United States Patent Application Publication US 2019/0348154 A1 - sequence listing, part 5

SEQ ID NO: 13608 - DNA, 741 bp, Escherichia coli
atgagtgatgatcgtggtagttcaacaggtacggcagaaaagaaagaagaatgtgttaaagagtttattgtttccgataagtttaaaaaaatgatggacgatgcctttaatgcaactaaaagtgtgttaaagaaaagggctaagaatctgaaggattggactgaaaacgataaacaggaatttagtcaaatatttggtgtttctggtgatgtaattattaccagtacatattttgcgaagagagtagcagataaattatcagaaaacgttgatgctcgaacctttatgatagacggtgttaatcgaatgattatgatatgtgatagtatctctgtagaatcacgctcatgccaaaatggggtgaacttatatggtaactttatcaacaatacacatatttttcctggttcggctcgcgttaataatgggataactatagggctgtctcctgatcaatataaagagacgctacgaattgagatacttcaaaattttaagaaaaagcctttttctggtcgtgaatctcatgtgtctactctatgccatgagttatctcatttttgtagatattttatcgatggtaaacattgtggcggaatgggaactgatgatgttccaacagaagaatttgatccaaacttcagatatacaggatacgctcgagatttagtaaaggcgcatgatcttatggtattcaaaaatgcatataatatcgaaaggtattttgagatagaaccttga

SEQ ID NO: 13609 - DNA, 306 bp, Escherichia coli
atgaattattcaatgcaagttatggttgaccaagaaactatgaattggcttaatgacctgaacaggtcgggctttaatatctatttcatgcattgttttgaagcgtcaacgtatattgacaagcatataatcaacgaaattaaacttggtgactttgttcataaactggaagtaacagacccagactacaagagatttatcacaagcgaatgcaaccgacttgatttaagcccggagcaattattgaagctgaatgtattcttgacctatcagaatgaattaaacccttacagtgaggtgatgtaa

SEQ ID NO: 13610 - DNA, 216 bp, Escherichia coli
atgaaaactatcacagtacaacttcagactaataaagcatttcgttattttgaaaacttgcttgagttatacgaaggatggggaagcatccacggcaaagatgatatctatcttcacttgtcagcccctaactattctctgaaggctccggttaagcaaagctggttaaaagactacggtcaccagatggggctattagtctcagacttgagctaa

SEQ ID NO: 13611 - DNA, 222 bp, Escherichia coli
atgtgttacaggttccaatattccacacttggcagccacctaatcagacagaatttagcagatgctgaatttgaagatgtgaccctcaaagcaaacaaacgattaaaaccctctcaaatccaccagcttaaacacgaattaaagccactggtaatactcgactataacgaccctgaacagcttgagcagggaattaagcttatttctgaatggggtgcttga

SEQ ID NO: 13612 - DNA, 291 bp, Escherichia coli
atgactcacacagttacacgccttttgccagaggcatttgaacgactggcagcaatcaaagctaaatatcccgatatgaagcacacagcgcttgttggagagcttttaaaagagtcggtatccctgacccctttcgataacgttaagggtgttgcagagggttctaaggccatcagaatcacaacgggccaactggaactactcaaagcacagtccgcagtagcaggttgctcaatgattcaggtgttgagtgctaaggtccatcaactggcggataaattggaggtttaa

SEQ ID NO: 13613 - DNA, 186 bp, Escherichia coli
atgggttttcttgaaacaattgctgaatctcacagattcgcaagcttaggttgctttgtgtttctggtgcttctggtgtatcagcttttaaaaatgattatcgccaaaagtacacgattcaatttcagcattaagcttttcaaatatgaaatcacaattacgattgatgatggtaaaacaaactaa

SEQ ID NO: 13614 - DNA, 291 bp, Escherichia coli
atgaaagaatttcacggtgaaaaacgatacaaagattacctgttaaagcgttacagcatttctcgtgagggtcaccttatgaaggatacttatggggaggtttaccggattcgaccgaagaaagaagggagggattattatttcgtcgatggtgtgacagatttaaagattgacgctttgaggtttgcagtgctgtatcattatgatatctgggattcagtccaccagctacgattaaaagacggtgaccccggtaatctgagggccaccaatatcatcacaaaacgttag

SEQ ID NO: 13615 - DNA, 963 bp, Escherichia coli
atggaaaaatttcacatgtttgatgaccgtatttatcagatgactaatggcgttaaagctgccgaccgtattatttacactgtcatgttgaatgaacaaaagttttatcacgataaggggcaatattataccccttcatatgctcatcttggtcagtatgctggaatcacaagaacatccgtgattgcatgtatgaaacgacttgaggcacatggtttaatcaagaaaactaacgttgcaagcaatcagtgtgttattaaagtttattcacttgatgaagtaccggaagttttaacagagcttacagctaaggaagccagaaaggcaaagctggagtctaaagttactcagtcagtcaagaaagatgacccactgagtcaaaattctttacccactgagttaaaattttttactcagtcagtcaaaatctttgacacgtataataacagtaataacaagaaagaacttattaataacaataaagaagatgactttgaagaagaatctcttaagaagggagcttcgctctgtgattcacatgaatgtgattctcttgatattgaagaggctattaaagagactgttaaaacatctgacttagatgaccttgatagtgaagctactaaagaggctgttaaaaaggaagataaaatctctgatgtgaatgaagttagtgaccagcaagatacaccttgccgcctcgaatcaactgatgatgaattaccggatgttgaccttgatgatgaagaagaccctgaagaggaattgaaacgtgaacagcgtaaagcagaaattaaagaaagattcagaaaggctaagctaaagaacagaattgatgaacttgatgactttgatgatagtgacgatgatgacttttctttcacaccaaaaaagaaaacccacactgaaccgaagaaagaaaaagtgaaagtaagacgtatttatgctggaggtatgcgctaa

SEQ ID NO: 13616 - DNA, 663 bp, Escherichia coli
atgtcaattgagcatattttaatcgggaagcatcatggtggttctgatgactggcgtacaccgtatcgtttatttcgtaacctgcatcgtgaatttggtttttcgatggatggtgctgcaactaagcatgacgcattgctaccacggttcaccgatgatatccacaatcagtcatgggttggtgaaaaggtattctgtaacccaccatacagcgatattccgtcgttcctcttaaaagcgtctgaatcagatttagcggtattcctgataccgtaccgaccccacaccacatactggcttaagcacatcttcacaaacccgctttgccatgaaatccgtattcttcatcgcgcagttaaataccttccaccagcagggcataacgggcttactactaggtcaccgtttgctgctgcagtcgttgtttttaaaaaagaatcacgcaggcatgaaattacgcagatggtttgctgtgctgacacgctattaccgttaaccatcattaaccgtggtggactaagaggaagacccaccatttacccacctgagacgctcgacagcttcataaagctatacaggcaaggaaaacccattaagtgcattgcagatgctctcagaatgcctctgagcacgtcatacaggattgctcaaaggttgggctaa

SEQ ID NO: 13617 - DNA, 1062 bp, Escherichia coli
gtggagattgcccgtgccctttctaaagatacccgggtactgattatggatgaaccgacatcggccctcagccagtcggaagtaaaagtccttttcaatgtgatcgcacaactgaagcgccgtggtgtcaccatcatttatatctcccatcgtctggaagagttgatggagattggcgatttcatcaccattttccgtgatggtcgctttattagtgaacgcgccgtgagcgatgccagtattccgtggatcatcgagcaaatggtcggtgataagaaaaaacatttcgattatcaaccagctacacaaggtgacactgtactggcggtacaggggttaacggcgctgcatcccagcggtggttacaaactcaatgatgtgacattcagcctgcataaaggcgaagttatcggcatttacggcttgctgggcgcaggacgtactgaactatttaagggactggtgggcctgatgccctgtcagagtgggaagatccagcttaatggtgaaaccatcgacaaatgccatttccaggcgcggctcaaaaaggggctggcgttggtgccagaagatcgccagggcgaaggcgtcgttcagatgatgtcgattcagtccaacatgacgctatccgatttcagcctgcaaggttttcgccgtgcctggaaatggctgaatccgcaaaaagagagcgccagtgtgaaagagatgatcctgcaactggcgatcaaagtcagcgatgccgaactccctattacctcactcagcggcggtaaccagcaaaaagtggtacttggaaaagcgttgatgacccagccacaggtggtgtttcttgatgaacccacacgcggcattgatgttggcgcaaaaaccgacgtctatcagctggtgggaaaaatggcacaacaggggctggcagtcatgttctcttcttcagaactcgatgaagtcatggcactggcagatcgcattctggtgatggctgatggccgtattaccgctgatctaccccggggcggggtcacccgagagaaactgatcgcggcttcaacacctcaagattaa

SEQ ID NO: 13618 - DNA, 1236 bp, Escherichia coli
atgattacacatttccgtcaagctatagaagaaacgctgccctggctttcctcttttggcgctgacccaaccggcggtatgacccgtttactttattcgccggaatggctggaaacccagcagcagtttaaaaaaagaatggcagcaagcgggctggaaacacgtttcgatgaagtggggaatttatacggtcgcctgaatggcaccgaatatccacaggaagtggttctgagcggttcgcatatcgataccgtggttaacggcggtaacctcgacgggcaattcggtgcgctggcggcgtggctggctattgactggctgaaaacgcaatacggcgcgccgttacgtacggtcgaagtggtggcgatggcagaagaagaaggcagccgcttcccgtatgttttctggggcagtaaaaatatttttgggctggcgaatcctgacgacgtgcggaatatctgtgatgccaaaggaaatagttttgtcgatgcgatgaaggcttgcggatttactctgccgaacgccccactaactccgcgtcaggatattaaagcctttgtcgaactgcatatcgaacagggctgtgtgctggaaagtaatgggcaatcaattggcgtggtgaatgcaattgtcgggcagcgtcgttatacggtgacgctgaacggtgaatcaaaccatgcaggcaccacgccgatgggctatcgtcgtgatacggtttacgctttcagtcgcatttgccatcagtctgtcgaaaaagcgaaaaagatgggcgacccgctggttctgacctttggcaaagtagagccgcgcccgaatacggtgaatgtagtgccgggtaaaaccacgttcaccattgattgtcgtcataccgacgctaccgtgctgcgcgatttcacccaacagttagaaaacgacatgcgggcgatttgcgatgaaatggatattggtattgatatcgatttatggatggacgaagaacccgtgccgatgaataaggagttggtcgccaccctgacagaattgtgtgaaagcgaaaaactgaattaccgggtgatgcacagtggtgccgggcacgacgcgcaaattttcgcgcctcgcgtgccgacctgcatgattttcattcccagcatcaacgggatcagccataacccggcggaacgcaccaatattaccgaccttgccgaaggggtcaaaacgttggcactcatgctttatcaacttgcctggcagaaataa

SEQ ID NO: 13619 - DNA, 1302 bp, Escherichia coli
atgttcaattttgcagtgggccgcgaaagcctgttatcaggattccagtggtttttctttattttttgcaacacggttgtggttcctcctacgctactttctgcttttcagttgccgcaaagtagcctgcttacgctcacgcaatatgcttttcttgctaccgcactggcctgcttcgctcaggcgttctgcggtcatcgtcgcgctattatggaggggccgggcggcctgtggtggggaaccatcctgactatcacccttggcgaagcatcgcgcgggacaccgatcaacgatatcgctaccagtctggcggtggggattgcgctctccggcgtgctgacgatgttgattggttttagcggattaggccatcgcctggcacggttatttacgccgtcggtgatggtcttgtttatgttgatgctgggtgcgcaactgaccactatctttttcaaaggtatgctcgggctgccgtttggcatagccgacccgaattttaaaattcaattaccgccgttcgcgctctcggtggcggtgatgtgcctggtactggcgatgattattttcctgccacaacgttttgcccgttacggcctgctggtcggtacgataaccggctggttgttgtggtacttttgctttccttcttcgcattcgctctccggtgagttgcactggcagtggttcccgctcggcagtggcggtgctttgtcgccggggattattctgacggcggtgattacaggtctggtaaatatcagcaatacctacggtgcgattcggggcacggatgttttttatccgcagcagggcgcggggaatacgcgttatcgtcgcagctttgtggcgaccggatttatgacactgataaccgtgccgctggcggtaattccattttcaccgtttgtttcatccattggtttattaacccagactggcgattacacgcggcgttcgtttatttatggcagcgttatttgcctgctggtggcgctggttccggcactcacgcgactgttttgcagtatccctttacccgtgagtagtgcggtcatgctggtttcttatctgcctttactcttttccgcgctggtgtttagccagcaaataacgtttaccgctcgcaatatttatcgactcgcattgccgttatttgtcggcatatttttaatggcattaccgcctgtgtatctgcaagaccttccattaacgcttcgtcctctgctcagtaacggcttactggtcggaattttactggctgttcttatggataatcttattccgtgggaacgcatcgaataa

SEQ ID NO: 13620 - DNA, 252 bp, Escherichia coli
atgcataatctgatattgttggagaacatttgtatgcagaaaactgcacaatgcatggcacacattacctttacgctcaacaaattgacaacacaacctgcaataacaaaaaaagatagcgtgggtaatgagcaactttatcagattggcaaaatctaccataagctgggagttaaaccagagccaaagcagcaggctttaattcagtcgctttatgaccaggcatcaggaagcacctcttcaactcaataa

SEQ ID NO: 13621 - DNA, 912 bp, Escherichia coli
atgaaaattaccgtattgggatgcggtgccttagggcaattatggcttacagcactttgtaaacagggtcacgacgttcagggctggctgcgcgtaccgcaaccttattgtagtgtgaatctggttgagacagatggttctatatttaacgaatcgctgaccgccaacgatcccgattttctcgccaccagcgatctgctcctggtgacgctgaaagcatggcaggtttccgatgccgtcaaaagcctcgcgtccacactgcctgtaaccacgccaatactgttaattcacaacggcatgggcaccatcgaagagttgcaaaacattcagcagccattactgatgggcaccaccacccatgccgcccgccgcgacggcaatgtcattattcatgtggcaaacggtatcacgcatattggtccggcacggcaacaggacggcgattacagttatctggcggatattttgcaaaccgtattgcctgacgtcgcgtggcataacaatattcgcgccgagctgtggcgcaagctggcagtcaactgtgtgattaatccactgaccgccacctggaattgcccgaatggtgaattacgtcatcatccgcaagaaattatgcagatatgcgaagaagtcgcggcagtgatcgaacgcgaagggcatcatacttcagcagaagatttgcgtgattacgtgatgcaggtgattgatgcaacagcggaaaatatctcgtcgatgttgcaggatatccgcgcgctgcgccacaccgaaatcgactatatcaatggttttctcttacgccgcgcccgcgcgcatgggattgccgtaccggaaaacacccgcctgtttgaaatggtaaaaagaaaggagagtgaatatgagcgcatcggcactggtttgcctcgcccctggtag

SEQ ID NO: 13622 - DNA, 489 bp, Escherichia coli
atgaaacgttccctgatgctggaagccgacagaattaatgtgcaggcactgaacatggggcgaattgtcgttgacgtcgatggtgttaatctcactgaactgattaacaaggtcgctgaaaacggttattcactccgcgtggtggaggaatccgaccaacagtcaacctgcacactaccaccgtttgcaacccttgccggcatacgctgcagtaccgcacatatcacggaaaaggataacgcctggctgtactcgctgtcacaccagaccagtgacttcggtgaatcagaatggattcatttcacaggtagcggatatctgttacgtaccgatgcgtggtcatatccggttctgcggcttaaacgcctggggctgtcaaaaacgttccgtcgtctggttatcacacttacccgacgttatggcgtcagtctcattcatctggatgccagcgctgaatgcctgccgggtttacccactttcaactggtaa

SEQ ID NO: 13623 - DNA, 831 bp, Escherichia coli
atgaatagtcgaattgcttgtaccacgtttgacctccctattaatactaacttggataacaatcacacacttgtatttaaaaaaatacgtttttacaatagtgcagtgatttttatcagaaatgcacaactagtgattaaggcaacagatggagatgttattgatatctctcccggctctttgtgttatatagaaaagaaccttgtcattgatgtaacattaaaagtgcttggaagtggcgtaccctatgatatttatactattgatagcgatatattaagtagtgtttgtaaggtcatggaaccgattttgtcagggcaacatttagttacccaggtaagaaaaagaatatttttttataaactggaagaaacagataaagaaatttttagacgacttattagtgatgatttaccatcatacaggcaagtttataagattgcttatttactttcaaggattcatgaaattgagccacttacgtattccttgtctgtatcaacagatattacctttactgagaaactcaaaaaaatcatcgaagcagatttatcaagaggatggaaactgagcgatctgagagatatcttacatatgtcagaagtttcaattaggaaaaaactcgaaagagaaaataataacttcaacgcgttagttttagatatcagaatgcagcatgcgacgaaaatgattacatccactgaaaaacatataaatagaatttcgtatgatgttggatatacaagcacatcttatttcattcgaaactttaaaaattactttggtattacaccgaaacagttttctctgaaggttaaacgaaaagtctaa

SEQ ID NO: 13624 - DNA, 522 bp, Escherichia coli
atgagaccagtctttatacttgcaagcgataataatttttttaattatggaataaaatcaatatcatacactaacaaaaaaattcaatgcgttgattttactaacattgataaattaatacataaagacattgcatcaaaaaaatacttagtttgcgatgattctagttattatatttatagtattatattcgctgaaatcgaaataaaatgcatttgtattgagaatatcacattacataatggaaccgtatgcgtttatgaaaataatgcatctactattggatcaattaactcatttaatagcattgagagagagatcttttttttatattttttccatcaaaagagtgtaaaggaaatatccaaaataacatgtctttcaattggtaaaatttactatagattcaatcgtattaaatcaaaactaggaatagaaaccaccagaaagttaccagcatcattaaagaaaattttcagtcaacgtataggcaaccaatatagcttcgttaatcacgcataa

SEQ ID NO: 13625 - DNA, 555 bp, Escherichia coli
atgaagaagatcgcaatgattgttgcaatgctgacggtctctgcatcaggttttgcagcatcaggagatgttattggtactgggaatcagaatgtcactggctctcttaatagctctacctgtgctgtttcttttccaagtgatgtaacgctgccaaacattactacagcggattatgcttcagcaagtcagtatggtttaattggaaatgcttctgtttcagcgggtaatatttcttttaatggttgcaccggacaaaatgtaaaggttgttattaatagcccaaacaataaatcttctaacggtataatggcttttccaactctgaatggttcgaaccaatctgtagttggtattgttttaaaagaaggtattagtaataaatatgttcgtgttgatggacaggaaagttcgaacttaatgttcacggtcgatcaagatagttttgctattcctgtacaggtagaagcattacgtgccagtggtagttccatgaattctgctacatcaggtacactttcggctcagttcacatacactgcgacatatcaataa

SEQ ID NO: 13626 - DNA, 660 bp, Escherichia coli
atgccaatatttgctcattcagcaatagaaggagtaacattaggttcaactcgagttatatataaatcaactgatgaaatgtcagttgttaaggcaaccaatttttcagaaaaaaattactggctgttgcggtcatgggtgtcaaattattttgatgatcaaaaaaatgaatgttttattgtgacaccaccacttcatagaattgagcctaatgatgagattcaattacagataaaagcaattagagaggaaaaaataccggatgacagagagtcattatttagacttaatgttttggctattccaccaaaaacatttttgtcaacagatggaaaagagataaaaggtcatctgcaatttgcaataaatagtaggataaaattgatataccggccagcaagaataggagaaccttatgatattaccaaaaaattatatgtccataaatttaatgatttggttgcaatcaagaatccaacgcctttttttgtgacattggtcaatatttctattgatggtaagaccatacatagagatattgatgaggttataaaaccatattctgaaattaatattgatgcacgaaatccaaaatggatcgagttttcaactgttaatgataaaggtggaacaacaccacccataaaaataaatttatga

SEQ ID NO: 13627 - DNA, 2493 bp, Escherichia coli
atgacaaaaatgaaaaaacaaaacttgttaggttgtgcttttattgttgttacatattcctcttatgccgcatcaagtgataacgcaacctttgatcctaattttttaaagatgtctgacggtgaagaagcaagacatttagatttaaagtattttatgcgtccgggcggaatgagccctggtacatacactgtggcaatatttcttaatggggtaaaagttagtactgaggaatctgttgagtttatttcagataaaaaacaggagggggttacatttccattctttaatcagttcattttagctagttggggagtcgatgttgataaatataatatcgaaaaggaacctattgataaaaatatacctggcagcactgcatcgttttctgctaaagataacgcaatttatataaaaatccctcaggcgtcgatgagaaatgaagtttggtttcgggaaccatcagcaacatgggatgatggaataacttcttttcttgttaactataacttttcagggacatcacaaagttacgatgggaataaaacaggaaatacttatggtagctttgagagccaaataaactatggcgcatggcggttaaagaattttagtaattatgtgagaagtagttatcaaaaaaaatttaaatctgttagctcttatttagaaagaggttttgatttctttcagggaggtcggttgacgataggtcaaacgacaacagacggtaccatactggatagcattcctcttgaggggataacaatatcctcagatgatgggatgttaaaaccaatgcttgcgcagtacagtccgactattcgtggaatagcaaattcaccagcaagagtaatagtgaaacagaatggcaatataatatatgaaaaaaatgtgcctgcaggtgaatttgaatttaatgatgttactcaggtctataatggtgatttaaaaattgaaattgttgagtcaaacggaacagttagagaatttactcagtcagctgcagaattaccagtcttacaaagaaaaggaaggtttcgttataatatagcattgggtgaatataggagtgattataaggaattcacgaaagaacctagattcatacaatcatcttttgcttatgggttaggatataattatacattatacggaggggggattttctccgaggattacaagcaatcaaccttaggtttgggaaaatattttgaaaactttggtgcattctcctttgattcatctttttcttctgctgaattggataacaatacagtaaaagatggtcaagcttatcgggttatgtactccaaaattttctctcctacagatacggcatttaatcttgcaggatataagtatcaaagtagtggatattatgattttaatgattttcaatatgtgaataatgggcttgatttttataaccagaaatcaagattaagtgtttcattatctcagccgctcggagatgaattaggggctttttatttgtcggcttctgatgataagtattggaataatggttcaggatataatgtaaacatatcttattctaattacattggttttgtaaatagctcgctgtcattttttataaataaaaatccttctatttctgaagttgataaagcgatctttatatctttatctatcccactagataggttatcgaattcattgcgtaataattatttaaataccagtgtttcaggttctaaacatagtgatacacagagggttggcttcagtggtaatgggttaaataatcaattgaattataatatctatcagtcctttgattccagaaacaatagtcattctgggaatgttgatgcatcttatgtaggtacttacggtagggtgtctggaggatatttttatcaagataatttagagcgtttttcttatggtattaacggtggggttgctattcatgatgagggtattacattgtcccagccgttgtcattgaatggtgccaatgctttgctcaaagtagaaagagctaatggtataaaagttcaaaacggtattggaatctatactgattttcgtggttataccgtcgttcctaacttaacatcatattccagaaataaagtgtcaattgatactagttcacttgatagaaatatagaagtatcaagatctggcagtacggttgttcctactcgtggggcattagttaaaactatttttgaaacgaatataggaatgaaagtattggctgagataaaagatgaaaaaggagttcatattccttttggtagtgttgtttcaatcgatggaacggagaaaaaatcaggatttatcgttgacgataatggggttgtttacctcactggtatgcctaataaagggactttaaatgtacagtggggaagtgataatagtagaaaatgcaaatctgaatttaacttgggtgaggtgaatagtacttatcttaagaaaatatatttgacttgtaattataattattctggttaa

SEQ ID NO: 13628 - DNA, 3681 bp, Escherichia coli
atgaataataacagaaaattaaaagtattgactatccttgtatccgccgcaatatctaatttgtctggtatctctgtcgtatcagcatctgttgttaataacttgcttccatatcagatatatcgagactttgccgaaaataagggcgactttattcctggaacggaaagtcttgagttgtataataactcaggattattagtgactacgttaaataaagctcccatgcctgatttttcatctgtggataggctattgggcgttgccacacttgttaacccacaatatgtcgtcagtgttaagcataatggtggctatagtagagtacggtttggtacgagtaattatactttagtagacagaaataactactcagcaagagatttccatacgcctaggttaaataaactggtaacagatgtggttcctgtagaggttaccagtgcaggaacagcgcagggaacatataaaaatgtaaccaagtttcctgttttctataggataggtacagggacacaaatatataaaaatgaacaaggatattatactctgaacggtgcttacagttatcttactggggggattgttcctacgccatcaatttcagattggtcatttgtgacaaatgctggcaacggtgctcttgcgtcgtatggaactcccggtgacagtggttcaccgctacttggatgggatacaactctaaataaatgggctcttgtgggggtactcagagcatatgcaggaaccacagggagtaccaactggtatgttgttataccaacagtgcaaatcaccgcaaatataaatgctgatactgataaacctgttaccagtgaggccgggagcggtgatattctctggactttcaacagtgtgacaggaaccggtcagttagttcagggagataattcctgggacatgcatggtcagaaggacttagatctcaattatgggaaaaatctgacattttctggaggcggtacaattgttttagaaaattcggtgactcagggggctggggcgctgacttttaatgatgactatgtggtgaaacctctggatgatcagacctggattggggggggtgtcattgtcaatgatgggcacgttgttgactggcaggtcaatggtgtgtcaggagatgcgctgcataaattaggcacgggtacgttgaaaattgatggctccgggattaatggtggaagcctgaatactggtgatggcgcagttattctggctcagagacccgatggcgaggggaaagttcaggcttttagtagggtatctcttgttagtggtcgctctattgtaattctttctgatgaaaatcagattaacccagataatatttattggggatatcgtggaggtacgcttgatattaatgggaatgatctgactttccacaaattaaatgcttttgatgacggtgcaattattacaagtaatggcagattggccagactgacactgtccttaaatgaaaaaacagcaactatttatcatgggaattttaagaatgatttgtctgtgacaaataacaccaccaataattcaggtgattttattgttgatggtggtataaatataaatgataattttgagcaaaatggtgggaaattgttttttcaggggcatcctgttcctcatgcggtgactagtcagtcagtagcaaatactctcaaaaaactaggagatgactcagtattaacacaaccagtgtcatttacacaggatgattgggagactcgccaattcagtttgaagtctcttgttctgaaagacaccgcgttttatcttggacgaaatgcgcagctcactactgatattagtgcagataactcatctgtcacccttggcagtgaagatgtctatattgatctgaatgacagtaatgaaaagaaagtacaggttattccgcaacaaggtcaatcaaaagcgacaaaggactcagataaaagtacattttatggaaatgtatctctgaccaataactctactttaaatattaatgaattttttacgggtggaataaatagtacagatagtactataaatatatcttcccctggtgcaactatcagtgagtacagtacgttgacccgttcggcactgacagtcaccgataatgcacagcttacaagcaaggctggtttactatcggatgacaatgttgtgctcggttcaggggctaccctctctttgttgaatgagcaatcgacgatgccagcgttttattcagcggcagcctgggatttgcaaggttctggatcaacgttgaatgttggttccggtacgatgatgagtggtgatattactgccggctcaaaagcgacaattaatattggtgttagtacgaaccaaggttctccattaggcatctactattccggagatatcaaagcacctggggccaatgttagtattgaccagacattgtggaagcttaactcgtcttctcaaatgcaaaatctggcactatctaacagccagcttgtgatgaccaccgatggtaaaaccagcagcaatattacggttctcgataagttaatcgcagagaacaatattctgtatgtaaaaccgaccagaccacttaacgaaatgtctgtcggtgatattccgttgatcacggcaaaaaatggaaccaacaatactcaggcgtttaaaactgtgcctcaacagatgggttttcactcaatggctcctgatgttgaggtggtaaatactgacggtgccacacagtggcgtctgaaaggattcgatgttcagcgtaataatgctgcactcaatgaaagtcaacgttttatggatatccgttacagaaacttcttatctgaggtgaataaccttaaccgacgtatgggtgatctacgcgatacacaaggagaagccggtgcctgggctcggtttatgaccacttctggttcgggtgaggggggattcactgatcgccatatgcatctgcaaattggtgccgacaaaaaacatcactttgatggaggcgatctttttacaggtatcatgatgactgttactgacagcaaagccagtggtgaaagttaccaggggaaaacacgctctgtaggcggcggtttatatgcatccaccctgtttaactcaggattgtatattgatgtggttggaaaatatgtccatcatcgtgacgattacacaatgcaaacattgggacttggtaaggcagacgatactgctcactcatggtatttaggcgcagaaacgggttggcgctatcagtggaagcctgatgtctttattgaaccgcaggccgaactggtttacgggacgttgtcaggcaatacctttaactggcaatacaacggtatggatgtcagcatggagcgtaaaaaggcaaaacccttgattggccgtactggtgtggagtttggaaaaacactggatggccgcgactggcaggttacagcgaaggctggtttaagttatcaatttgacctgcgtaatactggtgctaccacgtaccgtgattttgctggtgagtccaccgtgtacaacggtaaagatggtcgtatgttagccaatattgggattgatacacgcattaaagacaatacccgtatcggcctgaccattgagaaatcagcatttggtaggtacaacgtcgataatgcgatcaatgctaatatccgctatacattctaa

SEQ ID NO: 13629 - DNA, 2334 bp, Escherichia coli
ttggccaactcatcctcacgatattccgttctgactgccgcccactgggggcctatgctggttgaaaccgacggcgaaaccgtgtttagctcgcgtggcgcgttagccacaggaatggaaaactccttgcagagcgcggttcgcgaccaggttcacagcaatacgcgggtgcgatttccaatggtgcgcaaaggctttcttgcgtcaccggaaaatccgcaaggcattcgtgggcaggatgaatttgttcgcgtgagttgggatgaggcgctggagcttattcaccatcaacataaacgcattcgtgaggcttatggcccggcatcgatttttgctggttcctacggctggcgttcaaacggcgtgctgcataaggcctcgacattattacaacgctatatggcgctggcaggcggttatactgggcatctgggggattattcgaccggcgcggcacaggcgatcatgccgtatgtcgtgggtggcagcgaagtttatcaacagcaaaccagttggccgctggtgctggaacatagcgatgtcgtggtgctgtggagtgctaacccactcaatacgctgaaaattgcgtggaatgcatccgatgagcaggggctttcttacttttccgcactgcgtgacagcgggaaaaagctgatctgcattgatccaatgcgatcggaaaccatcgatttctttggcgataaaatggagtgggtggcaccacacatgggcaccgatgttgcgttgatgctggggatcgcccatacgctggtggaaaatggttggcacgacgaagcgtttctggcgcgttgcaccacaggttatgccgtcttcgcctcttatttgctgggcgagagtgacggtatagcgaaaaacgccgaatgggcggcagagatttgtggtgttggcgcagcgaaaatccgcgagctggcggctattttccaccaaaatacaaccatgctgatggcaggctggggaatgcagcgccaacagtttggtgagcaaaaacactggatgatcgtcacgctggcggcaatgttggggcaaatcggcacacccggcggcggttttggtctttcttaccattttgccaatggtggtaaccccacgcgccgcgctgcggtgctctcttccatgcagggtagcttgccgggtggcaccgatgcggtagataaaatccctgtcgcccgcattgttgaagcactggaaaaccctggtggcgcatatcaacataacggtatggaccgacatttcccggatattcgttttatctggtgggcgggtggtgccaactttactcatcatcaggataccaatcgcctgatccgtgcctggcaaaaaccggagctggtggtgatctccgaatgcttctggacggctgcggcgaaacacgcggatatcgttctgcctgcgacaacctcttttgagcgtaatgatctcaccatgaccggtgattacagtaatcagcatctggtgccgatgaagcaagtggtgccgccacgcgatgaagcgcgtaatgattttgatgtttttgccgacttgagtgaacgttgggagaagggcggttatgcacgttttacggaaggaaaaagtgagctgcaatggctggaaacgttttataacgttgcccggcagcgcggggcaagccagcaggttgaattgccgccatttgctgagttctggcaagccaaccagttaattgagatgccggaaaacccggacagtgagcggtttattcgcttcgccgattttcgccgcgatccgcaggcgcatccattaaaaaccgccagcggtaagattgaaatcttctcgcagcgtattgccgattacgcttatccggattgcccggggcatccaatgtggctggagccggacgaatggcagggcaatgccgaaccggaacagttgcaggtactttctgctcatccggcgcatcgtctgcacagccagctgaattacagttctctgcgcgaattgtacgcggtggcaaatcgtgagcctgtcaccattcatcctgacgatgcccagacgcgcggcatacaagatggcgatactgttcggctgtggaactcacgcgggcaaattcttgccggcgcggtcattagcgagggaataaaacctggcgtgatttgtattcacgaaggcgcatggccagatctggatttaaccgctggcggcatttgtaaaaacggcgcagtgaacgtgctgaccaaagatctccccagctcgcggctggggaatggctgtgcgggtaatacggcgctggcatggctggaaaaatacaacggtccggaactgacacttacagcgtttgaaccaccggccagctcataa

SEQ ID NO: 13630 - DNA, 525 bp, Escherichia coli
atgaaaaaggttgtttttgccttgtcagcactggcgttaacttctggttccgtatttgcagcggattccggtgatggcactgtgaaatttacaggtgaaatcgtcgatgcagcttgcgtactgtcagttgattctcagaatcaggaagttgtactgggtcaggtgcaaaaatctgtatttgctgcagtcggtgataaatcaccatcaaaacctttcgaaatcaagctggaagattgtgatatcaccactttgaaaaaggcgaaagtcagctttagtggcgttggtgataccgataaacctgaacttatctctgttagcaccgaagcaggcgcggcgaaaggcgtaggtatcggtatttatgataacagcaacaccctggttgcgatgaatagtggtgaagccagcactgacctgaaaaaaggtcagacagttctttatttcaccgcaaactacgtttctactttagctgctgtaactactggttatggtaatgctcaggttgatttcaatctgtcttacgagtaa

SEQ ID NO: 13631 - DNA, 687 bp, Escherichia coli
atgaaaaaaaaattcattgcgttaactctttgggtgttaatttcgcagtctgcactagcgagtggggttgggcttagttctactcgggtgatttatgacggtaataagaaagaagcatcgctaaccgtacaaaacaaaaataaatcagaagaatttcttattcagtcatgggttgatgatgcaacgggtagtaaaaaaacaccattcatcattactccgccattattcaaacttgagccaggaaaaaacaacatcttacgtattgtaaatgtgaatccgtccttacctcaggatcgtgaatctgtttactgggtaaacgtcaaagcgattccttctcaaaatgaagaaaatgaagggaaaaatgtcttgcagattgcagttcgtactcgcatcaagcttttttatcgcccagcaggtctaaaaggggatattaaatcttcgccaggagaactacgttttacgcgaaacggtaaacagataaaaattgacaatccaactgtttttaacatcacgttcagtgatgtatttattaacggacacgaaattgaaaagtccggtatggtgccagcaaaagggtctttgaatatcaatttgcctgcaggtgtgaacagtgcttcgcaaataaaatataatacaattaatgattttggctcttcaggtgaatatctgactcgcgaaattaattaa

SEQ ID NO: 13632 - DNA, 2577 bp, Escherichia coli
atgtcatggatggtcgtttcgcgcacttacacttctttgcccttttctttatctgtattggcgcttacggttgcaggctctttttctgcgacagctggaaaatttaatccgcgttttctggaagataccgcagggatcaaccagcatgttgacctttccatgtacgaaactgaccatggcgcgcagttgcctggaacatatcgcgtttctttaatcgtcaatgaacaaaaaatggaaacgcgcactctggagtttaaggcggctacagaatcccaacgaaaggagatgggggagtttctcataccttgtttaagccggacacaactggccgatatgggcgttcgtgtagacagtttttcagcacttaaccttataccagcagaagcctgtgtggcgtttaatgaaattatccctcaggcgaccagtcattttgattttagcgaacaaaagctggtgatgagttttcctcaggcggcaatgcagcaggttgctcgcggtacagtacctgaatctcgctgggacgatggtgtgcccgcgttgcttcttgattacagtttcagcggtagtaacagttctcatgatacaaaaagttataatcgctacattgatgaaaatggtaatcatcaccaggttaaaaacgaaactagccagactaacgatagctactacttaagtatgcgaagcggccttaaccttggggcatggcgtctgcgaaattacagtaactggagctatagtaacggcgagaagcagtgggacaatattggcacctatgtaacacgagccattgttccgctgaaagcgcaactgacattgggtgatacagcaacaccttcagatatttttgacagtgtgcagatgcgcggagcattactggcctctgatgaagaaatgttgccagacagccaacgtggttttgctccggtagttcgagggatagcgaaaagtaacgcggaagtcagtattgaacaaaatggttacgtgatttatcgagcatttgttcagccaggtgcgtttgaaattaacgatttataccccacagcgaacagcggtgatttaaccgtaattgttaaagaggctgatggtagtgaacaaagatttattcagccattctcttcagtcgctattttccaacgtgaagggcatctcaaatatagcctttctgctggtgaataccgtgctggtaattacgatagcgccaacccacgctttggtcagtttaatgcgatgtatggtttaccgtttggtatgaccacctatggtggcgcattaatttctaaggattacaacgcatttgctctgggattgggaaaaaactttggctctattggtgcaatatctgttgatattactcaggcaaaaagtacattaaataataatgcaaccgatcagggacaatcgtaccgctttctttattcaaaaagctttgccagcggcacagatttccgtttattgggttacaagtattctaccagtggtttttataccttccaggaagcaacagatgtgcgtagcggtgctgacagcgattacggacgttaccataagcgtagtgaaattcagggtaatttgacacagcaattgggcacctatgggtcggtttatttcaatatgacccagcaggattactggaatgatgacggtaagcgcctttctttggcaaccgggtacaacggtcgtattgggcgtgttaattacagtattgcttacagttggaataaaagccctgaatgggatgaaaacgaccagttatggtcatttaatgtttccattccgtttggtcgggcatggagtaactaccgcgtgacaaccgatcaggatggtcgtacgacacaacagcttggcgtcaatggcactctgttagaagatcgcaatcttagctataacgttcaggaagggtattccagtaatggtgttggtaatagcggtaatgccagtttggcgtaccagggcggcgccggtaatatcagcgtgggttacagctatggtaaagactaccagcagactaactacagcctgcgtggtggcattgtagcgcacagtgaagggatctcgctttcccaacctttgggtgaaaccattggtatagtttcagcaccaggtgcccggggggcgaaagtattaaataatagtggtgtgagtgttgactggcaaggtaatgcggtcgttccttatctgagcatctaccgtgaaaatgatgtgtccattcgcagtgaaacgttgaatgacagcgttgatatgaacagcgcattccagacagttgtgccaacgcgaggagctgtcgtacgggcgcatttcgatacccgtgtgggttatcgagttcttatgacattaattcggcaaaatgaagtgagcgtcccctttggtgcaactgcaacgctggtttcagataaaagtgaacagattagcggtattgttggtgaagatgggcagttatatatcagtgggatgcctaaaaaaggggatgtgaagatcgtatggggtaaagatacttcacaacaatgcgttgcgaaatatgaactgccgattaagaaaaaatcgtcaggtattatttctgtaacaacaaattgccaatga

SEQ ID NO: 13633 - DNA, 1056 bp, Escherichia coli
atgatgaaaatttcaagtctgttttttgttggaagcatgttgtttacggccaataatgttatggctgcagattggggaccctgtacatcgacttcaggtgttcatgattacccagtcaattttgatattgatattatggatgccagcaaaaatgaagcgggtactgaattaaaattaatttactcatggactggtgttgggcagccttttaattttatttgtgagtgtccggatacttataaaacggaaaaggatacactgattaaagtcgtgagtaacttatctacggcaacgcgaaaaataaacagtgagcaatactaccggttaaccgatgagctggaagtaatgaccatgattcaaggtccaagcgtgatgttccgcgttccggaggccaatagtcagatccctaatttaaataactcttctcaagactgtaaaggtaataatctggggcaatttggcagtaatggctatctgtcattttatatagcaaagcctgttcagggtgaggtggaaattccctatacgcttattgcaacaatgtatgcctcaaagaaaaaaaatacatacagggatccactttctacggtcagtattgcaggaaaattgacctttacacaaggctgtaaaattgacgccggtacggtattggatgtccccttcggcgagtacccatcttcggcgtttaaaaataaaaaaggaaccattccagttggagggactgaaaaagagattaacctccagttcgattgtgaaaatattaccgatggcattcaggtatctctaaggattgaaggaaacacaagtcaggctgacgagcgtgccatcgatatgggtaacccagacattggtgtgttggttatggatccaaacggcaatgtcttaaagcctaacgataccaacagcagtgttaacttaaacctcggttcgaacgattcccaaaaacatcgcgatgcaacaattaaactgaaagcagcaccaatcagcacgaccggaaatgctccagcggcagggcaatatagtggggttgcaacaatctttctggatatggattag

SEQ ID NO: 13634 - DNA, 531 bp, Escherichia coli
atgtggagaaatagtatacgttgcctgttaccctttttagctctggcatattttcccggcgctgaagctaaaataagcctcggtgaagcaggaaaactgacgttttctctttcagtcgtggccaaagggtgtgagtttgaagccgctgatttagaagttgtcatggggaaaatgatgttaatgaagccagtcacggtcggaagagtcataaacgaaaaaaatttcgtaatcgaattaaaagattgtgacggaatatcaaaagctaaagtaacaatggacggccttcctgacaccaatgataactctctttttgctctggatgccggaggcgcaacgggaatagccctgcaaattgttgacggcaagggcacaaaacagattccgaaagtcgctggtggaacggcgatagagtggccagtaaatggaacaacaacccaactgaactacaaagcgagttatgtcgttgtaaacgccaatgcaacgtttggacatgcaaatgccatggtcaatttctccgtggagtatgagtaa

SEQ ID NO: 13635 - DNA, 825 bp, Escherichia coli; identical to SEQ ID NO: 1755

SEQ ID NO: 13636 - DNA, 156 bp, Escherichia coli
atgataccggagttaatcatttcaggggaagacgcgaaaggtgagttcttgatgtcggttccgcgaaaaatgctgctttacagcttttgcgtgatgacgatgaaacaagatcgccaaattcgtcggttgaagaaacctccgccttcagagacatag

SEQ ID NO: 13637 - DNA, 366 bp, Escherichia coli
atgaaagagacgaaaaacatcgataacgaaaacacggtcgttgctgacactgtgaaagaaaccagtgagcgtggcgtaaaacttacccaaccaattgagcgaggcggcgaaaaaatcacgtatgtggagattaccggagctattgagcaggctggatctctgcgagatttgtcgctgtctgatgtgctgaatctgaaagcggaatccatgtttacgctgctgtcacgcgtgacatcaccgcgactggatgaagtgacgatcaaaaaaatggcatcccgtgactttattcagttatgtgtggttgccgtaaattttttgagcggtgcggactctggcgggaagaacgaacaggcgacggaagcctga

SEQ ID NO: 13638 - DNA, 816 bp, Escherichia coli
atgacaatcacactgcaacccaaagcatcaccagggcatcacattatcggactggattcggaacatctgaatggaggcacagttccctggcataaacatctctatgcccagttgctttacccggctgaaggagtcgttcgtatatgggctggagaaagcgtctggctagtgcatgccagcagcgcgctttggctgcccccacaaatgccgcataagtttgttgcgacaggcaacgtacttttaaaaaccgtactggtttcagaagcggaaagtgaaacgctgggaaaagtttgcttcatgacgggtatttcacccctgttaagggaattactaattgcaattaaccaacttccaccgtcgcaaagtaccacagataaacaacagttacgtttttcagccctcgagacactgatacttcaggaaataaaaatgggggtgaaaatgtcacttgaactcccttggccaaatgatgagcggctacagcagctttgtgagaatttgctaaacaaccaagggtatctgccaacactggataatctagcggataaaattaacgtcagtagccgtacactcatgcgcttatttgttaaagagacgggattaacatttcgccactgggttcagcaaatgcacgttatttctgcagtgacgcttcttgatgatggatattcgttgaccaaaattgcccatcgtctgggctatgcctcagctgaatcgttcggcaatatgtttaagcgtcgaacgggctactcacccggtaaatttactcgtcgattaacgatgcatgattatgcaatcacaagacaaatgatttaa

SEQ ID NO: 13639 - DNA, 822 bp, Escherichia coli
atgacttatgataaaaaagtaacttccggtacaacaagccagaaacaaaacaacattgtcactcaaaaaatatctcgcccaaaggaattatttctattattttgggttgatgagtccggtgatagccgacgttctatttttgaagaagcatgtctgacgcgttatttcaacatcctttactcccccgagtataaaaaagaaacacagatagtttaccatttatcaattaacacatttaatcaaatcaaagaaatattagaaatctttataaacaagaatggaggtataaccaaagcaaaagttaaagaagtcagtttattctcacatggggggccaattcatggtcctacaacctcagactctgtaaatacaccttccgtgcctaaatacccacaacaaatggacataatcggaggatgggattcaattgattttaactggtcaaataacgctatgtttgttatgtatggttgtcgcactagttatgcaagtgatgattcaggacaaggttttgccagtaaattatccctattagataattttaaggacgttaatgtctggggacaaacagaaagtacttatccatcttatttcccagatattaggacaacttcgataatgaggtcaataaatataggttggtctttttcaccaacatacatggttgccagttctgaaggtcaaggatgggatgccttatttccggatgataaaaatccactaaagtctctccctatgcagtgttataataatgggaaattgattttaacctgcgatcaaagcagttttaatgatcaccggaagaataaatcaaatgattag

SEQ ID NO: 13640 - DNA, 540 bp, Escherichia coli
atgattagtattatattgagaagcttgattctattattcatgataatagtgtatccagattataataaaaacctacctgcctttgaagtatatggggaaaatgacatacttaaggatatggttattaatatgaaaacttatagtaaccatagtaagaaaaactcttccccaacaactatagtgcaaaccatcctttttaaagggaatatacagcaagtttttgaaagcaacgatatgggtgcagcgagcttctttttttcttataataacaaggttgaaacgctggtaacagacgctttctttttgaatagaaaattagacaaactgcatgatgcaaatatttttgaagttataaagcatggggaaaatatcgttattagatattacaaatgcaaaattgaatatatgaaaaaagaaaaatctatcgaaatagagatatcaacaaacaaaaacagttattttagcaaaaatggaataaaacaaaaagacacaaataaatataacacatatttcttcaattactttgaggctcaaaaataa

SEQ ID NO: 13641 - DNA, 222 bp, Escherichia coli
atgcaaaatataaagaccctcatcaacaggaagaagctcctggagatgatcccgctttcgacacgaacaatttataacctggagcagcgaggggattttccacgccgtatcgcgttaaccagtagaaatgtcgcctgggatttgtcagaggtcgaagagtggattgaggcacgtaaatcatcgggtgatcaagctgcgcgacctggccctatagagggctag

SEQ ID NO: 13642 - DNA, 828 bp, Escherichia coli
atggctcttgatcttatggcggctttcacggaattgccgccacccattgattatgttctgcctaatatggttgctggcactgttggtgctcttgtgtcgcctggtggggctggtaaatccatgttggcccttcaattggctgcacagattgcaggcgggcctgatttacttgaaataggcgagtttcccaccgggcaagtggtctatctgcctgctgaagatccaccggccgctattcaccatcgtctgcacgcccttggggcacacctcagcgcagcggaacggcaagccgtggctgatggtttgctcattgaacccttgatcggtaaatgcccaaacatcatggctgctagctggttcgatgctctcaaacgagccgctgaaggtcgtcgcttgatgatcttggacactttgcggcgcttccacattgaggaggagaacgctagcgggccgatggcgcaggttgttgggcacatggaggccatagccgctgatacaggctgctccattgtgtttctgcaccacgcgagtaaaagcgcagccatgatggggtcgggcgatcaacagcaggccagtcgtggatcgtccgtactggttgataacatccgttggcaatcgtacctatccggcatgacgcaaggcgaggccgagatactgggggtcgatgattgtcagcgtgggtattttgtccgctttggcgtcagcaaggccaactatggcgcaccttttcaagaactctggtttagacggcacgacggcggcgtgttgaagcctgctgtactggagcggcagtgcaaggtgaaaaggagacagcgtgaagaagcctaa

SEQ ID NO: 13643 - DNA, 882 bp, Escherichia coli
gtgaagaagcctaagcatgacctgacccacgtccgacatgatcccgcgcactgtttggcacctggcctgttccgcagcctcaagcgtggcgatcgcaaacgctgcaagctggacgtgacctacacctttggcgaggacgaatccatgcgtttcgtcggattcgaacctctcggggccgatgatatgcgtcttttgcaaggcatcgtggcccttggcggcccgaacggcatcttgctaaccccggaaccgaccagtgagacggggcgacagctacggctattccttgaaccccgtttcgaagccattgagcaagacggcttggtggttcgtgagagcctgaccaaactgctctcagaaacgggcatgacggatagcggcgacaacatcaaggcgctcaaagccagcctgctgcgcatgtcgaacgtcaccatccttgtgacgaagggacggcggcaagccgcgttccacctgatgagtcatgcttttgacgagacggacggcaggctatgggttgccctgaatccgcgtattgccgaagcgatcctggggcatcgtccatatgcccgtatcgacatggcggaagtgcgggtgctacagactgatccggcacggctgatgcaccaacggctatgcggctggatcgaccccggcaaatccgggcgcgtggaactggacacgctttgcggctatgtctggccagatgaagccaatgccgaagctatgaaaaaacgccgtcagactgcccggaaggcactggccgaacttgccgccgtgggttgggtagtgaacgaatacgccaagggaaaatgggagatcaagaggcctggccccacggcaactgcacccgtttaccgtcgtaacgttcccttgttaccgtcgtaa

SEQ ID NO: 13644 - DNA, 189 bp, Escherichia coli
atggcaaatgtgcttatcaggaatttacccgccgaggtgcaccgtgcgttgaaagttcgagcagcgctcaacgataggagcaccgacgcggaaatacgcgaaatactgacggcggcagtacagccgctagagcttgaagagattggccgggaagttggcttgtccgaaagcgataaaaaaacagagtag

SEQ ID NO: 13645 - DNA, 780 bp, Escherichia coli
atgaagtccaaaattttagcggctaaaaaaaccgctctagccgttgcactcgcaaccggctttatcaccactaccaccgcccctgtgcaagctggtatccccgtcatcgacggcggcaacctggcccagaacatcatgacggccatcgagtcggtggcgcagacgctcaagcagattgagcagtaccagacccagttgcagcagtacgaaaatcagctccagaacacgatggccccagccgcgtatatctgggatcaggcgcagactacgatcaaccggctgattgccgcgcaaaacacgctggcctattacgagaaccagctaggcagcctggatcgttacctggccaagtttcaggacgtggcctattaccgcagctcgccatgcttcaacggcagcggcggatgcacgccggctgaaaaggcagcgatggaagagaaccgccgcctggcgtcagagtcgcaaaagaaggccaacgatgccctgttccagaccgttgccgaccagcaaaaggctttgaaggatgacgcccgtaccctggagcggctgcaaggcgcggcccagggtgcaactggccagctacaggccatcggctacgccaaccagctcgccagccagcaggccaatcagctcttgcagattcgcaccatgttgaccgcccaacacaacgcggaggcagcccggattgcagcagaactcgatgccgaggcgcgaggtgatgccagggccgagcaaatgcgtacctggacgtttcgcccgagtccggcagacaactactag

SEQ ID NO: 13646 - DNA, 237 bp, Escherichia coli
atgaaaaaaatcttttttactaccgcggctacgttgctgttgttggctggatgtgaacaggaaaggatgcccgaaccaaatgcggcgacgtgtgcccccgatgcgttccaggcagcactgaatgaaatgcgcagcgaagcgaaccgagaggcctttaccgaggaatgcagagcattccagaaggccaagcagatgcgtcagtgggagttcaagcccagccctaaagatgattattga

SEQ ID NO: 13647 - DNA, 1428 bp, Escherichia coli
atgagaaagaaaattgctctaggtggcttgatgatggtcgccacaatggtgctggctgaacctgcaatggcgcaggagctaagtagcagcggtgttatgaatgatgtgctcaagcgttttcatgatgctgccgcaacatgggggccagctattgagtccgctgcatcgcgtttgttctggacgctggttgtgatttcgatggtctggacattcggcatgatggctttgcgcaaggccgacattggcgagttcttcgcggagttcgttcgcttcacgatcttcaccggctttttctggtggttgctgacgaatgcgaaccagggcatgaatatcgccggtacgattgttcagtcattgcaaactctgggcgcgcaggcggggggactttccaatagcaatcttgggccctccagcatccttgatcttggtttcgagttatacaaccgcacagtacaggccacctcggagctgggatggcggcagatggcaactgctctggtcatggagctaatggccctggctgttttgtttgtcctggcgttgattgcggtcaacctgttgctgttgctcgcatcagcctggattctgttgtatgccggtgtgttcttccttggctttggtggaagtcgttggacttccgacatggcgatcaattactacaagaccgtgctgggcctggccgcacagcttatggcaatggtgcttctggttgcgattggcaaagagttcatcaatcactactacacgcaaatcagcgagaacatggcatcccaggaactggccgtgatgttggttatatcggtcatcttgcttttcttggtcaacaaagttccgccgatgatttctggtcttgtgtctggtggtggtattggcgcagccggtggaattggaaacttcggtgcgggtgcggcagttggggcggcggtgacggcggccagtatggcaactggcggcgctgccctggcaggtaaagcggttatgggtgccgcagccggtgcagccggaggtgcaagtgcactccaagcggcttttcagaaagcatcagcgagtatggaaaccggcggtgacatgtccagcatggggtcagttgtcagcagtggcggaaacggtggtggtgaagcgggtactgctggcagtagcccattcgcccaagcggctggctttggtgacagcggcagtagctcaagcggtggcggctttgccaaggccgcgaagctggccacaggcacggcctccgagttagccaagggtgtcggctctcaagtgaagcagggattccaggagcgagtgagcgaaaccacaggcggaaaactggctgcttcgatacgcgaaagcatggagccgaaagaagcaagccaatctggccagttcgagggcaatagcttgggcgccgattctggcccagatagtaacgaagtcaggagttag

SEQ ID NO: 13648 - DNA, 249 bp, Escherichia coli
atgacgacatcaacatacatggccgcattggcggccctggatgaagcgccaagggaagaagtcagccaggtatttatttcgccgctgggtgatcaatcgaccgaggtcgatgcagagacagaaacagccgcttttgtatcacggccagaccctatgagagagagcgaaactaagccgataagtattgaggttaatggcggcaggaatgagcggtcagcattcgcggaggcggcggggctgtacctgtag

SEQ ID NO: 13649 - DNA, 615 bp, Escherichia coli
atgatactttggtctgtgaaaaaagaaaccgatatccggcgtggaaggcattgtgttttcctgatgcatgttcatctggtctttgtcaccagataccgacgtcagatttttgactatgacgcgacagaaaaactacgcacttacttttcaaatgtatgtgctgattttgaaactgaactggttgaaatggatggcgaaccagatcacgtccatttgttaattaactatcctcccaaactggcgatatccagtctggtaaacagcctcaaaggcgtatcgagtaggttactgcgacgagatcgaccagatattgcagtcaggtattactacaaaggcgttttgtggagtcctggctattttgccagtagctgcggaggtgcgccaatatccgccatccgtcaatacattgaacaacagcaaacacctggtcaggtggaaaaccgcgccgtatatccccgccctgaaggacggggttttacggcgcaccggataaaccaggccaagcgtatgctggttgatcaaataatatccgccaagcgcagcaatattaatattcacctgcaatgggtcgatatctggcttaaaaatattgtgtttcttcccttcatccaataa

SEQ ID NO: 13650 - DNA, 1047 bp, Escherichia coli
atggcttcctggctggttgagtggaaaaacgccactgaaacgcaatggcttaaagattctccctcacagccattgcaacagtcactgaaagaccttgagcgggcttacaaaaacttcttccagaatcgggctgcttttccccgattcaaaaagcggggacagaatgatgcattccgctacccgcagggcgttaagctcgatcaggaaaacagccgtatttttctgccgaaacttggctggatgcgctaccggaatagccgtcaggttacgggagttgtgaaaaatgtcactgtcagccagtcctgcggtaagtggtacatcagtattcagactgaaaatgaagtatcaactccggttcacccttcagcattaatggtcggactggatgctggcgtggctaaactcgccacgctgtcagatggcacagtctttgggcctgtaaacagttttcagaaaaaccagaagacgctggcgagacttcagcgacagttaagccgcaaggtcaaattcagcaacaactggcagaagcagaaacgcaaaatacagcgactgcattcccgtatcgcaaatatccgcagggactaccttcacaaagtcacaacgaccgtcagcaaaaaccacgcaatgatagtcattgaggatttgaaggtcagcaacatgtcaaagtcagcagcgggtacggtcagccagccggggcgcaatgtccgggcaaaatcaggtttaaaccgttcgatactggatcagggctggtatgaaatgcgccgccagcttgagtacaagcagctctggcgtggcggtcaggtgcttgctgttccgccagcgtacacaagccagcgttgcgcgtgctgtggtcatacagcgaaagaaaatcgcctgtcacaaagtaaattcagatgccaggcatgtggatatacagcgaacgctgatgtaaatggcgctcgtaacattttagcggcggggcacgccgttcttgcctgtggagagatggtgcagtcaggccgcccgttgaagcaggaacccaccgaaatgattcaggcgacagcctga

SEQ ID NO: 13651 - DNA, 1791 bp, Escherichia coli
atgagcaaaatatcagatttgaattattctcaacacattacattagccgacaattttaaacaaaaaaatgaagtcttagatacctggtatgtgggaatgaatgattttgcccgaattgccggggggcagaatagcagaagcaatattctttctcctagagcatttttggagtttttggcaaagatatttaccttgggttatgtggattttagcaaacgctccaacgaagcgggtagaaatatgatggctcatattgagtcctcatcttattctaaagatactgatggcaatgaaaaaatgaagttttacatgaataatcctgaaggggagcgagcggatttatctaaggtgaagatagaaattacacttgcctcagtttctactaaagggattcgtgaaggacatacagtcattatatttaaacaatctgatggttcgactaatcgttatgaagggaagtcttttgaaagaaaagatgatagttcattacacctgattactaacaagattctggcgtgttaccaacgcgaagctaacaaggaaatagcgcgtctattaaataatcatcagaagttaaataatctacagaagttaaataatctacagaagttaaataatatacaggagttaaataattcgcaggagttaaataattcgcaggagttaaatgattcgcaggatttaaatgattctcaggatttaaatgattctcaggatttaaatgattctcaggagttaaataactcgcaggacttaaataattcgcaggtgagttgtaaaggttcagttgattctacgattgcggatttattagaaaaaccattgaataatgccttattagcaataaggaacgaacatctgctattaatgcctcatgtatgtagtgaatcgatttcatacttactgggcgaaaatggtatacttgaagaaatagataagctctacgaatcaaatgatcacggaattgataatcacaaaaaaggtaacaatgaaattaatgacatcatgattaacctgtctcatattcttattgattccttagatgatgcaaaggttaaccttacaccggtcatcgattcgatgctggagacttttttaaaattcccatatatttatgatgtaagaatactggagtggtgctttaataaaagcatgcaatattctgatgatacaaaaaagataaagcatgcatgctccgtaataaatcatattaatcttcgcagcgatcagtctaaaatagctgaggcattatttttcaatctcgataaagaaccctataaaaatagccctgaattacaggggttgatttggaataagttggttgtatatgtcaatgattttaacttaagcaatcgagaaaaaacatatttaatacaaaggatatttaataatgttgagtctgtatttaataaagtgcctgtcagcattttagtaaatgatatttttctgaaggatttttttatgaaaaatcctgagatgattaattggtatttccctcagttacttaatacctatgagggtgaaaagatttattttgataagttggggtatgattttaataataaagagtctaatgatgagattatgaaaaatcaaccaaatgatgttattaatgaaaaaattaataatgaattaaaacttaggtttagaatgatgcaaactatcttgaaatcgagagttaatgtattaccatatattaatgaacagcgtttaaataaactaaatccaccggaaaatttacgtatagcaatagaaaaatttgggtggaataataaacctatcactgcataa

SEQ ID NO: 13652 - DNA, 1770 bp, Escherichia coli
atgagtgtggaaaagctgatcgttgatcatatggaaacctggacctcggcgttgcaaacccgttccaccgccgggcgcggcagttccggaaaaattgatttatatggcattaagaaattacgtgagctgattctggaactggctgtgcgcggtaaactggtgccgcaggatccgaatgatgaaccggcgtcggagctgctgaagcgtattgcggcggaaaaagcagagctggtgaaacaggggaaaattaaaaagcaaaaaccactgccggaaattagcgaggaagagaagccatttgaattgccggaggggtgggagtgggtgcgattgggtgactttaccaatatcattcgtggcataacttttccaggaaatgagaagtctcaatttcaagccccaggtaaaatagcttgtttacgaacagcgaacgtgcaagaacaaatagattgggatgatttaatatatatatctgatagttttgtaaagcgagatgatcaatacctccaagaacacgatatagtcatgtctatggcaaatagtcgtgaattggttggtaaagtcgccctagcttctctacctgataatagcaaatttacatttggcggattcttgagtgtattgagaccattagttgttaatgaaatttatttaatggccttactcagatgcgaaacttataaatcacagttaattgaatcagcaagtcaaactacaaatattgctaatatatcgttagcaaaacttaacccattaccagtatgtattcctccagctaaagagcaaattcatattgttaaaaagatgaatgaactcatgtccctatgcgaccaactagaacagcaatccctgaccagtctggacgcacatcagcaactggttgaaacactgttgggaacgcttacacacagccaaaacgccgaggaactggctgaaaactgggcgcgtattagcgagcatttcgacacaccatttaccaccgaagccagcgtggatgcgttaaaacagaccattctgcaactggccgtaatgggtaaacttgtgctgcaggatccgaatgacgaaccagcctctgaactgctcaaacgaattgcgcaggaaaaagctcaattggtgaaagaagggaaaataaaaaaacaaaaaccgttgcccccgattagcgatgaggaaaaaccgtttgaacttccggaagggtgggagtggtgtcgtttaaatgatatttcatctaaaattactgatggagatcataaaacaccacctcgtattgccgaagggtataaattactttcagcaaaaaatatccgtgacggttatttagactacaataactgtgattatatctcagcgattgactatgaaaaatcccgtgagcgatgcttacctgaaaaaggtgacttattaattgtttcggttggtggaacaattggtagatcttctttaattaaggactgttctgatttcgcactcgtaaggagcgtagcgattataaaaccattattaatcgaacctgagtatttaaaacttgcaatggactcgaagttattacagtcaatgattcactctcataaacgaggcggagctcaaccatgcctatatcttggagaaattagtaaatttctattccctacccctccattggcggaacaaaggaatatagttaataaagttagtatccttatggaaaaatgtagatttttatttttaggacttcaatccgcccaacaaacccaactgcaccttgcagacgcactgactaacgcggcgataaactaa

SEQ ID NO: 13653 - DNA, 792 bp, Escherichia coli; identical to SEQ ID NO: 9265

SEQ ID NO: 13654 - DNA, 1632 bp, Escherichia coli
atggcaaaaagcagtggcacttatctggatccggcactcgtcaaacgtatcgaagttgtccgcggaccaaactccagtctgtacggcagtggcgggctgggaggtgttgtggacttcagaactgccgatgcagcagatttccttccccccggagagacaaacggtttaagtctgtggggaaatatcgccagtggtgaccacagcacaggctcggggctcacctggttcggtaaaaccggaaaaacagatgcgctcctttctgtcattatgcgtaaaagaggtaatatctatcaaagtgatggtgagcgcgcacctaacaaggaaaaacctgcagccctgtttgcgaaaggctctgtcggtataacagacagtaacaaagcaggtgccagcttgcgtctctaccggaataacaccactgaaccgggcaatcccactcagacacatggtgacagcggcctgcgtgacagaaaaacagtacaaaatgacgtacagttctggtaccagtacgctcctgtggataacagcctcatcaatgtaaagtcaactttatatctcagtgatatcactatcaagacaaacggtcacaacaaaacggcagaatggagaaacaacagaacctccggtgttaatgttgtcaacaggagtcatactctgatttttccgggagcccatcagttaagttatggcgctgaatattaccgtcagcagcagaagccagaaggctctgccacactatatccggaaggaaacattgactttacatcgttgtatttccaggatgaaatgacaatgaaaagctacccggttaacattatcgtcggttcccgctatgaccggtacaagagcttcaatccccgtgccggagaactgaaagccgaacgcctgtccccaagggcggcgatttcagtctcaccgacagactggctgatgatgtacggctccatatcctctgcattccgtgcccccacaatggcagaaatgtacagggatgatgtacatttttaccgcaagggtaaacccaattactgggtacctaaccttaatctgaaaccagaaaataacattacccgtgagattggcgcaggtattcaactggacggcctgcttacaggcaatgatcggctgcagttgaaaggcggatatttcggaacggatgccagaaactatattgccacgcgcgtggatatgaaacggatgcgttcttattcttataatgtatcccgggcccgtatctggggatgggatatgcagggaaattaccagtctgattattttgactggatgctttcttataaccgcacggaaagtatggatgccagcagcagggaatggctgggctccggcaatcctgacacactcatcagtgacataagtatacctgttggtcatggaggagtttctgccggatggcgtgctgaactttcggcagcagccacgcatgtgaaaaaaggcgatccccatcaggctggctatgccgtacattccttttcactgtcttataagcctgtaagtgttaaaggctttgaggcatcagtgactctggataatgccttcaacaagcttgccatgaatggcaaaggagtgccgctttcaggcagaactgtcagtctttatacccgttatcagtggtaa

SEQ ID NO: 13655 - DNA, 177 bp, Escherichia coli; identical to SEQ ID NO: 10102

SEQ ID NO: 13656 - DNA, 234 bp, Escherichia coli
atgcacagaataccaggcgagatacctcagcataaaactaaaaatatcaagctgatggccattgttcaccgtctacagcagattatggtcaacgaaaatctgacgcctgatgagctggtcgggtgtgccgaaatggtccgggataattacagacggtttaacgatatcagtagacagaaaattgaggtatttcgaccagcaaacatgcctaagaaactaccgcataggatgtag

SEQ ID NO: 13657 - DNA, 939 bp, Escherichia coli
atgccaactgtagtttcacttttttctggatgtggtggttctgatgcgggagttttgagagcagggttcaatgtgctgatggcaaacgatattttgccttatgcaagggacgtttacttagaaaaccatcctgaaactgattacatattgggcgatatttcaggactccaatcgttcccttctgccgaattgcttatcggatgctatccttgccagggatttagccagggtggagcaaggaaggcagatagaaagattaatactctatatttagagtttgctcgtgctttgagaaagattaagccaaaagcattcattgtagagaatgtttctggaatggtaaggcgtaactttgaacatttgttaaaggatcaattcaaagttttcgaagaagcaggttatacagtaagctcgcaaattctgaatgcgtcccactatggcgtatcacaagataggaagagaatctttatcgtaggaatacgaaaagactatggtattacatacaaatttccaaaaccaacacatggtgatggcttgaaaccatattcaacaattcgtgatgctattggtcatatgcctgtttggcctattggtgagttttatgatgccgattttcattggtattatctatcgcgcaaccgtcggcaagattgggatcagatatctaaaacaattgttgcaaatcctagacatatgcctctacatccaataagtccaacattagaaaaattgggtccagataagtggcaatttacttcggatgcaccagctcgtaggtttagttatcgagaggccgctattttacagggttttggagacctaatttttccagaaactgaacgggcttctattaatatgaagtatacagtagttggcaatgctgttccgcctcctttatttgaggcggttgctaaatctcttccagatatttgggattag

SEQ ID NO: 13658 - DNA, 993 bp, Escherichia coli
atgaagatttttaaaatcggagacattcatcctagtgttcctcatctttttgcagaccttgcagaacttgctacggttataaattattctggtcgttatgatctacataaaaatgacctcataacaataagaactcaaagtaacacaagtgtggatgatattgatcaagaatatcaagaagatgaaaatgaaggctgcgatgctgaacgcaatgaccgtttagaaagacaagttgaagatgtctggacgcaactcgattttagacaaaattttctcaaggatatttatccatttattattaatggtgactttatttcattgaaagaaaacctcactgagatacaaagaatatatattttcttactcgcatgctcgaggttacgttctttcacaaaggctaggcaaggaataatacagttttgggcaaaaaattttgctgtcgtaagtaaattttgtgcaacagcactactcccagcacactcaactgtacgagtatttgacgcaaactcagatgacaggcgaaaatattatggtactgatttaagaaaagccttgaaaaggctaggaaaagacttagctgttccttatattaatgagcaagagtgcgaaagagctgatccgagaggtgatggtggttttgatatagttgcaactatagaatttgaagataaattaagtagtaactttgcctttttaggtcaatgtggagcccaagaaagagattggcccaaaaaaacacttgaagcccactcattgaaactacgaacatattttcaagtgcattttgacataccaactctaatgtttacccccgtattctatcgaaactcagatggtcaatgggtagacaatagcccttgcgctggagtattgatcattgacagagcaaggatattacagcttttaaaaaagacaaaccattgccctaaaatagtttcagaacaatggtttcttgatttcgaacaaattatcaatgatcttaaggtcgaataa

SEQ ID NO: 13659 - DNA, 1119 bp, Escherichia coli
atgacagaaagccttgattacatcgacctcaataaacttgagcttgatacaaaaaatccacgtcttcctgaaggtgttgaacgtaccccagaagcaatgctaaatcatatagctctaacaacctctattgaagacttgatgaatgcaatcgcagaaaatggattttttcctggcgagcctcttattgcggttaaagagggagataagtacaccgttgtggaaggcaaccgtcgcttaacggcagttaaacttattcataacccatatgagtgcgacagacccagctcccggatgatagaaatcgccgaaagcgctaaagataaactaggtacactagaaaaattaccagtgatcgttagagataccagagctgaaattttaccttatttgggtttcagacatatcactggtgtcaaacaatgggaacctctatcgaaggctcgttatatcgagcaactttttggtctcacctccccaaactcaccgactaatgatcgatatcatcaggttgctcgtgcaatcggtagcagaaaagatcatatcaagagaaatctagatgctttagccgtttataaagtaatggagagcaataacttttatgatattgatggattagatgaagaatcgatcaagttttcaattttatctacagccttagctgacgagaaaattggattgtttgttggcgtttcagaaaaagacgaatatggtgatattacatccaatgatgtaataattcacccacatcatataaatagagaaaataccagagaacttacagtatggctttataaaaaggatgattccgggaaaacaaaggttggagagtcccgaaatttacgcctattatcttctgttattgataaccccaaggctttaacgtcctttagaaacggggctgaccttaaggttgcgtatcagttaactgaagacttaaaacaagatttcatgacgttactttataaagctgaatctgcattaattgaagcggctggaattgttgcaaccattgattacaatcctgaagcattggaagttgcaagacgcctaagtcaaaatgtcaaacttattggtaatacaattaaagccaaaaaggtttctgacgatgaagatttttaa

SEQ ID NO: 13660 - DNA, 780 bp, Escherichia coli
atgagtaatgaaacacaatcattccttagtcaattgctaatatccataatctctatatctttagggtcatttctttttgctggaatcctagagagctacaaaaaagaccaagatcttcaggaggagtttataaaggattactttaggccaatgatgaaattacaaagttcttgttcatcttcacataatgaactatttctaaagtatggagagttatctgcttcttatcagctcatgtataatgaaatagtacatatggcaatgagccctgattcagaattaggacaacattatgaagttctcccgatgtctcttattaaaacaaatgaagagttaaaaaaaagagttgaagatcttgaaatgacggtaaaaaaatgcaatatcgatttattccttaagtacgaagagcttgcattagttactggttcatatccagagtttaagagactggcgaaaaaacacactaacacaattaactccatctattcagaaagacaaaaaaaagcaaaggaaaatgcaaaaaatatagaccctgatcaactaattccattgatgcggaaatatattgccatggatccacacaccaatgtaaacaaatccatgcttgccagtgaaatagataacatatctaaactaacaacacagcataatttgataatggcagagtatgaggagttaattttcaaagaagataatgatttatttataactcttcatgatctttatgcaatcaaaattagtgaaaagtattcaggtggatttatcagttggatattttaa

SEQ ID NO: 13661 - DNA, 285 bp, Escherichia coli
atggctttaaaactaaaccgtccgaacatcgatgaatctaagcaaccagcaacaaacgcagaaaccgcgcgttttatctccggcgctaccagagcgcctgtagtgggtaaaccaaagttgatgaacttcagactgccagcgtactttgaggagatcctggaagcagaggcgcagagaacaggccagagcaagacaaccgttctaaaggcagcgctggccgctttcgatagcctagacgagaacctgaaaaaccactggctgcttgaatctgcaaagttagggtag

SEQ ID NO: 13662 - DNA, 663 bp, Escherichia coli
atgggtaaaatcttgcttgtcgtatcagataagggtggtgtaggcaaaagcacctacgtggctaacacaggctcaatgctggtcaataaaggtaagtcggtaattatcctcaagacagataaaaaccacgatctgttgagctggaacgaaaagcggacagataacggcttactcactatcccggttcacgcagcttacggaaacgtcagcaatgaaattaagcgacttagtaagctgtgtgaagtcctcattgtcgattgccccggccacgacagccaggagttccgtagcgccctgacagtatcagatatcgtggtaacactggttaagccgtcctctgatttcgaaagcgaaactctgaccagtgttacagagaaaatccgcaccgctcagaaagctaacgcagccctagaaccgtgggtgctgttcaccagaatcaactcagcgaaaccccgccacagaaaagcggccattgatctggataaattactgcgttcggacaacatctggattcaacctctgaaaacccggatatccgagctggatgtgtatgaaagcgcctgtaatgaaggggcaggggtacatgacgttagccgggcatcaagcctttcaacagcgaaagcacagattgaacttgtggcacaggaaattgggattttatag

SEQ ID NO: 13663 - DNA, 645 bp, Escherichia coli
atgacttcaaatgcaccaacaaactttgtccgcgcttatctgagagcttcaacagcagaacaggatgcttcgcgtgccctggaaactatcgaggcttttgccagggaaagaggcctgatcatttgcagctattatattgagaatgaatccggctcccgtcttgaccgcccggaactcttccgtcttctgagagattgccagcaaaatgacattttgcttatcgaggatgtggacagactttcccgactgtcaggggaagactggaatacgctgaagaaaatgatccgtcagaaagatattcgagttatggccgtgaatgtgccgacgacctggattaattctggtatgagtgagtttgacagccggttgtttgcagccattaacgatatgctgctggatatgctggccgctgttgccagaagggactatgaacaacggcgggaacgccagaaacaggggatagagaaagcaaggaaagacggcaaatataaagggcgtaaacctaatcaagccagacatgatgcaattatcaggttgatagaaagtggcagctcctggacacaggtacagaaggtgctagggtgcagccgcggcacaatcagtagcgcaataaaacgtaaatcccggcaatcctccggtgagtag

SEQ ID NO: 13664 - DNA, 945 bp, Escherichia coli
atgattaaaaagctatcagtttttttgatggatacagtagcggcggtacgctgcgtgaaatctgataaaaaagcagggggaacggagaagatttttcacgtagtctccgataaagtgactattgatattagcaatgaacataaggagggtattgtgggagctacaaaagattgggttatgcaagtcgaggaaagtcgccgtgaggaatggatacgagaacggctttccagcccagatcttgaggaggattctgaagaatggcagttacttgaaaaggactatgacgagtatcaggactttctttctgatatggctatggaagaatatgaaaacgaaaaatggttaaaacagcatccacatacagaaatttataaaatagcaataaaccttttagaacaaataaaagaagagggaaaacaatctacaagtgaagttttcataaaaatgaaaatcgcatacattgtgacaataatggaaaactgtcttagcgaaatgattaaaagcgttgtattgtcacataacagatatgtagaaaatgccataagaaacataaatgaactgaaagcaaagaatatctctctatctgagttgataaataaagagtctaatgcaaacaaatatgtacaggagtacctttcagatattctttatcatagaatccaactggtagttgaaatatataaagcagtcctgcaacctaagcaatatccacgttttccactcaaaaatatcaatgaattgatgaaactgaggcatgacatagttcatcgtaacgggaaaacgaaaacaacggatgaaaagatacatacattcaatacagctacgctcaatgatgcgtttaaagttgtagaggagtttcttaataacatgatgaatttgatcagtgatgctgttgagcatcatgagaatgagcagatagccagagatcttgaagacgagttttga

SEQ ID NO: 13665 - DNA, 1326 bp, Escherichia coli
atggcaacaaaaaaatacgaactaacaaaagaatacttttttcatggtgaattttggcaccaacttgatgataacaaaggaagattttctgcacgaattgaatattcaccgtaccatggtctgattctagattattgtatttctgacagtgaaagccccagaacatgtgaaatattatatggagtcttaaatactggagaaagatgtactctaattgggaaatttgatttcacacaagggaatattcattttggtaaagggattatccatactggaaggcatggatttcccataatgctattcaatgatttttatgcccccgactcaaagatagaatattgtgatttatccttgcacggattgcaagaatttatccaccctcacggttttttcactcaattgaaacatttagaacatccaatgtttatcgcaaaaggaaaccattggactcttcaacttgtcaaccatgtatcttttagcgtaattgatgatgatctattaaacataataaattgccaaaacaaagccgcactggataacataactcatcaactaaaaaagacaaaagaattatatccagatgcttttttctcaattagaaaagaacttattttctactttaggataaaatcatctaatgatttaggaataaaagaccacatatcaaagtgctgggatatttccgggttattttcaattcttctgaacaaaccgactcttcctgaagaaataaacataaagttcaagggaaatggttcgaagacaccatgtctcttaacaacggggtttgaacaaagaactattgacctggcgctgagggaaataaaacatcaactccttccaataaacaggaagcatattaatcttggaaagatattctgcaaatggttcaaaatagcagaaagatatatgccattgataataacatatcagtatgaaacaggttttcgaacactgcatcaagctcatactgatattatattgtttgcgactcagttagaagcaataaacaaaacaataggtggctcaaaaaatgaaaaatacatgaaacccattaatgaatatgcaagtttgtttcttattcaagagatagagctattttttaagaaattcaacaataaatctattggtgaaaatattgccacactcagaaatgaattagcacatgttgaccgcaaaaaggagttaatgaacatattgacgattggtgattatgttaaaattggaaactacctaaaaacaattgtaacatcttatctgctatcagatttaggaatcaataacattattattgaaaaatatcaggctcagacaattcaagaataa

SEQ ID NO: 13666 - DNA, 264 bp, Escherichia coli
atgagtaatacatcctacaaacaaattatccctgcgacagactggtatttccgtcacgataatgtctccggtgtggcaggaaagtcaacagtataccaactggctgcatgggcgcttaaagaaaatggtgaggtagttggtctggtgacggttcgtgatgataatgggcgtcctaaactggttactcctccccctgtccctggtgattatttgcataaagaacaactcaccgatgatgaaaaagagtgggcgaagagacgctaa

SEQ ID NO: 13667 - DNA, 3006 bp, Escherichia coli
atgcccgttgactttctgaccactgagcagactgaaagctatggcagattcaccggtgaaccggatgagcttcagctggcacgatattttcaccttgatgaagcagacaaggaatttatcggaaaaagcagaggtgatcacaaccgtctgggcattgccctgcaaattggatgtgtccgttttctgggcaccttcctcaccgatatgaatcatattccttccggcgtccggcattttaccgccagacagctcgggattcgtgatatcaccgttcttgcagaatacggtcagagggaaaatacccgccgtgagcatgcagcgctgatacgtcagcactatcagtatcgtgaatttgcctggccctggacatttcgccttacccgtcttttatatacccggagctggataagcaacgaacgtcctggcctgcttttcgatctggcgacagggtggcttatgcaacatcgtattattctccccggagccactacgctgacccggttgatttcagaggtaagggaaaaggcgacgttgcgcctgtggaacaaactggcactgataccgtcagccgaacagcgttcacagctggagatgctgctggggccaactgattgcagccgcctgtctttactggaatcactgaaaaagggccctgtgaccatcagtggtccggcgtttaatgaagcaattgaacgctggaaaactctgaacgattttggcctgcatgctgaaaacctgagtacactcccggctgtgcgcctgaaaaatctcgcacgttatgctggtatgacttcggtgttcaatattgccaggatgtcaccgcagaaaaggatggcggttctggttgcctttgtccttgcatgggaaacgctggcgctggatgatgcattggacgttctggacgccatgctggccgttatcatccgtgacgccagaaagattgggcagaaaaaacggctccgctcgctgaaggatctggataaatctgcattggcgctcgccagcgcatgttcgtacctgctgaaagaagaaacaccggacgaatcgattcgtgctgaggtgttcagctacatcccaaggcaaaagctggctgaaatcatcacgcttgtccgtgaaattgcccggccctcagacgataattttcatgaagaaatggtggagcagtacgggcgcgttcgtcgtttcctgccccacctgctgaataccgttaaattttcatccgcacctgccggggttaccactctgaatgcctgtgactacctcagccgggagttcagctcacggcggcagttttttgacgacgcaccaacggaaattatcagtcggtcatggaaacggctggtgattaacaaggaaaaacatatcacccgcaggggatacacgctctgctttctcagtaaactgcaggatagtctgaggcggagggatgtctacgttaccggcagtaaccggtggggagatcctcgtgcaagattactacagggtgctgactggcaggcaaaccggattaaggtttatcgttctttggggcacccgacagacccgcaggaagcaataaaatctctgggtcatcagcttgatagtcgttacagacaggttgctgcacgtctttgcgaaaatgaggctgtcgaactcgatgtttctggcccgaagccccggttgacaatttctcccctcgccagtcttgatgagccggacagtctgaaacgactgagcaaaatgatcagtgatctactccctccggtggatttaacggagttgctgctcgaaattaacgcccataccggatttgctgatgagtttttccatgctagtgaagccagtgccagagttgatgatctgcccgtcagcatcagcgccgtgctgatggctgaagcctgcaatatcggtctggaaccactgatcagatcaaatgttcctgcactgacccgacaccggctgaactggacaaaagcgaactatctgcgggctgaaactatcaccagcgctaatgccagactggttgattttcaggcaacgctgccactggcacagatatggggtggaggagaagtggcatctgcagatggaatgcgctttgttacgccagtcagaacaatcaatgccggaccgaaccgcaaatactttggtaataacagagggatcacctggtacaactttgtgtccgatcagtattccggctttcatggcatcgttataccggggacgctgagggactctatctttgtgctggaaggtcttctggaacaggagaccgggctgaatccaaccgaaattatgaccgatacagcaggtgccagcgaacttgtctttggccttttctggctgctgggataccagttttctccacgcctggctgatgccggtgcttcggttttctggcgaatggaccatgatgccgactatggcgtgctgaatgatattgccagagggcaatcagatccccgaaaaatagtccttcagtgggacgaaatgatccggaccgctggctccctgaagctgggcaaagtacaggtttcagtgctggtccgttcattgctgaaaagtgaacgtccttccggactgactcaggcaatcattgaagtggggcgcatcaacaaaacgctgtatctgcttaattatattgatgatgaagattaccgccggcgcattctgacccagcttaatcggggagaaagtcgccatgccgttgccagagccatctgtcacggtcaaaaaggtgagataagaaaacgatataccgacggtcaggaagatcaactgggcacactggggctggtcactaacgccgtcgtgttatggaacactatttatatgcaggcagccctggatcatctccgggcgcagggtgaaacactgaatgatgaagatatcgcacgcctctccccgctttgccacggacatatcaatatgctcggccattattccttcacgctggcagaactggtgaccaaaggacatctgagaccattaaaagaggcgtcagaggcagaaaacgttgcttaa

SEQ ID NO: 13668 - DNA, 216 bp, Escherichia coli
atgaaagtaaccaaatctattatagctgttttattgtgcttatctgctggtagtgcatatgcagattgtgagtattaccttacaggtaacaaggaaactcttaataggggtctgacgctcagtggaacgaaaactcacgttaagcaacgttttctgcctctgacgcctcttttaatggtctcagatgtcctttggtcaccagttctgccagcgtga

SEQ ID NO: 13669 - DNA, 258 bp, Escherichia coli
ttgaacaacagaacaatcactgtttcaccggaacaacttcgtcggcaggcgcaggagatgcttcgttgtgctgaacagatgaaaaaaacgagcgtgaaaaaagatacgctccgcaagcagcttactccggcgcttcgtgatctgctgcaggcaaaacaccgcacacaaaaggcggtggatgagctggtggattgcgtggcggaactggaaggacaggtaagccagtttgaaatactggtgaaggagtttactgcgtga

SEQ ID NO: 13670 - DNA, 708 bp, Escherichia coli
atgaacaccgcaatttttaacggcaaagcatccatgaccagcgttgagatcgcagagctggtgggtaaacgtcatgacaatgtgaaacgcactattgaaacattagccaaaggtggcgttgtccggtctcctcaaattgaggtttccgaaagaatcaataacttaggttttaaagttcaatatgagcattacctgtttgaaggagaacaaggtaagcgcgacagcatcattgtcgtcgcacagctctgtcctgaattcactgctcgcctggtagatcgctggcgcgaactggaagaacagatccgtaagccaatgagcgaaatcgaaatggttgccgcgatggctcttgaagccgttcgccaacagaaacggatcactcaggtggaagaaaaagtcagccacgttgctgaaacagtcgagcaaattaaaaagggcactattcgtgagggctatgccggatatcgccaactgaaagcaaaaaccggtttgtcagatgataaatgccgcaatctggtgaacgcctatcagattcctacagacacccatgagttcatgacgccggacggattgttgtcacgtcgcgcaattgttgctgtggaaccgtttatggctgctttttatcgggttatggaggaagcagaaccgcgagggactcgctggtatcacccgaaaatggggttatttcaggttattggttggcagcggtga

SEQ ID NO: 13671 - DNA, 243 bp, Escherichia coli
atgaaaaactgtgatgcttaccatatttgtctcattggtgaattgcttgatttcatacaaaaaagcactgcgcgcaataataaaaatataacatatggtgatctggtaataatttcagaggatataaagagcatcgctcttaaattcaagagcgacgcgagtattgatgacgctatttacgcttatcttgcgaaaataattgacggatccaaaatccagcctctggatgaacctcgtcagtga

SEQ ID NO: 13672 - DNA, 228 bp, Escherichia coli
atgattaacgcagagcaactcgaaaaagagatttcagaactcaaaaaagaattaatttggcacaaagttgctatctccgcattaattcgtcaggtagtttcacctgaagataaagtaaagtttatgaagcagttctcatcttcatcaaaggagtttttcactgacgaggttcatccagaggctggattttggatccgtcaattattttcgcaagataagcgtaaatag

SEQ ID NO: 13673 - DNA, 189 bp, Escherichia coli
atgaacatttatttcagaatagttatatcactggcaattatcgcatgtatttacggattgctcgtcccgtttctgatatcaatgaaggatacggtagcggtgatttctggctttgcactgacgtttctaaccccgccatgtatttataccatttataaggggctttctttcactaaggataaaagatga

SEQ ID NO: 13674 - DNA, 342 bp, Escherichia coli
atgaactatgacccaaatctgacgtcatgcggacgcatggcgaaacaaaccgttcgattaactttcgggcaatgggaataccgcgaaacattcgaagtcactgtcggtggcaacctgaccggactcgatgttatcagttgcgctattgaaagcctgtacgcaacgctgccttatgaagaagtcgaggatgagcgtacaggggaaacagatatcatggccaccattaatattggcgaactgacatgccaggatgaagacctgtccggagagctctggcttgccgggatgcttatctcagcagaaattatcagtattgaacccgctacaaacatacggctctga

SEQ ID NO: 13675 - DNA, 147 bp, Escherichia coli
atgaataaagcgtttgagctatgggtgcgccagcgttacggcaatcgctatgacctgacgcgagatgttgacggcttctactgtcgtgaaattgtgaaacgaatgtttgaagtgtggtgccactgccgtgggctgagtgttgtgtga

SEQ ID NO: 13676 - DNA, 402 bp, Escherichia coli
gtggagggtaacaccacgctttatgccctgccgaaacccgaggttgtcctgcgctggcgtgagcagaccacagatgacttccgcttctgttttaagtttccggcgaccatttcgcatcaggcagcattacggcattgcgatgatttagtgactgaatttttgacccgcatgtcaccgttggctccgcgcattggacaatactggctgcaactgcctgccacattcggcccacgggagctgcctgcgctttggcattttctcgattctcttcccggtgaatttaattatggggtggaagtccgccatccacagtttttcgccaaaggggaagaggaacaaacgcttaatcgcggtttacatcagcgcggcgttaatcgggtgatttttattagacacgtttaa

SEQ ID NO: 13677 - DNA, 1524 bp, Escherichia coli
atgaaacgtgccatttcttacatcaggttttcatctgagaagcaatcccgaggtgattcattacgccgacagtctaagatggttaatgactggcttaaggctcatcctgagtactaccttgaccaagatttatcttttcgtgatttgggggtgagtgggttcactggtaagcacttgaaaggtggcttaggtgactttttaaccgctatcgagaaagggcttgttaaagctggtgatacgctcttgatagaatctcttgaccgtctgtcacgtcaagatgtagaccaagcaagtgagctactcagaaacattcttcgctctggtgtagatgtggtcaccttgtccgatggtgaacattacacaaaggaaagcttaaaagacccgttagctctgattaaaagcattttgataatgcagcggtcgcatgaggagagtttgcgtaaatctgaacgtatccaagctgcatgggatgcaaagaaagaagctgctaaagccggtatcaagatttataagcgttgtcctgcatggcttaagcttaatgatgaccgtaagaccttctctgtgatacctgagaaggtagaaactgtgaagaggtgctttcaattacggttagagggtaagtctatttgggagattgtcaggactcttaatgatgaaggtcaccagacacttaaccagtacaaagcaggtaagtttggtcaaacctcagtgcaagaccttctgaaaaatcgctctgtaattggttacttcacacctaaaggctgtgaggagatagctggttatttcccccctatcatccctgagactgatttctacaaagtccagcaactatcatattctcgttatggaagaaagcctgcttcagataaaccattgagtgtgaatcttttcaaaggtgttatccgttgttctgaatgtggtcatgctttgattatcacaggctttagcgatacaagaaacgggatttatcgttgtcctcttcgtaatgaaaaccgttgtagtgctaaaggactttcacgtaagcaaaccgatggtacattgcttgccctgctatcccgtatagaccgatttgatagcgatatgacgaataccatagacacactgaagctacaccgtgaacacatctcaagcaatattgaaaagctggtacagctatcacttgaaattgaagacttgtccgctattaccagcaaactaaaacagttaaaaggtgagctatcacaggttgatgcggatatcgagaaggagacacaacgccttaaatctattgatgttggttgtttgtctgattgtgacttgactacaaaggcgggaaggattgaagcacaactgataatcaaaagtgctgttaaagaggtcattttaaatactgctaaacgtcgctgtaaagtaacttttcacaatagtaagtcaatcaccctaccaataacagaaaccccctcagaggacgttacagaggctatacagtcgctttctgaagtcactgagagggggttgatagatgttgatgaggttatcatatag

SEQ ID NO: 13678 - DNA, 774 bp, Escherichia coli
atgatttactctaaccaaatcaaatatagtggcaaagacggcatctatttccacttaagagataatgtagatgccttcttaaccttatcagcaactgaaaacatggaatttgatagtcctatgcaggtgactacacagaacatgcaatcaggacaaaccgttacagataatgtgcaaagagcacccagaacaatcactattagtggtgtcgttgtagttggctatgaaggaagcttattattaactcgtcagggtcaattagtagaaaacttcatcgacactcttgaaagctggcgtgaccagaaacagattatttcggtcatctgtaaagacggaattaaaattgacgattccattattacgagttttaaagcctctaaagatgtggggatttcaaacggtctaagaatccagctaacttttcaggaaattaacttcaaagctattgttggtcagactgatatttctgctgcaactggaaagactgctaccacgaatgatggtggtgcaacttctaagaagaacactggtaacactacgacaagtctaggtaatggtatgttgctgtgtcaggagctatataatcgctctacgagtgaactcactaatgagcaacttcaagcccgtatcaattgtggtaaaagtgtcaaagttgagaatggaaaaagcaccttctcagatgccgctaatgcgcaagcttcaaaggtgcttaataatgctggtacaggtagtactttgaagaaattttctgtgaatcctaacaagcgattctga

SEQ ID NO: 13679 - DNA, 1695 bp, Escherichia coli
atgtctaagctgaaaggtcttaacccaattgtcgagaaatacattaagagtcagttttacgcattaagtagtaaatccaagacacttggaaacgaagcttttaatcgtgagttagcaaagttaaatcaaaatctacgtgaaacactttctaagtttaacaagaccaccagcaaaaataatcacagtgaaaatgcttcaaatggtttagatgtactagcttcaagtgcaattaaagcgggtacggctatttacacttttcaaagtgctttggcagcttatcagcgagtaatggaaattggtttacagcgtgcaagtgctgaacgttcaattgatttcgtatttgataaagatgcaggtcaggtaaaagagttcacaaagtcattagctcaaacaacgggtttagatatcgctgaactgcaatcacagtttgctggtttcggtgcttcagctaaagagtctatgggtattcaaggttctgaagaactttttagaagtatgattggctattctcgtctgatgggtcgaagtgaagaagagattaagcgagcactgacagcattatcacagatggctggtaagggtcaggttatggctgaagagcttaaggggcaactagctgaagctgttcctggtatggttcaggtattcgctaaagcaaccggaaagactgaacaggaattatttgatgccatgaagaagggggctttaaaatctgccgatactcttcagaaggtcactcaggaactgaatagacaaatcaccgctaaaggtggctggaaagctatttcagaaagtacacaggcacaattagggaacctgaaaaactcttggaataccacgcttgatagtatcttcagaggttctgaaagtggtctgcaagattttacaagaagcttaacaacgcttttaaacgctcttggtggaagtggtaaaagtcttggtgaatctcttggtagcttgatgactgatatgtcacatggtgtcgatagtctggccgatattagttacaaggtgcgagcgttctttgatgaggtgacattagcttatcgtggtttaaccgatgaacaaaagaaagttgttgatgctttaggttctggcttgattaatagtttaaaagtcttggctggtgttattgctgtaaataaagttgttggtgtaaccagaagtatttacgggcttatgactgctatcacaagattaggtcaggttgctgatactacagcggataacgtgaatagaaagaatgggaaaccatcaagactgaatcttgggaatatgctattagctggtagcgctctctatgcaggttatgaaagactagcctctacacctgaacgaatggaagcacaagctaaattaccagagttagctaaagaatctggacttaagccagtatttactatggacgatgtgaaaggttggtttaatagtgcagctatgaatcttgctaacttccagcatccagaattaatcaccatgagacaagatgcggcattaacgaatacggatatccaaagcctgagagatgaaattagtgctttgagcaaacgtattcaggagcctgtgaaagtttcacttggtggtgaagttgccattaaaccagatgaaaccagctttatgacctttagcagtaatatctacgaccaatacgcagaagctacgctattaagttcatcattcccagaagatgattga

SEQ ID NO: 13680 - DNA, 228 bp, Escherichia coli
atggcacaatttaaagttgatagttttatcgttgagctaggcttcagcgagaacgttattaagggcttgcaaagagttgaaaaggcagctttgcagtcagcacaaagaattgaacgtaatttgaatagaccgtttaaggtcgataccaagcaacttgacagcaatctgacaagttctttagggcaacttgaaaggaagtttaataagacctttgacaagattgagtag

SEQ ID NO: 13681 - DNA, 540 bp, Escherichia coli
atggcagccagaccacgtaagaataatgtttcagtcccgaacttgtatccgctctatagcagaaaagtaaataaagtttattggcgatataagcatccagtgaccgggaagtttcattctttgggcacaaacgaagctgaagccattgctattgccactgaggccaatacacgcctagctgagcaaagaacccggcagattctagctatcagtgacaggatcgcaaccagcaaaggaaaagcaatcacaacgtcaacctggttagatcgctatcaagcaatccaggaagacagactgaaaagtggcgatataaagctcaacacctataaacagaaagccaaaccagtatccttgctcagggaacgagcaggactgaagttaatttcagccgttgatgtcagggatatagcccagttgcttgacgagtatatcgccgccggacagccgagaatggcgcaagtagttcgttccgtactgattgatgttttcaaagaggcgcaacactacggagaagtccccctggctataacccggcattag

SEQ ID NO: 13682 - DNA, 132 bp, Escherichia coli; identical to SEQ ID NO: 6019

SEQ ID NO: 13683 - DNA, 210 bp, Escherichia coli
atgtggatggagttcgacagggtatccccgctgggtgatgagcgcggggatatccgtaatgcacagatcgtgaaagcggttttcggggcacaggggatgaatgttgcactgaaggacgccatgctctgctggggcgaggatgaggataagccggaggtggatccgtttgcggcgctggaagacgcgctgaactttgcagcacagtcatga

SEQ ID NO: 13684 - DNA, 375 bp, Escherichia coli
atgaaaaaggatctgaaaacgctggcgctggccagactgtcagggtttcgtcataaaacggtgaaggtgccggaatggggtaatgtcagcgtggtgctgcgggagccttcggcagaggcctggtatctgtggcaggaagtgctcaatggtgatggagaggatgacgataccctgtcggtggtggcgaaaccccgccgtaacctggaagcggatgtgacgctgttctgcgatgtcctgtgtgatacggatctgcagcgggtgttcactccggacgaccgtgagcaggtgctggccgtctatggtccggtacatgcccggttgctgcgtcaggcactggaactgatcgctgatgcagagtcggccagaaaaaagtag

SEQ ID NO: 13685 - DNA, 714 bp, Escherichia coli
atgtctgctttgtatgaacgctcacagctgacgcaggtgatgatttcatctgccccggcgactgctgaaactatggataaggcggaatatctgcgcctggactgcaccatcaaggaagtccagttcaccgccggtcagaaacaggatattgatgtgaccacgctctgctccacagagcaggagaacatcaacggtctgggggcgtcgtctgagatttccatgtcgggtaatttttatctgaatcaggcccagaacgccctgcgtgatgcctatgacaatgacgcgttgtatgcgtttaaggtgctgtttccgtccggtaagggctttaaattcctggcggaagtgcgtcagcacacctggtcatccggtaccaacggcgtggtggctgcaacgttctcactgcgtctgaaaggcaaaccggtgtcctttgtggtaccgctggcgtttgtgaaaaatctggataaaacacttaccgtgaataccggtgcgctgctgacaatgtcagtcagtgccaacgggggaacgccgccgtataaatacgcctggaagaaggatggtcagccggttgacgggcagacgacagacaccttaagtaagccaggtgcgcagtccgctgatgcggggaaatatacctgcgtggtgaccgattcggcagagaaagcacagagtgtgacgtcttttgaatgcaccgtgacagtgagcgcagccgcctga

SEQ ID NO: 13686 - DNA, 345 bp, Escherichia coli
atgacggaggcggatttgtatcctcatctggcgcatcttgccggcgggcaggtgtacccgtatgtggtccccctgctggatggcaggccgtcggtggcgcttccgtgggtggttttcagcctgatttcatcggtgtcagcggacgtgatgggcgggcaggcggagtcctcagtgtcggtgcagatagacgtttatgccgggactgtgacgcaggcgcgtcagatacgtcaggacgcccgtgaagccataatgctgctggccccgggatccgtcagtgaaatgcaggactatattccggaaaaccgctgttaccgtgcaaccctggagtttcaggtcacggtgtga

SEQ ID NO: 13687 - DNA, 447 bp, Escherichia coli
atgatcgaaaccctgctggatttttcggggctggaggacatcagccgcgatttgcagcttctgagtggtgcggaaaataaccgggtgctgcgtgaggcaacccgtgcgggtgcgaatgtgctgaaagaagaagtggtgtcacgggcaccggtacgcaggggaaaactgcgccgcaatgtggtgatcctttcccggcgctcccgcgatggcgggatggaatccggtgtccatatccgtggtgttaatccggacaccggtaacagcgataacaccatgaaggcggataacccgcgcaatgctttctactggcggtttgtggaaatggggaccgtgaatatgccaccgcacccgtttgtgcgcccggcgtttgatgtgcgcagtgaacaggcagctcaggtggcgattgcgcggatgaaccgggccattgatgaggtactgagacgatga

SEQ ID NO: 13688 - DNA, 351 bp, Escherichia coli
atggcaatatctgcaggtcgtctgacacagatgataagtgttctgaacccggtgttaacccgtaatgctgccggagaaatgacggaagagtgggtgtcatgcgggaaaattcatgcggatatccggggcaggagcagccgggagcggatgcagtccggtgcggaaatggctcaggcggaaatccgcatctgggtgcgcggtcagtccggccgggaaatcacagcagcgtcacgacttcatgtgctgagtggtccatggcgtgaccggatcctgaacgttgtcgggctgcccgtgccggatacgaccggcgggcgtctggaaattctctgtcggctgggaggggaaaaatga

SEQ ID NO: 13689 - DNA, 276 bp, Escherichia coli
atggattgtcgagccgtcttactgattgaggacaggaaaggcaaaataataatgagaatattcatcgtattagctggtcttttattgggatgctggaggttatttgataactacagatcctataaaaaaggaatttataaagaacatcgcaagatggctcctcctgtttattattatcgtggagatcatacgtttatcatacggatagtaattgattcacttttgaccctggtgatgattggttttgttgtctggttctggtttagaactgcttaa

SEQ ID NO: 13690 - DNA, 597 bp, Escherichia coli
atggcatcagataatagatacagtattaacttcacgctatctgttttagaaaaaacagaagcaagcaaattaataaaagaacaagaaaaacaagagcatatagaaccttatggctatattttgcttataaaaaaagcagcgttgttagttctttcatttgcagcattatttgattttataatactttttggtttgattgctctcgccccaaaagaccctgattatgtagaaagagcaaaatttctttccattattacatttacactaatagctatatttatcgggttattatatatatatgattatttgatgaaaaaagtaatgaggactaactatttatcagaaataagagattctgaactaatgttacgtctcaaaataaatcgttcatacattgagcaaatcatgaaaattggtagttcgaaggttttctggaataacataaaaaaaacataccgtaagaaaggatttctatttatccagacaaaagaaaacagatgcataatcattccagaaagagtttttaaaaatggagaagaaaccaaaaaattatataattttgtaaaggagcaaatagcaaaaaacacaatagaatga

SEQ ID NO: 13691 - DNA, 843 bp, Escherichia coli
atggagcaaataaaattacataaacaaggtggtgcggcagtaattatcattcctgctagtatgatagaaaatacaggatgggaagatggaaccttattggaggtactagaaataaatgagactcttcatataagaagaaagacagaatcaggagctttagctactaaagcttgtccttctcttttttcatctactatgaggcatgttaattacgataaaattattagatataatagcggattaaatctgttagttaatgaactgtcattttcggcaagaagggtcttttttatttgtttatattattactttgaaaataaacttgaatcggataagtcgctattgatccgggctgataagtatgcagaatttgttggcgttgagcgttctgtcgcatataagcaaatgaaggatgcagcagatttcttttcaagaaataaaaatttaattacacattgtgactatatttcgaatgagggattgcttcgtgttatgttttcgtctaagacgataaattatattacagcgatagactcccgtaaatatcaggttaccgagcttcctctaaaatctgctttgtctcttcaaggaagatactcatggcctttatatcaactgataaaatttagccatcttaaatctttcactataggtgtagatgaacttaagaaagaaataggttatattcaaaatcaaaagttttctttctttaaaagagatggaatcaatatagctattgatgaaataacagaaaggacagatgttaaaaacattaaatgtgttaatgctgaaaggcaggggagaagagtcagcaaagtccgttttgagatcgaaatgaggtaa

SEQ ID NO: 13692 - DNA, 435 bp, Escherichia coli
gtggcagatctcgacgatggttatacgcgcattgcaaatgagttgctggaagctgtgatgctggccggattaacacagcaccagtttctggtcttcctggctgtcatgcgcaaaacatatggctttaataaaagactggattgggtgagcaacgagcaactttccgaattgaccgggatattgccgcacaagtgttctgctgcaaaaagcgttctggtaaagcgtgggatttttattcagagcgggcggaatatcggcattaataatgtggtcagtgaatggtcaacattacccgaatcaggtaagaaaaataaagtttacctgaaagaggtaaatttacctgaatcaggtaagaaaagtttacccaaatcaggtaaacacaaaagacaaactaacaaaagacaatataaaacctttttcgtccgagaattctga

SEQ ID NO: 13693 - DNA, 435 bp, Escherichia coli
atgaaaactgaactgactctgaatgtattacataccatgaacgcacaggaatatgaagatatccgggctgccggaagtgatgaacgtcgtgagctgacacacgccgtgatgcgggaactggatgcgccggacaactggacgatgaacggcgagtacggcagcgagtttggcggctttttccccgtccaggtccgtttcacgcctgcccacgaacgttttcacctggcgttatgttcaccgggcgatgtctcccaggtctgggtgctggttctggtgaatgccggtggtgagccgtttgcggtggttcaggtacagcggcggtttgcaccggaagccgtcagccattcactggcactggcggcgtcactggatacgcagggatacagcgttaacgacatcatccatatcctgatggcggaaggaggtcaggtatga

SEQ ID NO: 13694 - DNA, 720 bp, Escherichia coli
atgagcgcacgttcacaggcactggttcccctcagcacagagcaacaggccgcatggcgggcagtggcagagacggaaaaacgccgccatcagggaaacacgctggcggaatatccgtatgcgggggcgtttttccgctgtctgaacggaagccgcaggatatcgctgtctgacctgcgatttttcatgccatccctgaccgcagaagaactgcacggaaaccgtcttcagtggttgtatgccatcgatgtgctgattgaaacacagggcgaggtctgcctccttccccttcccggtgatgcagcagaacgcttgttcccgtcggtgcggttttgtgtcagggaacgcagtcgccataaatccgcgctggtcatgcagaagtacagccgccagcaggcgagggaggcagagcagaaagcccgtgcgtaccaggcgctggtcgcccaggctgaaatcgaactggcgttccattcaccggaaacagtcggaagctggcatgcacgctggagtgatcgggtggcagagcatgacctggaaaccctgttctggcagtggggcgagcgttttccgtcactggccggaatggaacgctggcagtggcaggatatgccattctggcaggttatcgcggaagccagtctggcagcaaaggaggccggtcatgctgtccgtgagatggagcggtggatggtgccgaacaaactccgggaggtggcgtga

SEQ ID NO: 13695 - DNA, 213 bp, Escherichia coli; identical to SEQ ID NO: 6096

SEQ ID NO: 13696 - DNA, 666 bp, Escherichia coli
atgtttgtatctcataatgaggttgtacgaaaaattttgttttttaatgattacctaaagttgaaaattactgaagaaaatattatcaaacgtttgagagttgagcaatttatctttctgacagaagaagataaatgttggtataaaacaagatacaatattgatgagggttgttgttccttagcgagcaatcatctttatgtagaaaagattaagagaactatcaatttccaaacccctttcctgcttattcccggtagcattgaattttcacaaaatttttacggcttaaattggtttataaaaaatatatatcctggattaaataggaaaataagaatagttgtaacaggaaaggcatcagataaaaaaataaagatgttaaactgtggagaggaaattacctttacgggagagcttgacttttccacatataataaacttagctcaacatgcttgtgtgttattgcaccgattacaacgggcactggaattaaaataaaaatattagaagctgtacaaaaaggtattcctgtacttacaacaaaatttgcttcaaaaggaatatgttccgatttatgtttttattgcgaggaggatactgacacaaactttgtcaatttaattaacagttttcttgaaacgacattaagagtccaagaatga

SEQ ID NO: 13697 - DNA, 1074 bp, Escherichia coli; identical to SEQ ID NO: 4451

SEQ ID NO: 13698 - DNA, 204 bp, Escherichia coli
atgacagacccaaagaacctagagaacaggctgcatgagaaggccgacccggcccgcgccgtttccactggtcgggtgcgctacacactggccgaactactggccgacgcggaagcatccggggcttacccgctgccgccggaggaacgcgaatggatggatgcgccgtctgtgggtcgggaatggccaaacagtgaagattga

SEQ ID NO: 13699 - DNA, 1068 bp, Escherichia coli
atgagcgccggcgcacaggccatcgccgcgaagccgcgccaggccccgatgagcggcttcgagcgttacctgacgctgtgggtggccctgtgcatcgtcgccggtgttgcgctcggccagggccttcctgacgtgttccaggccataggccgcatggaagtggcccaggtcaatttgccggtgggcctgctgatttgggtaatgatcgtcccgatgctggtcaagatcgacttcggggcgctgcaccaggtcaaagagcattggcgcggcatcggcgtcacgctgttcgtgaattgggccgtcaagccattctcgatggccctgctggggtggctgttcatccgacaagtgttcgctccgttcctgccggccgatcaactggacagctacatcgcgggcttgatcttgctggccgccgcgccctgcacggcaatggtgttcgtgtggagccgccttaccaacggcgacccgcttttcacgctctcgcaagtggctctgaacgacgccatcatgatcgtggccttcgcgcccatcgtcggcctgctgctgggcatgtcctcgatctcggtgccttgggacacgctgctgatttcggtcgtgctctacatcatcgtgccggtgatcctggcgcagctcttgcggcggcatctgctcaagcaaggacaggccgcctttgaacgggccatgcagaagatcgggccgtggtcgatggccgcgctgctgctgacgttggttctactgttcgccttccagggcgaggccatcatccggcagccgttagtgatcgccatgctagccgtgccgatcttgattcaagtgttcttcaattccgggttagcctactggctgaacaagcgggcgggggaaaagcactctgtcgcctgtccttcggccctgatcggtgccagcaacttcttcgagctggccgtggcggccgccatcagcttgttcggtctgcactccggcgctgcattggcaaccgtggtcggcgtcctggtcgaagtgccggtgatgctgctggtcgtgcgcgtggtgaatcgctcgaagagctggtacgaacgaggttga

SEQ ID NO: 13700 - DNA, 507 bp, Escherichia coli
atgaccgaaagaatctataacgtcctcatcctctgcaccggcaattcggcgcgcagcatcatggccgaagctctcatcaacacgatggggcaagggcgcttccgcgcctacagcgccggcagtcacccaaccggcaaggtcaatcccttcgccgtcgaaaaggtggagtcggtgaattacccgaccgagaatctgcgcagcaagagctgggacgagtacgccacgcccgacgcaccgaagatggacttcatcatcaccgtctgcgacaacgccgccggcgaaatgtgtccggtgtggcctggtcagccgatctcggcgcattggggatttgaagacccggccgccgtcgaaggcactgacgccgagaagcgccgggccttcgaacaaaccttccggcacatgatgaaccgcgtccgcctgttcgtgaatctgcctctcaaaatgcttgaccagacggccatcaagcgcgagctggcgaacatcggcaagaccgagcaggaagcatga

SEQ ID NO: 13701 - DNA, 768 bp, Escherichia coli
atgagacttcgccatctttccgaccccgattctttgcccgctttggacaaatcctttgccatcgagcgcccggcgctcgggctggcacccgacgccccgccggtgcgtatcctgctgctgtatggctcgctgcgcgcccgctcgttctcacggctggccgtcgaggaagcggcccggctgctgcaattctttggcgcagaaacacgcatcttcgacccgtccgatttgccgttgcccgatcaagtgcaaagcgacgatcacccggccgtcaaggagctgcgcgccctgtccgagtggtcagagggacaagtctggtgcagcccggaacgccacggtcagattaccagtgtcatgaaggcgcagattgaccatctgccgcttgaaatggccggcatccggccgacccaaggccgcaccctggccgtgatgcaggtatccggcggctcgcagagcttcaacgccgtgaacaccttgcgtctgctcggccgctggatgcgaatgttcaccattccgaaccagtcgagtatcgccaaagcgttccaagagttcgacgcggcgggccgcatgaagccctcgccgtactacgaccgaatagccgatgtgatggaagaactggtgcgcttcacggcgctggtacggccgcaccgtgaagcactgacagaccgctattccgaacggaaagcggccggccacgtcatcgacgaggccaccgatctttcatccatcgccattgctccccagccactaccagaaagcgaaacatcatga

SEQ ID NO: 13702 - DNA, 333 bp, Escherichia coli
atggaaacgataaatgctgtagccgccctggcggccatcgctcaagaatcgcgcctcgcggtgttccggcttctcgtccaggccggccccgccggcatggccgccggaaaaatcagcgaagcggccggcatcccgccgtcttcgctatccttccacctgaaagagctggcacacgccggcatggtcacgtcgcggcaagaaggccgatttgtgatctacgaggcgaacttttcgacggccactaacctggtggcctttctcacggaaaactgctgcggcggccaggtgtgcaacctgtcttgcaccacggaagccgggaaggtgttggcatga

SEQ ID NO: 13703 - DNA, 738 bp, Escherichia coli
atgcgcaggacgaagccagtagccgcgccgatggtggcgcgggtctatctgcgcgtcagcaccgacgcgcaggacttggaacgccaagaggcgatcactacggccgcgaaggccgccggctactacgtcgccggcatctaccgtgagaaggcatccggcgcacgcgccgaccggcctgagctgctgcgcatgatcggcgacctacagcccggcgaggtggtcattgccgagaagatcgaccgcatcagccgcctacctttgcccgaggccgagcgcctggtggcctcgatacaggccaaaggcgcacgcctggccgtccctggcgtggtcgatctatccgacctggcggccgaggcccagggcgtcgccaagatcgtgctggaagccgtgcagatcatgctttttcgcctggccttgcagatggcccgcgacgactacgaggacaggcgcgaacgccagcgccaaggcattgagttggcccgccaggccgggcggtacaagggccgccgtgctgatccgaagcgccgcgcccaagttgtcgcgctgcgcaagtccggctacagcatcaacaagaccgccgagctggccgggtacagtgcggcccaggtgaaacggatatgggccgaggtcagccaggccgaagcgaagcagcacggcgcgttcgtggaggacgcattgacggaagccgatgccctggccgctgtcggccaggatgagcgccaggaggaaagggcatga

SEQ ID NO: 13704 - DNA, 225 bp, Escherichia coli
atgaagaagccgaaccaagacgacgagccgtttttcatcaccgaggagattgcggccgaaatgatcgccggcggctatgagttcgagctgccgcccattccttgcaccatccgcctacgcgacgtgctggagcgcatgaccgatgctgagctagcattgcagccgggcgagatcgccgaccaggagcgtgaacgctgccggcgcaagccgtgttcaacctcatga

SEQ ID NO: 13705 - DNA, 423 bp, Escherichia coli
gtggcaaaagtttttacacaagaagagcgggaaaaaattaaaggacaggttgttgaactcgtacgccagagtgggcgcgagacgttacgacaactggaaactaaaactggggcaacaagatatctgatgagcgttctggccagagagctggttgccagtggcgatgtatacaattctggctacgggttattcccgtctgaacaggctcgtaaagactggcaaaatgcccgcaaaaaattatcgagggcaaagctgaagaaaccggttgtggttgatccggaccttatctggtcgttacctgacggagaaatacgtcgctacgacagtcgcctaaacataatctgtcgcgagtgccggaagagtgaagctatgcagcgtgtactggctttctatcagggtaattttcaggaggcggtactgtga

SEQ ID NO: 13706 - DNA, 1491 bp, Escherichia coli; identical to SEQ ID NO: 8027

SEQ ID NO: 13707 - DNA, 573 bp, Escherichia coli; identical to SEQ ID NO: 7694

SEQ ID NO: 13708 - DNA, 1047 bp, Escherichia coli; identical to SEQ ID NO: 11409

SEQ ID NO: 13709 - DNA, 207 bp, Escherichia coli
atgctgaccgtgatcgtcagtggagatgaacagttgactcttacactgaaaaatatactctcttgtttttttatcgtttatctgcatgaaataaataatcttcagcatttttcatgtgaatttcatcatcttaccctgaatgttcattttatcagtatgatattccattgtttactgataaaattaaccgataaatgttcttgttaa

SEQ ID NO: 13710 - DNA, 159 bp, Escherichia coli
atgttccaggaattgccagtgaaattttgcgcgggcgcgacgttcatcaccggcttcaatggcagtggctacagcgacggcaccttcttcctttattgcctgttcgcccggaatggcggcgcaaataaagactttactcattttgttttaacctcatga

SEQ ID NO: 13711 - DNA, 192 bp, Escherichia coli
atgaatccagcatttgcgcttgttctgacggtttttcttgtttccggagagccagttgatattgcagtcagtgttcacagaacaatgcaggaatgtatggcagcagcaaccgaacagaaaattcccggtaactgttacccggtcgataaagttattcaccaggataatatcgaaaccccggcaggtctttaa

SEQ ID NO: 13712 - DNA, 189 bp, Escherichia coli
atgaaaacgttattaccaaacgttaatacgtctgaaggttgttttgaaattggtgtcactatcagtaatcctgtatttactgaagaggccattaacaaaagaaaacacgaacgggagttattaaataaagtatgcattgtttcaatgctggcccgtttacgtctgatgccaaaaggatgtgcacaatga

SEQ ID NO: 13713 - DNA, 1494 bp, Escherichia coli
atgcctcatgtggcggccaggacggccagccgggatcgggatactggtcgttaccagagccaccgacccgagcaaacccttctctatcagatcgttgacgagtattacccggcattcgctgcgcttatggcagagcagggaaaggaattgccgggctatgtgcaacgggaatttgaagaatttctccaatgcgggcggctggagcatggctttctacgggttcgctgcgagtcttgccacgccgagcacctggtcgctttcagctgtaagcgtcgcggtttctgcccgagctgtggggcgcggcggatggccgaaagtgccgccttgctggttgatgaagtactgcctgaacaacccatgcgtcagtgggtgttgagcttcccgtttcagctgcgtttcctgtttgccagccggcccgagatcatggggtgggtgctgggcatcgtttaccgcgtcattgccacgcacctggtcaagaaagcgggccatacccaccaagtggccaagacgggcgcggtcaccctgatccagcgttttggatcggcgctcaatctgaatgttcacttccacatgctgtttctcgacggtgtgtatgtcgagcaatcccacggctcagcgcgtttccgctgggtcaaggcgccgaccagcccagagctcacccagctgacgcacaccatcgcccaccgggtgggtcgctatctggaacggcaaggcctgctggaacgggatgtcgaaaacagctatctggcctcggatgcggtggatgacgacccgatgacacccctgctggggcactcgatcacttaccgtatcgctgtcggttcacaggcggggcgaaaggtgttcactttgcaaactctgccgaccagtggtgatccgttcggtgacgggattggcaaggtagccgggtccagcctgcacgccggcgtggcggccagggccgatgaacgcaagaagctcgaacggctgtgccggtacatcagccgcccggcggtatccgagaagcggctgtcgttaacacgaggcggcaacgtgcgctaccagctcaagacgccgtaccgggacggcaccacgcacgtcattttcgaaccattggatttcattgcaaggctggccgccctggtaccgaagcccagagtcaacctaacccgcttccacggggtgttcgcacccaacagtcggcaccgggcgttggtcacgccggcaaaacggggcaggggcaacaaggtcagggtggctgatgaaccggcaacaccagcacaacggcgagcgtcgatgacatgggcgcaacggctcaagcgtgttttcaatatcgacatcgagacctgcagcggctgcggcggcgccatgaaagtcatcgcctgcattgaagaccctatagtgatcaagcagatccttgatcacctgaagcacaaagccgaaaccagcgggaccagggcgttacccgaaagccgggcgccaccggctgagctgctcctgggtctgtttgactga

SEQ ID NO: 13714 - DNA, 303 bp, Escherichia coli
atggtgcgcaaatatttcggcacagacggtattcgtggcaaagccaacgaaggcgcgatgacggcggaaaccgccttgcgcgtcggcatggcggctggccgtgtctttcgtcgcggtgaccaccgccatcgtgtcgtgatcggcaaggatacgcgcctgtcgggctatatgcttgaacccgcgttcacagccggtttcacctcgatgggcatggacgtattcctttttggcccgctgccgacaacgtataggaagaataaacgcccttttcacccaagtccaacagctttggaccgcagttga

SEQ ID NO: 13715 - DNA, 852 bp, Escherichia coli
ttgtcgtgtacagagattattattatagaagcccccatgaataaatcgctcatcattttcggcatcgtcaacataacctcggacagtttctccgatggaggccggtatctggcgccagacgcagccattgcgcaggcgcgtaagctgatggccgagggggcagatgtgatcgacctcggtccggcatccagcaatcccgacgccgcgcctgtttcgtccgacacagaaatcgcgcgtatcgcgccggtgctggacgcgctcaaggcagatggcattcccgtctcgctcgacagttatcaacccgcgacgcaagcctatgccttgtcgcgtggtgtggcctatctcaatgatattcgcggttttccagacgctgcgttctatccgcaattggcgaaatcatctgccaaactcgtcgttatgcattcggtgcaagacgggcaggcagatcggcgcgaggcacccgctggcgacatcatggatcacattgcggcgttctttgacgcgcgcatcgcggcgctgacgggtgccggtatcaaacgcaaccgccttgtccttgatcccggcatggggttttttctgggggctgctcccgaaacctcgctctcggtgctggcgcggttcgatgaattgcggctgcgcttcgatttgccggtgcttctgtctgtttcgcgcaaatcctttctgcgcgcgctcacaggccgtggtccgggggatgtcggggccgcgacactcgctgcagagcttgccgccgccgcaggtggagctgacttcatccgcacacacgagccgcgccccttgcgcgacgggctggcggtattggcggcgctgaaagaaaccgcaagaattcgttaa

SEQ ID NO: 13716 - DNA, 216 bp, Escherichia coli; identical to SEQ ID NO: 10053

SEQ ID NO: 13717 - DNA, 681 bp, Escherichia coli
atggcaacgacgaacgcattctgtctggcgtcaccgccactggcacgcatctgccttcacggggatttgcaacgatttggccgccgcctcagcctgtatgtgaacacggcagcggaagccatccgtgccctgtcgttacaggtgccgggctttcgccgtcagatgaacgaaggctggtaccagatacgtattgccggtgatgacacggcaccggaggcggtgtatgcccgtcttcacgaacagctgggtgagggaacggtcatccacattgtgccgcgactggccggggccggaaagggtggactgcagattgtgctgggggcggcagccatcgtgggctctttcttcacggccggaggctcgatggcgttatggggtacagccctgagtgccggtggtttttctgccaccacgatgctgttttcactgggtgccagcatgatactgggcggagtggcccagatgctggccccgaaggcaaaaacaccggattaccgcgcaacggataacggcagacagaacacgtacttttcctcgctggataacatgattgcccaggggaacccgatgccggtgccttacggggaaatgctggttggctcccgccgtatatcccaggacatcagtacccgtgatgaaggcgggggcggaaaggtcgtggttatcgggcggcaggggtaa

SEQ ID NO: 13718 - DNA, 279 bp, Escherichia coli; identical to SEQ ID NO: 4619

SEQ ID NO: 13719 - DNA, 1962 bp, Escherichia coli
gtgaacacggtggcctctgaaaatccggatgaagccgggcgttacagcatggatgttgagtatggccagtacagcgtcaccctgctggttgaagattttccaccttcacatgccgggaccattaccgtctatgaaggttccagaccaggtacgctgaatgattttctcggtgccatgacggaggatgatgcccgtccggaggcactgcgccgttttgagctgatggtgaatgaagtggcacgtcatgccggagcgtcatcacagagtgcagcggcggcaaagaaatccgaaacggcagcagcctcatcgaagaatgcggcgaaaacctcagaaacgaatgcagctaatagtgcacaggcggcagcgacctcacagactgcatcagcaaactccgcgacagcagccaaaaaatcagaaaccaacgcgaaaaacagcgagacagccacaaaggccagcgaaaaaaacgcaaaatccagccagacggcagcgaaaaccagtgagacgaatgccaaagacagtgaagccaacgcaaaggtgagcgaaacagcggcggcgaactcggcgaaagcatcggcagcaagccagacggcagcaaaagcaagtgaagatgctgccagagaatacgcaaaccagacagcagagccgtacagatatgttttacagccgctgccggatgtgtggataccctttaatgattcgctggatatgattacgggctattctccgggttataaaaaagtgaagattggcgataatgtggttcaggttgccagtgataaacagattaatttcagtcgcgcatcaacggcaacatatatcaacaaatctggcgaactgaaaacggcggaaattaatgagccacgatttgagtgtgatggcctgcttattgaggggcaaagaacgaacttcttcccgaacagtacagacccttcgaagtggaataagtcaacttcactggacgttacagaaacaggcacagatagtttcgggtttaattatggccggtttgtcgtacaggattcgattgttggtacaagtaaagcgcataccattatcggactgtattcgagtaccggaggggttgatacttcaggggacgaaaagcatgtaactatatcctgtcgggtaaaaagtgaagttgataatatcgccgttcgtattttatttgaacattatgatggggaggtaaggacatcaataggagcagcaaacctgaaccttaccacccgcataattagcaagacaggtcagacaagccgtgttacagcaaggtctgttaaggatgatgcaactggctggatattttttgaggctacattaaaagcagatacaacagaaaatacggttggtggttttgtccagtattctccggatacagggcagatggttgcatcaggggattatctcgatgtaaccactccacagattgaggctggtacaggcgcatcatcttttattgttacggggacggcaccggtaacgcgggcaagcgatatggttacagttccgattaagaataatctttataatcttccttttacggttctttgtgaggtacataagaactggtataaaacgccaaatgcagcaccgcgtgtttttgacacataccggcatcaggcagatgcggggatcgtaatggggtttggttcatcaggtgggtacgacggttttccgtattgtgatataggtggttcagaccgacgaataaatgaaaatgccgggctggaaaaaatgcttattggtatgcgggtaaagtccgaacggtccacatgtgtagtcagtaacggtaagttaagcagcgaaactaaaaccaaatgggaatatatccggagtacagcaaccattcgcattggtggacaaactacagcaggattacgccatttatttgggcatgtgaggaattttcgtctctggcataaagagctaacagatgcgcagcttggggaggttgtggagtga

SEQ ID NO: 13720 - DNA, 198 bp, Escherichia coli; identical to SEQ ID NO: 9311

SEQ ID NO: 13721 - DNA, 537 bp, Escherichia coli
atgcgcattatggcttcgtatgcgtttgaagattatgcccgtagcgcggcgagcaaaaaacagtgcccctgctgtcacggaaaaaaatttattgaaagcgaggtttttacaaacaagatccagtatccggatggtaagccaccagtgtgggcaaagtgcacaaaaggcgtgtatccgtcttactgggaagaatggaaaaaagtcagggaggtggtaaaagttgcctgtccggagtgtggcggaaagggtgaggtttccaccgcctgtaaggattgccgtgggcgtggtgtcgccattcatcgtgaagagtcggtaaaacgtggtatgcctgttatcagagattgccagcgttgtggtggtcgtggctgtgaaaggctgccatcaacggaggcatttaatgccatatgcaaagtgacgagtgctatcacgcttgatacgtggaaaaaatcagtgaaacgcttttacgatacgttggtggttcggtttgacattgaagaggcatgggcggagcggcagttaaagagggtaacgcgatag

SEQ ID NO: 13722 - DNA, 432 bp, Escherichia coli; identical to SEQ ID NO: 9330

SEQ ID NO: 13723 - DNA, 1257 bp, Escherichia coli
gtgggggattcgtatcaggaggcgagacagcgttatatcagtaatgctctggaagcctggcgtaataacgaggcgaacaaacctaaatcccggggtggaaaatcagagacggaaaaagcggaagacagtttttcccggctactgaaacagcagaaagagcaactggcactggcgggtcagaatacagaactggcgaagctgaagtaccagactgcgcagggagaactgaaaaccctgacggagatgcagaagcaggaactgctgcgtaacgcggccctgattgaccagcaaaaaatccgggaacagttgcgatcccgggaagagaccctgaagaatgataatgtggctgcgcgtgcatcaaatgaagccgaactgctggggtacgggcagggagaacgagccagggaacgcatgcgggagttgcagcagatccgcgacagcttccgccagaaggatgcggaccttcagtctcagtatcagaccggggatatcagtgaggatttttacagacaggcacgggcacagaacgcgcagtatctgagcgaacgccttaaggaccaggcagccttttatgccgaatcggatgcgcagcgtgcggactggcagaaaggcttgcaggaggggctcagtaactgggtggacaatgcatccgattacgcctctcaggcagcacagctggcaacggaggggatttcaggactggtgaataacatcacggagatgctgaacggaaacaaagtggaatggcgcaactgggcctcatccgtactgcaggaaatctcaaaagttcttatgaatgccgcgattgtcaacggaattaagacggcggcaaacggtatgtccggtgcgggaggatttattggcagcattggtgactggctgggcggtgcggtggccaatgcaaaaggcggcgtgtatacctcggcaaacctgagtgcgtacagcaacagcattgtggacacgcccacgtactttgcgtttgcaaaaggggccgggctgatgggggaagccggacctgaagccattatgcccctgacccgggcggcggatggctcgctgggcgtacgcgcggtgggcagtatgaacggcagtgccggtctggtgtattccccggtctaccacatcgccattcagaatgacggggctaacggacagatagggccggaggcggcaggcagtcttgtgcagctgattgaccagcgggtgcaggcggtgatgctgtccatgcgacgtgacggaggaatgctgagtggctga

SEQ ID NO: 13724 - DNA, 342 bp, Escherichia coli; identical to SEQ ID NO: 9277

SEQ ID NO: 13725 - DNA, 357 bp, Escherichia coli; identical to SEQ ID NO: 6160

SEQ ID NO: 13726 - DNA, 693 bp, Escherichia coli
atggacttattgccttttttactggacgcgaacctcagcgcgacaaacccacccgctattccgcactggtggaagcgtcaaccgcttattcccacccttctgtcacaggaactgaaaaactttctgaagcttaatgttaaagagaaaaatattcagattgcagaccaggtgattattgatgaaagtgccggtgaggttgttatcggcgcgaatacccgtattttccacggtgccgttattcagggtccggtagtgattggcgcaaactgcctgataggtaattatgcgtttattcgtcctggcacaataatcagcaatggcgtaaaaattggttttgccaccgaaattaaaaatgcggttattgaagcggaagcaacgattggtccgcaatgctttattgccgactcggtagttgcaaaccaggcatatttgggcgcacaagtacgaaccagtaatcatcgtctggatgaacagcccgtgtctgttcgaactccagagggaattatcgctaccggatgcgataaattaggttgttatatcgggcagcgttcacgccttggcgtacaagttattattttgcctgggcgaattatttccccgaacacgcaacttggcccgcgcgtgattgtagaacgtaatttacctaccggaacttattcactccgacaagaacttatccgtacaggagattaa

SEQ ID NO: 13727 - DNA, 774 bp, Escherichia coli
atggccgccctgaatgctgagacggacgctgttattttcaccgtttacaccggtctgatggctgcgggagcctgccagaatccggtcatagtccattgcctgtgtcagcatggaggcatacagggggacttcagcacgataagcattttcactgcgcagataccagctctcatcactgtcccggttgagggtgtagttaaaggccccggcctgcaacatattcccctggacaaaagccccttcctccgtggtggcaccgttaatggcctcaaccacctgaatacccttaccggtggtcgccagccccgtaccactgttgccggcgttcaccagattcaggatggtttttccggttgccctgccaccgtcaatgaccagtctgtcagcattgttctgcgccatatccgggcgtacacgcaggctgatggtgccattctgcccgttcaggtttttcacctgcagagttgtcggaacgaacttccctgtgcgggcggaggtgaaatgaatctgtccggcatggctgaggtcatccaccaccgactgaaccgtggcgttatcggggatattccaggtggcaccggatgtcagggtgacattcgtggggtcaatggcaccgttcagcactgtgctgccggtcagcttcagggctgtaccgcgctgagcaatgacatccgtggtgacggtactgtcgttcagcgtcagcgtgccttcattcaggttgacggctttctgggtgagtgtggtgttgctgacagtgagtgtgccacttcctga

SEQ ID NO: 13728 - DNA, 228 bp, Escherichia coli
atgcacgcgtttaccttcacggcgcttacgcttctggtaagcgttgattcgggctttcagggcattgataaagcgggatatcaccgccgcgtccgttgctgccggtacatccgggagccgcaggtcaacccgaagtgccgtcaggcggggatgaacatccagtgcgcacagcaccatctcacggatgcgttgttgccagaaggggttgtatttgtaggtcatggttaa

SEQ ID NO: 13729 - DNA, 1026 bp, Escherichia coli
atgttaactttggagcaagcagtgacaatccaaatacttcatcaacaaggtcaatctattaaggcaattagccgcgaactcggtatttctagaaatactgtgcgtaaatatttacgatctcaagtaacacctaaatatcaacgaacacaatctaaagtgagtattcttgagccttataaaccgtatttaatcaaacgtgtaaatgccgccgatccagaatggataccggctgcagtgttgtatcaagaaatcttgcaaaaaggctacacggggaaaattagaacactacaaaattatctcaatacattaaagccaactaaacaaccagagccgattaagcgatttgagactcaaccaggtcaacaaatgcaggttgatttcacaacaattcgacgtcatcacaccacattaaaagcatttgttgcaactttgggatactctagagcaacctttgttaagttttatgatcatgaacgttctgatgcatggattgatggcttagaaagtgcttttcagttctttggtggtgttcctaaagatgtattatttgataatgctaaggccattatcattgaacgtgatgcttatcaagatggtcaacatcgctggaatgctaaattacttgattgtgctaagaaatataacttccgagcacgtgtttgtaagccatatcgtgcgcaaacaaaaggtaaagtagaacgctttaatagttatttgaaatcaagttttatcgtgccattaaaagcaagtttaaaggtggttgaccttagcttagatgttgatatggcaaatgcctatattggtcgatggcttagtgaaacagcaaatcaacgcattcatgcaacaactaaagaaaaaccaagtactcgtttgcttgaagaacaacaatttttttcttcattacctttatttaatgatggttctaaaaaatctgtaattgatgatgttagcccatcatcactcatacctcatgagagtgttcaacaccccttatcaatctatgatgaattactggaggtttcttaa

SEQ ID NO: 13730 - DNA, 570 bp, Escherichia coli
atgacacatctcaatgagttatatcttatcttaaacaaatatctaaaatggaacaagtcacatttaaagtgctttgcgctcatcatgcttgtgattattttaaagcaaacatgtaatctttcttctgcatctaaagccttgcccatcaagtgcttaccacaatcattttatcgacgtatgcagcgcttctttgcaggtcagtattttgattatcgtcaaatttctcagttgattttcaatatgttttcattcgaccaagtgcaactgactttagatagaaccaattggaaatggggaaaacgaaatattaatatcctgatgctcgcaatcgtttatcgtggaatagcgatacctatcctttggacattgcttaataaacgtggaaattcagatacgaaagagcgtattgctttgattcaacgctttatagccatttttggtaaagaccgtattgtgaatgtgttcgcagacagagagtttatcggtgagcagtggtttacatggttaattgaacaagacatcaacttctgcattcgtgttaaaaaaacttcattgtcaccaatcatttag

SEQ ID NO: 13731 - DNA, 198 bp, Escherichia coli; identical to SEQ ID NO: 6538

SEQ ID NO: 13732 - DNA, 639 bp, Escherichia coli
gtggtactctgggaaatcgacctgacggtacagggtggtgagcggtattttttctgtaatgagctgaatgaaaaaggggagccggtcacctggcaggggcgtaagtatgaggcatacccgattgacggcagcggttttgagatgagcggccggggcagcagtgccagaccgtcgctgacggtgtccaatctgttcggtctggtcaccgggatggcggaagacctgcagagtctggtgggggccacggtggtccgccgccgggtgtatgcccgttttctggatgcggtgaatttcgttgcgggcaatccggaggcggacccggagcaggagctgagtgaccgctgggtggtggagcagatgtcgcagctgacagccatgacggcctcgtttgtgctggctacaccgaccgagacggacggggcgctgtttcccggtcgcatcatgctggcgaacacctgtatgtggacctaccgctctgatgagtgtggttacacgggcggggcagtggcggatgagttcgacaaccccaccacggatatccgtaaggacagatgcagcaagtgcatgcgcgggtgtgagatgcgcaggcatggtggcaattttggcggtttcctttccattaacaaactttcgcagtaa

SEQ ID NO: 13733 - DNA, 300 bp, Escherichia coli
atggaaataaaaccagaggatgagttaagcaatatcgttttatttccggtaaaagaggatgaccctcgtaatcaggttaattttctttatgagccatcggaaagaccatattgtcatcacgcctctgtccgggttgacgaaaaagagcgtcaggtccgctgtaaaatctgcggtgcagttgtggagccatttgactggatgctctctgtggcgaaaagagaaaccagactggcagatgatgtaaggctattgcgccaggaggaacaggaaaggcggaaaaatatagaaaagttaatttag

SEQ ID NO: 13734 - DNA, 501 bp, Escherichia coli
ttgcataaatatgaagaagagataagcgaaaaagaatcaaaactcactcaggcaatatcagaaaaagaacagattttaaaacaattgcatatagtgcaagagcagttggaacactattttatagaaaatcaggaaattaaaaagaaacttccacctgtgctatatggagcagctgagcagataaaacaagagttaggttatcgacttggttatattatagtctcgtattctaaatccctcaaggggattattaccatgccatttgcacttatccgtgagtgtgtttttgaaaaaaaacgtaagaagagttatggcgttgatgtgccactctatttatatgctgatgctgataaggctgaaagagttaagaaacatttatcttatcaattagggcaggctattatctccagtgctaattcgatatttggattcattacccttccatttaagttaattgttgttgtttataaatataggagagctaaaatcaagggctgttaa

SEQ ID NO: 13735 - DNA, 384 bp, Escherichia coli; identical to SEQ ID NO: 8439

SEQ ID NO: 13736 - DNA, 510 bp, Escherichia coli; identical to SEQ ID NO: 8026

SEQ ID NO: 13737 - DNA, 330 bp, Escherichia coli
gtggtcatccagacggatgatgatattttcccggttgtcggggatgggcctgccgctgaacaggtgcagcatcctttccaggtcagcaacccggtcagcctgttgcccggtgataagatgaaccccccaccggtcccacctcaccaggttgttgacgataattttactgccaaatttgcaggggcaattggttttgtaattccagctcagtcccctgaagacgttgatcacccctcgctcaaacacctcatccttattctggtgcagttgttcaaatgtgctcagaatgttcgcttcactgatttccggaaagttatcgtactccagtga

SEQ ID NO: 13738 - DNA, 207 bp, Escherichia coli
atgaataccccagtttcactgatggatgaccagatggtcgacatgtcgtttatcactcagctgaccggcctgaccgataaatggttttacaagctcatcaaggatggtgcctttccggcccccatcaaactcggccgcagctcccgatggctgaaaagtgaagtggaagcctggttgcaggcgcgtattgcacaatcccgtccgtaa

SEQ ID NO: 13739 - DNA, 198 bp, Escherichia coli; identical to SEQ ID NO: 10430

SEQ ID NO: 13740 - DNA, 159 bp, Escherichia coli; identical to SEQ ID NO: 5044

SEQ ID NO: 13741 - DNA, 141 bp, Escherichia coli
atgctgaaaggcggaatttccggtcgcagtgccagagggaaacgtatccatacccgtgccattcacagcatcgacaccgacattaagctcaatcgcgcattgtgggtgatggctgaaacgctgctggagagcatgtgctga

SEQ ID NO: 13742 - DNA, 222 bp, Escherichia coli
atgaagcgtgcagcagcacagagtgcagcgctggcggggcttttccagccgtacagtgtggggaaattcaacgccactgctgccctgggggggtacagtgataaacaggctgttgccgtgggtgttggttaccgtttcaacgagcagaccgcagcgaaagcgggtattgcagcgagtgatggcgatgtgtcctacaacatgggcgttaacttcgagttttaa

SEQ ID NO: 13743 - DNA, 213 bp, Escherichia coli; identical to SEQ ID NO: 3614

SEQ ID NO: 13744 - DNA, 447 bp, Escherichia coli
atgggcaacaatgagcatgaagttatggcggacaaacagagagcagaacgtatcaaaaaggtaattctggaacactcgacttatgaagaactggccgagaagactggcattagcgtgagtacgctggtcaggatagcgtccggcaaaactgaacctaaattcagtgacatcattcagatagctaaaattacgggtgcagacttaaacaccttagcttatggctatgctcttgatgttaaagaagaagctaccgagcggaagctaatcacttctgcggatggatatactgatgaagaaaccactaacgcacataatttcatcgtgtggaacatcaggacactggaaaaacaagatattctggcactcgcaaggcaggtttctgccttaagttcatacacttacagtactaaaatgtttatgaaaaaagcggtgtctggagaagagtaa

SEQ ID NO: 13745 - DNA, 1092 bp, Escherichia coli
atgccggacttgattactgatacattgaaagtagttacttctttttttgtggcattagtcctcaataagtttttatctatatttaggaaaagacaactttacttatcctgttggaactccttgagtaaaacctcaatatctgacaatgcaatagtaataaatgcatcagtatttaataaaggtaaggataaagaaaaaaatgtagaaataaaagtcccaaacggtatgtcttgtactgtaattgcaagtgatcatgatgcaactaccgaaggttcttttgtgaagatagatagaatattagcaaataaaaaaatatccatggtgctcttgattgaaggaacaagagttcttgataaaagtaccatgccttccataagatcagaagatactgacgggaaaacatacctttcaaaagactcagtgccaccgagtgcaggttcttttattttaggcggtgctatttttgctgcatttttcagttatatggtcatcagtatccaaacagaagacaaccctctcgcgggcccattgaaagcatataactacatgatttataacaatatgtacaattctggactttcgattaatcctataggtaatggactgataactgaaaattacaatctaagagcgaatgaataccctattgaaataatagatgccaagatagaaaaaaatcaaataatgttcaaatttagaataattaataaaacatcagaagcactgaaagtttcaggcggatggagaatatataaaaactttcaatatatttccgaacatgttgatacatttgattataaagatgaaaagaaaagagaagaagaagaaataagggtgtataagaaatacaatgtggaatttgttaatgataatggatatcttatggaaaaaccgaaagaaagggttgaagttcctgcaaattcagttggctatattataataaacagaaaatactctccaagcattacttataatgacctaaacatcgagtttaactttagtggtggttcaggtgaaatataccaagaagcagatatgctttttacagctaagaattctaatataagcagtactatattagacaagaaataa

SEQ ID NO: 13746 - DNA, 423 bp, Escherichia coli
ttgcagcttctgaccgcacatccggcacaccgtttacacagtcagcttaactatgcggaactgcgtaaaaaatatgcggttgccgatcgtgaaccaatcactattcacaccgaagatgctgctcgctttggtattgcgaatggcgatctggtgcgtgtctggaacaagcgcggtcagattctgacaggcgcggtggtgactgacgggatcaaaaaaggcgtggtatgcgtgcatgaaggtgcatggccagatctggaaaatggcttgtgtaaaaacggtagtgcgaacgtgttaacggcggatatccccagctcgcagctggcgaatgcctgtgccggtaactctgcgctggtgtatatcgaaaaatatacgggcaatgcgctgaagttaacggcgtttgatcagccagctgttcaggcataa

SEQ ID NO: 13747 - DNA, 1515 bp, Escherichia coli
atgcaacagtctaccccgtatctctcatttcgcggcatcggtaaaacgtttcccggcgttaaggcgctgacggatattagttttgactgctatgccggtcaggttcatgcgttgatgggtgaaaatggcgcaggaaaatcaactctcttaaaaatcctcagcggaaactatgcgccaaccacgggttctgtagtgattaatgggcaggaaatgtccttttccgacacgaccgcagcacttaacgcgggggtggcgattatttaccaggaactgcatctcgtgccggaaatgaccgtcgcggaaaacatctatctcggccagctgccgcataaaggcggcattgtgaatcgttcattgctgaattatgaggcaggtttacaacttaaacatcttggtatggatattgacccggacacgccgctgaaatatctctccattggtcagtggcagatggttgaaatcgccaaagcgctggcgcgtaacgccaaaattatcgcctttgatgagccaaccagctccctctctgcccgcgaaatcgacaatcttttccgcgttattcgtgaactgcgaaaagaggggcgggtgatcttatacgtttctcaccgtatggaagaaatatttgccctcagcgatgccatcaccgtctttaaagatgggcgttatgtcaaaacctttaccgatatgcagcaggttgaccacgacgcactggtgcaggcgatggtcgggcgagacattggcgatatctacggctggcaaccgcgtagttatggcgaggagcggctgcgtcttgatgctgtgaaagcaccaggcgtgcgtacgccaataagtctggcggttcgcagtggagaaattgtcggtctgtttggtctggtcggggcagggcgtagcgaattaatgaaaggcatgtttggcgggacgcaaatcaccgccggtcaggtttatatcgaccaacagccgatcgatattcgtaaaccgagccacgccattgccgcaggcatgatgctctgcccggaagatcgcaaagcggaaggcattattcccgtgcactccgttcgcgacaatatcaacatcagtgccagacgtaaacatgtgcttggaggttgtgtaatcaacaacggttgggaagaaaacaatgccgatcaccacattcgttcgctcaacatcaaaacgccgggcgctgagcaactgattatgaatctctcaggtggaaatcagcaaaaagccattctgggccgctggttatcggaagagatgaaggtcattttgctggatgaacctacgcgcggcattgatgttggtgctaagcacgaaatatataacgtgatttatgcgctggcggcgcagggggtggcggtgctgtttgcctccagcgacttacctgaagtcctcggcgttgccgaccggattgtggtgatgcgcgaaggtgaaatcgccggtgaattgttacacgagcaggcagatgagcgtcaggcactgagccttgcgatgcctaaagtcagccaggcagttgcctga

SEQ ID NO: 13748 - DNA, 456 bp, Escherichia coli
atggatgcgctgaaagctgcaggattcccggaaaaacaaatttatcaggtacctaccaaatctaacgacatcccgggggcatttgacgctgccaactcaatgctggttcaacatccggaagttaaacattggctgattgtcggtatgaacgacagcaccgtgctgggcggcgtacgcgcgacggaaggtcagggctttaaagcgagcaatatcatcggtatcggtattaacggtgtggatgcggtgagtgaactgtctaaggcacaggcaaccggcttctacggttccctgctgccaagcccggacgtacatggttataagtccagcgaaatgctttacaactgggttgcaaaaggtgttgaaccgaccaaattcaccgaagttaccgacgtggtgctgatcacgcgtgacaactttaaagaagaactggagaaaaaaggtttaggtggtaagtaa

SEQ ID NO: 13749 - DNA, 360 bp, Escherichia coli
gtgctggcagatctaagtgatgaaggtccatatgttaaagcaactatttatattagtaacgataataaatcacttaatgaccatgagcaagatcatataactggaatgaatctaactgaagctgctaaacaaatatgctatagctacatctccttatacatgaaagaaaaaaacaactgctatattccaataaagctggaagcaaacttttacagttatgtagaaaagcatatacctgcagttttagttataaaaaaggtaacgttacaggacaacctttacttatttgatgttgatataatccagaatgagaaaacactggcaaccgttaatttaaaactaggaggagaatatggataa

SEQ ID NO: 13750 - DNA, 225 bp, Escherichia coli
atggataaattaaaagagttattaacagaggtgtttggcgttccagaaaacaatatccaagacaacaaatcccttgagcttataggccttgattccatcagtattgtggaattccaaattgaaatagaaagagcttttaagattgatgaagggaaacttgctctggtcaatcaggataccctcaacacaattaaagaaagagtcaaagtgctgcaaaatgtataa

SEQ ID NO: 13751 - DNA, 1227 bp, Escherichia coli
atgagaaataaggttgtggttacaggcatggggattatctcctctgcagggcacacaccggaagagtgccatttgactctattgaagggaaaaggaatgactagacttgactcgcgtctgcaaggtctgaaagtctcatggtcttgtcctgttcagaatttcgcccctgcacagcatatgagtaaatctttgatctggcgaacagacccttttattcaatatgccctgtatgcagcctgtaacgctgttgaagatgcaggattaaaaaaggggtatagagggctgaagacaggcatcgtactgggcaattctcttgcaggcataagctctttggaaaccctgaataaaagagccttccaagaaggaacagcaacaattgggtcactgtatctcttgtccacaatgggcagcatggcaacaggaaatatagccattgaacttggtatacatggaccaacttatcttacgggtacagcatgctcttccggagcagatgcaattggaacagcaagtcgtcttatcgagagcggagaatgcgatattgttattgccggtggcagtgaagcgccgattacaccactggttgtttcgtctttcacgaaactcggtgctctctcaaaaaatactgatctgccgcatgcgtcacgtccgtttgacaaagaaagggatggttttgtcatctccgaaggtgcggcgatgatggtattagaaaacgaaaaaacagcgatggagcgcggtgccagaatttatgcaacgttatccggatacggatcagccaacgacgcgcatcatattacttcgccagcaccagatggttctgggctatctaaggcaatttatagagcactggaagatgcttcgttatcatcgtgtgatattcagtgtattaatgctcacggcacatcaacaccactgaatgattaccttgagggaaatactttatctgcaatattccctgatcatccttgggtgacatcaacaaaaggtgttaccggacatagtcttgctgcaacaggtgcaatggaagctattttttcagtcttgaatattatacatgatgaaatcactcctgttgctggcttgaaaaatattgatgaagcaataaaaataaatattgtaacggaagttattaaaggtgcaggcattaaaaatgtactcagcacatccctgggatttggtgggcaaaactctgctcttatcttttctaaatacaacaaaaggttataa

SEQ ID NO: 13752 - DNA, 699 bp, Escherichia coli
atgatgaatctgaaaaaaattaaattatttgccattgacagtgatggcgttattctgaatgacacgtacagcccggcgatcaaaattttcgtggaatcttttggcgttagctattcaccattaattgaacgcagtgtttggggatcaccacaagtgacagcagggcataacctcgctcttgcctgtaaattaccttattcgggtgaaaaagtcattaaagacttttttaaaaccagagaggaatacctgaaaaaacatcctgttgaagttcttcctgacattgaatcaacgctggctttgctaagtagtacgggagcacgtattacctgctacggcggaagaaataaagagtacagcttcgataggtttttaaaaccttttgaaaaatattttgataaggaaatgccctatattgatattaactctttccgcccgggtgtatatgaaatagtcaaagaaaaattcaaccttaattttgatgaggttgtttttattgatgacatcaatcgagttgctgaagtttgcaaagcgttaggtactgggtttatcggggttcctgcatccatggctcataactatcagcgagaagaaatggtcagaacaggtgtaaagtatatggtaaatcgttttactgatattacagataaactcattcatgaagttgacgaacatctggcttcgtcagacctctggaaataa

SEQ ID NO: 13753 - DNA, 1167 bp, Escherichia coli
atggaaaagttcaacaataaccatctgatttatcttataccgataatatgtggttttacagcagcaaatatgtattatgttcaacctttggctcctgtgatcagtagtgagttgatggtttcttatgagagagcctccatgctgtattcattcgctcttactggtaatgcgttatcattattttttatcatacctttaggtgatttttatagtaagagaaagttgatttcgcttctctattttctttctacaatgtcattactgatttttttcataacgaagagttattacttattgtctgcgtctgcagttcttatcggaacaggaacatccgctatacctctgattacagctggcttgagcaagctgcagggaggaacccggtatataggcagaattatggctggagttttgaccggaatacttttttctcgttttctgtcgagtatgttaagtgaaatctggggctggaagtcagtatacgctctgtctgctctcatgatgttcatgtccggcatcatacttttcaaagattatcccgcccccgacaataaggaagtgaaaacacatgcatcttatttccatattctatttctgaatatcaggggactcacacaggactctgttatagggcattactgttttaacgcatttgccattatgtttctgttctcagctttttggagtaatgtttcaatgtatctgacaacggctttccatttcagtcagacgcaagtaggattattctccctgaccggtgttgccggcgcctcatctgctcttttttcatcacggatactggaaataataaattatagaaataatattcttttctttttagttgtggcaagtctgctggcaatgggattttcaggaaaccatttatctattaccgtcgcgggtgcacttctgattgatgcatttattcagttaatacatgttaataatcagcgtggactgtttctttcctgtcagggtaacgaagcacgagcggcgagttgctatatgatgagttttgttacaggaggtgcgattggtggatttatctcatcctatctctatgcaatatttggatggaatgtagtgctgattagctgtgcaatcatcaccatgattccgttatttatcaaaacaaaaacacgagaaaactttaatgaacctaactag

SEQ ID NO: 13754 - DNA, 720 bp, Escherichia coli
atgaacctaactagtacacctcaaagtaaaagagagcttctgaatcgttacttgtccttaatgacaggagatgaaaaacatgcgccttcatcaatctccactcttgatgtgatccaagtgttgtatgaaaaagtgctgaattattcaccgggacaaattcaggatgaatatcgggatcgtttcttcctttcaaaggggcatggtcctatggcattttatgccgtattggcattaaaagggtatatttccccggaacaactggaaacatacggtgaatatgatagcaaactgggttaccatccggaccgtaccaaactggattgtgttgaaatatcaagcggatcactaggacacggtttacctttagctattggctcgattatggccctgagagccagaggaattacaggccccagacactgggtacttatgggagacgcaggacttgatgaaggctcgaatttcgaggcaattccctttgctggcaggcgtgggatatcagaactaaatgtcgtggtcatagataatgactcgtctactctcggctggcctggtggtatatcacaccggttttccatagagggttgggaagtcagcagcgttaatggcagggatcatgacgaactttaccgggcgtttaccaaagagcatccacataaaccccacgccattattgcaactgtagaatccaaatcaggtaaacctcgcaggcttttatag

SEQ ID NO: 13755 - DNA, 930 bp, Escherichia coli
atgaaaaaagttttaacttgggatcaacgatttgccgaaataaacgcaatgaggcaacgttttgctgtagtcatgtcagatctgattcgggaaaatgataatattgctttagttcttgccgatattaccgccgagagatttagtgatgtcttaagcgattttcctgaccgagtgatcaatgttgggatcagggaacaactgatgattgacatgacaggcggtttggcgttatcgggtatgcgtccatttgcacacacttttgccagttttcttatagaacgcccctttgagcagattaaaatcgcccttaaccatcaaaatgttggtgctgtcctggtcagcgctggggcttcttatgatttgtcagttgatggtcggacacatcagtcaccagcagatgtagccttacttaatacattagcggactggaatatcattattccgggaaatgcagaagaagccgaatacgcccttcgtatggctgcaagtgatacaggcctctattacattcgcctgtcaacagaaacaaataagcaaacatactggtcaggtgaaaacggttttacagtgctgaaatcaggtcatcagggtactgtcattgctgttgggcctgttgctgacagggtattagcatccactgaggatcttgatgtcactgtactgtacactccagtgatcacgcctttcgacactgccacattacggaaaacactttccgtacctgatatcgcaattgttgagccatacctagaaggtacatctgcacattctatttctaaagcattatccgatatacctcacagattattatccattggtgttaagcgccaagaactcaggcaattcgggaccccggaagagcacatacgggcacacggtctggatacacccggattgaaagaacgtctttcagttttctatcgccgctaa

SEQ ID NO: 13756 - DNA, 615 bp, Escherichia coli
gtgattaaaaagataatagaggaatatcttaagcaaatacacgcagataaatattcagtaattacgattaatcatcttgatgaggtatcgattatctcaaatttgccatatcactgggcgcaggattttataaaaaggaaattgcatttacgaagccatatcgtattaaaggcgaaaaataaaataacacctttcaagtggtcctcggtaaatacagctaacgaagacattaaattcatgtctaataaatatggtattcgcaatggagtaagttttgtcataaaaataaattataattctgttatttttactatttattttaatgatgatgatgattttattaaagtgtacgccagtgaaaaacataagatattgtttgatgtactgagcatttttgaacatcattacaaacaaaaaataaaatatacttttacaatacgggaaaaggaggttatgaatttacttaaatttggtaaaacttacacagagattgcactgattcttggtgtaagtgaaagaactgtcagatttcacattaataatgtcctcaggaaactggatgtgacatctgtccgctatgcgatttttaaagctacatccgaaggtttgatctga

SEQ ID NO: 13757 - DNA, 927 bp, Escherichia coli
atgtcagagtcatctcaatcattatttatgattcataatatgccttcctgggtcactatacctgaagccgccgaaataacgatgaaaactttaaagagaaaaatcattcctggtgacatttatcgccacgcattgagcggagacattcttctttcaatttattttcagtccccagttatcattaagaagatacagacatttaatggaaaagttaaattcagacagtttgacggtggattgattgataaactgtgccagcttgacaagaatgggtttatttatgagcacaacttaactctttgcaccgaaggtaaatatatccacccaaccccgcgaattatagatacaacccttatgggttacgaatatgttctcatccagagaattcttgctcatgagtttaaatttcctttgcctgttacaggtgcaaaagaactcaactatggaattacagttaaactatctggaaatatatttcagacttttgaaaaaatgacatgggagaaaagagttgaaaatcaattaggccaacttcctaaaaaagccgcaatgaacgttatggctcaactcgctgcggagaaaattatgaaatacagacaaattgattatttccctctttataacttaccctctgatgcctgctttgtaattcgctatgccgaagttgaaaaactaattaatctgtataaaaaggatataaaaagcaccaaatcatccccgagaataaccacgcctttatctcgcctattctggttggcctgcaagcacaatgatactatcagcccgttacttaaacacccttataaactcctctcaatttttgagcagtgggcatcagatgatggcatcaaagaagaattgaatgcagaaactctaaaaagagctctggaacgtgggtcaccatcctctacatccttattcagttaa

SEQ ID NO: 13758 - DNA, 186 bp, Escherichia coli
atgacatcccatcagttactacgcctcaggcaggttgaacaaaaaacagggttgaaacgctcacagatatatctatatatgaaaaaagggacatttcctcgctcaataaaaataggaccatctagtgtagcctggctcgaatctgaaattgacgaatgggtcaacgaaaagttatccgctcgctga

SEQ ID NO: 13759 - DNA, 150 bp, Escherichia coli
atgagaacaaatatgctttcaattatgaatcctacttttcagtccaaaaaagaaatctcacaccagtataacaaggacagatatgtatccaggctatatcatagcataacccacactgaaaatcagattgactttcttaatgacatttaa

SEQ ID NO: 13760 - DNA, 585 bp, Escherichia coli
atgtacccgttcctgaattatattatgctaactgtagttctcagggcactacgcgaagggaacataaactactgtgaagcaatgggattcactcacgacgaaatgaatttgattggaaaattatcagtacccgaacttattagtatcggccttttatccacaccatttgtcgatattagtgttcgacatgatattctacgacaatttctcatattatcctgcaatgaaagcagacgtcatgaacagctaaatagagccgtcagactcggtggctcaattgcactcatgaaccgttattttggtattagctctaaagaagtctgcgcacgtcgacggttacttggtatcgccgtaccaaacgggagaacgcccactcctgatgaagaaacagatgctgaaatctggaatcagtggaaaaaatatcaagtcgaaaatattgattcgcctgaagctctggacgcaatgatgcaggttacagaaaacctttcatcatgtactgacagtccttctctgaccgttgtctggaactgcatcatgcattacgaaagggaagcagcagtaaggagaatacggcgtgccagatga

SEQ ID NO: 13761 - DNA, 636 bp, Escherichia coli
atgctttccaccactgctttcctggcggtggctatgcaatgcgccgccaccgttcacccttcgacatccctcgatgtggcaagggtggagtccggttataacccctatgccatcgctgaaatcgtgcccaggcccgaacgaaaacccggcgataaaggctttattactcacatgccaaaaagtaaggaggatgcagtcagcatcatcacgcagatagaggcgaaaggtcgccgctactctgttggcctgatgcagataaccagcactaattttaagcaattgatttataaaattcaaaatccagaaacagcagaatgggcggcaaaaatgacaggttcaatcctggtcgatgatgaaatgaggaaagtaaggactgatttatcattaacggaaaaaatggatacagaccgtatgataagacaggcagaaagttactacgttgacagtaatatgtttttaaatctccctgaaaaggtcggctttgtatttacaacaaaagaactggcgaaggcaacaaagatgtcccctattctggttaaaaagaaacatattgaattgctgtcatttgaaaatcctcaatctgaacaaccacaaaccgaaatcaatgaacaaaataagccatctattaatttgtaa

SEQ ID NO: 13762 - DNA, 765 bp, Escherichia coli
atgcttatacataacgtatcagagagaaaaaaagcctctgctgacaaaatgctctcccttctaaactttctgaaagaagaaacttattctgattttaacacactaagacgtgttctcggctttagcaaaaattctcacagcccattatataaggtactaaatagagcaattaaagctggcttcatcatcaaacacgaaatgcctggggtaaaacaaaaaataacgatttgggggataactatgcaggggttagcaatggtggtcatgcctgacgatgctgttttccctggatactttgaacccggcaaactcaaatactggactctggaacatcgtctactaaatcagagggtcagaattgcactggaagagaaaggcgggcaaagctggcttaatggtgatcggggggagtttatagcgcgttatcctggtgttcgccatcgccctgacgggattatcacgttagatagcggcgcaatcgtcgctgtcgaaacagagcgctcaatgaaaacccgcgcacgctatatcaacatcattaacagccatctggcggccagcgatgccggacactggcactacgcgatgtatgtcatgccggatgacaaaaccaaaacatcgttaatccggctgtttgactccatcaaaacggtaatgaggaacaacgttccggtgccgttcgacacgaggaaccgcgaaatgtttcttttccgcaccattgatgaactggagcaagcaaccgccagcggtcgaagcaaaacctgttaa

SEQ ID NO: 13763 - DNA, 1512 bp, Escherichia coli
atgttcacggcaacagaggcagtcccggtagcaaaagtggtggcaggaaataagcgttaccccggcgtcgttgcgctggataacgttaacttcacgctcaataaaggcgaagttcgcgcgctgttaggcaaaaacggtgcgggaaaatcgaccctcattcgaatgcttaccggtagcgaacgtccggatagcggtgatatctggattggcgagacgcgactggaaggtgacgaagctacgctgactcgccgtgccgctgaactgggggttcgtgcggtttatcaggagttaagtctggtggaagggctgacagtggcggaaaacctctgcctcggtcagtggccccgccgcaacggcatgattgattacctgcaaatggcgcaggacgcccaacgttgcttgcaggcgttgggcgttgacgttagtcctgaacaacttgtttcaacactaagcccggcgcaaaagcaactggtggaaattgcgcgggtgatgaagggcgagccgcgcgtggtcattcttgatgaacccaccagctcgcttgccagtgcggaagttgaactggtgatcagcgcggtgaaaaagatgtcggcactgggcgtggcggtgatttatgtcagccaccggatggaagaaattcgccgcattgcctcctgtgccaccgttatgcgcgatggtcaggtggcgggcgatgtgatgctcaaaaacacctctacgcatcatattgtgtcgctaatgctcgggcgcgatcacgttgatattgcgccggttgcccctcaggaaattgtggatcaggccgtgctggaagtccgtgcgttacgccataagcccaagctggaggatatcagttttacactacgtcgtggcgaagtgctcggcattgctggtctgctgggggcagggcgcagtgaattgctgaaggcgattgttgggctggagacgtatgaacagggcgaaattgttatcaacggcgagaaaatcacgcgccccgattacggcgacatgctgaaacgcggcattggctatacgccagaaaaccgcaaagaagcggggatcattccctggttgggcgttgacgaaaatacagtgctgaccaatcggcaaaaaatcagcgccaacggtgtactgcaatggtccaccatccgccgcctgaccgaagaggtgatgcagcggatgacggtcaaggccgccagtagcgaaacgcccatcggcacgctttctggcggcaatcagcaaaaagtggtgatcggtcgttgggtctatgccgccagccagattttgttactcgacgagccaacgcgcggcgtcgatatcgaagccaaacagcagatttaccgtattgtccgcgagctggctgccgaaggaaaaagcgtggtgtttatctccagtgaagtggaggagttgccgctggtgtgtgaccgcatcctgttattacagcacggcacgttctcgcaggagtttcactctccggtcaatgtggatgagctgatgtccgccattctgtctgtgcactga

SEQ ID NO: 13764 - DNA, 243 bp, Escherichia coli
atgacagtgcgggagggcgggcctcccggcgggttattgcgttggctgttgtttgatgacattaatcatccacggtacgccaaatttatcggtgactttgccaaagccatgcgcccagaacgtttcctgctaggccatttcgatttttccgttggcggcaaggttatcaaaccagcgttttccttcttccacctgttgagaatcgagcaccagcgtaaagccggagtagctggcttttcctga

SEQ ID NO: 13765 - DNA, 558 bp, Escherichia coli
gtgggtaagcatcactggaaagtagaaaaacagcctgagtggtacgtgaaagctgtcagaaaaactatcgcagcgttgccgggtggttacgctgaagcagctgactggctggatgtaacagagaacgcattatttaaccgccttcgtgccgatggcgatcagattttcccgctgggatgggcaatgattttgcaacgtgctggtggaactcacttcattgctgacgctgtggcgcagtctgcaaatggcgtctttgtgtctcttcctgacgtcgaggatgtggacaacgccgatattaaccagcgtctgctggaagtcattgaacagatcggcagttattcaaaacagattcgttcagcaatcgaagacggtgtagtggaaccgcatgagaagacagcaattaacgacgagctgtatctctcaatttcgaagctgcaggagcatgcagcacttgtctacaaaattttttgcatttcagaaagtaatgacgcccgcgagtgtgcagctccgggcgtcgtggcgtcgattgcttctggttgtggagaaactaacgcatga

SEQ ID NO: 13766 - DNA, 261 bp, Escherichia coli
atgcaatcaccattacgaaatgtgcgtaaggcgcatggtttcactttgcagcatgttgctgcgggtgttcaagtcaatccagcgacattgagtcgtattgagaggctggagcagattccatctatcgagcttgcagaacgtttagccaatttttttaagggtgaagtcagcgaaatgcaaattctttatccggcacgttttcaatctagccaaaaccagaatgggtttaaaccacaggaacaggaggtgaaccgtgggtaa

SEQ ID NO: 13767 - DNA, 648 bp, Escherichia coli
atgaaaatcgccgatctcgctgaagcaataggagtagatgcggcgaacatctcgcgcttagaaacgggtaagcaaaaacaatttaccgaacaaacactgagtaatattgccaagagcttaggtgttgatattgctgatctctttacctctgccctcaaaagtaatactgtatataaaaacagtaataatgaggatgttgcgcaggtgaaggatgtgttccgtattgaaatgctggatatcagtgccagtgcgggaaatggccttatccagggcggtgatgtcattgatgtgattcatgccatcgaatacagaactgataatgctgtatcaatgttcggcggacgaccggccaatcacatcaaagttatcaacgttcgtggggacagtatgtgtccaaccattgagccaggagatctcatcttcgttgatgtcagcatcaatcagtttgatggtgatggtatatatgtctttggttttgatgacaaaatatacgttaaaagacttcaaatgattcctgacaaactgctggtgatttctgataaccagatttaccgtgaatggggaattactagcgaaaacgaacaccgattcatggtctttggaaaggtcttaatcagtcagtcgcaaacccttaagagacataattaa

SEQ ID NO: 13768 - DNA, 384 bp, Escherichia coli
atgccggttaatagtcaagattttctcggttttgcaaaagactgtcatcaacgtaatgacgaaatcggctatcgaaatgctatagcaagatcctactatggcgcttaccatcatgtcttgccttgtatggtaaacgggccgaaagacagtcatcaggggctaatcaattatttgcagggtgatgcttcaagaggaagtgaagtatatgaagctagatatctaaaagggattagttttatcctgagtcaacttaaagctcagaggattgttgcagactatcgacttgatcaatcggtcacttctaaacagtctgaagttgcgattctaacaactgagaggctctttgctaagtgtacggaaatgcttaaatcgagagcctcctaa

SEQ ID NO: 13769 - DNA, 816 bp, Escherichia coli
atgttgcagccagcaaaaaaagcatcagttattagcgcggggctaactaaatacctcaaagatggagtgaggattgatgactttaactttagaaggatgttacgtgagattgaagcacttagagatcctgtctctgaggactatcttttagcgttggtctatggtgcacatggtcaagtgaatgaggcgataggcttctttgagcgttccttgcaggtatgccataataaggttgttgcaaagaattttcttgttttcttgtcagattacggtacgttgaagaaaagctttgaaacaagcattaagcttgctgaaagcttcgtatccccgtttatttatcttcaagcttatgaaaactccctctttatggggaaaatggcgttggcggagaagtatttccagtcatactctaaattgttcggagataaggagcctgaaaaaatggacaacaattttgatgaagttgtttcccaggtcgaatcctttaagcaacgtgccgatctttctggtttagaatatgaacttattttcaataatgtagccaatgtcatggattctcagaaggttcatctttcgggaatgcgtttttataatatttcggaagagaaagtgaatgcgattgtattcatgacaaagtcttctgatgctgaacaaatcgctgatatgaatattgagcttgctttttcaatggctgagcacgattgtttagtcggtaaagattttactgtttggtttgaatgtaaagacactcatattgagcagaatgctatctccgaattaggtctaattacccggagggttgcacatgccggttaa

SEQ ID NO: 13770 - DNA, 249 bp, Escherichia coli
atgcatgcacgaaaggcggtactggcagataatccggaattgatcctgcgtgtgctacaactgaaatttgacgagtcactgtcgtacccgcgcatttcagcgcagaccgacgtcagcaaaaccgccattttttctctggtgaggcgatttcaccaagtatccactgaccggtctctttctggtgaatattccttcgggcaacttgcccggactcttttcctgggcgatctccttcagccccgacagtaa

SEQ ID NO: 13771 - DNA, 1257 bp, Escherichia coli
atgtattcatttgttaaaccgtttcctcagtatcgttggagatgggcttcaatgactccatctgaaagtctaaatattccagaagtcttctttggctgtttacgtgttcttgcattaaatgaaggtaagaacgtaaatagtaaagatatttacagacttctagaacaggttgaaaaagacattaaggactataatgatttaaacgtatcattagcacgttctgaagaaagaaatctttttaggaactctggtcagtattggaaaaatacaggcactcttttaagtacggagcatggaataaagctaactaatttcggacgctcctacgcttctggggtaattactaaagatgagttttctgctattgtaattaagagtatggaacttcctaatccatttattgaaaatgatgcggttattactgcatggcatcacaaaggcattaaaataaaaccactggaattgattttgtccattatcagtcatctttacaattttaaatgcgcgcaagggtatttaacaactaaggaattggtagaaatagtaataccaatggttggtaacaaagctgtcgaatatgatatttataaagtaatacttgatggtcgtcacggtaaacatttagagcgtagttcttggaaagctaatgaaaagtctaacgatcaacggatggctagggagtttctactttttttagaaaattatggatacctaaactccagacggtctcagaatgaaagggcaaccaatttaactcaagaattctatctaacagaatatcagtattctttagttaaatcacttcttaattctcctgatatatcatacaattcaatggctccaagcctagtattatcgcaaatttctgaaactacagatgtaatggccagaaagcgagctcttacagagattaccttgcgacctaagcagactgagtttagaaagaaactgatggaagcatattctggtaaatgtctactgtctaatgcaagtataagcgaagtattacaagcatgtcatatcatacctgtgaaaaataatggtgatgattctgttggcaatggttttattttgcgttctgatttacatcttttatacgactcgggccatataaaaataaatgaagatggctctgttgttttatctgacaacctaaaaaaagatattttttatagtaagacaataccacgcaaggtgaaactaccttcatttattaatatcgagaatatacgaatcaggaatgcatacaatatgtga

SEQ ID NO: 13772 - DNA, 933 bp, Escherichia coli
atgaaagttgtttcattgttctctggcgctggcggattggacctcgggttaaaacaatctggacttgatatcatttgggcaaatgatatctatgaagatgcggtagatacctataagagaaatataggcgaacatattgttttaggtgatattgccaatatcaattcatctgatatacctaattgtgatgtcgtggttggggggtttccatgccagggattctcagtagcaaatatgaacagaaaatcagaagaccctcgaaacaaattatatttagaaatggtccgcattattcgggataaacgaccagcatattttatagctgaaaatgtcaaaggtatattatccttggataaaggccttgtcatacaaaaaataacaagtgattttgaatcgttgggatataatgttaaatacagccttttaaattgtgctgattatggtgttccacaaacccgaatgagagtcattatcttaggtgtaaggaaagatttgcctgatatcgaaaactttccaccacctaaaactcatgaaaaagaagggataaatttgcctaaatggatttctgtaggccaagctttacaacggtttactgaaccaagagttgatagtcagttcaaaaaccatgagcattcattgtacaagcttacgtttaacgggcatctgggtcacaggtttatggacccggataaaccggcgcctacagtaacaggtcgtggagatgagaaaggtggtgtagttgtattgcaccatcccagcaatgagagaagaatgactgtcagagaaattgcggcagttcagtctttccctgatgacttctttttctgcggtagtaagacgtctggatatcgacaaatagccaatgctgttccacccaaactaggtatagccttaggtaaaatgttaattgagcatcataaaacgatagaatag

SEQ ID NO: 13773 - DNA, 945 bp, Escherichia coli
atgaaagtcgtttcattattttcaggagctggcggtcttgaccttggttttaaaaacgccggatttcaaatcgtttgggcaaatgatattgactctgacgcagtgctaacatacaagaaaaatattggtgatcatatcgtcttaaaagatttatctcaaattgatatggatgatataccggattgtgatgtggttattggtggatttccttgccaaggtttttctcaggcaaacctcttaaggaataaagacgatgaaagaaatcaattatacttagagtttctcagagttgtgaatgcgaaaaagccaaaattcttttttgctgaaaatgtaagggggattttaagcctagataatggtacggctattgaaaaaatagaaagtgatttcaagtcactaggatacaaagtcaaaaagcagttatttaatgtcgccgactatggcgttcctcaaatgcgataccgagtcatcattgtcggtgtaagagatgatataaaagtggaatatatttatccacaaccaacgcactcttcaccgaagaaaagtgataagacaggcctggcaccatggatcagcattggcgatgccctccatgatatcccagaaccagattctgagaatgacttattaaatcatgtgtattcaacttataaaataactaatagaaatttcacgggacacagagaaactgacccaaataagccatcacctacaattcttgcaagaggaaatggtaagggtggcgtttgcgcgattcaacatcccaaaaatcatcggaggatgtctgttagagaatcagcaattatacaaacttttcctttggattatgagtttataggaagtatgacatcttgttatcggcaggttggtaatgctgtccctgttttatttgctgagttattagctaagagtttaaaaaatacacttgcaggtgatgataaatga

SEQ ID NO: 13774 - DNA, 1608 bp, Escherichia coli
atgtatacgcgaaatttattatggctggtcagcctggtaagtgcggctcctctctacgctgctgacgttcccgccaacacaccgctcgccccgcaacaagtctttcgttacaacaatcatagcgacccaggtacgctcgacccgcaaaaggtggaggagaatactgccgcgcagattgtgctggatctgtttgaaggtctggtatggatggacggtgaaggccaggtgcagcccgctcaggctgaacgctgggagatactggacggcggcaagcgctatattttccatctgcgtagcggtttgcagtggtccgacggtcagcctctgacggcagaggattttgtcctcggctggcagcgcgcggttgacccgaaaacggcaagcccttttgctggctatctggcacaggcgcacattaacaatgccgcagctattgttgcgggtaaagcagatgttacatcgctgggtgtcaaagcgacggatgatcgtactcttgaagttacgcttgagcagccggttccttggttcacgacgatgctcgcctggccgacgctgttcccggttcctcatcatgtcatcgctaaacatggcgatagctggagtaagccagagaacatggtttacaacggtgcctttgtgcttgatcagtgggtagttaacgaaaagattactgcacgcaaaaatccaaagtaccgcgatgcgcaacatacagtattgcaacaggttgagtatctggcgctagataattcggtcaccggctataaccgctatcgcgcgggagaggtcgatctcacctgggttccggcgcagcaaattcccgccattgaaaaatcactgcctggcgagctacgaattattccgcgtctgaacagcgaatattacaacttcaaccttgagaaaccgccatttaacgatgtgcgagtgcgtcgggcgctatatcttacggttgatcgacagcttattgcgcaaaaggtactggggttgagaacgcccgcaaccacgctgacgccgccagaggtaaaaggctttagcgcgacgacgttcgatgaactgcaaaagccaatgagtgagcgcgtcgcgatggcaaaagtcttgctgaaacaggcgggatacgacgcctctcatccgctacgctttgagctgttctacaacaagtacgatctgcatgaaaagaccgcgatagcgttgtcttccgaatggaaaaaatggctgggtgcacaggtgacgctgcgcacaatggagtggaaaacctatcttgatgcccgacgagccggtgatttcatgctgtctcggcagtcgtgggatgcgacgtacaatgatgcttccagcttcctgaacacgctcaaaagcgatagtgaagaaaacgtcggtcactggaaaaatgcgcagtatgacgccttactaaaccaggccacgcagatcactgatgcgacaaagcgtaatgcgttgtatcagcaggcagaagtgatcatcaaccaacaggcaccgctgattcctatctactatcagccgttaatcaaactgcttaaaccctacgttggcggttttccgctgcataatccccaggattatgtctacagcaaagagttgtatatcaaggcacattga

SEQ ID NO: 13775 - DNA, 1305 bp, Escherichia coli
atggactttgaatatatctaccccgtcttaattttatttggcagttttgccgtcatgctggcaataggtgtgccaattacttttgcgattggtctttcttcgctgttatctattattactgccttaccacccgatgccgccatttctgtgatttcgcaaaagatgactgtggggctggatggctttacgctattagccattcccttcttcgtgttagccggaaacattatgaataccggtggtatagccagacgactggttaacctggcgcaagcattagttgggcgtcttcctggctcactggctcattgtaatatcctcgcgaatacactgtttggtgcgatttcaggttcagccgttgcgtcagccgcagcggtaggtgggattatgtcaccactgcaagaaaaagagggatatgatccggcgttttcagcagcggttaatattgcctctgcacccattggcctgatgatcccaccgagcaatgtgttgattgtttattccctcgccagtggcgggacttctgtcgctgcgttgttcttagctggatatctgccgggcatcctcaccgctgttgccttaatgtttgtagctgcactttatgcccgacgtaaccattatccggtggccgaacgcatcaattttcgtcagtttttacaagtattccgcgaatcaattcctagcctgatgcttatttttatcattattggcggtattatcgccggggtatttacgcctacagaagcatcggcaattgcggtaatttatagtttagccctggcgatgatttaccgggaaatcactcttaagaagctcaatgatattctgttagattcggtagtaaccagttcaattgttctgttactggtaggctgctcgatggggatgtcatgggccatgacgaatgctgatgttcctgagttgatcaacgaactgattacccgcgtttcggataacaaatgggtcattctgtttattatcaatatcattctgttgatcgtcggtacctttatggatatcacgccggcgatcctgatatttacacctattttcctgccgatcgcccagcatctggggattgatccgattcacttcggcatcattatggttttcaacttaaccattggcctttgcacaccacctgtcggcaccattctgtttgtggggtgcagcattggtaaggtcagtatcgacagggcaataaaaccattactgccgatgtttctggcattgtttgtagtaatggcaattatttgttatttcccgcagcttagtctgatgctgccaggattattttcgacctga

SEQ ID NO: 13776 - DNA, 1044 bp, Escherichia coli
atgtcagggaacgaaagtatcgatgccgcccactatgatcaggtaaccacctggcctcgggacgggttacaggcagatattgtccatattggttttggcgcttttcatcgcggacaccaagctgtctacacggatctcactaatcaactttcggacacccgctgggggatctttgagatcaacctgtttggtgatgctcaactgatcgaaaacttaaatgcgcaaaatgggctgttttcggttgtggaaacatctgcatcgcaatctacctcacgccttgtgcgttcggtggctggcggtattcatacccccagagatggcattgccgcagcaatccataaactggctgaacctcaggtaaaaatcgtttcattaaccatcaccgagaaaggttattgcctcgatccgcaaacacgttcacttgatctcaccaatggattaatccaacacgatctacaaaacccggatgcgcctctgtcagctattggcgtgatcgtctgtgctttgcaacaacgtaaagcgacaggactcgccgcttttagtgtgctctcctgtgacaacttgccagacaatgggcatctgacgcgcaatgccgttctcggttttgcccgacaactggaccagcccctggctcagtggatcgaagaaaatgtctcatttccaggcacgatggtagatcgcattgttccggcaatgactgaatcgcaattcgccttactggaaacgaaaaccggttatgccgatccctgcgggatcgtctgcgaatcatttcgtcagtgggtgatcgaagataattttgtgcgcggacgaccggaatgggataaagccggcgcgatgtttgtcagcaatgttcagccttatgaagagatgaagttacgcatgttaaatggtagccattcatttctggcttataacggctcactggctggctatgagtttatctggcaatgcatggaagacgctaattttcgttccattacccaccaactgatgattaatgaacaagcccgaacacttaatccagacttaaatatcaacatctag

SEQ ID NO: 13777 - DNA, 837 bp, Escherichia coli
atgatgagaaaatatttcccgcttgaggcgagcgagcgtctatttgttgcgattgaagaagatgatgttgttgatgcacaggtcagtttgccgccgactatcgcactaagttgtaccaccgaaatcatccatgataattacgcgttatgcctgaaattctggctggatggtgttaatcgtcaggagttactgcgtttaatccgcaaacaggcgaaaggcgatgagctgacgacagacgagcgcaaacagtttaaatacatgcgagcgcgctacaagcatctgcgttttgcgcaacggctgtatttaaagaagcatcaggccggatttttattcggcaaaacgaccgtttttcttgggcattttcaggatggctttcgtaacggtaagaaaaatattgtgtcgttttacggtaacctgttacgtgtttatttgagctcccctgtctggtggctggtgaactattcattgcgccatagccagttagaaaccgtgaacggttttatcgcctaccgccagaagcaaatgtacatcctgaaagagattattgctaaaccgcaactaactggcagggaatttcatgatgtgcgaaaaatcatcagccagcaggtttcttattacgacaccttaagatcgcttgatcctgaaaataaagaggcgttactgatttcccgttttctcgccgccattaatggtctgatgggggataagcacgacgacatggtggcggatgatatggataaccgtcggtcatatgatgcaccggtggcgctggatagcgatattcgccagcgtttagaactgcttatttcgcgtttcccactatatccggagcaataa

SEQ ID NO: 13778 - DNA, 399 bp, Escherichia coli
atgaatgttttcagtcgctatttaatccgtcacctctttctcggttttgccgccgccgcagggctattgctgccgctttttaccaccttcaacctgattaacgaactggatgatgtcagtccgggcggttatcgctggactcaggcagtgctggtggtgctgatgaccttaccgcgcacactggtcgaactttcgccgtttatcgcgttattgggggggattgttggtctcgggcagttatcgaaaaacagtgagcttaccgccattcgcagcacggggttttctatcttccgcattgcactggtggcgctggttgcagggatactgtggactgtttcgttaggcgcgattgatgagtgggtggcgtcaccattgcagcaacaggcgctgcaatggtga

SEQ ID NO: 13779 - DNA, 915 bp, Escherichia coli
atgaatcaaactgtcgcggtgacgggcgctaccgggtttatcggtaaatatattattgataacctgctcgcccgcggctttcacgttcgcgcattgacgcgtactgcccgcgctcacgtcaatgataatctcacttgggtgcgcggttcgctggaagatacacattcgcttagcgaactggttgccggagccagcgcggtggtccattgcgccgggcaagtgcgcgggcacaaagaagagatttttacccgctgcaacgttgacggcagcctgcgcctgatgcaagcggcaaaagagagcggcttttgccaacgttttctgtttatctcttcgctggcggcgcgccatcccgaactctcctggtacgcaaattccaaacacgtcgccgaacaacggctgactgcaatggctgacgaaattacgttgggcgtttttcgcccgacagccgtgtatggtcccggcgataaagagttaaaaccgctgtttgactggatgctgcgcggtctgctgccacgacttggcacgccagagacacagctctcttttcttcacgtcaccgattttgcgcaagcagtgggtcagtggttaagcgccgaaactgtacagacgcaaacctatgaattatgcgatggcgtcgccggaggctatgactggcaacgtgtccaacagcttgttgccgatgtccgctgtggttccgtgcggatggtcggtattcctcagccgctactcacctgccttgcggatatcagtaccgcgttgagccgtctggcgggtaaagaaccgatgctgactcgttcgaaaatccgtgaattaacccatgccgactggtcggcaagtaataaccgtatttctgaagatattaattggtttcccgggattagcctggaacacgcattacgcaacgggctattttga

SEQ ID NO: 13780 - DNA, 246 bp, Escherichia coli
  misc_feature (48)..(57): n is a, c, g, or t
atgggcatttttttggtaaaaatcaatttttatatgcagataatatcnnnnnnnnnngataatatctatattatagatattattgttatccatcatgtagcgaccaaggcggtagtgattaaagggggggtggatataaaaatttattgtacgtggactgcaccccaaaacttggagacccaactgattaatgtgcaatttttatggcaaagccaaaatattctctcgaaaccagattggttgtag

SEQ ID NO: 13781 - DNA, 315 bp, Escherichia coli; identical to SEQ ID NO: 9107

SEQ ID NO: 13782 - DNA, 192 bp, Escherichia coli; identical to SEQ ID NO: 12354

SEQ ID NO: 13783 - DNA, 714 bp, Escherichia coli
atgaaaaatattgccgcgcagatgattaactttgaccgtgagcagatgcgtcgaatcgccaacaacatgccggaacaatacgacgaaaagccgcaggtgcagcaggtggcgcagatcatcaacggtgtgttcagccagctgcttgcgacatttccggcaagcctcgcgaaccgcgaccagaacgagctgaacgaaatccgccgtcagtgggttatggctttccgtgaaaatggaattaccactatggagcaggttaacgccggaatgcgcgtggcccgccgacaggagcgaccattcctgccgtcgcccggccagttcgtagcgtggtgtaagcagagtggcggggcgttaggtatcactgttgaccaagtcataaccgaatactgggattggcgtaatcgttccttcgaattcacttccagcgagcatttcccgtggtcacagcctgtcatgtaccacatctgcgtcgaactgcgccaccgcagcacagagcgccagttaacgcatggtgagctggcgcgtgaagccggcgatctgctggacatgtgggagaggcgcgtcaccgagggcaaaccagtaccgcctgtgcgccgggcgattgcagcaccggctgccgagcatggcccgacgccaatccagctgcttcaggcgaagtacaaccgcaacaagtcgaacgggatggtgcgaagtggtaaagaagataataaagaataa

SEQ ID NO: 13784 - DNA, 429 bp, Escherichia coli
atgattaacattactactaaggatggcactcaagtcagtggtgaagtaagagatctagtaattcttcttgaaactgatggaaaaacggtgtctgattatttgcagccaatccctcccaaaaaagatacacactggagcatgattttcattccggtagcaatttatatactacttaatcttgtatacattattgctcacccattatttcctgaaaaatatctaaaaacatcaacatctatatttctattcatttccttcatattaagtgcaatagtagcatattttgttttccataagcataaatctgccactctatccatatgcagcttagtgttcttagtgttaattgtaggtgctaacgtagggtttatcagttacagcgacctaacacaaaaagcgacgcaaaaattagatagtttgtctaaataa

SEQ ID NO: 13785 - DNA, 378 bp, Escherichia coli
atgaccaacaaagaaaacaaagataaatatattaacaagttcaagaaagagctttcaaaatatatacaaccaactgctggagtggacattcaattatttaactctaaggatggtggtggtgtaattaaagccactttgaatagaagtggaaaaagaaaatcatctattgcaggtaattttactaaattaggtgaggcaattacctcgagtgggcagagggtttttggtggtgatctatcaaatgtaaatttttacggaacaaatacgatttttgatggagatacaatatttttaattaaatcacctgattcagaggagtggtcatcacaaaaagcttccaaagacgtagagggaatcgtatttggagggaaaaaatga

SEQ ID NO: 13786 - DNA, 846 bp, Escherichia coli
atgtcagacatcaccatctcccgtccggaagtgctcaatggacatacggacgttatctgctcaaccagtatccgccacattctggctgtacgaaagagtgcgctgctgcaaatcgacacacttatccggcaactggcagaaatctcagtactgacagaaagtattggaggtaaaaccgccctggactgggcgatgaaacaggattttcgctgcggctgctggctgatggagaaacctgaaaccgcaatgaaagctatcacacgcaatctcgatcgtgaaatctggcgtgacctgatacaacgttccgggatgctttccttaatggatgcacaggcccgtgatacatggtaccggtcactggaatatgataattttccggaaatcagcgaggcgaatatcctgagcacatttgaacaactgcaccagaataaggatgaggtgtttgagcgaggggtgatcaacgtcttcaggggactgagctggaattacaaaaccaattgcccctgcaaatttggcagtaaaattatcgtcaacaacctagtgaggtgggaccggtgggggtttcatcttatcaccgggcaacaggcagatcgacttgccgatctggaaagaatgctacacctgttcagcggcaaaccgatccccgacaaccgggaaaacatcacccttcgtctggatgatcacatccagtccgttcagggtaaagagtgctatgaagatgagatgttcagcatcagatactttaagaagggctccgcgcacatcacgttcaaaaatcaagaactggttgacaggctgaatgacattattgcaagacactatccgggaatgttaccttcattataa

SEQ ID NO: 13787 - DNA, 237 bp, Escherichia coli
atgagcagcaacacatttactctcggtacaaaatccgttaaccgtcttggttatggcgcgatgcaactggctggtcctggggtttttggccccccaagagatcgccacgtcgctataaccgtgctgcgtgaggcgctggcattgggcgtcaatcatattgataccagcgacttttatggtccgcacgtcaccatcagattatccgcgaagcgctttatccgtactctgacgacctga

SEQ ID NO: 13788 - DNA, 1041 bp, Escherichia coli; identical to SEQ ID NO: 11406

SEQ ID NO: 13789 - DNA, 1854 bp, Escherichia coli
atggcatttaaacactatgacgtggtcagggcggcatcgccgtcagaccttgcgaaacgactgacacaaaaactgaaggagggctggcagccgtttggtagtccggtggccataaccccttataccctgatgcaggcgattgcagcagaaggtgatgtggtcgtcagtggtgcaactgagccggagtggtactacgtcatcgtactggccgggcaatccaatgccatggcttacggtgaagggcttccgcttccggattcatacgatgcgccccatccgcgcattaagcaactggcccgtcgtaacacagtgactcccggtggtgaagtatgcgtatttaacgacatcattcctgctgaccattgtctgcatgatgttcaggatatgagtacgattaaccatccccgggctgacctgagcaaagggcagtacggctgtgtcggacagggcttacatattgccaaaaaactgcttccgtatatccctaataatgcggggatcctgctggtaccatgctgtcgtggtggttcggcattcacccagggcacggaggggacattcagcgagtccacgggagccagtcaggattcggctcgctggggagtgggtaagccgttatatcaggatctgcttttccgcacgaaggcagcattgcagaaaaacccgaaaaacgttttgctggcgatatgctggatgcagggggaattcgatatgacgaatgccagttacgcccagcagccagcagcatttcttgcaatggtacagcagttccgtgctgaccttgccgggctggcagcgcagtgtcacggtggaagtccggcatcagtcccctggatttgtggcgacacgacatacgcgtggaaacaagaacacggtacgcaatatgaagtggtatatggtgcatataaaggtaaagaatcccagcagatttattttgttccctttatgaccgatggtagcggagttaatacaccgacaaacaacccgtcagaagatcctgatattgtcgggtctggttattacggttcggcatcccgaacgaacaaaaactgggtatcatcaaatcgcccgacgcatttcagctcatgggcgcgtcgtggcattattcccgatcgtatggcaactgctattctgaacgtagccggtcgcaccttagccttcattagtggtaaggcaccggaaatcaaactctcgcccggcggcgacacgccatcggggccgtctgaagatgcatccatacgcacaatctccctgttgccgacagccggagacgctgctgcgcagggctggagcattaagaatggcggaattcagttgtcagatggtgtatttaagatcaccaagcagagcaataaagcctggtccctgacgcgcccggtggatgacgcagtctccctgctgacacggggtggcagactgagctgtaagtttcgactgtcaggcgcactgaccaacaatcagttcggtctgggaatttatctgtataccgatgtagcgttacctgacgtcgtggcgatgaccgggactggtaacccgttcctgatgtcgttcttcacccagaccacagacggcaaactgaatctgatgcatcacaagaaagcaggaaacacaaagttgggcgagttcgggaattacagtaacgactggcagacgctggagctggtgttcaccgccggcagtgccacggttactccgaaactgaatggagtggctggcccggcattccaggtcataaaagacagtctgacactggggctgaatgcgctgacgctgacggatattaccaaaaatgcagcgtatggcgttgagatagaaagtctggtgctggagataaatgcaccggcatcatcataa

SEQ ID NO: 13790 - DNA, 699 bp, Escherichia coli; identical to SEQ ID NO: 6139

SEQ ID NO: 13791 - DNA, 744 bp, Escherichia coli
atgacacagactgaatcagcgattctggcgcatgcccggcggtgtgcgcctgcggagtcgtgcggcttcgtgataagcacgccggagggggagtggtatatcccttgtgtgaatatttctgcagagccggaggcgtattttcgtatcgcaccggaagactggctgcgggcagagatgcagggggagattgtggcactggtccacagtcatcccggtgggctgccctggctgagcgaggctgaccggcggctgcagataaaaagcgcactgccctggtggctggtctgccggggtgacattcacaaattccgctgtgtgccacatctgacaggacggcgctttgagcacggggtgacggactgttacacgctgttccgggatgcttatcatctggcggggactgagatgccggattttcatcgcgaggatgactggtggcgcaacggtcagaacctttacctggacaatatggcggtcaccggcttttaccgggtgcccctgtcctctgcacaggcgggcgatattctgctgtgctgctttggtgcttcggtaccgaaccatgccgccatttactgcggcaacggtgagctgcttcaccatctgcctgaacaactgagtaaacgggagaggtattccgaaaaatggcaacgacgaacgcattcagtctggcgtcaccgccactggcacgcatctgccttcacggggatttacaacgatttggccgccgcctcagcctgtatgtga

SEQ ID NO: 13792 - DNA, 582 bp, Escherichia coli; identical to SEQ ID NO: 12419

SEQ ID NO: 13793 - DNA, 876 bp, Escherichia coli
gtgttcggtgatgtccacactcaccggcttaccgctgccgttaatcaggttcaccgtggcggcaccggtctccggaagtgtcacttcacggtccagcgtcagggtgcgggtggcagcatcaatggacaggacacgtccgccggtcagggtcccggcatagtcgttatcacagatttcaatgatgtcaccgggtgtgtgccgcagcccctgagacccgagcgtgaaatccaccgtctgcgtttccagcagttcggtctttatcacccacagtccggcacggtgggcctgaccgcggctggtacagccgaacgcgtccatcttcagcaggttgcgtccgtagcgcagtatggcttccgggtcttccaccagttccgtggaggtctgccagccgttctgcgggtcggtgtaattcacctccaccgccgtgtgccggtccttcagggcactgaagctgtagcggaatcccacgccgttatcatccaccaccacatcgctgttggtgtacggccacaccacatccgacgggcggtcctgaacgaacgtcagcgtctgaccgttccataccggcatacagcgcatcgcagagcagaaatcactgagaacgtcccacgccttacgctgttgtgccaggtacgcattaaaggtcatccgcggctcggtccccccgaaaccatccgggaccgtctggtcgcagtactgcccgatggcatacagcgcccacttgtccacatccgccgcccccagacgttttcccatgccgtagcgcgggtgagtcagcatgtcccacaggcaccaggccgggttgttgctgtatgccggtttcagactgccgtcccagataccactgtacgtgcgtttttccgggtcatagtttga

SEQ ID NO: 13794 - DNA, 921 bp, Escherichia coli
atgaaccaactgcaagaaatcattcagatactaagtactggtgatgaaggcacaacaaatgctctcataaaaacgaagatccttcttttctctatcgggaaaaaggagcttgctgcatgggtaaatcatgagataaacggttatcctgattcagtttcccttccagattatagaattgttggcacaagaattcttgcagatctgaataacggcgttcgcctatatagagcttttccgttaccgattggttatctaagtgaagatgactatgaagatgctacaaccagtaatgtgaggctttcaatcagtcaaatcgaagaactagtgaccaatgctggtgatagccatgctcttcagcagccaattcctttagattacgcgttagttaagtactgcaaaggtatcgataaaggctatgagttaacacgctgttataaagagatcgcactacataactttacttccatcttaactcaggtcaggtcacggctacttgattttatacttgaactttctgatcaagtttctgaaataccagatgagaaaaacatgacagaaaaacttaaaaatatcgacacgtcttcattattccataactcaatttttggagacaatactgtcataaacttcggaaatgaaaactcattttctgtgaataaccacgtcgtaaaaaacgacactgagtcattaaaagagtttctctcagctcaggggttccctaaatctgatgttaacgatttagaaattgctattggtgaagatggcccgatagctaacaaacgtggtgaatatggtcaatctgttagtaaatggttggcaaatattgcgagtaaagcagcccatggtactttgggcataggaatagctgctgcaactcaagcagctacagcggctctgaaaaaatactacggtctatcataa

SEQ ID NO: 13795 - DNA, 207 bp, Escherichia coli
atgccaaacggtgctgtggatgcgttaaaggaagaattaactcgacgcatcagtaagcgttatgacgatgtagaggtgatcgtaaaagccaccagcaacgatggcctttctgttacgcgcaccgccgataaagattcagctaaaacttttgttcaggaaactctgaaagatacctgggagtctgctgacgagtggtttgttcactaa

SEQ ID NO: 13796 - DNA, 936 bp, Escherichia coli
atggggtttataatgaataaagatagatctttaaatgaaatgatgttaagcttgtttaataaatcaactattgttgacttgtcaagtgagacaatatctgagagtaaatctctttcaggccgtatttatcaggatcctgaacataacggggaatttgaacttgatcgtgtattgacagatatttatgctcctcagttaattatttttttaccagataaaccaaatggaacaggaatattgattattcccggggggggctaccaggctgttatgttagataaggaaggtacagctcttgctccagagtttttatctcagggctatacattatttgttcttagttacagattaccatcgccagttgagggagaaaatataaacaaaacttttattgatgcaatatctgcaatgctttatattcgtaagaatgctgataaatggcatctacagcgtcatcgtattggtgtattaggattttctgctggggggcatatcgcctcaacgtttgtgaatcagatttgtgatttcaaacgttcttctgacagtaaagaacaagagattttcgctattcccgattttgtcgggttaatttatcctgtaatatcaatgaaagatgatgtgacacatccaggctccaggaagcaattactgggggacaatagtacctcagaaaatataatacaatatagtgcggatcttaatgtcacatcatgttttcctcctgtgtttttactccattgttgtgatgatgatcttgtgtcaattgaaaacagtctgctcatgtaccgtggcctaatagagaaaggtgtttctgctgaaatgcatctctatgagaaaggagggcatggttttagtattcagtgggccacagatcttcctgttggaggatggataaaactgtttatggactggatgtattctcatggatttaaataa

SEQ ID NO: 13797 - DNA, 735 bp, Escherichia coli; identical to SEQ ID NO: 6008

SEQ ID NO: 13798 - DNA, 987 bp, Escherichia coli
atgtatcatcatgattttaatgaaaaaataggtttctggtatgtgatagccctcgcaggacagtctaatggtatggcctacggtgaaggtattcccctgccagatacactcgacaaacccgagtcccgtgtaaaacaactggctcgtcgaaaaacaatcacaccaggaggaaaagagtgtaaattcaatgagattattccggcagatcactgcctgcatgatgttcaggatatgagtggatatcaccatccggctgctgatttgcataaaggggaatatggttgtgtcggacagggattgcatatagctaaaaagttactgccatacatacctgagcaagcagggatattactggttccttgttgcagaggaggtgccgcctttactgttggagctgaaggtatgtatgtacctgatacaggggcaacagctgatgcaatgcggtggggcaccggaacagcactctatgaggacttagtagcccgggttaaggtagctctggaatataacagaaagaataaactgctatctgtctgctggatgcagggggagtttgatcttatgtcaccagattatgaaaagcatcctgacttgttttatcagatggtaacttctttcaggtctgagttatctgaatactcatctcagtgtgttggtaattcgtcagaaagagttccatggttgtgtggtgatacaacctggtactggaaggaatcttatcaaaaagaatatgattttatatatggacattacagacaacggactgatgatgaaatacattttctcagctttcaggatagtaaccgacatgaattaactaatgagccagaagaagatgccgatgatttatctgtcgggtatctggggtcatcatggaggacagaattaagctggacaacgtcacagagaagtacacattttaattcaatggccagaaggggagttattgctgaatgttatgcgcaaaaaataagaaattatttgtaa

SEQ ID NO: 13799 - DNA, 1194 bp, Escherichia coli
atgtcacctgggatcgaagatacgccccaaaaaccactgtcctgctggccacttgcgttcagtgccgggcttctcggtatcgggcagaacggtctgctggttgtgctccctgttctggtcatacagacaaatctgagtctgtctgtatgggctgccctgctgatgcttggctcaatgctgtttctgccatcgtccccgtggtggggaaagcaaatttcccgtactggcagtaaacctgtggtgttgtgggctctgggaggatatggcataagctttaccctgctagggctgggaagcgtgctgatggctaccagcgccataacaacagcggtgggactgggaatattaatcatcgcccggatcgcctacgggctgaccgtgtcggcaatggtgccagcctgtcaggtctgggcattgcagagagctggagaagggaatcgcatggccgctctggcaaccatcagctccggcctgagttgcggcaggctattcgggccgctgtgcgcggcagcaatgctggccattcatcctctggcgccactggggctgctgatggcagccccagtgctggcgctgctgatgctgctgcggttgcccggcacaccaccacagcccacaccggagtacaagagcgtcagtctgaagcgggattgtctgccttatctgctttgcgcaatattactggctgcggcggtgagcatgatgcagcttggactttcgcctgcccttactcgccagttcgccacggataccaccgccattagccaacaggtggcctggctgttgggtctgtccgcagtagctgcgcttatcgcgcagttcggggtactccgtccgcagcgcctgactccggtggccctgctcctgagtgccggagtgttgatgagtggtggtctggctatcatgctctccgaacagctatggttgttttacccgggctgtgcagtgctgtcatttggagcagctctggcaacacccgcttatcaacttctactgaatgataagctggctgatggcgcaggcgcgggctggctcgctaccagtcacacacttggctatggactgtgcgctttgctggtgccgctggtatcgaaaacaggtgtcgcaatcgcgctgattatggcagcattatttgcaactatattatttaccattgtgtctgtatttatctggcattaccgtactatcaaataa

SEQ ID NO: 13800 - DNA, 435 bp, Escherichia coli
atggataaacctacagactggcgctccggaacccgccggatattttctaatgaatttaaacttcatatggttgaactggcttcgaaaccaaatgccaatgttgcacaactggcccgggaacatggcgttgataacaacctgatttttaaatggctacgcctctggcaaagagaaggacgtatttctcgtagaatgcctccaactattgtaggccctacagtatcacaatcttttccggcctctccgactctggttccagtggaacttatcgacaccccgcgctgtgctacagatgctcctgctccggaggcattatcagttgcttgtgcagcttcctgccatgtggaattccattacggtaaaatgatgctggaaaatccttcaccagagctgctcacggtgttgatccgtgagctgaccgggaggggacgatga

SEQ ID NO: 13801 - DNA, 351 bp, Escherichia coli
atgatttcactcccatcaggtacccgtatctggctcgttgccggcgttactgatatgcgtaaatccttcaacggtctgggggagcagatacagcatgtgctggatgataaccccttctccggtcacctgtttatcttccgtggccgacggggagacacgattaaaatcctgtgggctgatgctgatggtctgtgcctgttcaccaaacgccttgaggaaggtcagtttatctggcctgcggtgcgtgacggtaagatatccattacccgctcgcaactggcaatgctcctcgataagctggactggcgtcagccaaaaacatcccgccttaacgcactgacaatgttgtaa

SEQ ID NO: 13802 - DNA, 714 bp, Escherichia coli
atgcctcttgccttgtcgaatgctgcagaagttgaatcgctaggcattggcgaggtaatcaaggttttttctatttttattttatttgttatagtttcattcgttacgatgccttctggtgctctggtcggccgtattaaatattataaatttagttttttctgtatagtattattgcttgtgtgttctttcataagcacgggaccggtatatgctttttatgaaacagcaaaattgtactatttacagcaaacctttaagcctagtgagaagatcggtgatgccgggaaatcttttttaaaaacaagtgtttttattacccctctacagaataacaacaacttcaaagggcgtaatgttattgtaatctttgctgagggattttcatcggagattattggtaattcaaaaatggcgcattttccaattacgcctaatttagataagttatctactgaagcactaagttttaaaaattattataaccatacagcagcaacctttcgaggtttaagaggtcagttaacttctggctatcaatttcgtgatgggttaactgatgctggtactggtattgcacaattatctaacgtagaaattaataatatttatcttcatcgtcaaacatctttgccggatatattgaaagagtatggctataaaagttattttatagcgtctacagaaaaaatagcccactcaacactatgttga

SEQ ID NO: 13803 - DNA, 330 bp, Escherichia coli
atgattgatgtcttaggaccggagaaacgcagacggcgtactacacaggaaaagatcgctattgttcagcagagctttgaaccgggaatgacggtctcccttgttgcccggcaacatggtgtggcagccagccagttatttctctggcgcaagcaataccaggagggaagtcttagtgctgtggccgcaggagaacaggtcgttcctgcctctgaacttgctgctgccatgaagcagattaaagaactccagcgcctgctcggtaaaaaacgatggaaaatgaactccttaaagaagccgttgaatatgggcgtgcaaaaaagtggatag

SEQ ID NO: 13804 - DNA, 165 bp, Escherichia coli
atgcttgacaacttaataggggcacccccccagactgactatccgcaggacattttctgcgatgttgttatcgacttcggccctaccatcctctgcatagggcgtcagtgccagctactggttcagggcgtacacaaacgctttcgccagcgccaagtaccgtga

SEQ ID NO: 13805 - DNA, 1266 bp, Escherichia coli
atgttgaagtgtctttgttttggatattttaccaaaagtctaatgcaacgcattattaaatgcacgtatggggctggagagtatgctaccatttttaccgttttatttttttctgcgcatagatgtgcaatagcagttgagaataactatacgatatcaatcgacaagacatttgatatatcaagtattaccagagactggatagagttaggtgagtttccgtatccaaaagcagcaagtaataatgagacccatttccgttgcactgagggagcaggaaaaggtttatgcgcacatacagagtttagagtgaatggaggcttacagagtaaccccgcagcatactggaatggatggatgaggatggagcctaaagaggtcaatataggagatggggaaaagttaattttttcagcatactggaaaggaagcccaagcataagatgggaggagacaaatagaagaaatatgaagagtatttttcatcaatacactattggtgttgcttctattggctcatctgccggctcaataactaaatggtcttcaggcgaacaaggaccatcattgaggtgtggggatttgggcggatgtacaatagatacacatacgtactttgataacagaagtggaggagcattaaagctagcggtcaagcttccggctgctttcaggaaaggcacgtatacattttctaatgttgaagtgcttgatttggggcatacagcgcgaaatgcttctggcacaacacagcagagtgtcagtgctaaagtttatattagtgggaaaattactgtgcctgagagatgttatattgatacaggatcaggttctgaaataaaatttaatgatgtaagcgcaggggcaagtaatggggagattgataaacgcagttttacattaaaaacaacatgcaaatatattaatcttaaactcaatcaatatatcaaagtaaatgggagtaatggtctttccgagtatgagattttttccagagataactcaaatgaaaaagcattggcactggtgatgagaattgttcgtggtgacaatggagaggacttctccgcaaattgtgaacctgaccattcgggtagggtatattttagtaaagagtatctcttgagagaaataaatggcaatggattgaacatacatacttacaacgatataataaggttttcattatgcaaatatggaataccaaaagattatggagaaaaaatcattccacttactattgtttcgagatggagcgattcctga

SEQ ID NO: 13806 - DNA, 534 bp, Escherichia coli
atgctgaagaaaataccgtgcataatattaatgtctttacctggacttatttctgctgcggaaataacaaagcagatagaactcacgctaaaagttaatgtattaaagccagtatgtaaactcagttctgggcagcaaacaataaacttcggtgattttgatgtgctggatgttattacgaaaagtagtaaagtgaatggtagcgctacatttagatttactgagtgtagtgctgtcaataatataaaaataaaatttaagcaagccggacaaagcccagttccggatatagaaaacaattatatccctaatgctaagggggatataatggcaaagggggtggctgtaaagcttctggatgatcaaaagaaagaggtcgagttggacaagataatgagcgttagtgtgggggagaatcagatatctaaagatttaacgttaaatgctcaggtcatctctgttaataaaactggagaagggatttcgccgggaatgcttcaaacggcaatagggatggagatttcatatgagtga

SEQ ID NO: 13807 - DNA, 453 bp, Escherichia coli
atgccgtgtatgatgttacagatcttcattacaattttactgttactgcctttatcagttacgaaagcagatatattatatccgtggccaagtgatactgaagtcaggctgaaaataagtgacgaaaagggtcagagcaggggagatctacgagttactaatcctggcgatgcactctggttggttcaggcatgggctgaagatgaaaaatatagacgatatagcgttatatatccatccgtatacagattggagccatttagtgcttatgcgctgaatatttaccctggtaataatattatgccagaacggctgaaatggtttttgatttcttttataccttcgatagtggaaaaaaacaaaaaccaactaattataccagttacttacagactcaaaataattgatgatgtggtatgtaagggtattgaaaaagtagctggtgagtgttaa

SEQ ID NO: 13808 - DNA, 2508 bp, Escherichia coli
atgaataaatattatctactaataattcttttttttgtgaggagcacaaaggtttttgccgaagattattttgacccatctcttctggcaaccgatattattggtgaaggtaatattgacctttctgcattctcacgccctggtggaggtatggagggggaacaggaggtcgctatttatgtcaatgatgagttttattcccgtaatactctgttttttaaaaatactttagataaaggacttttacctgaatttaccccgggattttttgacgaattgttgtcgggggattttcttgtgtctgaagaagataaaacaatatcatcatcagacttcctgaaaaaggttccttatagtgatataaactttaatcaaggaatgtctcgcgtcaatgtcagcattcctcaggcatatcttggtgatggagcaaagttgatctcctcgcctgatacatgggaatatggggggccggcatttttgctagattataatatttcaggcaaccggaatgattcaggaaattatgattcccgtagtctgtatatctcttcacagatgggggtaaatctcatgaagtggcgtttgcgtacatcctccagttacagcaattataagacaaattctgtatggggaggtgctcgttcagagcaaaatagcttttacaatacttacgcagagagggatattagctcgttacgtgcaatattacgacttggtgaagtttcgactgcagggttaatactggattctgttcctttccgaggtgtgaagctgtcaagtagtgatgacatgctggggatgcgtttgcgtaattacacacccacagtgcgaggtatggcgagcagtcaagcagttgttacaataactcagaatgggcgacaggtataccagacaaatgtaccagcagggccatttgaactgaatgatttttatctttccggctattcgggggacatgctggtgactgtccgtgaggctgatggtagtgagcacagtttcttgcaaccttattcgacccttccggaaatgaaacgcgagggagtctccggatttgaggtttcggttggtcgctatgataataacggtgctgaacactattacgatgctgagtcatttgtttatggtaactggtctcggggttttgctcgtggagtgacattttttgctgagactcttcaggcagaaaaataccagagtctggggggagggagtacgttgtcgctggggaggctgggggctgcatctgcagatatatccttatcacgagcagataaatacggtgacatccggattggtcagtcttatggctttaaatactccaagagccagattgaaacgggcacaacggtaacattggcaacataccgatattccactgagaatttttatactttccgtgattttgtttcgaaaacggatacagctcgttatatctgggaaaataaactgaaaagcagaatgacatttagcctcagtcagtctctgggggagtatggctatttgtcagccaatgccagtcagcaggattattggaatagccgagaggtgagtcgaaattactcgctgactcatagctttagctggaatgatatttatttcagtacaacgttgtccatggatgatcaacgagggcgggagactggacatttatccaataagcaagcagggatatatgccagtgttcctttaagtaagcttttacctagaactgatccgacgagtagttcgctaacttggagtacttcgcatgctgatcataaggtacgcaatagtgtgactctggacgggaaagttccagaaagtgacgttcgttatcgagtgggaggcagttggggaaatggaaccactgaaggctcacgtatggcatcagtgagttggactggtgatcatgcaagcacctcgctgggatatacccgtgtagggaaatatcgaaccctggattacagtatgtctggcgcagcggtgatgtatccatgggggattgctgtgggtaacagtagtgttactggtgatggtgctattgtagtggaaacaccaggagctaaaggagtaagaactagcaccggatacaaaacttcatggttgggaacggctttaattagttcaccacaaaaatatacagagaatcgtattaatttatatcccgacggtcttcctagtgacaccgtccttggtgaaacatctaaaactgcagtgcctgctaaaggtgcagtcgttgtgctggattatactgtctttcgtggtagtcaggtggtgttcacactgagacagactgatggtaatccattaccgtttggtacagtgattacgcttgatggtgtatccagaggcaaggaaaacagtggtattgtaggtgaggagggccgagtgtatatggcgggtataccggaaaaaggaactctcactgcatcatgggggctgaataaaacttgtagcataccattccgtataaaccagcataaagctgaggccgttatcagggaggttcagggagtatgccgtgtatga

SEQ ID NO: 13809 - DNA, 432 bp, Escherichia coli
atgatggtgttgttaagtaatgctctaaaaaaagcagtgctttccctgttggcgtcctgtagcatagttgtttttgcatctgaatcagaacttggcgttgctgtagaaccgatgaggttatcaattaagcctggagagatgacatattttacggttatcaatgagacagagagagagtacattgtcaccaccagggtagtaagtgactcagggattgatgataaagataaagtatttgtctttagtccccccctgaagcatttaaaaaaaagggaacagtctgtaatgggagttgtatatctgaaaaatgggagagagaataagatgaaatactatttatctgtctcatttgtccctaaactttctgaggataaggtgaaaatatctattcctgtagttcttgttcatcaaataccactgatgtttgaataa

SEQ ID NO: 13810 - DNA, 702 bp, Escherichia coli
atgcgttatcagtattctgttttattcgtctttttattctctggcgttgtacaggcggcggagtttttcggtccgcgggaaagccggttgctttttgaagagaagaaaggaaacaccttttaccggattgacaattcagacaaaaaacttccctggcttgtacaggcatggattgaagatgcgtctgaaaagaaaacaaccgcactgacagccacgcccatggtgtttcgcgttgagccttcttctgtatttactgtcagggtggttaaaacgggagccctgccggaagaccgggaaacacttttctgggccgtttccaattcattaccgggaggtgcctcaacaaagcaggataatgaagagggaaaaatcagcgctaaaatcagcctggcttaccggtttaaggtgccacttatttaccggcctgcagcgttggataatttcaggcaggagccggagaaactggaatggacatataatggcaaggaagggctgaaattatataaccctacccgttatgtggtccagttacataacgtgacggcgaacggacgtgaatttaagggcaaaggggtttcgtttattcttcttccgatgtccggtaaaaatgtgagtgccgctgtgaataaaggcaccagaataaaatatggtgtcataaatgactatggcgcggtaaaagaatatgatggtgttgttaagtaa

SEQ ID NO: 13811 - DNA, 591 bp, Escherichia coli
atgaaaaaaatgattatgcctttaactatggtgtccgttctgatgagcggttctgctctggctgcgattggtgataacggtcaggcgaataacaatgatgcaagtcaggctgaactgcattttactggtaagctgacttccagcctgtgtcaggttgccacatctgatgttaaaaaagaaatttacttgggtgaacttagccaagctgcgttaacgcagggacgaggtcgcgggccatcgcagtctttttcagttagtttggtaaactgcgatccacaagttactaccattaagtattctctgcaggataaaaacggcagtaaaggtgattatcttgtaaaccagtcaggggatacgatggccaagggggttggcgtttatattgaagataatttaaatcaacctttgcaggttgatggtgcagaaaatactgtaactgttcagaataatggcactggtgctttaccaaatcaggttattccgctggcagcgtatattggtagtactagcgggaaagtggatgatgttggtacagtgactatgggtctggttgatgccagtgcagtaatgaccattcgcgcagcacagtaa

SEQ ID NO: 13812 - DNA, 771 bp, Escherichia coli
atgataagattaagaactaacaaacttgcgatattatatacaggtgagcatgacattttggtcacaaacttatctgataatactcagatacggtgcaaaagaaactctgtcgtaattgttggtagaaatgttagaatttcatttatggcagatcaactttatgatcgcatattacgggatactgtgttctttgaccatactcagattataacattaaaaaagatattgagtctagcttatgggtttagcaaaattaatcctcttgactttgaaaccgactctcctaaaataaggaaaataataagcatcgaagtaaatgacagaatcaaaaactccttttacaatataatttctgaggatagccatcataatagaatattatcatttatattcttttgtaaagaatctagtgtaatggatgcaatactccctctcatatacttctcagctgcaacaacgttttgtaatagggtgatagaattaatagaatcaaacatagcaaagaaatggacattgagattattgtctgaggaatttagcatctcagaaatagcgataagaaaaaaattagaagcagaaggggttatcttcagagaactaattcttgaaataaggatgaaaaaggcaatgactcttttaatagcaggggagttgtctgtatctaagatagccgataaggttggctacaataatatatcatacttcatatcccatttcagacaatttttcggaatgacgccaaaacaacttcatctgttattaacaaaataa

SEQ ID NO: 13813 - DNA, 174 bp, Escherichia coli
atgtctacccgtaaagtatgccagaatttttccgtaatgcctcagcttccatgcttcagtatcgacaaaatgcccttattgattctgctgctgctccagtcggtggtacctctctttctcttacctgcattgaccgacatttacccggatctgctcgcgtgtaagataaaataa

SEQ ID NO: 13814 - DNA, 282 bp, Escherichia coli
atgcctacacgttcattatgccaaaagttcttcaaaaatatactgtccccattacatcgctatcgccagaacgcgcttatcgatgcaaccagcgcagtcattaatggagctagccttacgctaaccagcatcggtcgttacctccggggcagtacttccgtcaaacataaaatcaagcgtgttggccgattgttgggtacccgagccctgatgagttccgcacctgataatcctaaaaacatcatcggcttcagtgagccatttcatctgttaggtttttaa

SEQ ID NO: 13815 - DNA, 573 bp, Escherichia coli
atgaatgctattccttatttcgactatagcctggcacccttctgggcatcttatcagaacaaagtcatcggcgtccttaagcgtgcgctacgtgagcagtccggctcccggatacggcggatcctgcttcgtctaccgtgtgaatatgacaataccttcaacagcagaacgacctggtttggtatggactttattgaaacggtcagcgcgctgatgaatgcaacacccgggcgtgacctctgctggctcctgacccgccatccggaaaagccggaatatcatgtggtgctgtgcgtcagacaggagtatttcgacggccctgaactggaccggctgattctggatgcctggagcaacgtactgggcttcgcgtcaccgggtgaagcggcaccgtaccagaaacagataacccgggatgtggtgctggacagtcgttcaccggactgcgaagacatcctcaaagatttgatctgggcgttcagtgatttcgcccgcgatcgtcgtggtgtgtgcgatccggaagcccgttgcctcgccggtaatccctggtatcccgtagcaggccagctctga

SEQ ID NO: 13816 - DNA, 567 bp, Escherichia coli
atgcctaaatcttacacaccaaactggttttttaccgctttacttgacaatcacatcaatcaaatgatggcacgctattcctgcctgcgggccttacggatggatttcttctacaggaaagatacgcctgatttcttacaacctgatcatcgctggcttgaattgcagttgcgtatgctgctggagcaggtggaacaatttgaaaatatcgttggtttcttctgggtgattgaatggacggctgatcatggttttcatgcgcatgcggttttctggatcgatcgtcagagggttaaaaaaatatatccctttgcggagcggattacggaatgctggcggtctattacgcataacagcggttcggcacaccgctgtacatatcagccgcattatacatacaacatcaacattcctgtgcgccacaacgatcctgaaagcatcgataatattcgcggtgccctgcattatctggcgaaagaagaacaaaaagacgggctgtgtgcctacggctgcaatgaagttcctgaacgtcctgctgcagggcgtcctcgtaagcctcacttctga

SEQ ID NO: 13817 - DNA, 1578 bp, Escherichia coli
atgtatccatccacaggacattattctcagccgaatcttcctgctctaacgtccaccatacaggcgataaaaagaatatcgccctacccgacagatacgcttcctccagttctcgggaatgtcatccggtcattacacaatagtaccgggatcccgacagaattgatcggtaacgtggtcctggcaacggtatcgttgacctgtcagtcactggtcgatgttatacagccgcatacagacatgccggagccctgttcgctttacctgatgactgttgcggaatcgggggaggggaaaaccaccatcaataaactggtcatgaaaccctgttacgaatttgcagcatcactcattcagcaatatcagactcagaataatgattataagaatcaactgaatatctggaaaatccgtcagcgggtgcttgaaggtaatttcagacaggcgataaaaaaaagatgttcaggtaaagatgagagagaggaaattcatcagcactttctgagcagaccacaacgcccgccatatccaaattttatttatgaagacacatcgctaaaagctcttgtggaaggactgagtgactatccgtgggctgggatgatttctgatgaagcaattatatttttcaaaagtcatctgaaaaataatcccggcctcctgagtaaggcctgggatggtgaaataattgacttcagacgggctgatggtgaatgctatcatttcattccacatctgacattttcattaatgcctcagcctggcgtgttcagtgagtacataagaaaaaatactgtatcagcccgggagagtggctttttgtcacgctttctttttgtatgccctgaccgtaattccgcagagtgtctgaacaccgggaccggggcatatacagactacaatctgaacgttttccacaaaaggattaatgagcttctggacaggcataataatcttaactccggaactgaaatcaggaaaaaaacactgagactgtcagatgaagcaatagccgactggcaggaaaatcatgccgtaattcaaagaatgatttctcctggtggtgagtgggagcatatcagggatattgcgttaaaagccagcgcaaatatattgaggctatctgctctttttaattacgttcatgatgatcgtgaagatgccattcattcacacagtcttaaggctgttatttacttggtgaactggtatcttggtcaggccgaaaaattattttatcctatgtcagagcggtatcagtttgagaatgatgttcgcagattatatgcatatatctttgataaagtgaatcagaataatggctacccatttccgaaaaatcatcttgaaaaatatggtcctcacagtctacggagagctgagaaacttacaccggtactcaatcagctaattaagcagaggcttgtatgtgttattcagatatatcctggtcgggcgctttacgttgcattatgcaaccagaatggcataatcatcgcgccatataatgttcattacacggtgattcagtcccaggagaatacgtggggaagaccttatgatgttactattttatga

SEQ ID NO: 13818 - DNA, 204 bp, Escherichia coli
atgttgggtggagcggacaatccaaatggtgaattaccgtcttatatcactggcgctgacactgatggaaataccgggcgttgggccagtaatcaccacggcagcagtctccactatgggagaatcatcagcgttttgcggcttatgttggtctggtgcctagacagtcaggcactggagggaaggttcgactaccgggaataa

SEQ ID NO: 13819 - DNA, 996 bp, Escherichia coli
atggctttaagattaaattctgtttttatacttgcggtgatttgcagtatccaaatttgtagcgctgctattttaagtaaaagctattcacataatgatattcatatcactctgccattattatttaatgagtacgatgatgtactcagtcagtatgacggggcaaaatatttataccctagttcatttgctcttgatgatgataataatatttatattcagtatatttttgagccaaaacaaaaggataatatattagtttgttataataaaaaaggaaattaccttgggtactataagataccaagtggtgggcgaggcggggctggcgaaggtttggctattatacaagactataatgggtttaatgttgtatatgtcgtttcgaatacgggaaccttgcaaagatataatatggtgagtagcttgtatggtgacagattatttaaggaaagagatttttcaattaatgcttttaaccaattttcgatgagtcaagactattggcttattgaaggttatgaaagcgaaagaagtataaagtatagtagaaatagacttgaactatattcagtaagtggagatttattaagagtaatttatttacagaataattattctggatatattgtatcagatgcgagtcctgatgcaaagaattataataaaagacaagggatagctttaggtgatggtttttttgttgctagttatggtgccttttactattccaaaatggaaagtacttataatacatatcaaggcattagagtttttgatttttccggaaagcttttatctgaaaaaattttccatccaaatgaaatgatgaatgttctcaaaaaaatgggcttaacagtttctagaattgaaaatgagggagtgatagtcaagaataatactatttacagtatgtatatttatagtgatagataccatcataaaacctccagaagtgaagggatcattattctactggatgaatttactcaataa

SEQ ID NO: 13820 - DNA, 1029 bp, Escherichia coli
atgaataagacagttttacatattaacagtaatataaccacagatgaaattagtttattgttgcaggcatccaagtataaatatattcattttgaaataattgggaaaggtgattcatgtaaaaatttaattgagttttcatatcatgattataatttaaaaaaacaattaattgctttaactaatgctggttttatgtcgtacgttcatcgtggaaatgtaacttcattggttcactttgatgagataaaaaacctctggattccagtaaaagaaaaaaagttttctattaattctgatgggattgtatatacgttacaacgggctgcatgcaaaataaatgaaaagctactgattgttttctctcagatgccaattgaaccatattctgcaagcttgtacagatattttgcaaaaaacttttctacaattgataaatatattggaaaaaatgtttctatattaagagtggctgatatcggaggaattactggctcattttacttaaatacaaatgcattaccaaccaatgctgataaaattaaaagccttatattagaagttattgaacaatgtcaaataaaatcagatgatgtcgtactttatggatgctcaaaaggaggtacggcagccgtttatcatggattaactaataattataaaatagtagcggtggatcctatattaaatgatgaacattatataaataataaaaatgatctacatttaatagagggagtttttcctcagccaaaggaagagttattcaaaaaagtcattgatgactatttaataaactataaggggaatatgtcttattttattgtttcacaaaattcggaacagtacaaatatattatggatattataaatccaatcatcacttattcaacagttgcaaatagcatcaatgataaaattaaaagccatcctgatgttgggccacaatcaattcatatgattgtagcaatgattaatatggctctttctggaataaaactatctaacggcatctatgattttgtttaa

SEQ ID NO: 13821 - DNA, 2082 bp, Escherichia coli
atgacagcatcatgtgaatttttgataaataatgttagttttcctgagtattttataagaaagaaagggcagcgatatttaaatacttggcatggaactcctataaaatttcttggaaaagatattaaagatgaatttttagcacataaaaatgtggctagaaatttccttcacacaacacatttacttagtcctaatacacacacaactaatattttattagataggtatgatatatctaatatatttagtggggaaattaaagagttaggttatcctcgcattgaccggactattaatcttagctctgaacggaaggaatatatacgtaggaaaattaatgcgaacgtttacgataaagtagtcttgtatgctccaacttggagaggaatacatggaaaggcaactttagatatagaaaaactaaagaacgatcttgaaaagttggctgaccaggattgtcatatcgttttccgtggtcatcatatgatcgaaaaattagtaagtgagcagaatatttctggtataacaattgttccttctgagattgacacgaatgagttactaggggcgattgatattcttatcacagattattcaagtattgctttcgatttttttgtaatgaatagaccagtaatttactatgcgtatgacattgagcaatataataatgagagagggttgtattttcctctaaatgaattacctggaaccgtttgttttaatgatgtagagttacttaacacgttaagtggatatcttcgtaatgaaatatatttcgatgcatctaaaggtattgataagttttgtaaaaatgatgatggaagtgtatgtggaaaagtaattgaatggttcttctttgaagaaaaatccatattgcttaataaaaacaaaaataaaaatatacttttttatattggtccatttattccaaatggtatattgtcatcatggctaaatcttatatcggtaattgatcgtgataaatataatatttctttggttgttgacccaaaatcaattcatggttttcaagaacggttcgagcagtttaagagagtctctccagatattcaagtcattggaacttgtggaaacatgctttataatattgaagagaaatggcttaatgataaattaaataatcaattcaccctggcaagtaaggaaatgtatgatattcttgatcatgcttaccaacgagagtttttaaggctctttggctatagtcatattgatcatctaatccattttgaaggttataatcaatcttgggttatccggtttgctaatgctccgaaagatacagttagaaataaaataatatttcaacataatgataagttgagcgagtggagagaaagatttccatatcttagagttgtttttgatttttataaatcttacaataaaattgtttctgtttctgaaaaaacgatggagttgaacagagataacttaagcgaattttttaatattgagcatgataagtttatttattgtgataatgttcagaatccagatgaggtgattaaaaaatctgatgatattgatacaagtggatttatttttgaaaatgataaaatctactttataactttgggcagactttcagtcgaaaaagatcaacaaaagttgattaatgccttttgcagattacaaaaattatatcctaatattgagttattaattcttggagacggccccctcaagattgatttacaacgccagattataactttaggacttgaaaaatccgtacatcttctgggacgcatatcaaatccttttccactgctaaagagagctgactgttttgtcctctcttcaaatcatgaagggcaacctatggttcttttcgaagcaatgattctagataaacctataatatcaactgacattactggttctagaagtgctcttgaagggcgttctggtgtattagttgaaaatagtgtagacggtctcttcaacggaatgcgggactttatcttgggaaggttggagtttaaacattttgacattgaatcttatcaaaaaaatgctttgtcgatgttttatgaaaaatgccttcattaa

SEQ ID NO: 13822 - DNA, 648 bp, Escherichia coli
atgaatcgattaaataatagcgtctgtcccattcgcgatccgcaggttatacgtgttctggaacgtatgaataatgaacgcaaacatcctccgcaggaactgtttctcgacgctccggcactcgatcctgaaaaattttcccgttatggtttttccatttctcctgagcaaggagagctaatctacttgctctgtcgagcaatgaaagccactcgtgttgtcgattttgctacgtctgtaagtatgtcagcactctattttgcagcagcaatgaaagataacggtggaggactggtgattggctctgaaatggtccaggaaaaggcagaaatggcgtgcaaaaatttggcagaagtcggcctgacatcttttgttgatattcgtgtcggtgatgcgagagaaaccctgaaagatcttggtggccctgttgattttattcttattgacggttttcctcttgctgacggcccaagccttgctcgtcaggttactgagatcgttgcgccacaactgcgagtaggtggatatatattaaatgacaatgcagagcctgattttttagattatattcgtaacccacagaatggttttatttctgtaacattaccgataaaacgaggtacagagttagcactaaaaataagttaa

SEQ ID NO: 13823 - DNA, 1296 bp, Escherichia coli
atgccgacacgtagagagtttttaattaaaagtattgcaggtgctttaattgtctcaatgcctcacattgtattcgccaacacaaacaacaaggcaatcaatgctacagctattacgcaagtctttggtgatggcgttagacttattgcaatagcggtagaattcgaaaaaactgtaaataaaaaagacctttcaacagcagcatttgacgtaaaagatcatcatattgataagatatttgtcagccagtccacagatttggttgaagcaaaatcaggcaaattcgtgattcttgaactggagcacagcaaaccacaaaatgaatggcaagaaactataacagaccacacaataaaaaaaacaccccacaagcaaggagaaggtaaaccctcctgggttgcaggagaaaaactaaaccaaactattaaatataaagatgcttctgctacagtgattacacaaaacatcacgctggaaactaacgccgtttccaatctggtgatggataattttagacaagatgaatacaaagacaatgaaagtggaaaaacactaaaatataatttctttattcccgaagaacaagataagccattaccactggttctttttatgcacgatgctggagctaccagcgcacaagttacaacaacactgtttcagggactgggcgcagtaatttgggcagaaccaagagaacaacaaaaacgtccctgctatgttttagctcctcagtatgatgaaataattgctgatgatgactggcgtacttcaccattgcttgatacaacaataaatcttgttcagcatctgataaaaaaacacaaaatagatcctgaacgtatttatgttactggtcagtcagggggatgtatgctggccatcgcaatgaatatcaaataccctgactttttcacagcgagttacctggttgcaggaaaatgggatgcagaacaggttgcaccaatagctaaaaacaaattgtggtttatggcctcagaagatgatgaaggagcttttcccagtttcaacactattactgaacgtcttgagcaatctggtggaaaggtttccagggcagcatggaatggtcaatgggaccctgagcaatatcgatttgctgccgacatgttgtttgaagaacaaagcaatatccgttataccgcctttatcaaagacagtgtatttgatgaatactcttcacgagaaggtgcaagcggacatcgtaacacatggcgtattgcttacagcatcgagcctgttcgggaatggttatttaaccaacgcaaacaataa

SEQ ID NO: 13824 - DNA, 690 bp, Escherichia coli
atgaagaaactattattcgcaattttatttatctctgtatacggatatgcaaatattcctgaaaaaatgagtattaatgaaataataacacgcgctgttcagggagatgctgaagcgcaagccagattaggcgaagcgtatctaaacggaaacaacaatcagacgataaattatactcaggcttttgaatggttaacaaaatcagcagccagtggtaactctcgcgcaaaactgggcttagggattttataccttaacggctacggcgtaccttttgattatacaaaagcattagcgttttttaagcaggctgatgccctcggagaaatgaaagcggcacgttatcttggaattatttacgaaagaggattaggggtcactcaggattataaaaaagcggcagaatactataaaaaaggtgataaaaataatgatattacagcacaataccgtctggcaaaactttatgaacaaggtaacggtgtaaaacgtgattatcaacaagcgataaacctttaccttaagcatatcaacagaatggatcacatcactgcccccagttttgtggctctgggtgatatctattctctgggattgggggtagagaaaaacccacaactggctgaaaaatggtatcaaaaagcgatagatgcagctaatacacaacataaccaggaaataaatcattaa

SEQ ID NO: 13825 - DNA, 1236 bp, Escherichia coli
atggctggcgagaacaaactgagcgacaaagcacttaaaggatatctggggaaacctagagaaaagcagatcaccattgctgatggaaaggggctttctattcgtgtgagtaccaagggggctgtgagctttgttttcttctacaggttagcaggtggccgggctgctccggtctggctaacgttgggtaaatatcctgatatgtcactcaaacaggcaagggaaaagcgcgacgagtgccgtggttggttggctgacaaacgtgatccgcgtattcagattaagattcaggctgaagaacgcttaaagccggtcacagtggaggatgcactaaattactggtatgaaaattactgtaaggtgcgtcgtaaaactcatgctgtaacgcttggcagatttcgaaagcatatctttccctatatcggtcatttgcccgtaaatgacactcacctatatgaatggctggactgttttgaccgaattaaacgtaatgcaccagttatggcggcgtatgttttttctgacactaaattagctcttcgtttttgtcgggtacgccagtacgcgacgtgtgatgctttaaaggatttgcgcatgagtgatgtggggcagattgcaggtaagcgggatcgggttctggatgaagccgaactgggccagctctggaaggcaatttttgtcgagcctgatttaaaactaatgtctgaatacacgcgaaaaatgtttgtgctttgtacagtatttggatgtcgaatgagtgaagcccgattatcagaatggagcgaatgggatctagaaagttgggtttggactgtaccgaaagatcactcaaaaactggtgttgaaattgtcaggccagtacctgaaattctacggcagtgggtaacggatgttcacgaagagacaaaacatactggttatgtgctgggaagtctgcgaattagagaaagcgtaagcaagattggggggaaaatcggtaaacgtttgggccatgaaaaacaatggtcactacacgaccttagaagaacgctatctactcatctaagtgatctcggtgttgaattttatgtagtagaacaactgttaggccatgcgctacctggcgtggcaggtgtttacaaccggagtaagtttatggctaaaaaactggatgctctggaactctggactacatatctcaatagcatcgcagctgctgattcaaaagtgacaatcctcaaacaaaaggctggttag

SEQ ID NO: 13826 - DNA, 222 bp, Escherichia coli
atgaaaaaaatggcaattgttgataaaaaggggctggagtacattcctaacattgaccgaatgatccgtgagaaagaatgtcgggagctaaccactcttgcgaacagcacacgctggaagcttgaaaaggaggggaaattccccaagcgaatcaaaatcggatctacggcggtggcttatagactctctgagattcaagcttggataagaggtgaatggtaa

SEQ ID NO: 13827 - DNA, 684 bp, Escherichia coli
atgactccaactcctgacgatgctgtattcactgcatcaaacattataaatttcttcgtggcactcgggacttgcacagcagtgttagttgcattaattgctaaaaagcaatcatcttttgaatcaacattttctctcatgttatctcaacataacaatgctctaaatgatcttagaaaaaaatcaaattactcagagttaattaataaaatgatgaatggattggtttctttaaaagacactaatacactgatgcacaatcatgatgctgtttttggaagctacttcagaatattatatcatctattgaagttcattgatgaaaatgctggataccatccctttgatctagatcgtaaaaaaacctatacaagccttgtccgtgcacatctagataatgaaataacgtatttacttgcaataaactgtgcacatgctaacagtgaaaatcaatatcatttttataaaacattgattgagcgctatgccatgttagaacatttaatcttggataaatcaacgctattggactatacccctccagatttaaatgaatatcaaaaagatttgcgcgtagcaacaatagtggttaccgatgatataaaaactatttttaacgagattgcaacagtatattataagagcgcatttggaaaaaaccctgatttaaaaaatttcctgtaa

SEQ ID NO: 13828 - DNA, 195 bp, Escherichia coli
atgtcaactacaattcaaagagataagcagccaaaaggagccggcaaagcccctgcgtttcagatccgaatcaatcctgaactcaaagaacagatggctgaatcagcagctcaggaaggaatgagcttggccaattggattaaagaattagttcgtgctgagcttcgccgtaaaggtatagaacctaaaggctaa

SEQ ID NO: 13829 - DNA, 366 bp, Escherichia coli
atggctggaacacagcatacccaaactcaccctaaatttatatacatctttctggcgctacatcgcgatcgcatagcagatggagcaactacggtacatgtagccgctgacacgctggttgatgcgcgcaagatggttaaggagatgggctatactgcggctttctggaaagggcgggaagaaaacacgctgtttattcagaaatgtgaaaacaatttcatctggcgttttatcgccctgagtacggcacaaccgcgcgtgattaccatcgaggccaccagcgaacaggaagcccgccagcaatccccaactggctgcgtgatgatgttcgccgcccgtattcgtcaggaggtgtgccatgaatga

SEQ ID NO: 13830 - DNA, 225 bp, Escherichia coli
atgaatgatctttattttaaagtgctgacacatgctgaaaacgcgctcgtttgtggcaaaaatatgcgagaaatcttatcaacctggcttgatgggacaacaaatgcggaacacgatgaacgggatgctaatttagctggagcgttaattacgttacttgatcctgtcatcaaagagctggatgaagctataaaaatacacgaccagagctataccggagaataa

SEQ ID NO: 13831 - DNA, 288 bp, Escherichia coli
atgaaaaataaattttctggctttattgccagcggtcaaactcattcaaaaatcagccttggggatattttcaaagatagctatggctatcgggtaaagattatttcggttgatgatcgtcgtgtctcttatttgcgtgatggttatgattttgaatgtgttatgccgcgtcagcagttcgaaagagatttcattctggtaaaaaattgcaagacagataatcagaggcgtgccgcaggctatatccgtaaaattcgggcaatgttagttgccggaggtaacaaatga

SEQ ID NO: 13832 - DNA, 1821 bp, Escherichia coli
atgaaacgtgctccgaacttaaaataccaaccgcgcgacaaaatgacggaagtcatcatttttgctggcagtgatgcctggagccatgcaaaagaatggaatgaatgggcaggtaagcatattgcagcagatgatacaccaccagtcattctgggtacggaacaactggaaaacctggatgatatgcaaattatcgatgaaggccgtcattatgtgcgtgtttatcgtgccggaaagattgcagagaaaagtctgacgaaggttgcgacattacttgctattgcaggcgtaaaggaagcacgttgttaccgtagctttgttgatcgagagcctgaagactggactccgcgccttgtcggcctaaaagctgaagcggagcatggggaaagtctggtgattgaactgccagtgaagaaggcagagcgcaaaaatgacgagcgtgcttcatctttggcgttgaatcagatgggggccagccagcgcggtgaagttctccttgcacattacggcggcgaactggcaatcaatgccgactctgacaccgttcatcattacaacggcgttgtatgggagccggttcaggataaagagttacagcgtgctatggcgcagattttcattgatgcggagatcagctattcgcagaacgccattaaatcggcggtagataccatgaagttaagtttgcctgtaatggggaatacagcccgtaacctgattggattcagtaacggggtatttgataccagaactggtaattttcgggagcataacaaaaacgactggttgttaattgccagtgaattacctttcagcccaccagcagagggggaaacgctggcaacacatgcgccgaatttctggaagtggttgcgccgttcggtggctgagaatgaccgcaaggcagatcgcgtactggcggcattattcatggtgctggcgaaccggtacgactggcagttattcattgaggtaacagggccggggggaagtggtaaaagtgtgatggcggagatttgcaccatgctggcgggtaaggcgaatacagtatcagcaagcatgaaggcgctggaagatgcaagggaacgtgcgttagtggttggcttttcgctgattatcatgccggatatgacccgctacgctggtgatggggcagggattaaggccattacaggcggtgacaaggtggcaattgacccgaaacacaaagccccctattcaacgcgtattccggcagtagtgctggcggttaacaataacgccatgtcattcagtgaccgcagcggggggatctcacgtcgtcgggtgatattcaatttttcggaagttgtaccggagaacgaacgcgattcgatgctggcggaaaaaatagaaggtgagctggcggtagtgattcgccatctgcttacacggtttgctgatcaggacgaagccagacgcctgttatatgagcagcagaaatctgaagaagcactggcgataaagcgagagggggattcgctggtggacttctgcggctatctcatggcatcggtaatgtgtgatggcctgttagtgggtaatgctgaaattgtgccattcagcccacgcaggtatctctatcatgcctatctggcttatatgagggcacatgggtttggtaaacctgtaacactgacgcgcttcggtaaagatatgccgggggcaatggcggaatatggcagggagtatatgaaacggaaaacgaagcacggtttgcgttcaaacgtgacactgacggaggaatcagaagactggatgccatcatgtgtatcggtcactaatgacgatagcaaaaattaa

SEQ ID NO: 13833 - DNA, 246 bp, Escherichia coli
atgacagcgaagcacacaaaaaaatcacaatcgcacgcccttgatttgacggaacactggttaagggtgtcgataaaaatcatcgaccgcaacgccggggaaggatacgcgaaagcacatcccgaactgattagcgcattcatgacaacggcggctgcaaactttgccactctgaccgaacgggagattgctgaagcggaggaagtggcaacaatcaatattaagtccggagagcaggcagcatga

SEQ ID NO: 13834 - DNA, 450 bp, Escherichia coli
atgacggcgcaaatatcagtttacgggcggttggtggacgacccgcagacaaaacagaccagcaagggcacccccatgacgctggcgcgtatggcggtatcactgccctgcagtcagtcggatgacggtcaggcgacgatgtggttatctgtcctggcgtttggcagacaagccgacgcgctggcaaagcatcacaaaggcgaactcctgagcgtggcgggtaatatgcaggtgagccagtggactggacagaacggtgaaacgcggcagggctggcaggttatcgcagacagcgtaatcagtgcgcgaacggtgcgaccgggcggcaaaaaaggtcaacagggtcaggctactgacgcactgaacagagcaaaacaacaggcagatcagcaaggaagccatccaccagtgggagataatgaacaatggggagatgatattccgttttaa

SEQ ID NO: 13835 - DNA, 1041 bp, Escherichia coli
atggttgatttatattcgcctacccagcttgtacaggtggttaatgctgtagatgtacaaaaacaactaaatgcgttgtttaccagtttgttttttactcgctcggtaatgtttgaatcgcgcgatattattcttgatacaatcgacgatccaaatatcccaattgcagcgttttgttctcctatggtgggtagtaaagtttcacgtgacgaagggtacgaatcaaaaacaattcgtccaggctatatgaagccgaaaagcagcattgatccaaataagttagctgtgcgccctgttggtgtatcacctgagcaatacaatgcttttggagcgcgtaatattaaagttaaacaggcgattgtaaatcaggctaaagctattcgtgcacgtattgaatggcttgccgttcaggcaatcacaacggggaaaaatatcattgagggcgatggtattgaacgttatgagctggactggaatattaaaccacaaaatatcatcactcagtctggcggtgctgagtggtcaggtaaggataaagaaacttttgatccaaatgatgatattgagagctacgcagaatttagtgagggcgtcactaatattatcattatgggcggtaatgtatggaagaaataccgttcattcagagcgataaaagaggctctggatacccgtcgtggttctaattccgaactggaaacggcccttaaagaccttggtgattcggtgagttttaaagggtatatgggtgatgttgcgattgttgtttacagcgggcgttataccgacgaggacggaacagaaaaacatttccttgatcctgatttgatggtgcttggcaatacggctcttcaggggattgtcgcctatggcggtattcaggatccggagctaatccgaatggggctgactaaagccgaacttgcaccgaaaaactatattgtgcctggtgatccggctattgaatatgtgcagacacattcagcaccacagccaataccggcccgcatcaatcgttttgttaccgttcgcattggctaa

SEQ ID NO: 13836 - DNA, 342 bp, Escherichia coli
atggctactcattacactgaactcatggctggcactgaagcactggtgactacgctggggatattttcagctaataaaggggtaattcctgcatttacgccactgatgcaggaagatgcaacaggtgcactggtagtatgggatggttcgagcgtaggtaaagcggtttatgtttccgctgtacaaatcgacaccgcgaaaaaaacacaggctcaggtctataagacaggtgtcttaaatgttgatgctctgaactggcctgagtctgttaaagaactgtcagtaaaggttgcagcgtttgttggctcaggtatttctgttcagccgctggctcgtgtgtaa

SEQ ID NO: 13837 - DNA, 384 bp, Escherichia coli
atgcagaatgattacaatgaccttaagccaattgccgaaatgatgtacccgaatcaagctgtagaggaattaaaagctatcgctgacaaaatgtgtttaagcgagcgccttgttgatatgaatcaggtgatggaaattacaaccctgagtcgtcgtacactgctaaaccttgaggctagtggagagttcccggagcgtgtgcaggttacggaagggcgtaaggcctggtatttaagtgaagtgatcgactggataaataatattcctcgcgcttctgaatattgccgcgtacctgtcccaaaaaagccagatgcggcgctatgcctcaagattgagcgtgtacgccgcaatgcacgggatggtcgctataagctgattggttga

SEQ ID NO: 13838 - DNA, 543 bp, Escherichia coli
atgaaattacacctgatgaacaaaaaaaacatggcaaaaagttgccgtgtaagcgccactgcgttcgataagtggggagtgattcccgtcgagcgtaagggccgtgaggcgttctatgatgttgccagtgtaatagataatcgggttaacaatgcaatcagccagattacaaacgaaacgggcgatattgatgacgatgaacttttacgcgtcaggatcagattactgacagcacaggcagaggcgcaggagcttaaaaacgagcgcgaacgcggcgacgttattgatacagagttttgtatgtatgttctttccaaactggcgagtcagatttcatctatcatggacagcctgccgcttaccatgcaaaggcgcttcccacagatgactccggctatgctggatggacttaaaaaggaagtggctaaagcctgtaatgccagtgccggcgttgctgacaacctcccacagatactggctgattatctgatggaaagtacaggaaacgtaccggataagttgcagctgaataaggataagtaa

SEQ ID NO: 13839 - DNA, 276 bp, Escherichia coli
atgactgaatccgaactactgaaagtaatctgccatgctggtggagtcagccaccagcatgacgaacaggccacgcagccgggcagtgtcaccgctgaaaattacgctcgtgtggttgctgaggttatgtggcgtgacggtatagaactgaacggacaggattgcttagtcatccgcaccaaagtgctggctatactggcagctaggcggaggcagggacaacgccagaacgttgcatcgtaccagtggaagaagcctgacagactgcggcgataa

SEQ ID NO: 13840 - DNA, 762 bp, Escherichia coli
atgaatattatagatacccttcaaaatgacctagagcgcgcagtagcgcttcaaaacatactaattgcaagagctacaggagcccaggatgaagctaataatgattatttgcttctaagaacatatttcttacaaaatcctcctttacatcagctattacaagagtttgtgagaactaatcgctcactaaaagaattttggggatttataaaaaagactgaaaagtatgccccccggagagatttgatttataaggcatttcagccgatgctggactatctagaagggaaaaataaagctccagcggatgaagacatatctgatgtattaagaaagtttaacgaggatggagtccacgccgtttggataaaagcacttgaacggcgccatacagatccggatggtgcgataacctccgcaagaacacttcttgaaacagtttgcaaacacattcttgatgatatgggcattcagtataataataaaaatattgaaatgtcagaactttataaaactctttcaaaagaacttaacctatctgccgaccaacatactgaaaatatcttcaaacaaattctcggcggttgttctgcagttgtaaatgggttaggtactcttcgtaataaactcggtgatgcacatggaacgaacagctcatcaattaagccatccccaaggcatgccgaacttgcagtaaatttatcaggctcaatggctctttttttaattaacacttggttaaaccttaaagatgggaaataa

SEQ ID NO: 13841 - DNA, 2535 bp, Escherichia coli
atgaacgctaataatctgtcatgcctgatttactgtcgttgttctcttctgctttttgctgcattagggttaacagtaacaaaccattcatttgctgctgaagaggctgagtttgattctgagtttttgcatttggataaagggataaatgttattgatatccgccgctttagtcatggtaaccctgtgcctgagggcaggtattattctgatatttatgttaataatgtatggaaggggaaggctgatttgcagtatttacgtactgccaataccggtgctccgacgttatgcctgacgcctgagctgctttcattgattgatttagtcaaagatactatgtcgggaaacacctcctgctttccggcgtcaacaggactttcttcagccagtattaattttgacttatcgactttaaggttgaatatcgaaatccctcaggcactgctgaatacacgtccaagaggatatatttcccctgctcagtggcaaagtggtgttcctgcagcatttataaactatgatgctaactattaccagtataactcttccgggacgagtaacgaacagacttatctgggattaaaagctggattcaatttgtggggatgggctttgcgccaccgtggcagtgagagctggaataatagctatcctgccggatatcagaatatagaaacaagtataatgcatgaccttgccccattgagagcacaattcacattaggggatttttatacgaatggtgagctaatggatagcctcagtttgcggggagtcaggttagcatcggatgaacgaatgttacccggctctttacgtggctatgctcctgctgtccggggaatagctaacagtaatgctaaagtaaccatttatcaaaatgctcatatcctctatgaaacgacggtgccagccggaccatttgtcatcaatgatttatatcccagtggatatgctggtgaccttatcgttaagataacagagtctaatggccagacacgaatgttcacggttccttttgcggccgttgctcaactcattcgtcccggatttagtcgctggcaaatgtcagtgggaaagtatcgttatgcgaataaaacatataatgatttaatagcacaaggcacctatcaatacggcctgacgaatgatattactttaaacagtggtcttaccacagcttcaggatatacagcggggttagctggcctggcctttaatacccctctgggtgctatagcatctgacattacattgtccagaacagcattcaggtattccggtgtaacgcgtaaaggttatagtctgcactcaagttatagcatcaatattccagcctcaaacacaaatataactctggcggcttatcgttattcatcaaaagatttttatcatctgaaggatgcgctatcagctaatcacaacgcgtttattgatgatgtttctgtaaaaagtacagcgttttatcgtcccaggaatcaattccagatttcaatcaaccaggaattaggtgaaaaatggggtgggatgtatttaacaggaacaacctataattactggggacataaaggaagtcgtaatgaataccagatggggtacagcaacttctggaaacaactcggctatcaaattggattgtctcagtcaagagataatgagcaacaacgccgtgatgacagattttatattaattttactctccctctgggaggaagtgttcaaagcccggtgttttccactgttttaaattatagcaaagaagagaaaaatagtattcagacatcaattagtggtactggcggggaggataatcagttctcttatggtatttcaggaaacagccaggaaaacgggccttccggttatgcaatgaatggggggtatcgttcaccttatgtaaatataaccacaacagtcgggcatgatactcagaataataatcaaaggtcatttagtgcgtcgggagcggtggtcgcacacccctatggagtgacattgagtaatgacctgagtgatacttttgccattatccatgctgaaggagctcagggagctgtcatcaataatgcctctggtagtcgtctggatttttggggaaatggtattgttccttatgttacaccctatgagaaaaatcaaattagcatcgatccctccaatttagatttgaatgttgaattatcggcgacggagcaggaaatcattcctcgtgctaatagcgccacgttagtgaaatttgacactaaaacaggaagaagtctgttatttgatattcgtatgtctactggcaatccccctccaatggcttctgaagttctggatgaacatggacagttggccggatatgtcgctcaggccgggaaggtatttaccaggggactccctgaaaaaggtcatctcagcgttgtatggggaccagataataaagacagatgttcatttgtatatcatgttgcacacaataaagatgatatgcaatctcagctcgttcctgttctgtgtatacagcaccctaatcaggaaaaaacatga

SEQ ID NO: 13842 - DNA, 1926 bp, Escherichia coli
gtgaatatatcgaacagtcaggttgacaggctgcggcattttgtccgcgccgggcttcgtgccctgttcaggccggagccacagaccgccgttgaatgggcggatgccaattactatctcccgaaagaatccgcataccaggaagggcgctgggaaacactgccctttcagcgggccatcatgaatgcgatgggcagcgactacatccgtgaggtgaatgtggtgaagtctgcccgtgtcggttattccaaaatgctgctgggtgtttatgcctacttcatagagcataagcagcgtaacacccttatctggctgccgacggatggtgatgccgaaaactttatgaaaacccacgtcgagccgaccatccgtgatattccgtcgctgctggcgctggccccgtggtatggcaaaaagcaccgggataacacgctcaccatgaagcgtttttccaatggtcgtggtttctggtgcctgggcggtaaagcggcaaaaaactaccgtgaaaagtcagtggatgtggcgggttatgatgaacttgctgcctttgatgatgatattgaacaggaaggctctccgacgttcctgggtgacaagcgtattgaaggctcggtctggccaaagtccatccgtggctccacgcccaaagtgagaggcacctgccagattgagcgtgcagccagtgaatccccgcattttatgcgttttcatgttgcctgcccgcactgcggggaggagcagtatcttaaatttggcgacaaagagacgccgtttggcctcaaatggacgccggatgatcccgccagcgtgttttatctctgcgagcataatgcctgcgtcatccgccagcaggagctggatttcactgatgcccgttatatctgcgaaaagaccgggatctggacccgtgatggcattctctggttttcgtcatccggtgaagagattgagccaccggacagtgtgacctttcacatctggacggcgtacagcccgttcaccacctgggttcagattgtcaaagactggatgaagacgaaaggggatacgggaaaacgtaaaaccttcgtaaacaccacgctcggtgagacgtgggaggcgaaaattggcgaacgtccggatgctgaagtgatggcagagcggaaagagcattattcagcgcccgttcctgaccgtgtggcttacctgaccgccggtatcgactcccagctggaccgctacgaaatgcgcgtatggggatgggggccgggtgaggaaagctggctgattgaccggcagattattatgggccgccacgacgatgaacagacgctgctgcgtgtggatgaggccatcaataaaacctatacccgccggaatggtgcagaaatgtcggtatcccgtatctgctgggatattggcgggattgacccgaccatcgtgtatgaacgctcgaaaaaacatgggttgttccgggtgatccccattaaaggggcatccgtctacggaaagccggtggccatcatgccacgtaagcgaaacaaaaacggggtttaccttaccgaaattggtacggataccgcgaaagagcagatttataaccgcttcacactgacgccggaaggggatgaaccgcttcccggtgccgttcacttcccgaataacccggatatttttgatctgaccgaagcgcagcagctgactgctgaagagcaggtcgaaaaatgggtggatggcaggaaaaaaatactgtgggacagcaaaaagcgacgcaatgaagcactcgactgcttcgtttatgcgctggcggcgctgcgcatcagtatttcccgctggcagctggatctcagtgcgctgctggcgagcctgcaggaagaggatagtgcagcaaccaacaagaaaacactggcagattacgcccgtgccttatccggagaggatgaatga

SEQ ID NO: 13843 - DNA, 213 bp, Escherichia coli
atgaatgttggtttctctactctggaggcatgggtacgtcagctcagacgggaacgtcaggagatcacgccttctgctgcagcaccactcacatcagagcagcaacgtattcgtgagctggaaaagcaggtgcgtcgtctggaggaacaaaatacgatattaaaaaaggctaccgcgctcttgatatcagacttcctgaatagttaccgataa

SEQ ID NO: 13844 - DNA, 1236 bp, Escherichia coli
ttgaaatttcattcagagataaaaaactctataaaaaatgcgaagaaattcaaaggtattttatttgttaatataatatcttatctgctgctaacaattgcgataagaaaaggtcattcgaaagagattttaaaatttaagtggttgattttactttttggcgggagtgtcgctaaatattttgttgctagggcttcatttcttaatggtgattatatatttgctaagaaattatatcaagagataattaaggtaaacccaatacatactgatagctattatgggttggctgatgtttatagactaaccggaaataaattagaagcgaaggatgtactcattcaagtttttaatttttctgatcgtttgaaaacttggctattattggcgaacttggttgatacaaaaaaagattatgatgaattattgaatcattgggaaagggaatgttcttataggaatatacttaagtatcattatgatgtgaacgattaccttataattgctgcgttaagggctaaactatatgaagaagcattaaatcgggttaaagtattgttgggaagtataaattctgaggcttttatcttaccaaaaactagcaataaaaacttttctgttaatgctgctaaaattgcattattaggtctaaaaaaaatattggatgctaataaaatacagttttttttagttagcggaacattacttggttgtattcgtgataaaaaattactaaaacatgacaaagatattgatataggagtatggagcgaaacaaatctatccgtattatcaacgaaaattgcttgctctggcttgtttgatattgcacctatgcgctcaccgtatacgttgagaataaaacatgttaatggtgtggcaatcgacatattttttcattatcgagatcatgacagctattggcatgcgggttcaaagctgagatggaacaatactccatttaatttgatttcttatggttttcttgggaacgtgtttttaataccagaaaattatgatttatatttgactgagaattatggaaactggatgcaagaaaaaatgaaatttgactctgcattcgatacacccaatcatgaaatagttaatatgtatgaattaaaaatacacgcgtataaaaagctaataataaacatgaaaattggtagtgttgaaggcgttagatattatgaagataaattaaatgaacttgggtgtattatatctaagccttga

SEQ ID NO: 13845 - DNA, 1266 bp, Escherichia coli
atggcactgactgacgcaaaaatccgggctgcaaagcccactgacaaggcttataaactcactgacggggctggcatgttcctgctggtacatcctaatggttcccgttactggcgtctccgttatcgtattctgggtaaggagaagactctggcacttggtgtgtatccagaagtttctctctccgaagctcgtacaaaacgggatgaggcccgaaaactgatttcggaggggattgacccttgcgaacagaaaagagctaaaaaagtagtccctgatttacagctctcttttgaacatattgcacgacgctggcatgccagtaataaacaatgggcacaatcacacagcgataaagtactcaaaagcctcgaaacacacgttttcccctttatcggcaaccgggatatcacaacactcaataccccggatctgcttatccctgttcgtgctgcagaagctaaacaaatttatgaaatcgccagtcgtctgcagcaaagaatatctgccgtaatgcgttatgccgtacagtctggcatcatcagatataatcctgctctggatatggctggcgcattgactacggtaaaacgccagcatcgccccgctcttgatctttcacgtctgcctgaacttctgtcgcgtattaacagttataaaggtcagcctgtcacccggcttgccgttatgctgaatttactggtttttattcgttccagtgaactcagatacgcccgctggtctgaaattgatattgacaatgccatgtggactattccagccgaacgcaaacctctgccaggggtaaaattctcacaccggggctccaagatgcgaacaccacatcttgtgccactcagcaaacaggctgtagccatactgacagaacttcagacatgggctggtgaaaatggtctgatctttacgggagcacatgacccgcgtaaaccaatcagtgaaaataccgtaaataaggccctcagagtgatggggtatgacacaaccaaggaagtctgtggccatggattccgggcgatggcgtgcagtgcattgattgaatccggcttatggtcaagagatgcggttgaacgtcagatgagtcatcaggagcgcaacggagtacgtgccgcgtatattcataaagcagaacatctggaagaacgtcggcttatgctgcaatggtgggcagattttctggatgcaaacagggaggagtgtatcagtccgtttgaatatgcaaaagttaacaatccactgaaaaggtga

SEQ ID NO: 13846 - DNA, 1437 bp, Escherichia coli
atgaaaacatggttaatggggttcagcgagttcctgttgcgctataaacttgtctggagtgaaacatggaaaatccggaagcaattagatactccggtacgtgaaaaggacgaaaatgaattcttacccgctcatctggaattaattgaaacgccggtatccagacggccgcgtctggttgcttattttattatggggtttctggttattgctttcattttatctgttttaggccaggtggaaattgttgccactgcaaatgggaaattaacactcagtgggcgtagcaaagaaattaaacctattgaaaactcaatagttaaagaaattatcgtaaaagaaggagagtcagtccggaaaggggatgtgttattaaagcttacagcactgggagctgaagctgatacgttaaaaacgcagtcatcactgttacagaccaggctggaacaaattcggtatcaaattctgagccggtcaattgaattaaataaactacctgaactgaagcttcctgatgagccttattttcagaatgtatctgaagaggaagtactgcgtttaacttctttgataaaagaacagttttccacatggcaaaatcagaagtatcaaaaagaactgaatctggataagaaaagagcagagcgattaacaatacttgcccgtataaaccgttatgaaaatttatcgagagttgaaaaaagccgtctggatgatttcaggagtttattgcataaacaggcaattgcaaaacatgctgtacttgagcaggagaataaatatgtcgaggcagcaaatgaattacgggtttataaatcgcaactggagcaaattgagagtgagatattgtctgcaaaagaagaatatcagcttgtcacgcaactttttaaaaatgaaattttagataagctaagacaaacaacagacagcattgagttattaactctggaattagagaaaaatgaagagcgtcaacaggcttcagtaatcagggcccctgtttcgggaaaagttcagcaactgaaggttcatactgaaggtggggttgttacaacagcggaaacactgatggttatcgttccggaagatgacacgctggaggttactgctctggtacaaaataaagatattggttttattaacgtcgggcagaatgccatcattaaagtggaggcctttccttacacccgatatggttatctggtgggtaaggtaaaaaatataaatttagatgcaatagaagaccagaaactgggactcgtttttaatgtcattgtttctgttgaagagaatgatttgtcaaccgggaataagcacattccattaagctcgggtatggctgtcactgcagaaataaagactggaatgcgaagcgtaatcagttatcttcttagtcccctggaagaatctgtaacagaaagtttacatgagcgttaa

SEQ ID NO: 13847 - DNA, 426 bp, Escherichia coli
atgaacggtataaaaacggggctggggatcacgccgggtgaacacattatcagtgcggcctcagcccttagcagaaatatcaggcattgtttctgcctttcctgtcgtggtcggttgattttgcagacagatgctcagggggcgtggtttgagcacgatttacatgccctgagcgcgcaacagaaggcggcctgcgtggtgctgaatccggaaaagtcccacccttacattgaggatatggcgatgtttctatcgccattaccggtcgtgctggagtggcattgtgtgatgtgcgggcagcattttcccgggaaaaagttctgcgaagcctgtggcacggggatctattccagagcaacatgtacgaagtctgtttacagctaccagccagacttgtttcaggactgcggaggtgcgagtacttaa

SEQ ID NO: 13848 - DNA, 195 bp, Escherichia coli
atggtgatacgcaaaaagaagtgcagggactgcggagaagcgacagagcataacacggtatgttgcccacactgcggttctgtcgatcccttcggctattaccgcaatacagacagaatattcaccctcctgatggtcctgctggttgtggttctgctgatgacggctgcggtcagcgtgtatgtgctgtggtag

SEQ ID NO: 13849 - DNA, 207 bp, Escherichia coli
atgaccacacccttttcactgatggatgaccagatggtcgacatggcgtttatcactcaactgaccggcctgagcgataagtggttttacaaactcatccaggacggagcctttccggcccccatcaaactgggccgcagctcccgctggctgaaaagtgaagtggaagcctggctgcaggcgcgtattacacagtcccgtccgtaa

SEQ ID NO: 13850 - DNA, 603 bp, Escherichia coli
atgaaacaacagtaccagacccgctacgaatggctccacgaaagctaccagaaatggctgaccggcttcacccggcacgccgtatcctggggcgtgtgtcatccgaatatctactatttccataatctgacgcccgggtgggtgtcattcaacggcgaacagtcggagattgccattgttcccggcagtctgcaccggctgatttatggtcatgacaaacgggccatgccgcccctggatgatgatctggtggtgaatttatgcaccagtgagaatctgctggttcatcatccgatgctggaaggcattctgctgtctgagtgcacgcgcctgcataaaaaatcactggcgaacaaactgatcagtatattccgtcagtttgacggcacggagctgcgtctcaaactggtctggctttgctggtttgatttaatgaccggaaactgccttgacgactggacggagaacctgaaacggaaatcagaaaaagagctggagaaatggatcattgagcgccagaaccggaacgcaccgctgacgaatctgatggatcagtacgtgctcctggcattccgcacaacggttgacgatagccgcaactga

SEQ ID NO: 13851 - DNA, 507 bp, Escherichia coli
ttgtttctccacgtcgcagtgtgtcatggcggcattcaccagctttccggcttactctgtgcactgcagcagggagattgctctgagggcagtaccgtccggttgcagatgcttcgccacacgaagacactgaggagcagccctgttcccggatgtgatggtgcgcaggcgttatacccccctgagtacctgtcgtgcacaagatggtttccggttttctttttacgccggcgttgtatcgacggttgttttcgtcagaggatgacttcgttcagtgaccggcatcaacgaggcgttgtgtaccggcacgccctgattttacagataacaggacgcacctgccgctggtataaccgacaatatcagccatccctgccacacagacagatgccggtaaacgcgttaccgcgactgtccggtagcgaaacccgatgcttcccggcagtgacgttcacttcagcagagcgcactgtctttcacaggataacgatttttttgataccttaa

SEQ ID NO: 13852 - DNA, 1134 bp, Escherichia coli
atggaaaaagaaccggatgatatctgcgcagactgtccgaatattgatgcaataaaacggcacaaacaacaggccggagccatcagggaatacactgagtggttaaaaaaacaaccgcgtgcttcttacttttttctcttccggttgtacgcataccttcagaatgaagtgatatcccgaaaacaaaaacattcgctcaccagcgataacagccatcccccggaatctgatgtcacccctccggatttaacccttccccgtcgctactactgtgattacggttacacgccctaccccatgatgggcggacagatgtctgtttttgccacaacgtcagaaaccaccagttcgacgaatgcagtccccggaaacgcagttaccgggaatgagactgaaaagcatgaaaacgcggtaccggcgacattccccgtcagccgttctgcaatgcccccggaacctctgcggtttgccacgggttttccatcgcaaccactgcttgccggtccccgggaaaagccgatgcgcaccgtgcatcctgacatccacagcgaaattatatggttctgctccacttacctgctgaaatccggacctcagattacgaagacgattatcaactcagtattctctgaatgggcccgcatcagcaatgattacccctcccccttttcgtgggtggacagcagggacagtgaacagtgtgactggttatggaacgccatgcagctccggtgtgtgggaaccccgctgaatccccttaccccggagcagaaatactggtttgcctgcgccacgtttgataactgggagggctggaatgagcaacagatacagtttttactgaaaagtaatcccagacgaaacagagcgaagtttacggtcaccttcggccctccctggattcagcataaagccattcttcttgatgagctgaagagtgcccgggagcaacaaaaaaggcgcgatgaacgcgctgatggttccgtcccgctgaaactgtccggaaaaatccacaaacaccttgaaagtattgcccggagtcgtggtatccccccaaaaaaactgctgaatgaaatgattgagcaggcgtaccaggactcagtggtgaacagccggaataaaccactgatttaa

SEQ ID NO: 13853 - DNA, 207 bp, Escherichia coli
atggaacgcttcttccgcagtctgaaaacagaatgggtgccgacggatggttacgtaggcaaggacgaggcccggcaacaaattagcggttatatcctgaattattacaatagcgtcagacctcaccattacaacggtgggttgacgccgaaagaatcagagaacagatactgtttttactgtaaaaccgtggccaatattacttga

SEQ ID NO: 13854 - DNA, 450 bp, Escherichia coli
atgctgacccaaaacggcgtcccgatgagccgttaccgtgccgggcggctgatgacacatctgaatctgagcagttgtcagcccggaaaacatcagtacaaaaatgcccgtcaggagcatacctgcttgccgaatctgctcgggcgccagttcgctgtccccgagccagaccaggtatggtgtggagatattacctatatctgggccggaaatcgctggtgctatctggcggtcgtcatggatctttttgcccgcagggttgtcggctggggtctgtcagcgaatgccgatactgctctgataagcagtgccttgcggatggcgtatgaggtgcgtggtcagccgcgggacgtcatgttccatagcgaccagggaagtcagtatacaggactgaaatatcaacagcttctctggcgttacaggataaagcaaagtgtcagccgacggtga

SEQ ID NO: 13855 - DNA, 135 bp, Escherichia coli
atgaacaagaaaacaaagcgtaccttctctcctgagtttaagcaggaatgcgcccaacttatcgttgataaaggttactcataccgggaagccagtgaagctatgagtgttggttcctctactatggaggcatga

SEQ ID NO: 13856 - DNA, 816 bp, Escherichia coli
atgaaagagattacctcccccagcagtctgaacactttttcacctatatctatttctatccggaatatagcgacaaataagtttttaattatccatactgataattgtgacttacatatagaaaatgaacatgggaattttttctgcaccagagggagctttgtctttatgagcaggaatatgaatttctcttgtcggatacacaagatagaaacaggtaggcccccctataaaactatacgtcttggtagagaggagctaactatgctaacaaatatccttcacagcactcatgtctactgtctgaataagcacataacagaaggcaaatctcacaatggaattgtctgtattggcggcaataaagactggggctatattttcaataaaatcgagacctccaaagatagtgcactgaaaatgctgaaattatcatacttgatttctcgaatggggatagccccagatataattatttccttaatggcatctacagccgttaccttcaccgagaagataagaaaccagattgaaaataacccttcaaagagatggtgcctgaatatgattgctgatgagtttaatatttctgagatctctgtcaggaagcgactagagtctgaaggaacttcatttagtaatttattcttaaaagtaagaatggaaaaatccatgcaattgctactccagaatgagttacaaatatgtcaaatatcaaaatccgtaggattccgtagcacatcatattttataaagatatttaaagattacttcggcatcacccctaaacaacttatcatttactttagaaattga

SEQ ID NO: 13857 - DNA, 171 bp, Escherichia coli
atgatctcactcccatcaggtacccgcatctggctcgttgccggcgttgccgatatgcgtaaatccttcaacggagtggggggacagatacagcatgtgctggatgaagattccttttctggtcacctgcttatctttcgtggccgacggggtgacactgttaaaatgtaa

SEQ ID NO: 13858 - DNA, 177 bp, Escherichia coli
atgaaatatacaccggttggcgttgatatcgcaaaacatgtcattcagattcacttcatcaatgagcacacgggtgaagtggttgataaacagttgcgtagacaggattttctgacgttcttcggcaaccgtgagccatgcatgattggtgccatggaacgtagttctcaccaataa

SEQ ID NO: 13859 - DNA, 693 bp, Escherichia coli
ttgacgcttacaaaacgtctgaaagcactggaagaaaaagtagcccgtgatggcattgagctaactgacagccagatcgcagcactggagcgtaaagccagtgataacgaggcctgtagcgaaatcgaaacggctcatccgggatatctgggttcgcaggacacgctctatgtaggcaacctgaaaggtgtcgggcgtatttatcagcagacgttcgttgatacgtactcgaaagtggctcactgtaagctttacgtcaccaaaacaccgattaccgcggctgacttactgaatgatcgtgtactgccgttttatgcgtctcagagtctgccgatgctgagaatactgaccgacagaggcatggagtactgtggcaaagtagagcagcatgattatcagctttatctggcaataaacgatatagaacacacgaaaacaaaggcgatgtccccgcagaccaacggcatctacgagcggttccataaaacaatcctgaacgaattttatcaggtaacgttccgtaaaaaactgtacggcgatcttgatacattacagtcggatcttgatgaatggctggctcactataataatgagcgaacccatcagggaaaaatgtgcaatgggtggacgccaatggaaacgttacttgatggaaagcgcatctgggtcgagaaaaatttaagccagatgtaa

SEQ ID NO: 13860 - DNA, 1233 bp, Escherichia coli
atgcaacgaaaatcatttgaaataccaaaagcactggtctgggcatcatatctggatgtgcgtcgcaacaagggagcccccggatgcgacgggcagactttgaaaatgttcgaccagcaacgtgatggcaatctatacaagatctggaaccggctatgttcgggaacatggtttccgccaccagtgctggaaaaacggatcccgaagtcgaatggcaaggagcgcattctggggatcccaacagtatccgatcgaattgctcagggagcgataaaacttttcatggaagaaaagcttgacccgattttccatgctgattcatatggttaccgaccaggcaaatcagctcatgacgctctgaaacaatgtgccatccggtgctggcgttatagctggatactggaagtggacatcagtgcgtttttcgaccatgtgagacatgatctggtgctcaaagcactggaacaccacgggatgcctaaatgggccatcctgtactgtcgacgctggatggaagcgccaatgcagagttgtgaaaatggagaattaataacccgaacacgaggcactccgcagggcggggtcattagtccgctacttgctaacttgttccttcactatgcatttgatttgtggatggaaagagaatatcggggggtaccgtttgagaggtacgctgatgatattgtagtacattgttcacgaatgagtgatgcaacaaggctgaagaacaggttatcggagcgcttctcggaagtcgggctggtcctgaatgcagggaaaacgaatatcgcctacattgacacgtttaaaaggagaaacgtcgcaacgagtttcacctttctcggatatgacttcaaagtgcgtacgctgaagaatttcaaaggcgaactgtaccgaaaatgcatgccgggtgcgtcaaatgcagcaatgcgcaaaataacagaaacaatcaaaaagtggcgtatacatcgctcaacagctgagagtttgctggattttgcgaggcgctacaatgcgatagtgagaggctggatcgggtactacgcaaagttctggtccagaaatttcaactatcgactgtggagtgcaatgcagtcacgtctgctcaagtggatgcagtctaaatacagactttcgaaccggaaggctcagcgaaagctgacgctggtaaggaaagagtatccgaagctatttgtccactggtatttactacgtgcatcgaatgagtga

SEQ ID NO: 13861 - DNA, 1182 bp, Escherichia coli
atgagcatcggcgatgcgttgacgaatataatcccggtactgccatccgccctgcgacagtcttcagcccgtaaaccgttaccggcctcacttccccgtgaaacccgggttatccggccggaagaggaatgctgtcttgcctgtggtggcgaactcagttctctgggatgtgatgtgtcagagcaactggagcttatcagcagcgcctttaaggttatcgaaacacaacgtccgaaactggcctgttgccggtgcgaccatatcgtgcaggctccggtgccttcaaaacccattgcacgcagttatgccggagcggggcttctggcccatgtcgtcaccgggaagtatgcagaccatctgccgttataccgccagtcagaaatataccgtcgtcagggtgtggagctgagccgtgccacactggggcgctggacaggtgctgctgctgaactgctggagccgttgtatgacgtcctgcgccagtatgtgctgatgcccggtaaagtccatgccgatgatatccccgttccggtccaggagccgggcagtggtaaaacaaggactgcccggctgtgggcctacgtccgtgatgaccgtaatgccggttcacagatgcccccggcggtctggttcgcgtactcaccggaccggaaaggtatccatccacaaaatcatctggccggttacagcggtgtgcttcaggccgatacttacggttgttaccgggtgttatacgaatccggcagaataacggaagccgcgtgtatggctcatgcccggagaaaaatccacgatgtgcatgcaagagtgtccaccgacatcaccacggaagcactgcagcgtatcggtgaactgtatgccatagaggcagaagtccggggatgtacagcagaacagcgtctggcggcaagaaaagccagagctgcgccactgatgcagtcactgtatgactggatacagactcagatgaaaacactgtcgcgtcactcggatacggcaaaagcgttcgcatacctgctgaaacagtgggatggcctgaacgtgtaccgcagtaatggccaggtggaaatcgacaacaacattgcagagaacgccttacggggagtggccgtaggccggaaaaactggctctgtgtgtcacgaaggagtacttatggcaacaatgtgaaaattgcagcataa

SEQ ID NO: 13862 - DNA, 210 bp, Escherichia coli
atgaaattaatcaaaacattagttgcagtttccgctctttccatgatgtctttcggtgtctttgcccagagcgtcagcgctaccgcttccactctggatcgtgcagaagccaaaattgctgcacaggctgctgaacaaggtgcgtcatacaaaatcaccagcgcccgggttgaaaacagggtttatatgacagcagaattgttgaaataa

SEQ ID NO: 13863 - DNA, 885 bp, Escherichia coli
atgccattcagcaattcttccctctccgcgcaagtgaaatcatatctgacgtttcttcctgaagaaattcgccagaaaatccttgaacatctccacggtgttattcattacgagcccgtgattggcattatgggtaaatccggcaccggcaaaagcagtctgtgtaatgccatttttcagtcccgtatctgcgccacgcatcccctgaacggctgcacccgccaggctcatcgcctcaccctgcagattggtgaacgcagaatgacgctggtcgatctgcccggcattggtgaaacaccgcagcatgatcaggaataccggacactttatcgtcagctgctaccggaactggatctgattatctggatcctgcgggctgatgaacgtgcgtatgctgctgatattgccatgcatcagtttttactgaatgaaggtgccgatccctcgcgttttctgtttgttctcagccatgccgatcgcgtgtttcctgctgaagaatggaacgacacagaaaaatgcccgtcccgtcagcaggaactctcactggcaacagtaacagcccgggtggcaaccctgttcccttcatcatttccggtactctccgttgccgcacctgtcggctggaaccttccggcgtttgtgtcgctgatgatccacgcactgccaccacaggcaaccagcgcggtgtattcacatatccggggggaaaaccgctctgaacagacccagaaacatgcacaacagacttttggtgatgccatcgggaaaagttttgacgacaccgttgcccggttcacttttccggtctggatgttacagcttctgcgtaaagcccgggaccgcattatccacctgctgatcacactgtgggagcgtctgttctga

SEQ ID NO: 13864 - DNA, 543 bp, Escherichia coli
atggcaatccctgaacgtatgatccccgtaaaagtcagcagcaaaaaaataagagaattagcacagaaagctaaagagatacttgcagctattgatagtggagcaagtgaagaagatgcttttttaaaggacatgatcgatgactggaacagtcaggtagtatgtccatgtgagttttcagattttagagattattcctcttggacaaatgcaaatgaatttacacgaatagcttttaatttggaaaagttctacgaggattttacttgggaggaactggttcaaacgataagctgtgtatgtgatcaaaagtcaaacgaatcggaaaaaatttttgctcttttgttgcttgaaaagaattttcatggaaatccatccgatcttatattctggcccgatgaatggtttcaggatccagatatgttagatgttgaactgagtgttgaagagattgcatgctatttgatggttcgatccggtaggcaactagttgatgcacctgaaatcgacctgaaatatcaaataccccagtctgacgaataa

SEQ ID NO: 13865 - DNA, 453 bp, Escherichia coli
atgaactactttattcggccagctacgcctgacgatattaataaaatcatcgaattcaccactcaggaagcgcaagaatcagaaggttcagtgattgaccttgttgctgtggagcgtggtgtatcgtcggcgttcagtgaaaaccctcgttcaaaatattgggtcatggaagattcttcaggaacggtaattgccaatacctctgtcgtaaaagaatggagtgatttccatggtaatgactactggtggattaaaagcttttatatcgccccggagcatcgagggatgggactggctgatgagctcatcaaacatcttataaaagaagccaaatcagaaaaggcacttgagcttcgcttatatgtccatggagataacgggcgtgcgattcgtgcttatgagcgatgtggtttcattgaatctccgtataccattatgaaagtgggtttatag

SEQ ID NO: 13866 - DNA, 240 bp, Escherichia coli; identical to SEQ ID NO: 9103

SEQ ID NO: 13867 - DNA, 528 bp, Escherichia coli
atggtgaaggatattattaaaacagtgacattctcctgcatgctggccggcagtatgttcgttacctgtcatgtctgtgcagcgggttctgtggtgaatattacaggcaatgttcaggataacacctgcgatgttgacattaactcccgaaaccttgatgtcagtctgggaagttatgacagccgacagtttaccgcagctggtgataccacacctgcgtcggtatttcatgtcgggttaacctcctgcggcagtgctgtcagtgcagtgaagctgacatttacgggcacaccagataatcaggaggcggggcttattcagattaacagcataaatggagcgcggggtgtggggattcagcttcttgataaggataaacatgagctgaaaattaatgtgccgacaacaattgcgttaatgccgggaacacagaccatagcgttttatgcccgtctgaaagccacttatcttccggtaaaggccggtaatgttgatgcggtggttaattttgtacttgactatcagtaa

SEQ ID NO: 13868 - DNA, 2631 bp, Escherichia coli
atgttttccggagatggcggacaactcctgtctgataaatcactgaccggctctgctggcgggggtaataacagaatgaaatttaatatactgccgctggcattttttatcgggataattgtttctccggcccgggctgagctctattttaatccgcgttttctgtctgatgacccggaagcggttgcggacctgtctgcatttacacaggggcaggagcttccgcccggtgtgtaccgggtggatatttatctgaatgatacgtatatctcaacccgtgacgtgcagtttcagatgagtcaggacgggaagcaacttgccccctgcctgagtccggagcatatgagtgcgatgggggtaaaccgttatgccgtgccgggtatggagagactgccggctgacacctgcacatcactgaattccatgattcagggtgccacattccggtttgatgtcgggcagcagcgattgtacctgaccgttcctcagttatatatgagtaatcaggcccgtggttatattgcgccggaatactgggataacggaattacagcggcattgctgaattatgacttcagtggtaatcgggtgcgcgacagctatggtggcaccagcgattatgcctatctgaatctgaaaacaggactgaatatcgggagctggcgtcttcgggacaacaccagctggagttacagtgccggaaaggggtacagccagaataactggcagcacattaacacctggctggagcgggatatagtttccctgcgctcccgtctgacgatgggggacagttatacccggggggatatttttgacggtgtaaatttcagggggattcaactggcctctgatgacaatatggttccggacagccagagagggtatgcaccgacaattcacggtatttcccggggaacatcccggattagtatccgccagaacgggtatgaaatttaccagagtacgctacctccaggcccgttcgagataaacgatatttatccggccgggagtggaggtgacttacaggtaaccctgcaggaagctgatggcagtgtacagcgatttaatgtgccatggtcttcggtgcctgtactgcaacgtgaagggcatctgaaatatgctctcagtgccggagagtttcgcagtggcggacatcagcaggataatccccgttttgctgaaggaacgctgaagtatggtctgccggcaggctggacggtgtatggaggagcctggatagctgaacgctaccgtgccttcaatctgggggtgggtaaaaacatgggctggctgggcgctgtttcactggatgccacccgtgcgaatgcccggttaccggatgaaagccggcatgacggtcagtcatatcgttttctgtataacaagtcactgacggaaacagggacaaatatccagttaatcggataccgctactccacacggggctatttcagctttgctgataccgcctggaagaaaatgagtggttacagtgttcttacccaggacggagtgatacagatacagccgaagtatacggattactacaatctggcttacaacaagcggggaagggtgcaggtgagtatcagccagcagacgggggaatcgtcaacgttgtatctgagtggcagccaccagagttactggggaacggacaggacggaccgtcagcttaatgctggctttaactcatctgtgaatgacatcagctggtccctgaactacagcctgtcccggaatgcatggcaacatgaaactgaccggatactgtcatttgatgtcagcattccgttcagccactggatgcgttcggacagcacatctgcatggagaaacgccagtgcccgttacagtcagaccctggaggctcacggacaggctgccagtacagcagggctgtatggcacattgctgggggacaataatctgggatacagcatccagagtggttatacccggggagggtatgaggggagcagtaaaacaggatatgcctctctgaattacagagggggatacggtaatgccagtgcaggatacagtcacagtgggggctaccggcaactgtattatgggctgagtggcggtattctggcacatgccaatggtctgacactgagccagcctctgggagatacgctgattcttgtccgtgcaccaggtgcatctgatacgcgcattgaaaaccagacgggggtgtctacagactggagggggtatgctgtactgccttatgcaacagactatcgtgaaaaccgggtggcactggataccaacacccttgcagataatgttgatatagagaataccgtggtcagcgtcgtgcccacgcatggtgccgttgtgcgggctgactataaaacccgtgtgggtgtgaaagtgctgatgacgctgatgagaaacgggaaagcagttccttttggctctgtcgttacggccagaaacggggggagcagtatcgccggagagaatggtcaggtttatctgagcggaatgcctctgtcaggacaggttagtgtgaaatgggggagtcagaccacggaccagtgtactgcagattataaattaccgaaggaaagcgccggacagatattaagtcatgtcacggctagttgcaggtaa

SEQ ID NO: 13869 - DNA, 696 bp, Escherichia coli; identical to SEQ ID NO: 11074

SEQ ID NO: 13870 - DNA, 447 bp, Escherichia coli; identical to SEQ ID NO: 988

SEQ ID NO: 13871 - DNA, 2235 bp, Escherichia coli
atgaataagcacacactattactgactgttctttttctgaatttgatttgtactcccgtttttgctcaaaactggcaggtggcgacgtttggtcagtctacggatctcaacttttcatcgctgatagattcggccaagatcggacggaataatgcctggcttgcaggaaacaataattttcttgaagctggaaaattttacactttaccaacagatttttttattgaaagccgtgggggaaaaattgctaactcccatgacggtatgaccgtcttttatactattgttccggttactcagacattccgactggaggctgatttgacattagaacagattggtccggaggtgaatggaaaatcaccagcgggacaggagggagctggattgtttgtcagagatattatcggtcctcagcgacaggaacctcagtcagctggaacagaagaatatccccaggcctctaatatattgatgaatgcctttattacacagaataaaaagaatgataacttagtacagattacttcaattgttcgtgaaggagtaataaaaacatggggtaatgaaggtattacaattaagaaacagccgatcattgagaatataaactttacgcaaaaaagaaatattcatatgacgatcgagcgactaccagagaagttcatcctgaccgcttttgataccgatcgtaaagaaaatcagtcatggcaattttctgattactcaggctttatgaatcaactggataataatagtttagctattggtttttttgccgcacgaaatgcgaaactaagggtgaaaaatgcatcatttaaaccgggcaagccactggttgattacaaacaattaacttcacgtcaattcagtcgtgtccggcataaagcccctgaactttttcttgcttcacctcaatccgttgtaagaaactcaacaactcttcaatttttggccaatcaggctggaatagtcagtattgataatgataagcagactaagcaggtgcaggcgggtgaactggtacagtttccagttactttgcaaaaaaaacataatgacttcaccgtcaactttaacgttgatgggaatatatcaaaaaaagctatacgcatagagcaggttaaatcaaacctgactgatccttatgagatttacgtatgtagtgattgtcgacagggggccagaggcagcaaaaatgaccctgtagatttacagacagccgtaaaatttgtcgcacccggcggtaatatataccttaacgatggtcaatatcatggaattaccttagatcgggaattaagtggaatacctggcaagtataaaacaatttctgccattaatccacataaagccatttttataaacaagacattcaatctggatgcaagttactggcatctaaaatccgtggtctttgacggcaatgtggataatggaaataataaaccagcatatttgcgtatagctggtagctataatattattgagcatgtgatagccagaaataatgatgatacgggaatttctatttcagcgaaagataaaaaccgttttttctggccagctcataacttagttttaaactcagattcatataataatcttgatttatccgggattaatgccgatggttttgctgcaaaattaggtgtcggaccgggaaacatttttcgaggatgcattgcacataataatgcagatgatggttgggacctatttaacaaaattgaagatggtccaaatgcatctgttactattgagaattctgtagcctatgaaaatggcctgccatacaataaagcggatatcctaaaagggagtattggcaatggctttaaattaggtggtgaaggtcaaccagtaaatcacaaagttattaattccattgctattaataataatatggatggattcactgataattttaatactgggtcattgatagttagaaataatatagcaatgaacaatgcacgctataattatattttaagaactaacccatataaattcccatcatctatcctttttgataataattattcaatcagagatgattgggaaaataaaataaaagacttcttaggtgatacagttaacagtgtgaattataaattgcttgtttcacatgaaacaggaccggtacaaaaagatttatttttcacacgagatgatagtggaaatattatctatcctgatttttttcttaatatcattaataaatttaattag

SEQ ID NO: 13872 - DNA, 510 bp, Escherichia coli
  misc_feature (492)..(501): n is a, c, g, or t
atgggtaaccaatggcaacaaaaatatcttcttgagtacaatgagttggtatcaaatttcccttcacctgaaagagttgtcagcgattacattaagaattgttttaaaactgacttgccgtggtttagtcggattgatcctgataatgcttatttcatctgcttttctcaaaaccggagtaatagcagatcttatactggatgggatcatcttgggaaatataaaacagaagtactgacactcactcaagccgctcttattaatattggttatcgttttgatgtttttgatgatgcaaattcaagcacaggaatttataaaacaaagagtgcagatgtgtttaacgaagaaaatgaagaaaaaatgctcccgtcggaatacctgcattttttacaaaagtgtgattttgcaggtgtttatggaaaaactctgtcagattactggtcgaaatactatgataaatttaagcttttactaaaaaattattatatnnnnnnnnnncagaaatag

SEQ ID NO: 13873 - DNA, 720 bp, Escherichia coli
ttgggcggtggtactggcatgatcgcattacattcactggcatttggttattcgggacagcacccgctgggtacgctggatggatgttttgacaccggttcactgactgccattatcggagcgaatggcacaggtaagtccaccttgcttaaaacgttggccggtctgctgccacccctggggggttgcttctgtatggtaccgcaggggcaacgccagttaggttatttgccccaattgactgaatttgatcgccagtttccactgagtgttaacgatctggtgctgatgggatgtattccacacagcgggatgttcggtcgtatttcctgtctatggcgaaaaaaagctatcgaagcgctggataccgtcggtatgacagaattttcgcagatgcacatcggcacactttccggtggtcagttacagcgcgtactgttcgcacgactgctggtgatgcagccgtcggttattctgctggatgaaccatttactggcattgatgttcagactatccgtactctgctggttgttattcggcagctacatctggaaggacgtacaattcttgcggtgttgcatgacatggaacaggtagaaaaatacttttctcatgtactgatgctcagtgcggaaggccaccgatgggggagaagtgccgatatactccattccctcacggctgcagtcacgccaccgcagcaggggctgctgccatga

SEQ ID NO: 13874 - DNA, 855 bp, Escherichia coli
atgatgttactgcacctgttgtgtgagccatttggcgatttcggttttatgcgtcgggcactggtcggatgtctggcgctgaccctgagtgccgcgccacttggctgttttttgctactgcgccgtatgagcctgatcggtgatgcactgtcccatgcggtgttgccgggagtagcaattggctacctggtatcgggcatgtcgctggttgcgatgggagtcggtggcttcattgccgggctgtctgtggcgatgttgtctggtgtggtcagccgccgcactggattgagagaagacgccagtttcgctgggttttacctcggctcgctggcacttggcgtcaccctggtctctttgcgtggctccagtgtcgacctgctgcatgtgctgttcggttccattctggctattgacgccaatgctctgatcactatcggcataattagttccggttcagttctggtactggcgttgatctaccgggtgctggtgattgagtcgtttgatgtcactttcctgaaagttctgtcacgtcggtcgcgggcgctgatccactgcctgtttttgtcaatggtggtactcaatctggtggctggtttccagctacttggcaccctgatgacagtcggtattatgatgttaccggctgccagcgcgcgtttctggagtcaacgtctgtccatcatgttgttagcggcagtgggtattggtacctgcgccagtctggttggactgacctggtcttattacgctgatttgcctgcaggccctgcggtcatcctcacgagcactctgtttttctgcttttcagttctgtttggctctaatggcggcatgttatgcagatgtcgctga

SEQ ID NO: 13875 - DNA, 879 bp, Escherichia coli
atgaaacggtccattttggttgtggcactgtccagcctactagtaagcccactggtgattgcaaaagagttgaatgtggtggcaagtttctcggtactgggcgatatggtcagccagattggcggcccatacgttcatgtcactgatctggtgcaaccggatggtgatccacatgaatttgaaccgtcgccgaaagacagcaaaacgctggcacaggcggatgttgtctttgtcaatggattgggactggagggatggctggaccgtctgatgaaagcctctggctacagaggtgaggtaattaccgcgtctaacggaatagatacactgaaaatgaaagaggatgggaccaccatcactgatccgcacgcctggaacagcatgaaaaacggtattgtctatgctcacaacattgtcaatggcctgagcaaagcagacccggagcacgccagcgattatcgaaaacagggtgacagctatatccagcagttgcagcaactggataattacgccacgcagacgtttgctgccattccaagagaaaaacgtaaagtactgaccagtcatgatgcgtttgggtatttcgctgccgcctacggggttcgctttctgtcgccagtggggtactccactgagtcggaagctagcagtaaaaatgtggcgaaactgattaatcaaattaagagagagcacgtaaaattgtactttatcgaaaaccagaccgatccccgtttggtgaaacaaatcgccaatgccagtggtgcacaagcgggaggagagctttatccggaagcacttaccgacagtagcggcctcgctgctacctacacggcagcgttcaaacacaatgtcgataccctcgctgctggcatgaagtaa

SEQ ID NO: 13876 - DNA, 222 bp, Escherichia coli
atgaaagaaggaaccggaataaaagctggtcaccgtaatgctaatattaatgcagactaccgccttctggaattaacagtcatcaaccagcacaaaccattaacaatcaaacaaattttgattaacaaaattttagctaatacaattactgcattaaccactctgcagtttgccttctcaataagttacagatgccaaacaatactcttttatatgctataa

SEQ ID NO: 13877 - DNA, 1173 bp, Escherichia coli; identical to SEQ ID NO: 9028

SEQ ID NO: 13878 - DNA, 699 bp, Escherichia coli
atgactcagccgttgttgtcagatgggcccctgacagtgctgatggatcattatcttgatactgatgatctggctgacgggctaccgttgtatgtgtcgctgtaccccacggaagggggaatgcaggatattatcgactgcattcgtgctgaactgggtaccggaactacaaaaaactccgtttttcagcatatccagagcctgccccacgggcagcagaaagaagccttactggcgtcagcagcactgcccctgctgttccgtccccgtgaggtacagggaaaaatgtacggtgatggtggtatgggcggatggcaaaatatgcaggggaatacccctgtgacgccactggtggatgccggatgcaatatggtgattgtgtcgcatctgagtgacggttctttatgggatcgccgggcttttccggacaccacaatccttgaaatccgtccccggaaaaagctgaaacaaacaggggaagaaggcaaaagtggcggtctgctcagttttacatcggcacatatcgacacctggcgtcagcagggctatgaagacacgatgctggcgatggagcatatccggaaaccactggaggcgcgtcaggcactgacccggtcagaggcggtgttgcagaaaagtctggagaaaacggaagaggcagatttggcactgagaaacgcgatggcccggattaaataa

SEQ ID NO: 13879 - DNA, 171 bp, Escherichia coli
atggcaaactatgtatcagggaatatcatttctcaatcgtatgttcatgttaatcctgagtggttaaaaaatgcgacccctcaagataagaaactaagaatcaatgagattgagaagcaaataactgcctttgcgaagagccgaatactttttttattggaagtgaggtag

SEQ ID NO: 13880 - DNA, 432 bp, Escherichia coli
atggtgaaagatgcacatgatctaggttcgtatattaactccgagctgttatttcaaacaggcgcaaaacataaatctgagcgcaagtcagttgaggctcgcttaggagtttttggtattattgatcgcgttaacgcccagattaatgatctaagcttgatctctcggaggaaggaaaattcgccatcaatcacatataaaaaattgttacagttgcatggggatatcctctcatcccttgataagatttctgaaaatgccctagatgactcagatgaaaaaatagccaaggatatgtggattgaaggcgtatccggcatatctgtgggacgatcgcatttcaaatttaatcttaaaggtgatgatgatgtgtacaaaatgttggttgccgaaaagcagagcattcttgatgacctgaaaaaaaggcaatag

SEQ ID NO: 13881 - DNA, 453 bp, Escherichia coli
atgttacaacaactggcctgtgagttttttattgagttttcacgatatgaatattgccttaaggcatgtgggattttaatcaatggaggccatttaaaagctgactggaatggatattccgatcaggtgcgtgacgttatcgaaaacccgtctacccctaaacttaatgaagcgattcattacttcgaagagcatccccctaaaaaacagatttacggtgaaaaggggatcatgtggtcggaaaaactaccgagttcccggcaccgggctgaactaattttactgctggtctgtcgagtaagaaacaatctctttcacggcggaaaattcaatggtaattggtttgaaccggaacgcagtgagcagttaatccggcacgccctcaccatcctacgggcctgtgcggagaaacacgccggagtgaaagatgcctatgagaacaaacacttctga

SEQ ID NO: 13882 - DNA, 189 bp, Escherichia coli
atgattcagtgcgtttatagtctccggggtatgcattgtaccggagcataccatttctggtggataacaagccggcacattcagcctgcagtgaagatggaggcacctggttgtgaagaacgtttctgcccgtggctgcttcgcatcatcaatggtattcatacccgctcagaaatgaccgggtgctga

SEQ ID NO: 13883 - DNA, 207 bp, Escherichia coli; identical to SEQ ID NO: 5080

SEQ ID NO: 13884 - DNA, 1602 bp, Escherichia coli
atgaatatccgtatctggagtggtatactcccctgtatggatatctccgctctcaacaccacgaatgacatcgaaaaactgcgtgctatggcacttgccatggtacaagaagtcatgtcggagaatgccgaaaaagagcgggaattactggagaaaagccggcgcatccagcttctggaagaaatgctgaaactggttcgtcaacagcgcttcggaaaaaaatgtggaacgctggctggtatgcaacgctccctgttcgaagaggatgttgatgccgatatcgccgcgcttaccgcacatctggataaactgctcccgcaatcccctgaagaagacgaaaaagcgtcccgttcacgcccgatacgcaaacccttaccggttcatcttccacgggtggaaaaaattatccagccggacactgaccattgccctgaatgtgacgagccgctgcactatatccgcgatgcggtgagtgaaaagctggagtatattcccgctcactttgtggtgaaccgttatgtccgtccacaatacagttgtccctgttgccagaaggtgttcagcggtgaaatgccggcacatatcctcccgaaaagtgccgttgagccatcagtcatcgcacaggtgatcatcaataaatacggtgaccacctgcctctgtatcgccagcaacaggtctttgcccgttcagatgtcgggctgcccgtcagttcgatggctgacatggttggcgcggcgggtgccgcattatctcccctggcggcgttactccatcgcgagttgataaaccgtccggtggtgcatgcagatgagactaccctgaagatcctgaacacgaagaaaggcggtaaatcctgctccggttatctgtgggcatacgtcagtggagaaaggacgggaccgtcagttgtgtgcttcgactgccggaccggacgtagccatgagtatcctgaaaactggcttcagggctggggcgggacgctggttgtcgacggacataaagcttaccggactctggcaaacaaagtgccggagatcacgctggccggatgctgggcccatgcccgcaggggcttcgccgacctgtataaaatcagtaaagatccacgggctgccatagccgtgaagaaaatcgcggggttgtaccgtcttgagaagaagatcagtagccgccccgtggaaaaaatccgccagtggcgacagcgttatgcccgtccgatactggaagaactgtggtcatggcttgaagagcaggaaccgcaatgttctccgggaagggcattacacaaagccattgcctatgcgctgtctcatcgcgtggaactgagccgcttcctggaagatggtgcggtgccgctggataataatgtgtgtgaacgggccatcaaaaacgtggttctgggcagaaaatcgtggctgttcgccggttcgcagatggcgggagaacgcgccgcgcaaataatgagcttgctggaaaccgcgaaacgcaacggtctggagccgcatgcctggttgacagacgtcctgatgcgtctgccggagtggccggaggagcgactggcagagttgctgcctcttgagggatttaccttctccgggtga

SEQ ID NO: 13885 - DNA, 558 bp, Escherichia coli
gtgaagctggcaatagatcgtgctctgggtgaagatatcccgatcaagatggtctacgatctgacggcgacttttgcgcagcaaatgcaggccgaaggggttgtcgcgaccaacaaagtctcggaagcactccagaaagaatacggtctggatgaagttcaggcgggaatagtcgcgagcgctgcggcgtcagcatttgggggaattggtaaggctaaagggaattcccagcctaaaattgaacaaatcctcaagccagagaaaaactgggaaactgctcgaaacaaggcattggatcttgtaggtaatttaggagcggactctaagccagttatcggacgtttggaagtcagcgctggtaatgggaaagtcatagggcggcaatccagcgacggaaaagttggttggcgtgttgattatgatcctgaaaaaggcacacacatcaatatatgggattactcacagggtaaaggccctggaaaagcggtgaagcaagtcataccttttgaaggcaatgaaaagtcttttgaaacaatattgaaacagctaaacaggtag

SEQ ID NO: 13886 - DNA, 243 bp, Escherichia coli
atgagcggcaattctcagcacttatcagaattgtttattatttttataatcgcatttctttctatagtggtgtcattcctatgtattgatgtgtttttttctttggtggagtggttgataacaggtaatttaaatattagtttgaaagagattcggcatgttttgtttatcggatgtgtgattggctcatttattggtattggatgtgctctcgcaaaatatttcaggctaaaaggcttctaa

SEQ ID NO: 13887 - DNA, 1251 bp, Escherichia coli
gtggcggatattgcgcggacgcagggggaactgaatgcgttgaaggctgcgcaggataaatatgggcctgttccggcggatgcgacggaagaacagcggcaggcatatctggcaaaactgcgtgatacgccggaatacaaaaaggaacaggaaaagtatggtaccggcagcgatatgcagcgcggtatccaggctgcaacggctgcacttcaggggctggcggggggtaatttagcaggtgctctggccggagcttcggcgccggagctggcgaacatcatcggtcatcacgcgggtattgatgacaatacagcggcaaaagccattgcccatgccattctcggtggtgtgacagcagcccttcagggcaacagtgcggcagcaggcgcaattggtgcgggtactggtgaagtgatctcgtcagccattgcgaaaagcctctatccggacgtagatccgtcgaaactgacagaagatcagaagcaaaccgtaagcacgctggcaacgctgtcagcgggtatggctggcggcattgccagtggcgatgtggctggcgcggctgctggggctggtgtcgggaagaacattgctgagaataacctggttggtggcacagagtccgagcagagcaaagctgctcagacgcatggcgcagatgtactttcctgtaacgatgccccaggcggtgaagcctgtaagcgaggagaagcagtcaataaagcgtatgccggagcgttggccactggtagtgtagctctcttacctggcggtgctcaggccatgtggggattaggggcaggagctaatgcaggtgttagctatctgacggatggaactatagatcctacaacagcgattatcggtggttgggttaatgtgattagtgcagggaatggagttgtaggcacagttggctggaatgcaactggaggagcattaggaaactggctcgaaggaaaagccccaacatctggtgcgttgatcaatggtgctggttctgctattggatatggcattggtaaaggcctttcatggggcattaatagtggtgctaactggttaaaagacggctgggacccgaaatttaatccaacacttcaaaaatataccgatattaaaggagaattggggctatcaaaagaaatgacacccagtaggattcctggtatagctggggatgtgtcggcttcttttgcttctgagtatgaaggtaaaaagattgagtcttacattccggaggtgaaaaaatga

SEQ ID NO: 13888 - DNA, 357 bp, Escherichia coli
atgttgactacaacaagccacgacagcgtatttctgcgtgccgataattccctgattgacatgaactatatcaccagtttcaccggtatgaccgacagagggttttataagctgatcagtgaagattcatcaagccgggccgatccagccgcaggtataaaagcgaagtgtcacagtagatacagtaacgaatcgaagaatcacgggggcagaagtatgaaacgtgttgtgataccggtacgctggcaatgttcaacgtgtcagcgctggtattgtggcgctgttccctggtgctggtccccccgtgaatcttcctgcgtcccctccggtcagccggcactttgtcatcctgactga

SEQ ID NO: 13889 - DNA, 441 bp, Escherichia coli
atggatctttttgcccgcagggttatcggctggagtctgtccgcacatgccgatactgcactgataagcgatgccctgcggatggcctatgagacgcgtggtcaaccacatgatgttatgttccatagcgaccagggaagccagtatacaggcctgaaatatcaacaaattctctggcgttacagaataaagcaaagtgtcagtcggcggggaaactgctgggataatagcccaatggaacgcttcttccgcagtctgaaaacagaatgggtgccagcgaatggttacgtcgacaaggacgaggcccggcagcaaattaatgattacatattgaactactacaacagtgtcagacctcaccattataacggtgggttgacaccggaagagtccgggaacaggtaccatttttactgtaaaaccgtggccagtattacttga

SEQ ID NO: 13890 - DNA, 378 bp, Escherichia coli; identical to SEQ ID NO: 10109

SEQ ID NO: 13891 - DNA, 426 bp, Escherichia coli
gtggtgacgcaggccgacaaaacggagccctgccatgaatgggatatggccggcattcagccctctcccgcacaggcacagaacattcgcgaaaaaacggaggcggtattccgtctgttccggcctgtacatccggttgtggccgtatcggcccgcaccggctgggaactggatacgctggtcagtgcactcatgacagcgcttcccgaccatgccgccagtcccctgatgacccgactgcaggacgagctgcgcacggagtctgtccgcgctcaggcccgtgaacagtttaccggtgcggtggaccggatatttgacacagcggagagcgtctgtgttgcctctgttgtccgtacggccctgcgcgctgttcgtgacaccgtggtctctgttgcccgcgcggtatggaactggatcttcttctga

SEQ ID NO: 13892 - DNA, 483 bp, Escherichia coli
gtggatgagtatttctggcgacacatcctgcaccggggacatcagcgggtactgtttgtggtgacgcaggccgataaaacggagccctgccatgaatgggatatggccggtattaagccttctcccgcacaggcacagaatattcgcgaaaaaacggaggcgctattccgtctgttccggcccgtacatccggttgttgccgtatcggcccgcaccggctgggagctggatacgctggtcagtgcgctcatgacagcgcttcccgaccatgccgccagtcccctgatgacccgcctgcaggacgggctgcgcacggagtctgtccgctctcaggcccgtgaacagtttaccggtgcggtggaccggatatttgacacagcggagagcgtctgtgttgcctctgttgtccgtacggccctgcgcgctgttcgtgacaccgtggtctctgttgcccgcgcggtatggaactggattttcttctga

SEQ ID NO: 13893 - DNA, 1134 bp, Escherichia coli; identical to SEQ ID NO: 12660

SEQ ID NO: 13894 - DNA, 597 bp, Escherichia coli
atggtactttctgattgttattcatgggctaacgagcagtttggacatgcccgtctcggtgatccgcgtcgtacacgacgccttgtgtcactgacctcttctctcgctcagcatgcaggtctttctattgtgaaatcatcccagtccactgctcaggttgaaggtgcgtaccgcctgatacgtaacccgtctgtgtccccgcaagccattgccgaagccggatttaccgccactgtaagggcatgtgaggctcatccgctgctcctcgcactggaagacaccaccaccattaacttcagccacagtacggcatctgatgaccaggggaataccaccactaacccgaagacgcgcgggctgctggctcactctgtcctgatgtacgcccctgacagcgccctgccagtcggttttatcgaacagcagcgctggagtcgggtcacggacacctacggtgttaagcaccagcgaaaagaacgtccctgtgaagaaaaagaaagttaccgctggcagcaggcttcggagcgtatggccgaacggctgggggagatacagaaacgggtaatcactgtctgtgaccgggaagcggatatctag

SEQ ID NO: 13895 - DNA, 369 bp, Escherichia coli
gtgtcagacacactccccgggacaacacttcccgacgacaatcacgaccgcccctggtgggggctaccctgcaccgtgacgccctgtttcggcgcccgtctggtgcaggagggtaaccggttgcattaccttgccgaccgtgccggtatcagaggcctgttcagcgatgcagatgcgtaccacctggaccaggcctttccgctgctgatgaaacaactggtgctcatgctcaccagtggtgaactcagcccccgcatacagcataccgtcacgctgtatgcgaaaggactgacctgcgaagccgacaccctcggcagttgtggttacgtttatctggctttttatccaacatccgaaacgaaaaagtaa

SEQ ID NO: 13896 - DNA, 780 bp, Escherichia coli
atgatggaactgcaacatcaacgactgatggcgctcgccgggcagttgcaactggaaagccttataagcgcagcgcctgcgctgtcacaacaggcagtagaccaggaatggagttatatggacttcctggagcatctgcttcatgaagaaaaactggcacgtcatcaacgtaaacaggcgatgtatacccgaatggcagccttcccggcggtgaaaacgttcgaagagtatgacttcacattcgccaccggagcaccgcagaagcaactccagtcgttacgctcactcagcttcatagaacgtaatgaaaatatcgtattactggggccatcaggtgtggggaaaacccatctggcaatagcgatgggctatgaagccgtccgtgcaggtatcaaagttcgcttcacaacagcagcagatctgttacttcagttatctacggcacaacgtcagggccgttataaaacgacgcttcagcgtggagtaatggccccccgcctgctcatcattgatgaaataggctatctgccgttcagtcaggaagaagcaaaactgttcttccaggtcattgctaaacgttacgaaaagagcgcaatgatcctgacatccaatctgccgttcgggcagtgggatcaaacgttcgccggtgatgcagcactgacctcagcgatgctggaccgtatcttacaccactcacatgtcgttcaaatcaaaggagaaagctatcgactcagacagaaacgaaaagccggggttatagcagaagctaatcctgagtaa

SEQ ID NO: 13897 - DNA, 486 bp, Escherichia coli
atgaaaaccatttcacataattccaccacatcttctgtttccgtaaccgctgcatcagggaatgaccagcctcagttggttgccaccatagtccctgatgaacagcgcatcagcttctggccgcagcactttggcctcattccacagtgggtgaccctggagccccgtgtcttcggctggatggaccgtctgtgtgaagactactgcggtggtatctggaatctgtacaccctgaacaacggcggggcatttatggcccccgaaccggatgacgatgatgacgaaacatgggtactgttcaatgccatgaacggcaaccgcgctgaaatgagcccggaagctgctggcattgctgcctgtctgatgacgtacagccatcatgcctgtcgtacggagtgttatgccatgacggtccactattaccggctgcgggattacgccctgcagcatccggaatgcagtgccattatgcgtatcatcgactga

SEQ ID NO: 13898 - DNA, 141 bp, Escherichia coli; identical to SEQ ID NO: 7328

SEQ ID NO: 13899 - DNA, 444 bp, Escherichia coli
atgctgcagggcgtaatcccgcagacggtaataatgaaccgtcatggcataacactccgtacggcaggcgtgatgactgtacgtcatcagacaggcggcaatgccggcggcttccgggctcatttcagcgcggttaccgttcatggcattgaacagtacccatgtttcgtcatcatcgtcatccggctcaggggccataaatgccccgccgttgttcagggtgtacagattccagataccaccgcagtagttttcgcacagacggtccatccagccgaagacacggggctccagggtcacccactgtggaatgaggccaaaatgctgcggccagaagctgatgcgctgttcatcagggactatggtggcaaccagttgttgcaggccagtctccggtgcacaggccgaagaggtggtgttctgagacaatgttttcatgtatga

SEQ ID NO: 13900 - DNA, 246 bp, Escherichia coli; identical to SEQ ID NO: 4533

SEQ ID NO: 13901 - DNA, 315 bp, Escherichia coli
atgcagtcgctgattctgccgccaccggcacgccaggcgctggcacaggcggcactgacttaccgttatggtgacgaacatcggcccgtcaccaccgccgacattctgacgccacgacgccgggaggattacggtaaggacctgtggagtacttatcagaccatccaggagaatatgctgaaaggcgggatttccggtcgcagtgcaaaaggaaaacgtatccacacccgtgccattcacagcatcgacaccgatattaagctcaaccgcgcattgtgggtaatggcagaaacgctgctggagagccagcgctga

SEQ ID NO: 13902 - DNA, 447 bp, Escherichia coli
atgacgcccggcgagcgcagtctcattctgcgggccctgaaaaccctggaccgccatcttcatgaacccggcgtggccttcacctccacccgtgcggcacgggaatggctgattctgaacatggcgggactggagcgtgaagagttccgggtgctgtatctgaataaccagaatcagctgattgccggtgaaaccctcttcaccggcaccatcaaccgcacggaagtccatccccgggaagtgattaaacgcgccctgtatcacaatgccgcagccgtggtgctggcacacaatcacccgtccggtgaagtcacccccagtaaggcagaccgccttatcacggaacgtctggtacaggcactgggcctggtggatatccgggtgccggaccatctgatagtcggtggcaaccaggttttctcctttgccgaacatggtctgctttaa

SEQ ID NO: 13903 - DNA, 315 bp, Escherichia coli
atgcagtcgctgattctgccgccaccggcacgccaggcgctggcacaggcggcactgacttaccgttatagtgacgaacatcggcccgtcaccaccgccgacattctgacgccacgacgccgggaggattacggtaaggacctgtggagtacttatcagaccatccaggagaatatgctgaaaggcgggatttccggtcgcagtgcaaaaggaaaacgtatccacacccgtgccattcacagcatcgacaccgatattaagctcaaccgcgcattgtgggtaatggcagaaacgctgctggagagccagcgctga

SEQ ID NO: 13904 - DNA, 432 bp, Escherichia coli
atgccggcagagcagcggcttgctgaacgtcagcgaaaaacgaaaccgctgttgaaatccctggaaagctggttgcgtgaaaagatgaagaccctgtcgcgacactcagagttggcgaaggcgttcgcgtacgcacttaaccagtggccggcactgacgtactatgcgaacgatggctgggtggaaatcgacaacaacatcgctgaaaatgccctgcgggcggtcagtctgggtcgtaaaaacttcctgttcttcggctctgaccatggtggtgagcggggagcgctactgtacagcctgatcgggacgtgcaaactgaatgacgtggatccagaaagctaccttcgccatgtgcctggcgtcatagcagactggccggtcaaccgggtcagcgaactgcttccgtggcgcatagcactgccagctgaataa

SEQ ID NO: 13905 - DNA, 567 bp, Escherichia coli
atgtatacagaatcaaatgttaagctttcctgtaacgccctctggcaaaagtgtgtccttgcaactctgtatcgggctgcagccacacatcctgaaattaaattattacaatttaaattaataccagggcagggtattaataaggccattccctctctgatggctgattttactggtgaactgcatagactcatttctgaatatttgcagtgtaagcgacgtaaagatcaatctgttgagcccacccctttatattatctctggagtagggaagctgtggctaacgataccactccttatcttatggtgctgctacttaataacgatgtctggtgtaagagtcgtgaggtggtggttctcagaaatctgattgagcagacgtggggaaaagtattgggtgaagataactccattacacatctggttgtgtatcctgaagtgctgtcgttggtatttgatgcagctaacacatacaacgctgagcctggtgtactggaacagacggcccgggcttacattgaatcacatggtaccattgaacgtcatcttgggtgtagtgacttttaa

SEQ ID NO: 13906 - DNA, 141 bp, Escherichia coli; identical to SEQ ID NO: 7328

SEQ ID NO: 13907 - DNA, 396 bp, Escherichia coli
atgctgcagggcgtaatcccgcagccggtaataatggaccgtcatggcataacactccgtacgacaggcgtgatgactgtacgtcatcagacaggcggcaatgccggcggcttccgggctcatttcagcgcggttaccgttcatggcattgaacagtacccatgtttcgtcatcatcgtcatccggttcaggggccataaatgccccgccgttgttcagggtgtacagattccagataccaccgcagtagttttcgcacagacggtccatccagccgaagacacggggctccagggtcacccactgtggaatgaggccaaaatgctgcggccagaagctgatgcgctgttcatcagggactatggtggcaaccaactgaggctggtcattccctga

SEQ ID NO: 13908 - DNA, 324 bp, Escherichia coli
atgactgtacgtcatcagacaggcggcaatgccggcggcttccgggctcatttcagcgcggttaccgttcatggcattgaacagtacccatgtttcgtcatcatcgtcatccggttcaggggccataaatgccccgccgttgttcagggtgtacagattccagataccaccgcagtagttttcgcacagacggtccatccagccgaagacacggggctccagggtcacccactgtggaatgaggccaaaatgctgcggccagaagctgatgcgctgttcatcagggactatggtggcaaccaactgaggctggtcattccctga

SEQ ID NO: 13909 - DNA, 444 bp, Escherichia coli
atgctgcagggcgtaatcccgcagacggtaataatgaaccgtcatggcataacactccgtacggcaggcgtgatgactgtacgtcatcagacaggcggcaatgccggcggcttccgggctcatttcagcgcggttaccgttcatggcattgaacagtacccatgtttcgtcatcatcgtcatccggttcaggggccataaatgccccgccgttgttcagggtgtacagattccagataccaccgcagtagttttcgcacagacggtccatccagccgaagacacggggctccagggtcacccactgtggaatgaggccaaaatgctgcggccagaagctgatgcgctgttcatcagggactatggtggcaaccagttgttgcaggccagtctccggtgcacaggccgaagaggtggtgttctgagacaatgttttcatgtatga

SEQ ID NO: 13910 - DNA, 228 bp, Escherichia coli
atgcacgcgtttaccttcccgatgcttacgtttctggtaagcgtcgattcgggctttcagggcattgatgaagcgggatatcacagctgcgtccgttgctgccggtacatccgggaaacgcaggtcaacccgcaatgccgtcaggcggggatgaacattcagtgcgtgccgcactgtctcacgaatacgttgctgccagaaggggttgtatttgtaggtcatggttaa

SEQ ID NO: 13911 - DNA, 312 bp, Escherichia coli
ttgctggatattctgcgtgccaagttgctgaagcgcggcattgaaggcagttcactggatgtaccggaaaatatcgttcatagcggtaaaacctggtttgtggaagcgaaactgaaacagggcattgagagcgcgactcagaagaaaatcgtcaaaatgatcaaagacagcaaactgaaagtgcaggcgcaaattcagggcgatgagatccgcgtaacgggtaaatctcgtgatgatttacaggctgtcatggcgatggtacgtggtggcgatctcggtcagccgttccagttcaaaaacttccgcgattaa

SEQ ID NO: 13912 - DNA, 171 bp, Escherichia coli
atgccatctttcgatattgtctctgaagttgatcttcaggaagcacgtaacgcggtcgataacgcgagccgcgaagtggagtcccgttttgacttccgtaacgttgaagcctcatttgagctgaatgacgccagcaaaaccatcaaagtgttgagcgagtccgacttctag

SEQ ID NO: 13913 - DNA, 912 bp, Escherichia coli
atgaaaattaccgtattgggatgcggtgccttagggcaattatggcttacagcactttgtaaacagggtcacgacgttcagggctggctgcgcgtaccgcaaccttattgtagtgtgaatctggttgagacagatggttcgatatttaacgaatcgctgaccgccaacgatcccgattttctcgccaccagcgatctgctcctggtgacgctgaaagcatggcaggtttccgatgccgtcaaaagcctcgcgtccacactgcctgtaaccacgccaatactgttaattcacaacggcatgggcaccatcgaagagttgcaaaacattcagcagccattactgatgggcaccaccacccatgccgcccgccgcgacggcaatgtcattattcatgtggcaaacggtatcacgcatattggtccggcacggcaacaggacggcgattacagttatctggcggatattttgcaaaccgtattgcctgacgttgcctggcataacaatattctcgccgagctgtggcgcaagctggcagtcaactgtgtgattaatccactgaccgccacctggaattgcccgaatggtgaattacgtcatcatccgcaagaaattatacagatatgcgaagaagtcgcggcagtgatcgaacgcgaagggcatcatacttcagcagaagatttgcgtgattacgtgatgcaggtgattgatgcaacagcggaaaatatctcgtcgatgttgcaggatatccgcgcgctgcgccacaccgaaatcgactatatcaatggttttctcttacgccgcgcccgcgcgcatgggattgccgtaccggaaaacacccgcctgtttgaaatggtaaaaagaaaggagagtgaatatgagcgcatcggcactggtttgcctcgcccctggtag

SEQ ID NO: 13914 - DNA, 339 bp, Escherichia coli
atgcaaatacctcgcatgtcacttcgccagctggcctggtccgcggttcgccagcaagagtctacgctggcgattcgtgccgttcatcaagggacaacgatgccagacggtttttcaatctggcatcaccttgacgctcacggcattcctttcaaaagtatcacccccaaaaacgacactctgttaattacctttgactccagcgaccagagcgccgccgcaaaagcggtcctcgacagaacattgccccatggctacatcattgcgcagcaggacaataacagtcaggctatgcagtggctgacccggttgcgggataactctcatcgcttcggataa

SEQ ID NO: 13915 - DNA, 7932 bp, Escherichia coli
atgaataaagtatataaagtcatttggaaccatacaacccaaaaatgggatgttgtttcagaattgacgagttgtagaaaaaaatgtaaatcaactcgcttaggaattgctttatcagcaatggttctggggggcgctattgcaattaattgcaataacgcaatggcagatgtcatattgtcaccagactggcgtccgggtacgaataactcgggtgttggggctgcaacagtaagtggtaaaaccgaatacatcactggtccaaatgtcgtccagtctggtgggtcaggtcttatctggatgactgtagaacaggcaattttaaatggctacaccactggagataatttatccggattgatttacgtcaataccggagaaaaaacaaaaaccattacagtgaaggatgaggttactggcgcttctcaaacacttcaagtgtttgatactgactctttctcacaacgcgatgcggggactgggggaaatgaaaccattcctggttttagtggcactgcggattttttcaatgcgacacgttttgtaacagccaataatggcggtacagctattttggatgtgggttcaccagcaatcggtaatttttttaaaaatacacagcttgctgtagctgatggagaaggttcctctgttgtatggaactcggtcaatgatttttattttcagcctggtgcaaccatgcaggggggcggcgttactcaaaaaatcattgactcaatgaaatatgctggaacaattactgattgggcgggaaaagtacaccatattaactctcttgatgatttaaagcaatataatcaatatttgataaagtcactagaggacaaaacgctttcttataagcagtatgatgctgaatttaataaggcccttattgtcaccaagcataattacaatgtggatatgaccgctgggggacgtatagactcaactccttacaaagaaaatgtagggctgcttgctgttctccatgcaaccaataacgcacgagcaatattaggtaaaacgggtaaattaactggagttcttcctgcctatgggaatggaggagggatcgttgcaactaatggtgggaccggtgttaatgaaggggtcattgatgccattggtactgaaatgattgcctatcaagacagtaccattgttaacgatggtacactttttgtttgggataataatgataaatatgctctccaggcagaggggatggttgccggtagtaatggttcttcagccattaataatggtgttattaatattcgcccatttaaaaatgctttcgctccagaggggattaacaccgcaattgttgttagtaatgggggcatggcaacaaataaaggcacaataaatattactgccgatgcatcaactaatgataataatggcaaaacacgaggtgtaaatgttggagctggaggctcttttattaactcggccttcgggagcatcaatgtaggtattgcggaggataaaactgcgactcattcggctgtgggttctgttgcgattgaagtacaaaatggtgcaaacaaagtcgttaatgaaggtactatttttttgggcaggggggctcaggggaactacggaatcctggcaaaggatgccgggactgttgatgtggtaaataaagggactatcactattgacggtcatgacagtgatgcacctgcactgaatgttggcatgctggcaaataatagctccgggatgaaaaactccgggattatcaatgttaatggtctgaacagcaccgggctacaggtaatcaatgcaggacagttgaattctgacggtacgataaatgttggcggcaagggtatcagtagtggtttccgtaactatggtgcctgggtggaaggtgccggaagcaatgttaatgtatccggaaaaatcagtcttgccggtacgggggctgtgggggtttttgctaaagatggcggcagtctgaccctgtcaggcaatggtgcagtgctatttggcagcagcgatcagataggcttttatgtctatggaaaggactctgccattcataataccggaagcggtgttatggatgtgtccactgaaaactcaacattattccgtattgccagtggtgcgacattccagggaactgcagatgcttcttctgcacttacggcgtctggtaagaactcttatgcacttattgccacggggaaatcggatggcggtgtggcctcgacagtaacgtctggaggaatgaccatcaacctgacgggtgagggggctacagcgactttaattgaagggggagcgcagggcacaattgaaagtaatgccattatcaatatggataatgccagtgcgatagccggtattgcggatggcaatggctatgatatttccggcaaactcattaatccgaaggacaagaccacactattaacggcgggggctcagttaagttccacccaggataaagtgaccgggtatatcgcccgtaatggggccactctaaataataccggtaatatcatctttactggaaagaatacagtgggcgtccgggttgaggagggggctgttggtaccaacagcggaaatattacagttcaggatggtggtgtgggactaattgctaatgccacacaagatgttacaacgattaataactcgggaaatctcgttctcaagggaggagataatgctaaccgtacaacgggtataaaagcatctggtacaacaacaacggttaatatgaccgcgggtactatatctttgcagggacagggggcgattggcgttgaggccagcaataaagggactgttaaccttgatggttcggcagtaccgaactttgctgctgacggctctggtattaccgatcagattgcttttcgtattatcggagatggtgcaaccattaagacgaatattgcaccgggaactctgctggatgccagtggggaacgttctgtacttttccgtattgaagatggggcaaaacaggccggctctctgctgatgaaaacctccgggacaggcagccgtggtatctgggccacagggaaagggagcaatgtcctggctgatgctggcagtgatttccagatcctgggcgctcaggctcagggattatatgtaactggtggtgcgacagcgacgctgaaacagggggcatcagttaaccttgtaggggatggcgctgttgtcgcggaagttgacggaaatgaatacgctctggatggcagtattacacaaacgaatactggctcggttattaccaatgaggcagatatctcttcgccgctgaataatgccaagggctttattacgcgtaatcagggactgttgattaacaacggcaacattgatttcactaccggtacagataatatcggcgtctgggttgataacggccgctttgaaaatacaggaagccgtattgcggtcaatggcgttgcattatttgttgaaggtgcacagtctcagattaccagcacaggaggggatatcgtcgctgtggatggtgaggctgccattaagctgggggcgggcgcgtcactgaacctggcagggagtggcttgggtacgatcgaaggtcagaaaaatgcgcatggcatcctgctggatacaggggctgtggggctggttattgatggtgcgaaaatcaatgttaatgctgcaggtgcggtcggtcacgggattgagaaccgcgcagaaattgaaggcattcagttaaccaatacgactgaaattaatgtggctgatggcattggtgtacgtacttctgcctccctggccaagaccaacagcggcactattaatgtagacggcagtggaattgcactggcgttccagaaagctgacggaagtgaaaccgataataacctggatatgtctgactccgctggattggtcattaacctgaagggtacggacggcacgggtattttcgccaacactaaagatggtgctgtcgtgaagagtggtgcaagtgtcaatgttatacaggccgatggcggttccgctctggtggttaacaatgcagccagtgaagtggttcagagcggtaatctcatctctgcttctctgagtcatgccgtagtggatgcttcaaaagcacaatcctttaccaataaaggtcagattaaagctgcgtccaccaccgggactgcaatggcgtttgatgacgccgtgaataccaccgtactgaatgacagcggtgctgaaattcagggggttgtggctctgaacggcggtgataacacattcaccaataaaggcagtattaccggaaccgtcagtgcgaaagagggtaacaatacatttttatttgatgatggcagcacactgacaggagaagtgactgcaggaaatggcaataataatgtaacactcaatggtaagactcatgttgatcaggttactgccggtaccgggaagaacaccttcaccattaaaggtgaaggggcaacctggaacctgctggatggcgggcagggagattctgattccctgatttttgataacgccattcatacgctggattctgttgtaaaactacagaatttcgaacatgtcgggctgaagaacagttcacttgtcactctgaaggaagctcttgtgctgaccgatggggggaacggtccgggttccgtcgatattgaatcgggcagcgaactggccattattcccgcagttgcaggcaactttacctttgatccactgttaacaggcaaaggaacactgtctgcccgtcttgatgccgacacatctgcttttgaattcagccataacgtcggggatcaatttgccggaactctgaagctgggtactagtagctttgctctggaagggctgaatacgagcgggttaacccatgcaatgctgatgtctgaaaccgggaatatcacaacggttggctccggtgttcagcagattggcggtcttgggttcaatggcggaacgctgatttttggttccgttatgccgggcgataccattgccagcaacagtattgaaacctctgctgcaggtacgctggatatccgggggaaaggcacaattcaggtcaccatgccagatgaagtgattaatgatattccggctgttgatacccgtaagaatttgctggagcaggatgatgcgcagaccctggtcacgctggtgaatgcagcgggtaccgtcaccggtactggcgggcaactgcaactggtggatgaaaacgggcaggctatttctcacagtcagacgtttgatgtcactcagggcggtgaagttgtagctcagggaaattatgactataagctgctgggaagctccgacggtattaaaggtgacggactgtacataggctatgggctgaagtcgctggatttacagggaaccggtgataaagcgctggtgctgacaccgagagcgaatgcccagggactgcagacagatcttggcgcacagttaacgggggcaggggatctggccatcgaagctgcggggcaggttgtcacactgtctaacggcggtaataactacaccggggatacgctggtgcgcagcggcacattacagatggcaaatgataatgtacttggcgcaacaggtaatctgaacgtcgccagcaatgccgtcttcagaacaaacggatacagccagactgtcggtgcactgcagacagaaacgggagcgcacattcagcttgatagcggtagtgtactaacggtcagcggcacgcagcgtcagccgggggatgataatggtggcatcattgaaaacaacgtgctgtccggtgagggaacgctggctgtcacgggcagcaatctgacggtacatggcaccaatatcgggtttaccggtaatgccagccttacccagggggcgctggttgaaatgaacggcgcacaggggctgggaagccagggctccatcagctttgaaagccttaatgatcgcctggcgattgatatcgccgacggtagcggagtcagcagtaacctgagtaaatcgctttccggagaaggttcagtgggtatactgaacaccactgatctgacgctttccggggataacagtaatttcagcggtgaattccgtgtgcagaaagatgctgctctgcgggcttcagatgaaaaacacctgggcaccgggctgattgacagtgatggtgtcacctggcttaccgccagtggaaactggttactgaagaatgatattactggctccggcgctctggtgaaacagggggcgggtaatctgatcattaatcatgagctgacttataccggtgataccacggttgagagtggcgttctgattgtcggtgatgattcagtcacccgtgccgctggcgcgacgttgtcaggatccaaaaacattcatgttcttaatggcggcacactgagtgggctggggaccgtttcgggtcaggttaataaccagggaacactggcatcactgaatgctctctcaggttatgaaacggcagaggtgggcaattttaccgttggctcactgaccaataccggcgtcattcgtctggccggtggtaagacaggaaataccctgaccgtaaatggcgattacaccggtggcggtacgttaattatcaataccgtgctgggggatgatacttctaccactgacaaactgattgtcacgggtaacacctccggtgataccggcgtggtggtgaataatgtccggggccagggggctcagaccgctgacggcattgagattgtgcatgtcggtgggcagtctgacggtaacttcagactgcagaaccgtgcggtggcaggggcgtgggaatatttcctgcataaaggtaatgcgggtggtactgacggtaactggtatctgcgttctgaattgccgccagaaccacaaccgcagccgcagccacaaccgcagccgcagccacaaccgcagccacagccacaccccacgccggataaacctgtacagaaggtctatcgtccggaagcgggctcttatattgcgaacatagcggcagccaacacgctgttcaacatcagaatgcacgatcgtgagggggaaacttactataccgatgtgtttactggtgagaagaaagcaacaagtatgtggatgcgtcatatcggcggtcataatcgctggaaggacagcagttcacagctgaatacgcaaagtaaccgttatgttgtgcaactgggtggcagcattgcgcaatggactgacggtcaggaccgtctgcaacaggggattatggccggttatggaaatgagaagagttccacgacatcctcgctttcgggatataaatctaaaggtgcgatcaatggatacagcaccggtttatacggaacgtggcagcagaatgacggtaatgacaacggggcttatgtcgatacctggatccagtacggatggtttaataataccgttaatggtgaaaaactggctgcggagtcctggaaatcccgtggatttaccggttcagtggaagcgggttatacctttaaagccggcgaatttaccggtagccagggtagtcactatgactggtatattcagccgcagtcccagatcacgtggatgaatgtaagagccagtgagcatacggagaagaatggcacgaaagttcagctcagcggagacggtaatatccagagtcgtctgggcgtcagaacttacctgaaaggtaagagtgcgtctgatgataataaggcgcatcagtttgagccatttgtggaagttaactggatccataatacacggagctggggtgtcaaaatggataatacggcactcagtcaggacggagctacaaatattgctgaagtcaaaacgggtgttcagggtaaattgtcagataacctgaatgtctggggcaatgttggtgttcaggctggcgataaagggtacagtgatgcccaggcaatgctgggtattaaatatatattctaa

SEQ ID NO: 13916 - DNA, 600 bp, Escherichia coli
atgcaaattggctatattcgtgtgtcaacaaacgaccagaacacggatttacaacgcaatgcactgaactgcgcaggatgtgaactgatttttgaagataaaatcagcggaacgaaatcaaccagaccgggattgaaaaaactgctcagaacgctatcagaaggagatacgctggttgtctggaagctggacagactgggcagaagtatgaaacacctgatcacgcttattgaggaattgcgggaaaaaggtgttaatttccgtagtctgacggacagcattgacacgtcaacacccatggggcgtttcttttttcacgtcatgggggctttagccgaaatggaacgtgaattaattgtagagcgtacactggccgggctggcagcagcacgcgcacaaggacgcattggcggacgtcgcccgaagttgacaaaagaacaacacgagcaaatagcgaggctgattaaaaacggtcatgacaggaaacaactggcgatcatttacgacatcggcatatcgacgatttatcgttatcaccctgtaggcgatatacaggctgaagaaacaaccaggcagactcaggaaaatgaaaaccgctaa

SEQ ID NO: 13917 - DNA, 489 bp, Escherichia coli
atgatgatgatctacggcatgtttgtttttgagctgcgcacgctgccgcatcagcagttacagcaaaacaaaagctggcggcatgtgaaaaatgaacgcgttaaccgttcagcaggctggcagtatatcggcgcaggtgatgatcgcattgtgctttccggcgtgctttatcctgaaattacaggtggcgaagtgtcgctttcgttgctgaccacgcaggcatatacaggacgcccctggcctctgattgatggtgtcgggcagatttacggcatgtatgtactgactgaaacgaatacgacccgttccgagtttgatcgctatggtaaggcgaaaaagatagaattttcactgactcttgaacgctgtgatgaggatttgcgggagcgcctgcaatcctcatcgttcagcgatatgctgtccggcttcaaagataaagtgacatcatctcttaacagcgcggccagctccgttaaagggctgttttga

SEQ ID NO: 13918 - DNA, 1170 bp, Escherichia coli
atgggaaagaatagtcaacgtaggcgagataataaaattaagcgagaaaatgagaaaaaaagaaacttagcggcaaagataaataaaatgttgtatataaagcctgatatattttttgatgaatcaggtaatactggcggaaatttactcgatccattgcaacctgtttttaccttaagttcaagtagtattagtaaacaggatgcgcttaaggcattagaactaaccggaagcaagtctccaacagaagcccactttaaaactcttagacgtagaaaatctggtcaggatggcatcattaggcttcttgaaagcaaatatgtcaatgaagagaatgttaaaatatacttggtcgataaaaaatacatgctaacagcaaagattgttgatattttgatcgagacgtggtgctctaatagaggaatagatctttatataaatggacagaatctagctctgtctaatgtttactatttctgtttccctgctttctgtggggaggaaaaaacagaggtaatgtatcagtgttttatgaatatgatcagaagccaatcgactgagtcaattgatgaattttacagggtaattgatgagttaaagatatgctcaagtgataagatattcacagatataataaacagaattagtattaccagaagcgatattgatgatatattggaaggtgttgagaaaagcacattagatccatctataccaagcctctttagacactgtgtagaatggggtaaattataccctaatggtttttatattaagcatgacgattccaaagctattacagagaagaaagatatttttgataaatttatggatatatcaaaaattacggaggcatatggttatgatcgaagaaaatttgaattgccaattaaagctcgttctttgacattccattcatcacaagagtatcctcaattacaaattgtagatatagtagcaagtgcggctgcttattatgttaactgtctaaaaagaaatgacttagaagattatctctttaaagaacttcaaagaataaaaatagataactattttaaaaatatggccatttggcctacaacatatgttacacctcaagaattaggcacaatttatactggtgggcgaaaccctgcagatggagtcgctgattatctttctcaatattag

SEQ ID NO: 13919 - DNA, 609 bp, Escherichia coli
atgagtaattcgttgttaccaccatcagccagcaatttcatgcgttgtgccgaagccgtcggaacacgcattacagacattccggtagacctcaacacgctgtggtcgccggacacctgcccggtgcatctgctgccttatctcgcctgggcgttttccgttgaccgctgggatcgcaactggccggaagagacaaagcgacaggtgattcgtgatgcatggctgatacaccgacacaaagggaccatcagcgcactgcgaagagccgtggagcctctcggctacctgattgaagtaaaggagtggtggcaactcaacgaggagccgggaacatttcgcattgttgtcggagtacttgatcagggcatcaccgatgaaatgtatcaggaacttgagcgccttattgcggatgcaaaaccagtaagtcgccatctgacggggctggcgatcagcctgagtgtgaacggaaagattttcgttggtacgggatgctatcacggcgatgccctgacggtttatccctacaccccggagtccattattgtcgaaggggattatttccctgccccggccattcatttaattgataatctgagagtaaacgcatga

SEQ ID NO: 13920 - DNA, 1881 bp, Escherichia coli
atgaccagtaagaactttgcactgattacagccatgacacaggctgaactgactcaaaaggtgaatgaacatcttgcgaaagggtggcatcttcagggggagacgcgggttgcctacgaacccggcaccccgtggtatctaatgcaggcaatggtggccgatggcactacagacatctcacctgattccccccagcacggcagcgtgccggagtggtattacgtggtggtacttgctggtcaatccaatgccatgtcatatggtgatggaatgccgctgccggattcttacgatgcgccccacccacgcattaagcaactggcccgtcgcaacacagtgactcccggtggtaaagcatgcgcatttaacgacatcattccggcagaccactgcctgcatgatgttcaggatatgagcgcactgaatcatccgaaggcagacctgagcaaagggcagtacggctgtgtcggccagggcttacatattgccaaaaaactgcttccgtatatcccgaataacgcggggatcctgctggtaccatgctgtcgtggtggttcggcattcacccagggcgcggaggggacattcagtgcggacacgggggccagccaggattcggcacgctggggtgtgggtaaaccgttatatcaggacctgatcgcacgcaccaaagcggcattacagaagaacccgaaaaatgtgttgctggcggtgtgctggatgcagggcgaatttgacatgagcgctgccacctacgcacagcaaccggacctgttcacggccatgctgaagcagttccgtactgacctttccggatttaacgcgcagtgccatggcggcagtgctgcagttgtaccgtggatttgtggcgacacgacgtattactggaaaaacacatacggcacacagtatgactccgtctacggcgcgtacaaaaacagggagagcgacaacgttttctttgtgccgttcatgaccgacggtaacggcaacaacacgcccaccaacttaccggcagaagacccggatattgctgatgcaggttattacggcgcgcaatcccgtagtaatggtaattgggtatcgtcaaatcgcccgacacatttcagttcatgggcgcgcaggggcattatttcggatcgcctggcaaccgctattctgaacgcagttggtcgaaccagcgccttcatcagcggtaccgcaccggagattaaaccctcgcccggcggcgacactccatcggggccgtctgatggtgacacatccgttcgtacagtctccctgctgccgacagccggagaggctgctgcgcagggctggaccatcaccggcggcagtgttgcgctggaagatggtgtgtttaaggttaccaagcagagcaataaaacctggtccctgatgcatccggtggatgacgcagtctccctgctgacacggggtggcagactgagctgtaagtttcgactgtcaggcgcactgaccaacaaccagttcggtctgggaatttatctgtataccgatgtagcgttacctgacgtcgtggcgatgaccgggactggtaacccgttcctgatgtcgttcttcacccagaccacagacggcaaactgaatctgatgcatcacaggaaagcaggaaacacaaagttgggcgagttcgggaattacagtaacgactggcagacgctggagctggtgttcaccgccggcagtgccacggttactccgaaactgaatggagtggctggcccggcattccaggtcataaaagacagtctgacactggggctgaatgcgctgacgttaactgatatcactaaaaatgccgcgtacggcgtcgatatcggcagcctggtgctggaaatcaataatcccgcagcataa

SEQ ID NO: 13921 - DNA, 621 bp, Escherichia coli
atgccgttctcacaaaaaaaccgcttgccatgccgcaatcagtcaggttacatttccgctgcacctcataaaacgggtgccgggattggaaccccgcagactaacagagcgcacaaccgcgccagcggtttttttgtgcgtgccgtatcgccacgtctttttcgcgtcagaattatggtggggcgtacagggccagcatcagctgggccgggtcctctgttagccggtagttccaaccctgtacgtctcaccaccccgagcttggaacctctggatggtgagttttcaaaactaactaacagagaggccacatcatggcaaaccgcaaacagcaccgcgctatcgcggagcgtcgtcacatccagactgaaatcaaccgcagacttttccgcgcatcacgcgtcgcgcaaatcatgcacatcaatatgctgcatgagcgcagccacgcactatcaaacatttattccgcctctgttttcagctatctggcggatgatctgcgcgagcttcagcagctcatccagcagcaaaacaaactccattaattcctgttccaggcctttcctgcaccttgcggcgggaggccttcgcacatctgtagcaagaggattgccgcaatga

SEQ ID NO: 13922 - DNA, 831 bp, Escherichia coli
atgaagaaattcaaactctttcagattctcccgctttttgccgccatcctgctggttggctgcgatcgcgttgagccaggtaatgtgggcatcaaagtcaacaagctgggcgacgacaaaggcgttggcgaagtggttggcgttggccgctactggactggctggaataccgaggtttacatcttcccgaccttcaaacaaatgaagacctacgatgagccgttcagctttcagatgagtgacggcacaaccatcggctatcacatcggtgtggcctacaaggttgatccatccaaagttactacagtgtttcagacctaccgcaaaggcgtggatgacattaccgacactgacctgcgccagaagatcgccgacgcactcaaccgactggccagcaaaatgaccaccgataaatttatcgacggtggcaagtctgaactgctggattcagcacttaaagacattcaggcagaaatgacacctatcggcattcaggtaatgagcctctcttatgtgggtaagccggaatacccgccaaccgttatcgacagcattaatgccaaagtcacggcaaaccagaaaaccctgcaacgtgaacaggaagtcaagcaacgcgaagctgaagccaacatgctgcgcgcagaagctgccggacaagccgatgccattcgcacaaaagcccaggctgaagccgacgccattcgtttacgcggtgaagctctgcgccagaatcccggcgttatggagctggaagcgattaacaaatggaacggcacgctaccgcaatacatgaccagtaacaccgctgttccgtttgttccggtgaagtaa

SEQ ID NO: 13923 - DNA, 204 bp, Escherichia coli
atgaacaacaagacatggtttcgtgcatatgcatgggcgctagtatgcgtcctcgtctctctcattctgtatgtaggggtactcccccgaatgatttcatcagacagctctttcctggtattgctgggcattttcattgccatgctgtacccggcaggcgttgttcgccttttcagtaagtacatcaaggaaattaaacaatga

SEQ ID NO: 13924 - DNA, 297 bp, Escherichia coli
atgagcatcatcaaccaccaggaactacgcgaactggcgactgccgtgcaaagaatacccccccatgaatcactaccatctcgcgtgagcttacaaccgtcagtggtgttggcactgctggatgagttggagcacgccagaaccacggcccctgccattcgcctgacactccatcatgaaatcgctgatttctgcgcgacgttggaggcgccaggcgaaccggaaacgccggaagcaatacagcaagagctgctgcaacgcattgacaaggttttcgattttttccttaaccagtaa

SEQ ID NO: 13925 - DNA, 318 bp, Escherichia coli
atgaaacaaaataaagaagacaaaattcaatgcgacgcattaactattcttgctcatctccaggattgcaaactggaagaggcgctccccgtcgctcttgaactaaccagaacacttgttagtgaaattgacccggaacgcgacatcggcacgtttactgttgcactggcggcaaaggccctgttaacggaactctcatcaacccttgattcgcttttcgccgaaatagacgagttgcacgaccacattgaagagctggaaatccagctatcccgcatccgtcgccagaaacagaacagtgggcgcaatggcaattaa

SEQ ID NO: 13926 - DNA, 279 bp, Escherichia coli
atggcaaaagtcctgaacacacacgaacaggcagactttgagcgtttagcagcgttctatccctaccgcgatgagcatgggttaccagtacttgaagaaagcctgaaagattacgcaaagcgtaccaaccaagctgttaacacagtgaaaagacaggctgacagaggttcaattcccatcaaccaggatgaaaagaactcaagacgcacagtaaatctcttcgctcttttcctgaaaacaatcaggagcgcagaaaaatacgtgcagatgacaaaataa

SEQ ID NO: 13927 - DNA, 309 bp, Escherichia coli
atgcttatcggtgaaaaaattagagtgattcgtgaatcagaggatttaacgcgcgaagaattttgcggcctgattgatgtgcctatcggcactttgcgtcgttatgaaacggggcggattgaaaacatagggggcgaagtgcttatcaagattgttaatcaccctcgcttttttaagtacatgaattggcttatgacgggaaaaacaaatgaggctgctgggcagatcagtccgtctctctcccctgatgggccaaaaagcacatcgccttctcaaaaaccccgcaagactggcacacagcccggctaa

SEQ ID NO: 13928 - DNA, 363 bp, Escherichia coli
gtgaagtttgatatagatgaacttaaaagaatggcaacgctcgataattttgcgcgttttctcaatgagtcgtctacgaatgaaaaatgtttgtcgtgtggcgatacggatatgtacatgtatttgacgaatattgttgaggtggggtctgagccgaaaactgctgaggagtgtgatttaggcactcttgttatgcttgattatatcggtccatttactgggtatccgggatatgagggacatgatcgggaaaatatccataactatgaattccgacttacctgtaacagatgtgggtttgttcatcgttactcggcccgggcctttatgaactgggtaggcaagcagggtgatgagaagtga

SEQ ID NO: 13929 - DNA, 438 bp, Escherichia coli
atggcagagaatgttgcacatatttcgcggttcagaaaaaagaaagagaatgcctataatgtatccaacaaccaagtaacaggaagtggtaatgatggaggtgatggcatgaatgacgaccttgaacggcgggtcagttgcctggaaagtgatgtgactgaaatcaaaaacaacctgattactctcaccacaagaagcgaatcctttgctaccaaatctgatgtactggagattcgcgaagggttgaggcttgagatggcagaatcgcgccaatccctgaagtctgagatggctgatttacgccagtctctgaaagttgagatggctgagcatcgtactgaacttcagaaatcatttgcaaatcagacttggttactcacaggtattgtcctgtctgcgatggctgtgcttgtggctgtggttactgttattaagtaa

SEQ ID NO: 13930 - DNA, 564 bp, Escherichia coli
atgaaactcaaacatgtcggtattattgtcgtttctgtgttggcgatgtcgtctgctgcggtaagcgcagccgagggtgatgaatcagtaacgaccactgttaatggcggtgtaattcattttaaaggtgaagtggtaaatgccgcttgtgcgattgattcagaatcaatgaaccaaactgttgagctgggtcaggttcgttcttctcgcctggctaaagcgggtgacctcagctccgccgttggcttcaatatcaagctgaatgattgtgataccaatgtttccagtaatgcagctgttgcattcctgggtactactgtcaccagtaatgacgatacattagcgctgcagagttcagcggcaggctctgcccaaaatgtcggtatccaaattttggacagtacaggggaggtattagtacttgatggtgctacttttagcgctaaaactgacttgattgatggcacgaatatactgccgttccaggctcgttatattgctctcgggcagtcagtagctggtactgcaaacgctgatgcgaccttcaaagttcaatatctataa

SEQ ID NO: 13931 - DNA, 522 bp, Escherichia coli
atgattataaaacctaaaattttgcacatatgttttctcctaacaattatagctattgcttatttgttcggagacaaatatacgtatgcagatataaaagatattttatctaccttgcaaaacatttctgcaatgatcttcactattgcaggtatttggcttgcatatatttaccctgcagctgtaagttcaattgtaaagccatcaacaataactagtataaactatcataaggaaacagaaaaagatattgagcgaattacgctgatagtgaaaaccattataatttcagctattgtaatattttctattgttataataaatttaacgaaacctatattttcaaatctggatttcatttccttgcataagcacgtgttctgcaagtttggattttttatcaccgcgttattagtatatctacaaataatagcgttatttagtatcattgctagtaatatattatttcttaatgatatacatgataaaagaaataaacgagagcttgataaattaaggtaa

SEQ ID NO: 13932 - DNA, 1203 bp, Escherichia coli
atgagtaaaaccaactttaaaactgaacgcggcattataacattttttgatttagaaatgtttggcctttataaaatacgacaaggcaaatcgccggaattagtcgaaaagaacttatcccatgttctgtgtaacttacatagctggatctgttcaagaacagttgaacaatctgttccatggggaaaggataataatagaagaacaaaagcatactgtaaaaatatttcatatgacagtacgacaggagattatctatttgttatctggaaaacgcttggtgataactctggaaatattcaaggtatagatgctgaaagtaagattgacggcacttcagataatgttgtatccgcctctgatactcaaggtggcggtaaatatatctggggcgtaccttgctactattgggtaattccagaatataacaaaattgcatccatacgattcccaagttctaatacggatacagatcttttctgtcattatattaaagcatacgttgactttaggatggagcatcctaataaaaaagtcatagatatgactcgtcctcgtaatgactcacctgaagacgttcattacaaacgtgttcttttttctcaaggtgatgatgaaagtttagtttttaaagtacagactaaacaaacaaggatgatcacgagtggagcaaacatagaagaactgtgtaaaaaaatcactcacattgtttaccatgacgtaatagaaacaaacatacctgatacacgggaaaaatggcagaagttatttgatgcagttggagatgttttctcaagaagctctcctattttatcaaaaaaacatcgcgttgaattattagtcgaaggaacgcctacgcctgaagagttcactaaactcatcgatgaatatatagaaaaccacaatcctatttcagaagatacagaaaacaacaatgagaatgtagggaatgatcacgcacgcatcggattcaaaataaatgggaaaaatggttcaactacttggttagatgaatatgtttatcgccatgaaattcacgttgacctttctaacagaaacaaacattactcttcttcatatttaatgagtgtagtaaaagctcatagaaatgatttggtgaattgttttaaaaatgaagatataatagaacaaccagaagctgataatgatacagcagtgcagattcataaaataggtgcatag

SEQ ID NO: 13933 - DNA, 882 bp, Escherichia coli
atgaatttcaaaaacggaggacaagcagtcataacgcgcatgcttgaagcgtatggattcaagacaaggcaagctctgtgcgaacagttcaacgtatctgcaagcactatgggcacgcgctggatgcgtgacgtatttcctgctgactgggtaattcagtgtgcaattgaaacgggtgcatctatcgagtggctctcattcggaaaaggcgtaccattccctcagagtactgaggctccggtcatgtcaaaggcaactgcatcaaaggttcagcacgtttcccaagccaccaccctgaagtccccaattgggaacgatctgaatttggactcaggcggacgtgatgcaatagacaggctaatgaaagcgtatggctttaaaacaagacaagaacttgccgaccatctgaatgtatctaaaagcactatggcaaatagatatttgcgagacacattcccggctgattggatcataaaatgttcgttggaaacaggaaattctcttttatggctagccactggacaaggcagcgagcacaatgctctcacaacatcggtaaaagaactgcctaaatttcatctcaatgcaggcaaaatggttgagagtggctcatatattttcgattcgtcatttttacccgctaatctttcagcaccaattgtcgttcaggatggtttagtggcatacatctgtgatcagaaattttctgatgtattagatggatactggttaattaatattgatggaacctattccgtcagacaaattactaggctacctaaaggtatgataaatatcagaagtaaagaaacttactttgaatgtgcattttctgatatcgaggtagttgcatgcataagaagcacaatcatttcgaattaa

SEQ ID NO: 13934 - DNA, 222 bp, Escherichia coli
atggctccacatatttcaatcaccttagctgtcccatctgtttctattgagaaatacagtgaactgactgggttatctatcgatactatcaatgacatgctggctgatggacgccttattcgccatcgtctccgtaaagataaaaagcgagaaaaggtaatgatcaatatcgcagcaatgaccgttgatgcgctctctgaatgcaatttgagtattaactag

SEQ ID NO: 13935 - DNA, 201 bp, Escherichia coli
atgctgacgaaagaaccatcatttgcatcgctgctggtaaaacaaagtccggcaatgcactacggtcacggctggatcatgggtgaggatggtaaacgctggcatccgtgccgttcacaagatgaattgctggcagaactatcaacgaataaacgggggaacaaatggctattgaaggcgctgcggcgactgttccattaa

SEQ ID NO: 13936 - DNA, 915 bp, Escherichia coli
atgccataccaattggtagagcttagccccgtagctaacgatcttgaacagttaggaaccaaagagaagttttggttctatttctccgatgacactgtaaatttgcagttgtttaagtactctaggccaggtactggcgagcattggtctgaaaagtgtgctgctgagttatgtcatttgcttaacattccacatgctagctatgatttggcgcgatacaatggtcgattcggtgtggtgactcagaatatcattccatctgatttccggatggtaatgggaaatgaagtgcttcacagttcgacattcgattatcctgggcctttacaagccggggaaaagccggtaagggtcagagaacacactgtcacaagggtattgggttgtttggatagggaatctatcaagcctcctccgagtgtatatgatctaaccgggctaaatgcagcagatgtattttgtggatatttgatgctcgatgcacttgtgagtaatcaagatcgccatcatgaaaattgggcgatcatgcttaacaatgaaactggtgagcagtttttgtgtccaacatacgatcatgccgctagtttaggaagggagatgttagatgatgagcgtaacgaacggcttaatactaaagataaaaatcgacaaatcccatgttttgtaagaaaagctcgctctgagctattcaaagcaaaaactgataaaaagcccttgctgaccgttgaagcatttcaacatgcagttgaagggagagttgccgctcgcgaccattggttaggtaagttgagcgttttaacagaagattccattacagatgtgtttaaccaagtgccttcatcgtgtatatccgacagtgcacgtagatttgcaacgttaatggtaatggaaaatcgcagaaggttactagaatga

SEQ ID NO: 13937 - DNA, 741 bp, Escherichia coli
atgactaatacaaactccgtttacgtcgcatggcaggcaccagataccagagactggcatgttgttggtaacttgcaagagcgcaaatcggggtatgttttcaggtataccaaaggtgctcttaaatctactaaatttacaaagtttagcggcatgagtgatgttcgtgaaacttatgtttcggaagaattgtttcctctttttaaaaatcgccttttatcaccgagacgtccagagtatccgagtttcattaaatggcttggatttgaagaagataaggtaaatcctatcgatattcttgctcgctcgggaggcttacgaagcactgatcagctgcagattttcaaaaaaattgatgttgattctgatggtaactttgagcattttttcttcttacatggacttggttacttaaatagcttagctaatgctcgtgtatctgaattgaaaccggggcaaattttgcgtctttgcttggatcttcaaaatgaatacgatggggatgctgttgtcgttcgtgcagataaaccagctgaaatcgttggttactgccctaggtatttaagtaatgatatcaagaagatgttattggatgatccaaaatcaatcactttaacggtcgaaaagattagcgatgatgctcctcataactatcggttattatgtaaattatcaggagtactaagccaagcctgtcaatcgacgctgattcctcaggatgagtttgaacctattgagtaa

SEQ ID NO: 13938 - DNA, 477 bp, Escherichia coli
atgaaaagttatgatgattatcaacatgattcttcttatggttttatatgggataaggtaaatgccagatttatggcgtatatattaaaaaatgaatatgaaagaaatggaatgtggcctaaggaaggggtggatatttcaaatgagactgcttgtgaattcatgaaacaacctccggaaggaaaaattcttggggcagatgataatggtatgcctgcatggattgatatgccaccactcacatatacagagttagtggctaaagcaaaaactgaaaaacaagcacgtataatagaagctgtaaattatataaataacaaacaatggcaggggaaagcattgcttgggagactgaatgatactgaactgaaaatgtataatatatggcttgattatattgaagcattagaggccattgatccatcaaaagcctctgatacagcctttccgactaagccatttaacgattcagtctga

SEQ ID NO: 13939 - DNA, 1032 bp, Escherichia coli
atgaaaagagatatttctttagatctgttacgtattatttgttgtatttttgtaataggaattcatgtcacgcccgactacgcttatactgttaccagtaaccaaacagaaagtatacaaatacaaactctttttgcacaatcaattgtacgcattggtttaccaatattctttatgttaagtggatactacctactcaacagacaaaatagcactccacttttgttttataaaaaaagaatccccgccattattatcccttttgtaatatattcattagcacattactatatcattagctggaataatggaacgtcatcgaatttacttgaatatttctcattaatatctaaaagcactatttcactctctgtgcatttctggtttgtttatgcctttatcggtttgtatttaaccgctccagcaattcaatacatagtcaataaaatcccacaagccgacagccttaaggtgattatagttttggctttcattttttattattcattatactcatactctctaagccaatcctctcaatactaccatcatttaatcccattacagagcatagatacatgggttttatattttgttgtcggcggattattaaaaagagttgacattaaaacacattatattgtatatagcatcccttttatatttttactacatgtgatgtttgtttattttagcgttaacaaatataactttaacatatacccatttgactcagggattaatatgttgttactgtgttccttgatagtaattgcatttacaaaaataaacatcaataataaaaaaataattttaaccattgaaaaaatagcacctctaacatacggaatttatttaattcatgtttgtgttttcagagtgttagagaaatatttcaatattccttttatcgtggataacattttactaaaaacaacatccctgtctttagtcattttttttatcagccttggtttaagcttgattattgatcggttgtttgttaatccaattctcagactgaatcgttaa

SEQ ID NO: 13940 - DNA, 312 bp, Escherichia coli
atgtatccagatgattctgccactgaaaccttcagggataagacgattgccaactgccagccctttaagggcagcattcagcgccttacgcggggcattctgctccagaaatacgtatgccaagtgagcgtgtacatcaataaagtcattctcctgtcgggcaaggcgcctgagtttgttgatgtaacttgtttcgctgatttcatccgcatcgtatgcatcaatcagttcttcaaactcatccagcaacgagccaaaccaggtttccgaaaatatgaaacagccctggttatcgttcacttcaaagcgtaa

SEQ ID NO: 13941 - DNA, 828 bp, Escherichia coli; identical to SEQ ID NO: 9067

SEQ ID NO: 13942 - DNA, 489 bp, Escherichia coli
atgaacctttccctgacgccggaggccgacggcattaacgtacaggcgatgaacatggggcgcattgtcgttgacgtcgatggtgttaattttgctgaactgattaacgtggcctgcggcaatggctactcccttcgtgttgttgatgaatctgaccggaccgcaactgacagcatgccaccctccgctgccctgagcggtatacgctgcagcacctcacatatcacggaaacagacaacgcttggctgtactcgctgtcgcatcagacgaatgacaccggcgaatcagaatggattcattttacaggcagcggatatctgttacgtaccgatgcgtggtcatacccggttctgcggcttaaacgcctgggcctgtcaagaacgttccgtcgtctggtcgtcactctcacccggcgttatggcgtcagtctcattcatctggacgccggcgcagaatgtctgccgggtttacccactttcgactggtaa

SEQ ID NO: 13943 - DNA, 528 bp, Escherichia coli
atgaatggtcaaataatcacagttgcactcatcctgttggggaactcatttctgacacctcctgtacaggccatagggttcgactattacaatgatcacggtgtcatgtcttacggtaaaggttattggggggataagaaaatcattgcccaatttccggagatgaacagggccgatttgcgccttgtgaaaaatatctctgggaagacgggttatataccttccgatgaaataagcataaaaaatgagtcataccactggatgacagacggccgcgttattctctggcgtggcaaaatcgttagcaatccaccgggaacacccactgtcgatattgccagctttcaagctatgggccgcttcgcggtcgataaatatagcctctattttgacggacagcgcaccgaaagtaatagcggcgcgtcacgtgttgatctggcgacactaaaagctatcgaaggtaactctaccacgctggtggatagtaaaaatctacttgtccggtcgatgtcaggggagcagcagtaa

SEQ ID NO: 13944 - DNA, 423 bp, Escherichia coli
atgaaactggccctgacgctggaggcagacagcgttaacgtgcaggcgctgaacatggggcgcattgtcgttgacgtcgatggtattaagctcgctgaactgattaacaaagtcgctgaaaacggttattcactccgcgtggtggatgaacatgacgctaccgaaacaccggcaacttctgccagccctcatcagttgccggaagacaatacagtgatacagagcgtgatgccattaaccactgaaacagcgctggatatcctcattgcgtggctgcaggacaatattgactgcgaatcggaaattatctttgacaacgatgaggacaaaacggattcggcagcactgttgccctgtattgaacaggccagggaggatatccgtaccctgcgccaactgcagcttctgtaccagaaccggtga

SEQ ID NO: 13945 - DNA, 843 bp, Escherichia coli; identical to SEQ ID NO: 9869

SEQ ID NO: 13946 - DNA, 1152 bp, Escherichia coli
atggcagcttcaaccttttttattccttccgtgaatgttattggtgctgattcattgaatgatgcaatgaatatgatggcagattatggatttacccgtaccttaattgtcaccgacaacatattaacgaaattgggtatggcgggtgatgtgcaaaaagcactggaagaacgcaatatttttagcgttatttatgatggcacccaacctaaccccaccacggaaaacgtcgccgcaggtttgaaattacttaaagaaaataattgcgatagcgtgatttccttaggcggtggttctccacacgactgcgcaaaaggtattgcgctggttgcagccaacggcggtgacatccgcgattatgaaggcgttgaccgctctgcaaaaccgcagctgccgatgatcgccatcaacaccacggcgggtacggcctctgaaatgacccgtttctgcatcatcactgacgaagcgcgtcacatcaaaatggcgattgtggataaacatgtaactccgctgctttctgtcaatgactcctctctgatgatcggtatgccgaagtcactgaccgctgcaacgggtatggatgccttaacgcacgctatcgaagcgtatgtttctattgccgccacgccgatcactgacgcttgtgcactgaaagccgtgaccatgattgccgaaaacctgccgttagccgttgaagatggcagcaatgctaaagcgcgtgaagcaatggcttatgcccagttcctcgccggtatggcgttcaataatgcttctctgggttatgttcatgcgatggcgcaccagctgggcggtttctacaacctgccacatggtgtatgtaatgccgttctgctgccacacgttcaggtgttcaacagcaaagtcgctgctgcgcgtctgcgtgactgtgctgctgccatgggcgttaacgtgacaggcaaaaatgacgcggaaggcgcagaagcgtgcatcaatgccatccgtgaactggcgaagaaagtgaatatcccggcaggcctgcgtgacctgaacgtgaaagaagaagatattccagtgctggcaaccaatgccctgaaagatgcgtgtgggtttactaacccgattcaggcaactcacgaagaaattatggcgatttatcgcgcagcgatgtaa

SEQ ID NO: 13947 - DNA, 1200 bp, Escherichia coli
atggctttgaacctcgacacgctggggctatcggcaacggtaaccgcccaggggattagtgcgcctgattaccagacaatcctcgatacactgaccagctatttcaggcagatttacggtagtgatgcctacctcgaaccagacagcaaagatgggcaaatggtcgcgctggtagctcttgccgtgcatgacgctaacaataccgctatcgagatctacaactcgttttcaccaacgacagcgcaggccgcagcgcttagcagtaatgtgaaaattaacgggatcacgcgaaaagtagcgacaaactctactgctgaccttctgttaaccggtacggcgggcacgactatcacgaatggctccgcacgggataaaaacggcattatctggaattttcccgcgagtgtagcgatcggcgttgatggtactgtgctggtgacggccacatgtgcgaatagcggttcggttgcggcgatggccgggactatcaccaccattaacacaccgactcgcggctgggtgtcggtaaccaacccggctgcggctactgtcggttcaccagccgaaaccgacgccgaactgcgcattcggcaggggcaaagcgtcgcgctaccatcgatcacaccgtttgaaggcgtcgacggcgcaattgctaatgttgctggcgtgacacgtcacaagctgtatgagaacgacactggagcaaccgacagcaacgggctgccgccacactcaatttccgccatcgtcgatggtggagatgttaccgaaatagcccagaccatcagggggaataaagggcagggaacggcgacctacggtactacttctgtcacggtaccggacacctacggcaatccacacgtgatcagtttttcgcgttcgactgatgtaacgatttacggtcatatcacactgaaagcctttacgggctacacgtcgcaaattggcgtacagattcagcaggccgtcgcggattacatcaacgggctgacgatcggtgattctgttctgctgagccgcatttactccccggcgaacctcggcgtggtgagtggtggcagtgcacgctattacgacattcaggagctgttgattggcaaatctgccggaacggtagcggcggcgaatatcaatatcgcctacaacgaatcagcgtcctgtaaggcggaaaatattgttctaacggtgacgtcatga

SEQ ID NO: 13948 - DNA, 354 bp, Escherichia coli
atgcgataccgtcgcgaagatgctgacggcgattacactttcgggcaaggtgacgacaccttccttatcgacagtccggaatgtgtcgcccaggccgtaaaaacccgtttcgagctgtggcgcggtcagtggtttctcgatctgacggaaggcacgccgtatgttcagtcagtgcttgggaaacagcgatcagacgtctacatcctggctatacgcgaacgcattcaggacacgccgggcgttctgtcgatgctttccttcgataccaattatgacggcaccagccgccgcgtcactttcacttcctccattgacacaatctacggccagacgactgtaacaagcgaggcataa

SEQ ID NO: 13949 - DNA, 639 bp, Escherichia coli
atgccaattccaactcaatcacagatcggcggagagcagcagaccgcgcaggccattgccgattcggtgtctacccagatgcgcgtggcgatgccaggcatcattcagtcgttcgatcctgacgctgtaacctgcacagtagaagtggcgcttcgcggtattgttggcgacggttccaccgaattaaaaccgctggtggatgtaccggttatctttccgcgcggcggcggttgcaccctgacctttccggtaaaagaaggcgacgagtgcctgctgatatttgccgaccgttgcatcgatttctggtggcaaagcggcggcgttcaggagaccgtcgacccgcgtcagcatgacttgtctgatgcgttcgccatcgttggcccgcagtcgcaagcacagagaatcagcggtatcagtagcagttcggtagagctgcgcagcgatgacggcggcacaaagttaagccttaacccatccagtggggcaataaattgcactgcaccgggcggattcaaccttaacgggctaaaaatcctgccagacggtcgcttgcagctggtggacggttctatcgtggataagcatacccatggcggcgttgagagcggcggaagcaatactaagccgctgggaggttaa

SEQ ID NO: 13950 - DNA, 213 bp, Escherichia coli
atgagtactaaaaagccagtccatgcacctaaagataaccttgggttcattagagaaaagaaatcacatgatggagattgttattctcacaaagaattaccaggtaactcggttgaaagggaaggatacgactcatctttaacagttccgcctggaaaggtagtatttgaaagctttggtggtaatcgccctgttaatgttaaaagaaagtaa

SEQ ID NO: 13951 - DNA, 558 bp, Escherichia coli
ttgagcacaggtaaccctaaatctgtagcccctaccgacgatcagaaagaatggattgagcgggcgaaatttgtttttgattatcaacaaaaacaatatgagtttgcactaacatcgttacgtaggttagaggataaagcgactaaaattttcggttcaatcaacgtcatacttactatttctatgttgatagttcgctattgggatagctatatttttgtatcagaaattactcccccaagggttctatgctggttgtcactggctctgttttttgtcttttttcttatttcatggggatttgtttttagtgcaatgcaacctcgtgaaggtatgagaccggcaaccgatgcaagtattatcgacttttttatgggtaacccgcgacaaaactcaatgagttcatttgcaagtagttacactgacttcattgataaacttgatgaagttcacaaagaaaaagtagccgtaatacagaaaggttccgaagcaatgctttttggggcttggtccttcattatcttcctgataagttttttattaataagatttacataa

SEQ ID NO: 13952 - DNA, 360 bp, Escherichia coli
atgacaaaaatcagcaatgttatttgcggcgtagctttagctttagcttttgttggtgcttcgtctgctttagcggacactcagtgtgggccttttcgtctgaccgcagggaacgatggtttgatgcacattaacggtgcaaagcctgaaaaccagaaaatgacctttctgaaagaaaaggaagattatcaaaatctgaagatggaatggacggttgcaaccaaccagcccggccgttgggtagggctggaatacatcaagcgtaacggtaaagccattctcaacgcccagtggttgcaagccagtatggacgcgccgcgtcagtatgcgacttatgactgtaagagagtttctaattga

SEQ ID NO: 13953 - DNA, 1065 bp, Escherichia coli
atgtctcttaactggatgcgccattttgagctgcaactgttggaccagaacgggcagggcgtttccctgtctgactttaaggtcacgttccagatcgagtgggcagacacacgctggccgcgcgtggcgaacgtgaaaatttacaacctttcgaccgataccacgaacaagatactggggcaggagtttgccaaaattcgcatcattgccgggtatgacggtatagcgccggatgttgatgcgagccaggttggcgtcgcccgagagatttcaccagaccagatagggcaggtgaacggtcagaactacggcctgatttttgacggtgatattcgctttaccgtaaccgggaaggacaacattaccgattcctgggtgttgattcaggctattggagatcacgaagcgttcctctacgcgactaccatcactacgcttgccgctggctataccgttgcggatctgcaccgggcgacgatgcaggatttcaacgcgttcggcgtgacacagggcattaccggcgattttcctgataccgtgtttcctcgtggccgcgcgatttactcatccagccgcaacgtgatggataatattgctgcgcagtgcaaagcgacatggcagctggtggatggacaggtccagatggtgccggaggataagtatattcacgaagccattgtgttaaatgccgatactggcctgatcggtatgccgcagcagacgatgggcggcggcgtaaacgtgcggtgcctgataaacccgaacatccgcattaatggtcttatccagctcgatcaggcttcagtttaccgcgccgcgcttggcaatagcgaaatcgctcagtcgcccgggagtatcaccgaaacagaagagaacggcaaccgcgtgctgaccggcacgacgtcacaggcagccagcattgcgacagatggcatttatatcgtcaaagctatcgactatactggcgacaccagaggccagacgtggtacatggatttaatgtgttttgcgcgtgggtctcgtgaactttatagccagtcgacgcttcaaaaagtacaggtataa

SEQ ID NO: 13954 - DNA, 306 bp, Escherichia coli
atgcagtttaacgaaataccgctttctcctgacaatcagcagttccgcgttttgctgggcaataccacgtacacgctcaggatcatctggcgtgatgcggcaggctggattatggacgtgatggatagcggcggtgccgcgcttctctctggcgtacctctactgaccggcgtgaaccttttacgacaatatccacagcttggcattgatggtgcgctggtggtggcgaccgataagggggcaccagacgaacccaccaaaaccaacctcggcacatacagccacctcattttcgtacaggagtag

SEQ ID NO: 13955 - DNA, 603 bp, Escherichia coli
atggatattttatcagcgatttttcgccagcaatcccggcgaattggaatattaatccccagcgtggttgtttctgaaaagcattctgatgcgctcgaaattactgagcacccggtggagaagccaacaacgaatagtgcctcgggtttcatcgccgatcatgcgtacaagcgccccagtgaagtcacaatggaatgcggcttcgctggtggcggttcgttgctggacttcattgatacatcgtcaatcggcctcagcgccggacttagcccgaaagagacctatcagcaactgctggatctccagtcctctcggttgccgttcgatgtaatgaccggaaagcgggtttacagcaatatgctggtgcgagccatcgaggtgacaacggataaaaccagcgagaacgtgctgaactgcacgcttaccctgcgtgaagtgatcatgtcgcagacgcagagcgttagcgttgcagataaatcagatatgcaggatggcgtcagcacatcggcagtgcagaattccgggacgaaatccactacaccgccaaacgaatccttgctgagccagctgggcggaagcattacatcagcattcgggggataa

SEQ ID NO: 13956 - DNA, 1221 bp, Escherichia coli
atgaaatattttttcaatacccggctgggagaaacccgctaccagctggctgacggctcgttgctgtgcaaagacgtgccgataggacgaacaggtaagcagctctatggtgctgatgatctgccaaaactgaaacccgataagttcggtgaaatagtcgtcacgcgttctcctgagcaggtattccatccggccacgcttgcctcattcgaagggatgagcatcacgatcctgcatcctgaagatgaaaacgggaatgtgcggctggtaaatcccgagaactggaaagagcttgctgtcgggcacctccagaatgtccggcgcgggacgggtgagcagtctgatttaatgctggctgaccttatcgtcaaagacgaaaacgccattcagcttatcgaagatggcctgcgtgaagtgtcgtgcggctatgacgcggagtacgagcagaccgagccaggtaaagccgagcaggtcgatattaccggaaaccatgtggctcttgtccccaaaggcagagccggaaatcgttgtgcaattggagacagagacacaatggcaaatcaaaagaaaaactggtggaaccgcatgcgtgcagccatcaagacaggagatgccgacaccatgaacgaactggtggagtcggctcccgcatcggttacaggagatgagggggatttgccgcagggcgttaatctcaacatcaacctgtccccgcagcaaccactaccggacaaagcaccagagatgggtggaggtccaaccggcgacagtgatgatgacctcaaaacattactgaaagccctgctggctaagctggaaggaaatgccacgggcgataacgataataagcctgacgataatccgaccggtgacggcgaggacgatgaagaggaaaccacgattactggtgactcagcctggcgtgccgaagttatcgttccgggtatcgatctgagccgtaagatgaaaccgaccgcgttcaaacgcgaggttctggcttccgcagataaaacgctggttcgccagatcgtcggtgatgcggatatccgcaaattgccgaaacaatcggtcgacatggcgtttaatgccgtgtctgagattgccaaagggcgaaacacccgcgccaccaccggcgatgcacagcgcctaaacatgggcatgaccagtatcgcttccctgaacaaacaaaacgctgaattctgggcaaaccgtaaagggtaa

SEQ ID NO: 13957 - DNA, 552 bp, Escherichia coli
atggcactcaccgacaagcaagaaatgttctgtcgcgagtacctcatcgatttaaacgccacgcaagcggctattcgggcggggtacagcgcaaagacagctaaccgtaccgcatccgaaaacctgtcaaaacctgacatacaattcagaatcgccgaactgaaagcgcaacgcaatgatcttgttggtattaatgcagaatatgtacttaatcgccttattgaaatcgaccagatggatgtgctcgacattctcctgcaaaatggtgagctaaagcccattaaagactggcctaaggtatggcgcacaacgctatcaggaatggatgtcgtggagatggtatccgcagatagcgccgcacttctgaagaaaatcaaatggcctgataaggttaaaaaccttgagttgcttgggcgtcatgtttctgttcaggcgtttaaagacaacgtcaaaaatgaagtgactggtgctgacggaggatcagtcagaacagaaattaccaacttaacgccggagcaggctgcagaagcatataaaaaaatgatgggctaa

SEQ ID NO: 13958 - DNA, 549 bp, Escherichia coli
atgaagttagaagatttcgcagcttataaccgccctcaatcgaaggtgtccgatgagaggaaatttcttgattacattcacagtcggaacagatgggttgagtttatcaaaagcatcgataacgcaaagccagtatcaattgccatgaaaaattcattccatagtcaatgggttgagtctggggcctttatacgtgaaaagatcaacgacgactcaattctcctcaaactattaacgctcttattgccaacatatgatggtgacagccttgtactttatcggggagaaaataaagacaggttcgataaagggctcattggattttgctggacaacggacatttcagtcgccgagaagtttggtcgtggattgaatgcatacaaatcaccaggtttgctgttaagagctgaagctccagcctgttctatattagctggccccaatgcccacagtcgttatcttggtgaaaatgagttcacggttaacccctcgcgtctttcaaacataaccgttattgaaacctatccggacaactcttttttcagatga

SEQ ID NO: 13959 - DNA, 180 bp, Escherichia coli
atgtcagtcccgaacgaacgtaaccttcgtgtttgtcgctcgccgtacaaggcgcgccgcttcgcgttgcatttcatcgataacttttggcgtcatcggctgatgcgcatatttacgttcaatctctgcaaaaatcccgttcatcgtttcgctgtctggtgggataacttcaacgtttaa

SEQ ID NO: 13960 - DNA, 393 bp, Escherichia coli
atgaagctgagatataagctggttattgttgccttctttgttaccgtcatcggttcttttatctggtctgccgggcattactacagcaaatatcaacacgaaaaagagcgcgctgatgaggctgtacgaaatgctgaatcagcaacagccattacccgtaacgtcctgcaatcactgcaaatcatcaacacagttatagaggctaaccagcatgcaaaacagcagatcgcactggagtcacagagaacccaggaagatatcaaagtggctgttgcggatgatgattgcgctgttcgtatcgttccttctggcgcagttaagcggttgcacgaatacgcgaacggtatacgtgtcggtgccggtcgttccgttaccagccagtctgacggatga

SEQ ID NO: 13961 - DNA, 477 bp, Escherichia coli
atgcagacactaaattcccaacgtaaagctttcctggatatggtggcatggtcagaaggaacggataacgggcgacaaccgacacgtaatcacggttatgacgttatcgtcggaggtgagttgttcactgattactccgatcatccccgcaaacttgtcacgctaaatccgaaactcaaatcaacagccgccggacgttaccagcttctttcacgctggtgggatgcctaccgcaagcaacttggcctgaaagatttttctccagaaagccaggatgctgtagcgctgcagcagattaaagagcgtggcgctttaccgatgattgaccgcggcgatattcgtcaggcaatcgaccgttgcagcaatatctgggcttcgttgccgggcgctggttacggtcagtatgaacatagaatcggtgacctgattgcccgatttaaagaagctggtggggtggtaaatgaagctgagatataa

SEQ ID NO: 13962 - DNA, 570 bp, Escherichia coli
atgtctgaagaaaaaggaattctttcccggataactgaatcgttatccggcgtgggaggagcaattaaaagcgcggttggagcagcaagagagattcagaatctgactgtcgactatgcagttaaagagaagacgcacatcttactcgataagctaatggatgttcagatgcagcaaatgtcgcttcaggagctgctgattgcggctaaggagaaaattgttgaactggaaaatgagaaagtaaagcaagagaactgggccgctgaagcggcgagctatgaactttaccagcctatgcggggtactctggtctatcgcagcaagctttctgcagatgctgaccaatctccggtttatatttgtcccaattgctacgagcaaaagagaaaatctatattgcaagcggaaggtctggttactaagccaggccttgggcgagccgttaatatggtttgttcgtactgtagggcttcctatctgttcaaccgaaatgctttagaggcccgactgccttctgaagatgaaaatccggggaaggcaatcacggattacgatccttacaaccagtaa

SEQ ID NO: 13963 - DNA, 189 bp, Escherichia coli
atgtcacagcccgtattaactaatcaccttaaaactcaaatcatcaataacgcacttgagaaagcgggtatccccaaacgtaaatcagcactacgagctgctcgtgttgaatgggccgaacgtgttcggcttgcagctatcgggggcgtagagaaagaagctgaaatattaaaaattataaaaaaatag

SEQ ID NO: 13964 - DNA, 261 bp, Escherichia coli
atgatgcgtaatacagcgaaactacaactggggttctccccgctatccaaaaagatcatgttggcaaaaatgcgcgatgttgacggcggtcgcttgcgagttggcaatgaccctgggcgtgacgtaacgaacgaagccgcgcagttagtttggcaactggtaatggcagaaggcggcgaaattagctggggtcttgatgatggtagccagatggtactgagggctgaaaagcaggtgtggaatgatggcctacgaacgtga

SEQ ID NO: 13965 - DNA, 933 bp, Escherichia coli
atgaatgcacagagtcagcctcagcccacaccccgcgcggtcttagatcttggtgtcaagcaggaaggggtttttaatgatatcgaaatgggcgttttggagaacggaattccgtaccttactcagaatggtttggcgagaatttgcggtgtaaatcgaacaaatattgcagatattgcaacggaatacgcacaatgttttgcaagtggcgtattcacccgtgggcgaatggagtttataagtacttatctgcagcaggctggttaccgtgaaccagtactatttataccgattatgcgtaatgggtctgtccattatgcgtttccagatattgtctgcatggcactgctggagttttacgcatttgaatcacaaacagcgtcgaatgcgaccgctcagcaatactatcgtgaactagcacgtgttggtctccgcgattatatttatggtgcgttacattaccagccagaagatccatggcgccactatcatgaccgggtctctcttattcaaagtacgggagctgtaccggatgggtattttattgtttttaatgaaattgcaggtttgatggttgatttgattaccgcgggtctcgtagttaatatgtatacggtacctgatatcagtgtaggttcctgctgggcgaaacattggagcgctagagggttgtctgaaaaatttggagaacgtgtaaagtgtgcgcaccattatccggatgattttaaccaagcagcttcgaacccacagatgattcaggcataccccaatgatgctttaccagaatttcgtcgttggttccgtcatgagtacctacctactaaattcccaaattacattcttggtaaagctggtttattgcctggtgggcgctctgaggcagcaagaatcgctgataactttcgaaaaactcagttagggagctcgcggtaa

SEQ ID NO: 13966 - DNA, 603 bp, Escherichia coli; identical to SEQ ID NO: 8919

SEQ ID NO: 13967 - DNA, 1080 bp, Escherichia coli
atggcaccttccaaaactgctcagccaaaacactcactgcgtaaaatcgcagttgtagtagccacagcggttagcggcatgtctgtttatgcacaggcagcggttgaaccgaaagaagacactatcaccgttaccgctgcacctgcgccgcaagaaagcgcatgggggccggctgcaactattgcggcgcgacagtcagctaccggcactaaaaccgatacgccgattcaaaaagtacctcaatctatttctgtcgtcaccgctgaagagatggcgctgcatcagcctaagtcggtgaaagaagcgcttagctatacccctggcgttgctgtgggaacccgtggcgcatctaatacttatgattacctgatcatccgcggatttgcggcagacggccaaagccagaataactatctgaatggcctgaagttgcagggcaacttctataacgatgcggtcatcgacccgtatatgctggaacgtgctgaaattatgcgtggcccggtttccgtgctttacggtaaaagcagtcctggcggtctgttgaatatggtcagcaagcgtccgaccactgaaccgttgaaagaagttcagtttaaggccgggactgacagcctgttccagaccggttttgacttcagcgatgcactggatgatgacggcgtttattcttatcgcctgaccggtcttgcgcgttctgccaatgcccagcagaaagggtcagaagagcagcgttatgctattgcaccggcgttcacctggcgtccggacgataaaaccaatttcaccttcctttcttacttccagaacgagccggaaactggttattacggctggctgccgaaagaggggaccgttgagccgctgccaaacggtaagcgtctgccgacagactttaacgaaggggcgaagaacaacacctattctcgtaacgagaagatgattggttatagcttcgaccacgaatttaacgacacctttactgtgcgtcagaacctgcgctttgcgcaaaataaagtttcgcaaaagagcgtatatggctacggtatgtgttcagatccgctgtataccaaagactag

SEQ ID NO: 13968 - DNA, 726 bp, Escherichia coli
atgtcgttttgttggaatgaaattaactctggtgtcaagtctttaattctcatattatgtatgttgtctttaatgactttgtctttgtgggatgatgttgcaacaaagtttcttcatgcagctggaattatatctgcattatattttctagcgacaccaaaaaaaacaataactaataatcctactttgttaattttcatctcattatgtcttttgggtatcgttaatatcatctggtattcacattataaagtttcaggctcggtttataccaatgcatatcgtggcccaatggaaactggaaaaattgccttgtgtagtgcttttattttcttagttctttttgctaaagatgagatgagaaccaaaataaaatttgggaaactaattctgttcgcatccttggcaacgcagttacttttttttgcgcatgccatgtggcaacatttctatttaaacgtcgaccgtgttgcattatcagcttcccacgctacaacagcaggctacatcatccttttcccttctttactggcatcaattctcattttaaaatccgactttagacataaaacaacattatatacaattaacttcatgcttagcttatgtgctgttatagtaactgaaacgcgtgcagccatattagtgtttccattctttgcgttactattaatcgtaatggatagttactgtctcttatacacatctgacgctgccgacgaatag

SEQ ID NO: 13969 - DNA, 477 bp, Escherichia coli; identical to SEQ ID NO: 4554

SEQ ID NO: 13970 - DNA, 456 bp, Escherichia coli
atgattcacctgttcaaaacctgcatgattaccgccttcattctggggttaacgtggtctgccccactccgggcacaggatcaacgttacatcagtatacgcaatacagatacgatatggctcccgggaaatatttgtgcttaccagttccggctggataatggcggaaacgatgaaggatttggccccctcaccatcactctgcaactcaaagacaaatatggtcagacgctggtgaccagaaaaatggaaacggaagcctttggtgacagtaatgccacgcgaaccacagacgcatttctggaaacggagtgcgtggaaaatgtcgccacaaccgaaatcattaaagcaactgaagaaagtaacggccatcgtgtcagtctgccgttatcggttttcgatccccaggactaccatccactgctgattaccgtttccggaaaaaatgttaactga

SEQ ID NO: 13971 - DNA, 2517 bp, Escherichia coli
atgttacagatagtcggcgcgctgattctgctgatcgcaggatttgccattcttcgccttttgttcagagcattaaccagcacagcgtctgcgctggcagggttcatattgctgtgtctgttcggtccggctttactggctggctatatcactgaacgcataacccggttattccatattcgctggctggcaggcgtatttctgacgattgccggaatgatcatcagcttcatgtggggacttgatggtaaacatatcgcactggaggctcatacttttgactctgtaaaatttattctgaccaccgctctcgccgctggtctgctggctcttcccgtgcagataagaaccattcagcagaacgggctcacacctgaagatatcagcaaggaaattaacgggtattactgctgtttttatactgcttttttccttatggcgtgttctgcatacgcaccattgatcgcattgcagttcgatatttcaccctcactgatgtggtggggcgggttgttgtactggctggctgcattagtgacgctgctatgggcggccagccagatccaggcgctgaaaagactgaccagtgccatcagccagacactggaagaacaaccggtgctcaacagtaaatcgtggctgagcagtttgcaaaacgattacagccttcctgaaacgctgacggagcgcatctggctgacactcatttcacaacggatttcccggggagaactgagggaatttgaactggcagacggaaactggctactggacaatgcctggtatgaaagaaacatggcgggtttcaacgaaaagctgagagagagcctgtcatttacccctgatgaactgaaaaccctcttccggaaccgcctgaatttatcaccggaagcgaatgacgattttctcgatcgttgcctggacggcggtgactggtaccccttttcagaaggccgccgttttgtatcattccaccacgtggatgagcttcgtatctgtgcctcctgcgggctgacagaagtacatcatgccccggaaaatcataagccggatccggaatggtactgctcctctctttgtcgcgaaacagaaacactgtgtcaggacatttatgaacgttctcacaccggttttatttccgatgcaacggcgaatggtctgattctcatgaaactgccggaaacctggagtacaaatgagaaaatgtttgcttccggagggcagggacatgggtttgccgctgaacggggaaaccatattgtcgacagagtccgtctgaaaaacgcacggatcctcggtgataataatgccagaaatggagcagacagactggtcagcggaacagaaatccagacgaaatattgttcaactgcagtccgtagcgtcggtgcggcattcgacggacaaaacggacagtatcgttacatgggaaatcatggtcccatgcaactggaagtcccccgtgatcagtatgccggcgctgtggaaaccatgaagaataagatccgcgaaggtaaagtacccggtgtaaccgatcccgcagaagcgtcccggctgattcgtcggggacatctgacttatacccaggcccgtaatatcacccggttcgggaccatcgaatcggtcacttatgatattgccgaggggtcggttgtcagtctggcggccggagggatcagttttgccctgacggcatcggtcttctggctcagcaccggcgatcgcgatgctgccctgcagacagctgctgtccaggcaggaaaaaccttcacccgcacactggctgtctacgtcacaacccagcaacttcaccggctcagtgttgttcagggtatgctgaagcatattgatttttcgacggccagcccgactgtccggcaggcgcttcagaaggggaccggtgcaggaaatatcagtgccctgaacaaagtgatgaagggtacgctggtgacatctctggcactggtagctgtcacaaccggccctgacatgatcaaaatgttgcggggacggatctccggtgcgcagttcatcaggaatcttgccgtggcatcttccggtgtggcaggtggagctgtcgggtcagtggcgggcgggatattgttcagtccactgggaccatttggtgcactgacagggcgtgtggttggtggtgttctggggggaatgattgcctccgctgtatcaggaaaaattgccggagcgctggttgaagaagatcgcgtcaaaattctggcaatgattcaggagcaggtgacatggcttgccggcagtttcctgctgaccggacatgagattgaaaatctgaacgcgaatctggcccgtgttatcgatcagaatgctctggagatcattttcgccgccggtatacaacaacgggccgcgaccaacatgttaatcaaaccactggtggtcagtatcatcaggcaacgccccgtcatggaatatgatgcatcccatctcggcaatatggttaaccgactggaagaaacattacccccggagttaccggcataa

SEQ ID NO: 13972 - DNA, 2124 bp, Escherichia coli; identical to SEQ ID NO: 9064

SEQ ID NO: 13973 - DNA, 3075 bp, Escherichia coli
atgccaacaataaccactgcacaaattaaaagcacactacagtctgcaaagcaatccgctgcaaataaattgcactcagcaggacaaagcacgaaagatgcattaaaaaaagcagcagagcaaacccgcaatgcgggaaacagactcattttacttatccctaaagattataaaggacagggttcaagccttaatgaccttgtcaggacggcagatgaactgggaattgaagtccagtatgatgaaaagaatggcacggcgattactaaacaggtattcggcacagcagagaaactcattggcctcaccgaacggggagtgactatctttgcaccacaattagacaaattactgcaaaagtatcaaaaagcgggtaataaattaggcggcagtgctgaaaatataggtgataacttaggaaaggcaggcagtgtactgtcaacgtttcaaaattttctgggtactgcactttcctcaatgaaaatagacgaactgataaagaaacaaaaatctggtagcaatgtcagctcttctgaactggcaaaagcgagtattgagctaatcaaccaactcgtggacacagctgccagcattaataataatgttaactcattttctcaacaactcaataagctgggaagtgtattatccaatacaaagcacctgaacggtgttggtaataagttacagaatttacctaaccttgataatatcggtgcagggttagatactgtatcgggtattttatctgcgatttcagcaagcttcattctgagcaatgcagatgcagataccggaactaaagctgcagcaggtgttgaattaacaacgaaagtactgggtaatgttggaaaaggtatttctcaatatattatcgcacagcgtgcagcacaggggttatctacatctgctgctgctgccggtttaattgcttctgttgtgacactggcaattagtccactctcattcctgtccattgccgataagtttaaacgtgccaataaaatagaggagtattcacaacgattcaaaaaacttggatacgatggtgacagtttacttgctgctttccacaaagaaacaggagctattgatgcatcgttaacaacgataagcactgttctggcttcagtatcttcaggtattagtgctgctgcaacgacatctctggttggtgcaccggtaagcgcgctggtaggggctgttacggggataatttcaggcatccttgaggcttcaaaacaggcaatgtttgaacatgtcgccagtaaaatggccgatgttattgctgaatgggagaaaaaacacggcaaaaattactttgaaaatggatatgatgcccgccatgctgcatttttagaagataactttaaaatattatctcagtataataaagagtattctgttgaaagatcagtcctcattacccagcaacattgggatacgctgataggtgagttagctggtgtcaccagaaatggagacaaaacactcagtggtaaaagttatattgactattatgaagaaggaaaacgtctggagaaaaaaccggatgaattccagaagcaagtctttgacccattgaaaggaaatattgacctttctgacagcaaatcttctacgttattgaaatttgttacgccattgttaactcccggtgaggaaattcgtgaaaggaggcagtccggaaaatatgaatatattaccgagttattagtcaagggtgttgataaatggacggtgaagggggttcaggacaaggggtctgtatatgattactctaacctgattcagcatgcatcagtcggtaataaccagtatcgggaaattcgtattgagtcacacctgggagacggggatgataaggtctttttatctgccggctcagccaatatctacgcaggtaaaggacatgatgttgtttattatgataaaacagacaccggttatctgaccattgatggcacaaaagcaaccgaagcgggtaattacacggtaacacgtgtacttggtggtgatgttaaggttttacaggaagttgtgaaggagcaggaggtttcagttggaaaaagaactgaaaaaacgcaatatcggagttatgaattcactcatatcaatggtaaaaatttaacagagactgataacttatattccgtggaagaacttattgggaccacgcgtgccgacaagttttttggcagtaaatttactgatatcttccatggcgcggatggtgatgaccatatagaaggaaatgatgggaatgaccgcttatatggtgataaaggtaatgatacgctgaggggcggaaacggagatgaccagctctatggcggtgatggcaacgataagttaattgggggagcaggtaataattacctgaacggcggagatggcgatgatgagcttcaggttcagggaaattctcttgcaaaaaatgtattatccggtggaaaaggtaatgacaagctgtacggcagtgagggagcagatctgcttgatggcggagaagggaatgatcttctgaaaggtggatatggtaatgatatttatcgttatctttcaggatatggccatcatattattgacgatgatggggggaaagacgataaactcagtttggctgatattgatttccgggatgtggccttcaggcgagaaggtaatgacctcatcatgtataaagctgaaggtaatgttctttccattggtcataaaaatggtattacattcaggaactggtttgaaaaagagtcaggtgatatctctaatcaccagatagagcagatttttgataaagacggcagggtaatcacaccagattcccttaaaaaggcacttgagtatcaacagagtaataataaggcaagttatgtgtatgggaatgatgcattagcctatggaagtcaggataatcttaatccattaattaatgaaatcagcaaaatcatttcagctgcaggtaattttgatgttaaagaggaaagagctgcagcttctttattgcagttgtccggtaatgccagtgatttttcatatggacggaactcaataactttgacagcatcagcataa

SEQ ID NO: 13974 - DNA, 714 bp, Escherichia coli
atggatagcgcatgtgcccttgttaccttcggacaaggaatagctccggtaagccgtgttctgggcgtgtcgcgtgcgcagctaacattacggatgaaggcatctgataacaagccagataaacggcgtcagagacgcgatgaggctgcggatgcagaagtcttatcgcgcatcctggatatcattggcgatatgccagcatatgggtatcgccgtgtctgggcgatactcagacggcagtcccgaaatgaaggcttgccgttcgtgaatgcaaagcgcgtttaccgaataatgagcgaaaacagcctgttgttgttacatgacaaaccatcacggctgcagcgggaacataaaggccgaatatcggtgaaggaaagcgaccagcgttggtgttctgatggcttcgagttcggttgtgatgatggcgaaaaagtccgggttacgttcgccctggactgttgtgatcgtgaagccatcgactgggcagccagtacgggaggttacgataaagcgacagtacaggatgtgatgtcaggagcgatagaaaaaggctttggcgataaagtgccggaagagcccatccagtggctgacagataacggttcagcgtacagagcgcatgaaacacggcagttcgccagagagctgaatctggagccctgcacgacggcagtcagcagtcctcagagtaatggaatggcagatggttcgtga

SEQ ID NO: 13975 - DNA, 2190 bp, Escherichia coli
atgtttgtggagcataacctgataaaaaatatcaagatattcacactagcgtttacgctcaccgtggtacttattcagctatcccgtttaatttcgccacttgctgttatccattccaattatatctttctggcgtggatgccactgtgcgtaatgctgtcaatcttgtttatctttggctggcgtggtgtcgttcccattttatgcgggatgttttgcaccaatctgtggaacctgcatctctcttttttacagaccgccgtcatgatcggcagccaggcgtttgcagtcctgtgtgcctgtgcaatattacgctggcaattggggacgcgttggcgttatggattgaccagccgatacgtctggcaacgtctgttctggcttggtttggtggcgccgattggcatcaaatgcagcatgtatcttgtgggaaatttctttgattttccgctaaagatatctacctttttcggcgatgcggatgccattttcacggtcgttgatttgctaagccttttcaccgcagtgctgatttacaacatgcttttttactatctcacccgcatgattgtaagtccccactttgcacagatattgtggcgtagggatatcgctccgtcgttgagcaaagagaaacgcgcatttaccttaagctggctggcatctcttagcgtgctgctacttctgatgtgcacaccgtatgaaaatgactttattgccggttacctggtacctgttttctttatcatctttaccctcggtgtcggtaagattcgctatccgtttttaaatctcacctgggctgtttcaacgctttgccttctgaattacaaccagaactttttgcaaggggtactaaccgaatattcgctggcatttattctcgcagtactgatttcctttagtgtttgcctgctctatatggtgcgtatttatcatcgtagtgaatggcttaaccgccgctggcatttgcaggcgctgaccgatccgttaacgcttctacccaactttcgtgcgttggagcaagcgccggagcaagaggcgggcaagagtttttgctgcctgcgcattgataatcttgagtttatgagtcgtcattacggcttaataatgcgcgttcactgtatccgctcaatttaccgtacgctgctgccgttgatgcaggaaaacgaaaagttgtatcaattgccgggtagtgaactgctgttagtgctgagcgggccggaaacggaagggcgactccagcatatggttaacatcctgaatagtcggcaaattcactggaacaataccgggctggatatgggctatggtgctgcctgggggcgttttgatggaaatcaggaaaccctgcaacccttgttggggcagttaagctggctggcggagcaatcctgcgcacatcatcatgtgctggcgctggatagcagagaggagatggtttccgggcaaaccactaaacaggtgctattgctgaataccattcgcacggcgttagatcagggtgatttgctgctctacgcccagccaattcgcaacaaagagggtgaaggttatgatgagatcctcgcgcgactgaagtatgacggcggcattatgaccccggataagtttctgccccttattgctcagtttaaccttagcgcgcgttttgatttgcaagtgctggaatccttgttgaagtggctggcaacacacccttgcgacaaaaaaggtccacgcttttcagtcaatttaatgccgctcacgctgctgcaaaagaatattgccgggcggattattcgtctgtttaagcgttattacatctccccgcaggcggtcattcttgagatcaccgaggagcaggcgttttctaacgcagaaagcagcatgtacaacatcgagcagctgcataagtttggtttccggattgcaattgatgactttggcaccggatatgccaactacgaacggttaaagcgtttgcaggctgatatcatcaaaattgatggcgtctttgtgaaagatatcgtcacgaacacgctggatgcgatgattgtgagatcaattaccgatctggcgaaagcgaagtcattgagtgtggtcgcggagtttgtcgagacgccacagcagcaggcgctattgcataaacttggggtgcaatatctgcaaggatatttaattggtcgtccgcagccattagctgattaa

SEQ ID NO: 13976 - DNA, 1041 bp, Escherichia coli
atggcacagaacccgtttaaagcactaaatatcaatattgacaagattgagtctgctctgacgcagaatggcgtcacaaactattcctctaatgtaaaaaacgaaagagaaactcacatatctggcacatataaaggaatagacttcttaataaaactaatgccatcaggcggaaataccactatcggaagagcgtctgggcaaaataacacttactttgatgaaatcgccttgattataaaagaaaactgtttgtattcagacacaaagaactttgaatacaccattccaaaattcagtgatgatgacagggcaaatctatttgaatttctttctgaagaggggataacaataacagaagataataataacgatcctaattgtaaacaccaatatattatgaccaccagcaatggtgacagggtcagggcaaaaatttacaagcgcggctctattcaattccaaggaaaataccttcaaatcgcgagtttgattaacgatttcatgtgctcaatactaaacatgaaagagattgtcgaacaaaaaaataaagaatttaatgttgacataaaaaaagaaactattgagtccgagttgcatagcaaactaccaaaaagcatcgataaaatccatgaagatatcaaaaaacagctatcatgctcgctaataatgaaaaaaatagatgtcgaaatggaagattactcaacatactgcttctctgcattaagagccatagaaggctttatatatcaaatacttaatgatgtttgcaatccatcatcatcaaagaaccttggcgaatacttcactgaaaacaaacccaaatatataatcagagaaatacaccaagaaactataaatggtgaaatagcggaagttttgtgtgaatgctacacttactggcatgagaacaggcatggtttgtttcatatgaaaccaggaatagctgacacgaagacaattaacaaattagaatcaatcgcaatcatcgataccgtttgccaattaatagatggtggcgtagctaggttgaaattatga

SEQ ID NO: 13977 - DNA, 381 bp, Escherichia coli
atgaaaaaagataaaaaatatcaaatagaagcaataaaaaataaagataaaactttatttattgtctatgctactgatatttatagcccgagcgaatttttctcaaaaatcgaatccgacttgaagaaaaagaaaagcaagggtgatgttttttttgatttaataattcctaacggtggaaaaaaagatcgttacgtctatacgtcatttaatggcgagaagttttcaagttacacattaaacaaagttacgaaaactgatgaatataatgatttatctgagctctcggcttcgttctttaaaaaaaactttgataagatcaacgtaaaccttctatccaaagccacatcatttgctttgaaaaaaggcattccaatataa

SEQ ID NO: 13978 - DNA, 150 bp, Escherichia coli
atgaacaagcagcagcaagctgtactcaacatggcaggattcataaaaagccagagcctgacgctgctcgaaaagctggacgcactcgatgctgacgaacaggctgccatgtgtgagaagctgcacgaactcgcagaagaaggggtctga

SEQ ID NO: 13979 - DNA, 663 bp, Escherichia coli
gtgaccagcctgcaccgtgaggctgaagcacagttccggcctgagctggagaaaatcgtcagcgggattgaaacaggttttcgtggcacggccctgtacgccacagaaaacattgccggtcgcatcaatacccgcctggaggatgagggctttaccgtaaaaatcagttttccggcagtcagtcagttacaaacccggctcgcggtaaaaacaaatctgagtgcgcttatggaggaaagaacggagaccgtcacccgtcgccgtcggcagagtggcgtatggggaaccgtttgtcgatggtttggcaccagtgactggggctgggaaacctataaagaggatgtgagccgcagtgttatcaatatcaacaccgtcaggaaggaagttatgtcactgacccgggcatatttcggggagctgcaggcatccattgagcaggatattaaccagcccgtccgccaggaaatcgatgcctttttctgcgcattcagggagaaagttgaacaactgcgtaacacgctgattcagagctctgaagatcataaacgcgatcagcaggcacaggaacggcttaccaggcgacttcaggcattaaatgaaagggttcctgagctcattactgacagtaaggcgctgagggaagagctggagacaatgctgtga

SEQ ID NO: 13980 - DNA, 1125 bp, Escherichia coli
atgcgaaaacgtattctttttattggccctccgctgtacggtttgttatacccattgatttctctggctcaggcctttcgtgtaatcggacatgatgtagtaattagtagcgctggcaaattcgcgaataaagcagcagaagctggactggttgtttttgatgcagctccaagtttagattcagaggctggatatcgccatcaggaagagttgaggaaaaaaagtaatattattggtcatttctctttttttagcgatgaaatggcagataacctcatcgattttgcaggaaaatggaggccagatttaatagtctatcccccgcttggtccggcaggcccattggttgctgctaaatatagaattccttcagtgatgctggctgttggattcgcgcatacatctgcccatattcagatgttaaaccgttctttaagcaatgcttacaggcggcatggagtcagcggtccactatgtgatttagcatggattgatgttgctcccccaagtatgagcattcttaaaaatgctgaagaaccgattatctcaatgcgatatattccttataacggaggtgctgtaaaggaaacatggtgggacagggattctgatcggaaacgtttactcatcagccttggcactgtaaaaccaatggttgatggtctggagctgatttcatgggttatggattcagcaaatgaagttgatgctgatatcattttgcaacttgcaataaatgctcgtactggattacgaaaactaccatcaaatgtacgtctggttgactggatacctatgggtgtattccttaatggagctgatggatttattcatcacggtggcgcaggtaataccctgacagcgctgtatagtggaataccacagattgtgtttggagaaggtgcagatcgctctgttaatgcagaaattgttgcgaagcgtgggtgtgggattattccggacaagcatggactgaccagtgatttggtaaatcgcctgctttatgatgattcactacgcttctgttcagatcaggtagccgctgaaatggctgaacaacccactcctgcagagatcgcagaggttttgatgagaaaattaaaaaacaacgggaaacaattgtag

SEQ ID NO: 13981 - DNA, 1275 bp, Escherichia coli
atgatacctatgaaaaactatcttttccagactcccgaagatatttgtgtacagttaaaaaaaatgacacatcctgtcacaataagaacaacagatattgctaatttctggcactatcttgagtcagcaacacttccagtgatcacaaaaagcaccactacagaaaatcgggaggttacatttctgtggcgctcagagaaagcactgcaaggcgtatatcttcgcctgaatcgtgttacagataaaaaagacgtcaaaaaaggactaatgactcatatcccttcgacagatatctggatgctgacactggtgttaccagcttcatatcggggctcatactcatttatagaaattcccacagatatgacacaaaaagacatatttcaactaggaagtcgcttctctccattacccggtaaatctgatccatttaacaaaacagcagaaataaatatacgaggattcggagaatcagtcctttctcttgatatggctcctgaacaaaaggaatgggatgatacttcccataaatgtacaggtattctttcaacattacattcctttgttgcaggatatcaacgccggattcgtttatatttccccctgaatccaacatcagtacctcttggattacttgtgttacctgatgctgaaacatggtttgaccggatagatattacccgggcattagatatggccatcaccactggtcgtatcacgccaatggcaattatggggatagacaatattaatgaatctgatcgtatgaatatactgggaggcaataaagaactcatctttgatatagcggaaaatctgataccccagttatacagagactatccggatatcgtatgggctggtcgctctaatactgtactggccgggcagagcctcggtggagtgacagcactgatggcagctatatatgcgtcgacaacatttggtacaatcattagtcactcaccttcaatgtggtggaaccctgaccagggcagcccgatcttgtttactgagaataatacctcctgggtaagtgagcagatactttcagcgcctccgaaagatgtaaatatccgacttggagtcggttctttagaaggtacaaccgtctcacatgttcagcgattgcatcattcgttaatcgcagctggtttggaaagtaacctcactgtctataccggtggtcacgattatgcttggtggcgcggagcaattattgatgaattagcaaattataattgcaggaaggtatcaaataataactctgtgtaa

SEQ ID NO: 13982 - DNA, 237 bp, Escherichia coli
atgagagaaatatcagatcacatgcttgatttcgtgaaaggagggatgaatcttaatggattacctagttctactaatgtaatagatctacgaggaaaagatatgggaacatatattgatgctaatggaacatgctgggctccgggtactccatccatcatcatgtatccggggggaagtggaccttcttatagtatgagtagttccacatccagcgtaaacagcggcacatcataa

SEQ ID NO: 13983 - DNA, 315 bp, Escherichia coli
atgaatgggtttataggctatcagagcgaaggggaaaaattatacacacacattcttacattagataatcccgaagagatatttaaaaatataatagaaaatagaaagtcaactaaggagtctaaaatttatgctgcttgtgggctatattatttaaacgtagaaaatatagagtcattgtttaatgaaaatgataaacaagaatatatgtctgtcttaagaggggatattttaacaaaaataaaactgaatgatattctgaattctgtgataataaatggttgcaacaccaaattaatatctgaacataaatga

SEQ ID NO: 13984 - DNA, 1266 bp, Escherichia coli
atggggattaatacctatcatataccaagggctattgatattgcgaaattttataccccagagatgaaaagctgggttgatacagtttccttaaacaaaacaccattacttgatgctgtggtaacaacgatatcaaatcgttattacgatgatgaaagtcaacagaaattatcgccttactgtgctgataaatttaaatttggttatcaagcttttggtcctgttattattgggtttacatcatggataaaaaaaatagcaatagaaaataacatcaagaaattatattttctatcgcgtgataccaaggtggcatatgattgtttcaatatcctttatccagatataaatatagaatcacattatatttactcatcacgtcgttctgtaagcattccattatttaagtcaaaaaaagatttattagtggaagtatataaaacaatatattcaacaactatatctgcatggctagaaaatcgttttggtataactaaagatcaatattctgttgaagtattacaaaaatatagtctaaaggattacgatcatcctattggcggtaagttcagtaaggacaaactttctcaattagtttgtgagctttctgatataattttggaaaatgctaagcaagaaagaataaacttaattgattatctttcttcccacggcatggatactaatgagaatattgcggtagttgatatcggttatgctgcatcaatgcaatctgcatatcaaaaaatacttaataaagaaaatattcacggtatatattatgcaacatttaatagtgcattgaaaaatgtttcagatagttctctcttgcatgggtatagtgtgcatcttgaaaatccatcatctccaaaatatggaatatgtagccatagattcttctatgaaacaattttttgtgatgcagacaatagttttattaaacctattaaaactaataatggatttgaaatcgttaaaagtaaatttgatgattccacaagacaaaccgttgtaaaagaaatacattctggtgttttggctttggctcacgatctcgcagaaaattattcaagcagtgtgttaaatggatatattgatcctagtttaggaagttttcttttcgattcattcttaaaaacaccgaataaaaatgatgcagaaatgtttaagggggttctgtttgaagatgcaactggtcctaacattcgtcgatatctatttgtcccagatgaatataaaaatgataaaaaaccattgataatatga

SEQ ID NO: 13985 - DNA, 312 bp, Escherichia coli
atgatttggaaagaagctgcaagtctatttataaatccaacaccgtctcaagatgttaaaataaagtctgaacccccagttaagaatataaataatacaataagtactaaacaaaataaaaatgataaggtaaaagccaaaccaagtgaatgcaagcaaaatagagttgctgtgattgaacgagtaatattcgaattgtttttaaaaggtaagaaaaaaaataaatatctcagggaccggagtatgtttttcaaagactctaataataagtttatttcgcattattataaaataatagggagtaagttctaa

SEQ ID NO: 13986 - DNA, 459 bp, Escherichia coli
atgaaaatatactggacaagaaaaaacattcctgaactttcagcacttccaccttcattaagaaagaaaaattttactgacgcatataatgctgcatcttcccatatcgaatactggataggtgctggcgtctcatttatctcgatgatgattttattcaaagtatatgactttcttttacccgcccaagatactttcccgggtgatatcataagaagtttatgtgttgtgtgtccatccatattaatctggtttcagttttcggtatatgtcatgaggaaatattacagacatattctggaacgaggtaaggaaaccgaaaccatttcagaaaggttgatacgtgaggctgatacacgagaatatgaactatggcgtccggtccatcgttttttctccattgtttttctcattattctattagtttgcattcattcactgataacaactataaaataa

SEQ ID NO: 13987 - DNA, 738 bp, Escherichia coli
atgacgataattgacatatcaggaaagacaatcgcgcaaagagcggaaatatttaaacctattggtcttaaattagaccacacaggagtaccaaaaggtttatcattaaccttctctccccccattcatcttgtaaaaacagaaattcgaggaaatatcagtgttggagcctattcttttatgcgtggaggaaggctttgtgctgatattggaaattattgtagtatagcaccggatgtatccattggagatggggagcatcccgtcaactggttaagtacacatccttttcaatatggtcgctctgcttttactgattggcttaatgctgacggttttaacaacactaagaggcttccgcttagcatttcaaaacgagctccaataataggaaatgacgtttggataggtactcgagtcgttattctgcgcggtgttaagatcggtgatggtgcaattgttgctgtgggtgctgtcgttacaaaagacgttcctccatttgctattgttggaggtgttcctgcaaaaattttacgttatagatttgaccaaaaagtaattgaaaaaattcaattgtcacaatggtggaaatatgacattaaatatttaaaagacataaatttccaagaaccagaggcggcagcagagcaaatgttagaaaaaatctctttaggtataaaaatgattcctgaaaataaatatagattagaatatgataggcttattatgcagaaataa

SEQ ID NO: 13988 - DNA, 141 bp, Escherichia coli
atgctgaaaggcggaatttccggccgcagtgcaaaaggaaaacgtatccacacccgtgccattcacagcatcgacaccgatattaagctcaaccgcgcattgtgggtaatggcagaaacgctgctggagagcatgcgctga

SEQ ID NO: 13989 - DNA, 480 bp, Escherichia coli
atgaaaatcgtttctcagaacacaactactctttcttcagccacagcaccagggaataaccagccccaactggttgctactcccgtccctgatgaacaacgtatcagcttctggccgcagcattttggcctcattccacagtgggtgaccctggagccccgtgtcttcggctggatggaccgtctgtgcgaagactactgcggtggtatctggaatctgtacaccctgaacaacggtggcgcatttatggcacccgaaccggatgaagatgatggaaaaacctgggtactgttcaatgccatgaacggtaaccgcgctgaaatgagtccggaagccgccggcattgcggcctgtctgatgacgtacagtcatcacgcctgtcgtacggagtgttatgccatgacggtccactattaccggctgcgggattacgccctgcaacatccggaatgcaacgccattatgcgcatcattgactga

SEQ ID NO: 13990 - DNA, 645 bp, Escherichia coli
atgagcagaattatcaccaccaccgtgtatacactgcatgagctatcctccaccgcacaggaaaaagcccgcgactggtaccgtcagcatcatgctgacagcaactggtatgaaaacgtgtatgaggacttcagggaggtctgtggcattttcggaattgacctccgccagcgcgttttccggctcagcaacggcaggtttatggaagagccgtgcatctggttcagcggattctgcagccagggggacggagcctgttttgaagggcgctggcactggcagccagcgacaccccggaaaatcagggaatatgcccctcaggaccgtgagcttcatcgtatcgcggatgccctgcaggcggtacagaagcgtaacttctggcagttacaggctgaaatcagtcaccggggacgttactgccatccgtacagcatggatatcaccgtcacccggaacagtccgactggtcaggcactgacagccgatgcggaagccgctgtcagcgaagccctgcgcgacctggccttctggctgtaccgccagctggaaaacgagtacgactggctgacctcagacgccgctgtagatgaggccattcacatcaatgcatataccttcaccgaagccggtctccacgccggctga

SEQ ID NO: 13991 - DNA, 369 bp, Escherichia coli
gtgtcagacacgcaccatgagacaaattatcccgacgactataacaaccgcccctggtgggggctgccctgcaccataacaccctgttttggcgcccgtctggtgcaggagggtaaccggttgtattaccttgccgaccgcgccggtatcagaggccggttcagcgacgcggatgcgtaccatctggaccaggcctttccgctgctgatgaaacaactggaactcatgctcaccagcggtgaactgaatccccgccatcagcataccgtcacgctgtatgccagaggactgacctgcgaagccgacaccctcggctcctgtggttacgtttatatggctgtttatccgacgcccgaaacgaaaaagtaa

SEQ ID NO: 13992 - DNA, 141 bp, Escherichia coli
atgctgaaaggcaggatttccggccgcagtgcaaaaggaaaacgtatccacacccgtgccattcacagcatcgacaccgatattaagctcaaccgcgcattgtgggtaatggcagaaacgctgctggagagcatgcgctga

SEQ ID NO: 13993 - DNA, 177 bp, Escherichia coli
atgaaatcatgcagtaccgcaaacagtcgttcagtcctttatgtaactcgttatggtaacaatccgttggtaatgggagagatgaactatcgcaagcgtaaactgaccgctctattcgatcacggccaacccgtgatcgattcagatgccattttgtacgttgtgcaacttctgtga

SEQ ID NO: 13994 - DNA, 210 bp, Escherichia coli
atgctggtgatattgatgatgttctgtcatggggagcgtagtccgtacccgtacagcatgaacagggcggtgtgttttgataatccggcacttgcggataaaacctgcacagagctgtttcatctggtggatatggcggtgatggacggcgatgaaatcatgcagtaccgcaaacagtcgttcagtcctttatgtaactcgttatggtaa

SEQ ID NO: 13995 - DNA, 366 bp, Escherichia coli
atgctgttggttgtgctttatggcgttgggatttatctcactacctggtttaatgaattcatcaccaccgggccacatggtgtggtgttggcaatgttcccgcttatctgggtcggcgtagtttgtgttattggtgcatttagcgcctggtttcatcgttgctggttgttggtgcctttagcaccgctttccgttgtgtatgtattattagcttatgccatctggattatttatggacttattgccttttttactggacgcgaacctcagcgcgacaaacccacccgctattccgcactggtggaagcgtcaaccgcttattcccacccttctgtcacaggaactgaaaaactttctgaagcttaa

SEQ ID NO: 13996 - DNA, 300 bp, Escherichia coli
ttgctgtccgcacaaggggcaacgctgttaagaacagcaatgctggattattataaccaggacactatgggaacctcggggatagtcggcatgggattcaacaatgaagattccattacagaccttcgtgagggcagctttaaaatgccggacgggacaacattcagcgatcctgtcatagcaatgtcagacaatggtatgcaggctactattctgacctctatcagaagcgggtatgcgaagggtatcactgtcagaccccgtagcattgcacttaattacattgtgagggcagtttaa

SEQ ID NO: 13997 - DNA, 447 bp, Escherichia coli
atgacgcccggcgagcgcagtctcattctgcgggccctgaaaaccctggaccgccatcttcatgaacccggcgtggccttcacctccacccgtgcggcacgggaatggctgattctgaacatggcgggactggagcgtgaagagttccgggtgctgtatctgaataaccagaatcagctgattgccggtgaaaccctcttcaccggcaccatcaaccgcacggaagtccatccccgggaagtgattaaacgcgccctgtatcacaatgccgcagccgtggtgctggcacacaatcacccgtccggtgaagtcacccccagtaaggcagaccgccttatcacggaacgtctggtacaggcactgggcctggtggatatccgggtgccggaccatctgatagtcggtggcagccaggttttctcctttgccgaacacggtctgctttaa

SEQ ID NO: 13998 - DNA, 567 bp, Escherichia coli
atgcctaaatcttacacaccaaactggttttttaccgctttacttgacaatcacatcaatcaaatgatggcacgctattcctgcctgcgggccttacgcatggatttcttctacaggaaagatacgcctgatttcttacaacctgatcatcgctggcttgaattgcagttgcgtatgctgctggagcaggtggaacaatttgaaaatatcgttggcttcttctgggtgattgaatggacggttgatcatggttttcatgcgcatgcggttttctggatcgatcgtcagagggttaaaaaaatatatccctttgcggagcggattacggaatgctggcggtctattacacataacagcggttcggcacaccgctgtacatatcagccgcattatacatacaacatcaacattcctgtgcgccacaacgatcctgaaagcatcaataatattcgcggtgccctgcattatctggcgaaagaagagcaaaaagacgggctgtgtgcctacggctgcaatgaagttcctgaacgtcctgcagcagggcgtcctcgtaagcctcacttctga

SEQ ID NO: 13999 - DNA, 141 bp, Escherichia coli; identical to SEQ ID NO: 11051

SEQ ID NO: 14000 - DNA, 198 bp, Escherichia coli
atggaatcattaaccacagaaacggcgctggatattctgattgcgtggctacagaacaatatcgactgcgaatccggaattatcttcgacaacgatgaggataaaacggattcggcagcactgctgccctgcattgaacaggccagggaagatatccgtacactgcgccaactgcagtttctgcaacagaaccggtga

SEQ ID NO: 14001 - DNA, 255 bp, Escherichia coli; identical to SEQ ID NO: 11121

SEQ ID NO: 14002 - DNA, 159 bp, Escherichia coli; identical to SEQ ID NO: 8964

SEQ ID NO: 14003 - DNA, 261 bp, Escherichia coli
ttgctttcatggcagaaaggtacactggtcggcggtcatgacgataacgattctgcgcttgatatctcgtacatgagtaacggaaataatattgactatggcggcgataaggtgtttgcggggaattaccgtagcgattatttgtggtacgcaatactgggtggaacaaacagtcgcgcaaaagccgaattaaacggagcattctttaacataacccgcccccgcaatatcgcgtttaactatatcgtgagggcggcgtga

SEQ ID NO: 14004 - DNA, 2652 bp, Escherichia coli
atgacagcctttcgtgccgcatttaaggcatatcgtatgcatcaggtgttaatactgcctcgctttgcacggcttacctttgcccttggcttagcaactgcggtttttcccgttgacgcagagtattattttaatccacggtttttaagcaatgaccttgctgaatctgtcgatttatctgcctttactaagggacgcgaggccccacctggtacatatcgggtcgacatttatttgaacgacgaatttatggctagtcgggatattacttttattgcagatgataataacgcagatctcatcccatgcctgagtacagaccttcttgtcagtcttggcataaaaaaatcagcattattagacaacaaggaacattcggcagataaacatgtgccggacaacagcgcatgcacaccacttcaggatcgtttggctgacgcatcatctgagtttgatgttggtcagcaacatctgtcactctccgttccgcaaatatatgtcggcagaatggctcgcggctatgtttctcctgatctgtgggaagaaggaataaatgccgggctactaaactatagttttaatggtaattctattaataaccgtagtaaccataatgcaggaaaatccaactatgcatatttgaatttacagagtggcatcaacattggtagttggcgactgcgcgataactcaacgtggagttataacagtgggagtagcaattcatctgacagcaataaatggcagcatatcaatacgtcggctgaacgtgacattattccgttacgctcacggttaacagtgggtgatagttataccgatggcgatatttttgacagtgtgaactttcgtggccttaaaataaattcaacagaagcgatgttgcccgatagccaacatggtttcgctccggtgattcatggtattgctcgtggcaccgcacaagtgagtgtaaaacagaatggatacgatgtttatcagactactgtcccacccggcccttttactattgatgatatcaactctgcggccaatggtggtgatctgcaagtaaccataaaagaggcagacggcagtattcagacattatatgttccttattcgtctgttccggttctccaacgtgctggatatacgcgttatgcacttgccatgggggaatatcgtagtgggaataacctgcaaagctcccccaagttcgtacaagcaagcttgatgcatggtctgaaaggaaactggacaccttatggcggaatgcaaattgcagaagattatcaggccttcaaccttggtattggtaaagatttaggactttttggtgccttttctttcgatatcacgcaggccaatacgacgcttgcagatgacacccgtcacagcggacaatcggttaaatccgtctacagcaaatccttctaccagacgggaaccaatatccaggtcgcaggatatcgctattctacgcaaggtttttataacttatccgacagtgcatacagtcgaatgagtggttacaccgtcaagcctcctaccggagacaccagtgagcagacactatttattgattattttaatctgttctacagtaagcgtggtcaggaacaaataagcatctctcagcagcttggacattacggtacgacatttttcagtgccagtcgccaaagttactggaacacgtcacgcagcgaccagcaaatatcatttggattaaatgtgccgtttggtgatattacgacttcgctgaattacagctattccaataatatatggcaaaacgatcgggatcatttactcgcttttacacttaatgttccctttagtcattggatgcgtacagacagtcagtcggcatttcgtaattcaaacgccagttacagtatgtcaaacgatttgaaaggcggcatgaccaacctatcaggggtttatggcactctgctgccggataataacctgaattatagcgttcaggtcggtaacacccaagggggtaatacatcgtctggcaccagtggttacagttctcttaattatcgtggagcttacggtaatacgaatgtcggttacagtcggagtggtgacagcagccagatttattacggaatgagtggtgggattattgctcatgctgatggcatcacctttggacagccgctgggcgacacaatggttctggttaaggctcctggcgctgataatgtcaaaatagagaaccagaccggaattcataccgactggcgtggctatgccatattaccatttgcgacagaatatagagaaaatcgtgtcgctcttaacgcgaattcccttgcagataatgttgaactggatgaaaccgtagtcactgtcatcccaactcacggtgctattgccagagcaacatttaatgcacaaatcggcgggaaagtattaatgacgttgaagtacggtaataaaagcgttccattcggtgcaattgtcactcacggagagaataaaaatggcagcattgtcgcggaaaatggtcaggtttatctgactggacttccacagtcagggaaattacaggtttcatggggcaatgataaaaactcaaactgtattgtcgattacaagcttcctgcagtctctcctggaaccttgctgaaccagcagacagcaatctgtcgctaa

SEQ ID NO: 14005 - DNA, 1158 bp, Escherichia coli; identical to SEQ ID NO: 8062

SEQ ID NO: 14006 - DNA, 1863 bp, Escherichia coli
atggatagccatacgcttattcaggcgctgatttatctcggttcggcggcgctgattgttcccattgcggtacgtctcggtctgggatcggttcttggctacctgatcgccggctgcattattggcccgtgggggctgcgactggtgaccgatgccgaatctattctgcactttgcagagattggcgtggtgctgatgctgtttattatcggcctcgaactcgatccacaaaggctgtggaagctgcgtgcggcagtgttcggcggtggcgcattgcagatggtgatttgcggcggcctgctggggctgttttgtatgttacttgggctgcgctggcaggtcgcagaattgatcggcatgacgctggcgctctcatcaacggcgattgccatgcaggcgatgaatgaacgcaatctgatggtgacgcaaatgggccgcagagcctttgcggtgctgctgttccaggatatcgcggcgatcccactggtggcgatgatcccgctactggcagcgagtagtgcctcgacgacgatgggcgcatttgttctctcggcgttaaaagtggcgggcgcgctggtgctggtggtattgctggggcgctatgtcacgcgtccggcactgcgttttgttgcccgctctggcttgcgggaagtgtttagtgccgtggcgttattcctcgtgtttggctttggtttgctgctggaagaggtcggcttgtcgatggcgatgggcgcgtttctggcgggcgtactgctggcaagctcggaataccgtcatgcgctggaaagcgatatcgaaccatttaaaggtttgctgctggggctgtttttcatcggcgttggcatgtcgatagactttggcacgctgcttgaaaatccgttgcgcattgtcattttgctgctcggtttcctcatcatcaaaatcgccatgctgtggctgattgcccggccgttgcaggtgccaaataaacagcgtcgctggtttgcggtgctgttagggcagggcagtgagtttgcctttgtagtatttggtgcggcgcagatggcgaatgtgctggagccagagtgggcgaaatcgctgaccctggcggtggcactgtcgatggcggcaacgccgattctgctggtgatcctcaatcgccttgagcaatcttctactgaagaggcgcgtgaagccgatgagatcgacgaagaacagccgcgggtaatcattgccggattcggtcgttttgggcagataaccggacgtttactgctctccagcggggtgaaaatggtggtgctcgatcacgacccggaccatatcgaaacgctgcgtaaattcggtatgaaagtgttttatggcgatgccacgcggatggatttactggaatctgccggagcggcgaaagcggaagtgctgattaacgccatcgacgatccgcaaaccaacctgcaactgacggagatggtgaaagaacatttcccacatttgcagattattgcccgcgcccgcgatgtcgaccactacattcgtttgcgtcaggcaggcgttgaaaagccggagcgtgaaaccttcgaaggtgcgctgaaaaccgggcgtctggcactggaaagtttaggtctggggccgtatgaagcgcgagaacgtgccgatgtgttccgccgctttaatattcagatggtggaagagatggcaatggttgagaacgacaccaaagcccgtgcggcggtctataaacgcaccagcgcgatgttaagtgagatcattaccgaagaccgtgaacatctgtcattaattcaacgacatggctggcagggaaccgaagaagggaaacatactggcaatatggcggatgaaccggaaacgaagccctcatcctaa

SEQ ID NO: 14007 - DNA, 1689 bp, Escherichia coli
atgaataaattagtgctagtcggacatcctggctcaaagtatcagatagttgaacattttttgaaagaaattggcatgaactcaccaaattattctacaagtaataaaatttccccagaatatatcaccgcttcattatgtcaattttatcaaacaccagaagttaatgatgtagtagatgagagagaattctcagctgttcaagtctcaaccatgtgggatagcatggttcttgaactaatgatgaacaatctaaataacaaactttgggggtgggcagatccatctataatattttttcttgatttttggaaaaatatagataaaagcataaaattcatcatgatatatgatcaccctaaatataatttaatgcgttcagtaaataatgcccctctctctttaaatataaataatagtgtagataactggattgcatataataaaagattgcttgatttttttttggagaataaagaacgatgtgtgttgattaattttgaggcgtttcaaagcaataagaaaaatattataaagccattgagtaatattataaaaatagataatctaatgtctgcgcattacaaaaattcaatattgtttgatgtggttgagaataatgattatacaaaatcaaatgaaattgccctgcttgaaaaatatacaactttattttctttaagtgcaaatgagactgaaattacatttaatgatacaaaggttagtgagtacttagtatctgaattaataaaagaaagaaccgaggttctgaagctttataatgagttacaagcctatgcaaacctaccttatatagaaacatcgaaagataacgtttcggctgaggctgcattatgggaggtagtcgaagagagaaattctatcttcaatattgtatctcatttggtgcaagagtcaaaaaagaaggatgcagatattgaattgactaaatctatatttaagaaaagacaatttttattattgaacaggattaatgagctaaaaaaagaaaaggaagaggtaattaaactttcaaaaataaatcacaacgatgttgtgagacaagaaaaatatccagatgatattgaaaaaaaaataaatgacatacagaaatatgaagaagagataagcgaaaaagaatcaaaactcactcaggcaatatcagaaaaagaacagattttaaaacaattgcataaatatgaagaagagataagcgaaaaagaatcaaaactcactcaggcaatatcagaaaaagaacagattttaaaacaattgcatatagtgcaagagcagttggaacactattttatagaaaatcaggaaattaaaaagaaacttccacctgtgctatatggagcagctgagcagataaaacaagagttaggttatcgacttggttatattatagtctcgtattctaaatccctcaaggggattattaccatgccatttgcacttatccgtgagtgtgtttttgaaaaaaaacgtaagaagagttatggcgttgatgtgccactctatttatatgctgatgctgataaggctgaaagagttaagaaacatttatcttatcaattagggcaggctattatctccagtgctaattcgatatttggattcattacccttccatttaagttaattgttcttgtttataaatataggagagctaaaatcaagggctgttaa

SEQ ID NO: 14008 - DNA, 786 bp, Escherichia coli
atgcaaccgtccagaaactttgatgatcttaaattctcctctattcaccgccgcattttgctgtggggaagcggtggtccgtttctggatggttatgtactggtaatgattggcgtggcgctggagcaactgactccggcgctgaaactggacgctgactggattggcttgctgggcgcgggaacgctcgccgggctgttcgttggcacatcgctgtttggctatatctccgataaagtcggacggcgcaaaatgttcctcattgatatcatcgccatcggcgtgatatcggtggcaacgatgtttgtctcatcccccgtcgaactgttggtgatgcgggtacttatcggcattgtcattggtgcggattatcccatcgccacctcaatgatcaccgagttctccagtacccgtcagcgggcgttttccatcagctttattgccgcgatgtggtatgtcggcgcgacctgcgccgatttggtcggctattggctttatgatgtggaaggcggctggcgctggatgctgggtagcgcagcgattccctgtttgttgattttgattggtcgattcgaactgcctgaatctccccgctggttgttacgcaaagggcgagtaaaagagtgcgaagtgaagtggtcaacaaaaactggccaccgagttagagttttttccagtatcgattttccgattcgtttggtggtaacccaccattatattcgtgcggtcttagtgcgctgtaatatccaacgatatagtccgttattgcgtgagctgcatcgctga

SEQ ID NO: 14009 - DNA, 774 bp, Escherichia coli; identical to SEQ ID NO: 7444

SEQ ID NO: 14010 - DNA, 234 bp, Escherichia coli
atgtcgtcacgcaactctgtacatgattttataatgctgctcccggtgctactgttggtcgggtgggtagtttttgtgataattctcatgtttcgggatgataaatgtgacaaaacttaccgtgaaggttcgtttcccgaattaatttgtctccattctgatcgctcgttacttcgagaaaacgattctgagagactcattgtcaaatatacagaaatacaatcacaaaaatag

SEQ ID NO: 14011 - DNA, 495 bp, Escherichia coli
atgagtgaattttattcaagggcagcaattgtggcagacatgccatttatcatgggggagttcgaagacggcgcacgcaaaggtcacttctacgaagaggtcctcacatcaaatgttggtgaaacctttgaacagcagctcaggctggcaatcaaggcaaacgagcagggccaatacaccgggcattttatctacatcctgctgcgacgttctgatgacaaaaaaataggactaatctggttctgtgacgtacgcgatccaactggtgtgccacgacttgagatccgtgccgtcagtattgtcaaagagcttcgcgggaaaggctatgggtcaatgcttgtgtccgaaatgctcgaatcaaaccctagccggccaatgatggcgaggtgctacgtcaaatcctcgcaaatggccgacatgctaaaacgcagaggtttttaccttttcggcacgtcacccaaaggcacgcagatgctgttccgcgacccaaagtaa

SEQ ID NO: 14012 - DNA, 240 bp, Escherichia coli
gtgtacgcttccggtggaaatggtgccggtggcggtgattgcgccaacacatcaaatcttcagggctatgtgaacggcgctttcattggtatgaatgccagcaataacccctcctacggaaagacagcatttatttcatttgccgtgccagtgggagcgtcatatcaaatcatctccagaccaacacaaaattacgcctgtggtaacggtgttttctctgtgtatgcctatcagatgtga

SEQ ID NO: 14013 - DNA, 360 bp, Escherichia coli
atggataccctcactgccggatatcagttttccgcagatgcattccggcgctttattatccggacgctgactgacgatattccgcctgacggagatgaaaaagagattgcccggttcattctccgccacccggcatttaacggcggctggctgctctttctggctgcagaaattcatgaaagatcccgtacccataacagcatcaccgtcacagtgagcgtcgataactatctctcatggatggatattgccgtgtccggtctcccggaattaccggatatgcccttctgtgattttttcattcgccgccagcagtttatttatccgggtgtacccccgacaaaatcaggagaagaatga

SEQ ID NO: 14014 - DNA, 381 bp, Escherichia coli
atgaaaattcaccgaatatccccggagacgcttataacactcatccacgcacacctggccggaaaagctgacagtaccgccaaagaagagcaccggctactccgtcgtttcctgcgggatgatgacggcaggctggccggcgtactgctgaatattgccggaatacttcagttcaacagggaattaagtgcgcggcataattatccggccacacccctgactgaattttcattaaggaaacggggaaaacaacttcatctctgtctctgcagtctccgtttcttttatattcctccggtatttatacaaaacaaaagaagaaaatctattgttgtacaccttaataagatcacttataaacaaacccattcaatacgctga

SEQ ID NO: 14015 - DNA, 1197 bp, Escherichia coli; identical to SEQ ID NO: 5901

SEQ ID NO: 14016 - DNA, 3006 bp, Escherichia coli; identical to SEQ ID NO: 10984

SEQ ID NO: 14017 - DNA, 519 bp, Escherichia coli
atgaatcatgctgttcagtacgcgccggtcctcattcaggtgcgtgacaatcagcgtctgctcccgtgcttccggtgtcctgccggtatagtcgcggacaatggcttcatacagtgtcatggggacatccgggaaagcctcgcctttcagcatcgccttctgctgcgcttctgccagtttcgcttcctggctgtgactgaactccgtcacggagtgctccggtgcccatgcgccctcctgacggggaacctgagacggtttcacactctcaagcccggacagtgccctttccacatcccggttaatcaggctgtataccgcctcccgcagttccggcgtctgacgcacaatctctttcatgatgaccacatcggcagcactgcgcgtctgctggagccggaaaggctgaccgggcgcgatggcctgcagctggtccgtgtcaccgctggccacggcacgaccaccaccggccgcaatcagggcgtatgcccgtgccatgtcggtattgcccaccattga

SEQ ID NO: 14018 - DNA, 213 bp, Escherichia coli
atgaaaaagatccttgtggcatgcggtaccggcatgtcgacttcaaccatgattgcactgaagtggtcaacaaaaactggccaccgagttagagttttttccagtatcgattttccgattcgtttggtggtaacccaccattatattcgtgcggtcttagtgcgctgtaatatccaacgatatagtccgttattgcgtgagctgcatcgctga

SEQ ID NO: 14019 - DNA, 1122 bp, Escherichia coli; identical to SEQ ID NO: 5870

SEQ ID NO: 14020 - DNA, 306 bp, Escherichia coli
atggcaacaatggacagtaaatatattcagcacctcaggaaaataggtgctgtgctgctcaggctgataagcagaacattaaatttatttccttttggtcttgtaatggtgcctgttatattattttattttgcacctgacagttttctcgctgaaattattcatgaatggaagaaggcagatatatcagaacaagtgacacttgtcagattatatctgaaggtgacatttacatgtgtgtttatggctgtttttctcaattatcttttttctgatgagttcatgcctgtaaatagcagaaagtga

SEQ ID NO: 14021 - DNA, 279 bp, Escherichia coli
atgattggcaagtttggtgcggccaaagaccagtggttcagttccttcctgctgcaggtggaaaaccattcctcctggcaccgtctgtttgtggacccgttaagccgcgccatgtacagctctgacggcccggattttgagtttgtgcagcagaaacgtaaagaggggctgagtattcatgaggcggtgtggcagctggcgtggaagaagtcagggccggagatggcttcgctggaagcctggctggaagaacatgagaaatacaggagtgttgcatga

SEQ ID NO: 14022 - DNA, 567 bp, Escherichia coli
atggaacacggtgcccgtttaagtaccagtcgtgtaatggccatcgcctttatatttatgtcagtgcttattgttctcagcctctctgttaacgtcattcagggggtgaataactaccgccttcagaatgagcaacgcactgccgtgacgccaatgggatttaatgtgccctttgccgtgtcacagaacagtgccgacgcctcttatttacagcagatggcgctgtcatttattgccctccgtctgaatgtttcatcagaaaccgtcgatgcctcacatcaggcgcttctgaaatatatccgcccgggcgcacagaaccagatgaaagttattctggctgaagaagcgaagcgtattaaaaacgataacgtgaactcagcctttttccagaccagtgttcgtgtctggcctcagtatggccgtgtggaaattcgtggtgtgcttaaaacctggattggtgattcaaaacctttcactgatatcaaacattacatccttattctgaagcgggaaaacggggtgacctggctggataatttcggggaaacagacgatgagaaaaaataa

SEQ ID NO: 14023 - DNA, 1452 bp, Escherichia coli
atggccagtatcaataccattgtgaaacgcaagcagtacctgtggctggggattgtggttgtcggtgcagcctccgcgattggtggggtactgtatctgtctgatgtggacatgtccggtaacggtgaggcggtggctgaacaggagcctgtgccggatatgacaggtgtggtggatacgacctttgatgacaaggtgcgtcagcatgccaccacagagatgcaggtgacggcagcgcagatgcagaagcagtatgaggaaatccgtcgtgaactggatgtcctgaacaaacagcgcggtgatgaccagcgtcgtattgaaaagctgggacaggacaatgccgccctggcagagcaggtaaaagccctgggtgctaatcccgtcacggcgaccggtgagcctgtaccgcagacgccagcctcaccgcccgggccggaaggcgaaccacagccgggaaacacccccgtatccttcccgccgcagggcagcgttgctgttccaccgccgacggcgttttatcccgggaatggtgtcacgccaccaccacaggtgatgtaccagtctgtgccggtgcctaaccggatacagcgtaaggtgtttacccgtaatgagggaaaacagggaccatcgctgccgtacattccgtcaggaagttttgcgaaagccatgctgattgaaggggcggatgccaatgcctcagtcaccggtaatgaatccacggtgccgatgcagctgcgtatcaccggtctggtggaaatgccgaacagcaagacgtatgacgcaacgggatgttttgtggggctggaagcctggggggatgtctccagtgaacgtgctattgttcgcacccgtaatatcagctgcctgaagaatggcaaaaccattgatatgccgattaaggggcatgtcagcttccggggtaaaaacggtatcaagggcgaagtggtgatgcgtaacggcaaaatcctcggctgggcatggggcgcgggatttgttgacggtatcggtcagggaatggagcgcgcctcccagccggctgtcgggctgggtgccacagccgcttacggggccggcgatgtccttaaaatgggtatcggtggcggcgcatcgaaagccgcacagacgctcagtgactactacatcaaacgtgccgaacagtatcacccggtgataccgattggtgcgggcaacgaagtgaccgtggtgttccaggacggcttccagctgaaaaccgtggaggaaatggcgctggagcagtcacagagtacagcggaagagggtaacccggaaagcccggtgccgaatcctccctcggcagaaagccacctgaacggttttaacaccgaccagatgctgaaacagctgggcaatctgaatccgcagcagtttatgtccggagacaagaacccgctgggcggggatgccggcaaggagggcggaaatggcgggtga

SEQ ID NO: 14024 - DNA, 282 bp, Escherichia coli
atggttcatccagtacccggcaccgtcctcaaaattccaggtacgccagaccaggccattgttattgcggacaaccaggcgaaaatgcgttccctgatcatcctcgataaagacgttccggtactgtgcggcaacggcttccgcctgttcgcgggtaaaggagccgtccggcagtccctgaagtattctgaaatattcgctcatcctcatatctccggtgatgccccgcacagggcggggcggttgtcacagtcagcccgatcagaacgggatgtcgtctga

SEQ ID NO: 14025 - DNA, 528 bp, Escherichia coli
atgagtgcacgtggtatcaacaaggtcatcctcgtcgggcgtctgggcaatgatccggaagtccgttacatccccaacgggggcgcagtggcaaacctgcaggtggctacgtcagaaagctggcgcgacaaacagacgggggagatgcgggagcagacggaatggcaccgcgtggtgctgttcggcaagctcgcggaagtggctggtgaatatctgcgcaagggcgcgcaggtctacatcgaggggcaactccgtacccgtagctgggaagataacggtatcacccgttacgtcactgaaattcttgttaagaccacgggcaccatgcagatgctggggagtgcaccacagcagaacgctcaggcgcaaccgaagcctcagcagaatgggcagccacagagtgctgacgcgacgaaaaaaggtggcgcgaaaacgaaaggccgtggacgtaaggccgcgcagcccgagcctcagccgcaaacgccggagggggaggattacgggttttcagacgacatcccgttctga

SEQ ID NO: 14026 - DNA, 192 bp, Escherichia coli; identical to SEQ ID NO: 8281

SEQ ID NO: 14027 - DNA, 423 bp, Escherichia coli
atgtactgtactgttaaagaaattatccgcgaagtgctggatacagacgtgccggacagtgaatgcgtttttgccgtggtgctgacccgtggggatgtgcgtcacatagcccaggactggaacctgtcagacgatgagctggaaaccgtcatgcagcggctggacgatgcttttgtatatggtgcggatgtcagcgttgttcacggcgttgttcgtgaactgatggaagaaaagcgcgccagccgtcatgtgacagtcccggcggtgatgctggaaaaagtgatggcgctggcaggtagtgaaatgaagcgcctgtatgccgtcgggagtgagaacgggggcgacggtgacgcattcgtcagggaggaactcgaagcaatggacgttgtgttgcaggcgctggacggggagacgatgtcatga

SEQ ID NO: 14028 - DNA, 426 bp, Escherichia coli
atgcaatatgcgaaacctgtcactctgaacgttgaagagtgtgaccgtctctcctttctgccttacctgtttggcaacgattttctgtatgccgaggcgtatgtgtacgcgctggcgcaaaaaatgatgccggaatatcagggaggcttctggcacttcatccgcctgccggacggtggcggttacatgatgccggatggcgaccgtttccacatggtgaacggtgcaaactggtttgaccgtaccgtgagtgctgatgccgcaggcatcatccttacctcccttgtgattaaccgccagttgtggctgtaccacgacagcggggatgcagggttgacacacctgtacaggatgcgtgatgcgcagttgtggagccacatcgaatttcaccccgaatgcaacgcgatttacgcggcacttgactga

SEQ ID NO: 14029 - DNA, 579 bp, Escherichia coli
atgactgagccattacaactcccgccaccgcttgagggtgatatcagtctcaggacgctgggaagactggcaggacggctggataacatcgacctgagcgtactgatggtctttctcgtcgatatcgtcgacagttccgcgctgccatggctgggcgagcagttctcactgtctggcgatggctgggagctggcggaatcggacgatgttcgccgcatgcttataaaagcagccatcgaactgcaccggtataaagggacgccgtggtcaatccgggaagttatccgccgttttggctttggtgaagtggatctgattgaaggcacaggtcgtctcagttacgacggcaatcgcagctataacggactgtttgttcatggagatgcagccgcctgggcagtttatcgcgttattctgaaacagcccattactaacgatcaggccgcgatgctgcgtcagacgctggctgcatttgcaccggcccgctgccatctggccagcctggagtatcagtctgtggccattcgctataacaataccgccatccatgatggcagttataaccacgggagcagttga

SEQ ID NO: 14030 - DNA, 1047 bp, Escherichia coli
atgattgcgaagtatgaagcggataccggcaaaacgctgtacccggcacaggcagaacgtctgctgattgatctgtgggcctatcgcgaaatgctggtcagggttgcggtacaggaggcagcaaagcagaatctggtcgcctttgcccgtgagccgatgattgattacctcggtgaactggtcggtgtataccgtcttgccgcgcagcctgccaccaccacgctccagttctccgtagatgaggcactggccattgatgtgctgatcccggcaggcacccgcgtcagcgcttccgacagcgttatttttgccaccgatacagatgtggtactgaaggccggattgctgctggtcaatgtcacggccacctgtaccgaacccggtaccgctggtaacggctggcaacctgcgcaggtcagtcagttactcgatgagattgataacgttaacctgctggtgagcaatctgatggccagttccggcggttcagaacaggaagacgatgacaggctccgggagcgtatcaggctggccccggagtcattcaccaatgccggaagccgtggcgcataccgctttcatgccatgcaggcccatcccaacattgtcgatgttgctgtgctttccccggttcccgggaccgtagatctgtatccgctgctcagtaccggtctgccggacggcggtgttctcacgctggtagagagtttctgctctgatgagaaagtcaggccactcactgatacagtgcgggctaaaacaccagtgaaggtggattacaccattgaagccaggattacgatctatcgtgatcaggatgccaggtctgtaaaagatgccgctaacagcgccatacagaactgggtggcatcacgtgccgccacgctggggcgcgatattgtccccagccagattatcagtgcattgtccgtttccggggtgtaccaggttgaactggtgacaccggcactgcgggtggtggcagaaaacgaatgggcaaactgtacggcaatcactcttaacatgactggagtgtctgatgactga

SEQ ID NO: 14031 - DNA, 771 bp, Escherichia coli
atgaatgaaacgctgaatgcactgatttatcgccacgccagcaacctgttgctggcgcagggctggccggaagaaacggatgttgaccagcgtaacccgaagtatccgggctggatcagcatttacgtgcggctggatgcgccccggctggcgacgttacttatcaagcgtcacggcggcgtactgccgccgctcctggcctctgccattcacaaactgaccggaaccggagcggaacttgttctgtccggcagtcagtggcagtcgctgccggtacttccggcagacggaacgcaggtgtctttcccgtatgccggtgagtggctggcagaggacgaaatcagggccgttcttggtgcggtacgcgatgcagtatgcagtgtcagttgccgggtggcagaagatgcgcggcgtatcagggcggcgctgaccacaaccggtcagacgttgctgacccgccagacgcgccgctttcgcctggtggtgaaggaaagcgatcacccctgctggctcgatgaagacgacgaaaacctgcccgtggtgctcgatgccatcctgaaccggggcgctcgtttttcgtcggtggaaatgtatctggtcagtgagtgtgtggagcatatcctgtccagtgggctggcctgcgatatgctgcgtatacctgatgaaccgtcccgtcgctggtttgaccgtggtgttctgcgggaggtggtccgggaagcccggaacgaaatccgcagcatggcggatgccctggcaaaaatccggaaatga

SEQ ID NO: 14032 - DNA, 426 bp, Escherichia coli
atgcaatatgcgaaacctgtcactctgaacgttgaagagtgtgaccgtctctcctttctgccttacctgtttggcaacgattttctgtatgccgaggcgtatgtgtacgcgctggcgcaaaaaatgatgccggaatatcagggaggcttctggcatttcatccgcctgccggacggtggcggttacatgatgccggatggcgaccgttttcatctggtcaacggtgaaaactggtttgaccgcactgtgagtgctgatgccgcaggtctcatcccgacttcccttgtgattaaccgccagttgtggctgtaccacgacagcggggatgcgggactgacacacctttaccggatgcgcgatgcgcagttgtggagccacatcgaatttcaccccgaatgcaacgcgatttacgcggcacttgactga

SEQ ID NO: 14033 - DNA, 192 bp, Escherichia coli; identical to SEQ ID NO: 13008

SEQ ID NO: 14034 - DNA, 981 bp, Escherichia coli; identical to SEQ ID NO: 8396

SEQ ID NO: 14035 - DNA, 192 bp, Escherichia coli; identical to SEQ ID NO: 13008

SEQ ID NO: 14036 - DNA, 288 bp, Escherichia coli
atggttaatcatctccccgacaatctcgatgaaagcctgtgcatccactgtctgtgtggtgatttttgcgccgtgaaaagaggcacggatgattttcaccagattttccatttccagaatgtcagcccggctttttttcttcgagggagaacagtacgagataaacacccggtaatggcgcagggtcaggggcagattcatcccctccggcagcgggaactgtgtcgctgccgctttcatataataggcacgggtaatggcgttaaaccgttcagcctgttcacctga

SEQ ID NO: 14037 - DNA, 462 bp, Escherichia coli
atgaaaaaaatagattttattctggatgagcatgagcagatattcagaaaacagggttctttgtgtatggcactgggtaagggctttttagttatagctattctttgtggtgttgccacattctgtgtttctggcctgtatctgaaatccctgtgcctgtccgttgcctgctgttgtggggtattcagtcgtatttttaattattacagcgtaccggaggaatcacgcatggtactcagtcgtcaggaattactccggcttatgcgtctgactgaagacgtaccagatgtgagacaggaactgcttaaccgtttgttgtccggtaaaaaactgactggtcgggatgaacaggatatccggcgtctctggcaggagaaagtggatgcaatgcaggagtctgccacccgtcagcgtgaacaggatactattcggaagtttactgaagggaataaatccgaatga

SEQ ID NO: 14038 - DNA, 258 bp, Escherichia coli
atgaaagtcatattcacttctaatcgtcttgttgattttcttatccggcttttgattacagcgattgtcatttctccggtaattatctggtcgtgggatacggtaaaagaaaccacggcagacgggatgcttgccgctgctttcgttatcctttactccggtgtgctcctgtttattctgtatttttgtttttctgccctgactggcctgcagaaagctgatgaaagaaaaaatgatgaaaggaatgaagatgaataa

SEQ ID NO: 14039 - DNA, 1374 bp, Escherichia coli
atgcttcgcattaaacctcttctggttctttgtgccgctttactgacgttcacacccgcagcgtcagcggatgtgaacagcgatatgaatcagttctttaacaagctgggcttcgcctccaataccacacagccgggcgtctggcaggggcaggccgccgggtatgcctatggtggctccctgtatgcccgcacccaggtcaaaaatatccagctgatttccatgacgctgccggatatcaatgccggatgtggcggcatcgacgcctatctcggctcgttcagttttattaatggcgatcagttgcagcgttttgttaagcagattatgagcaatgctgccggttacttttttgaccttgccctgcagacaacggtgccggaaataaaaaccgcaaaagacttcctgcagaaaatggcaagtgacattaacagtatgaacctcagttcctgtcaggtggcacaggggcttgtgggggggctgttccctcagacgcaggaatctcagcagaaagtttgtcaggacattggcagtgaaagcaatatcttcgccgactgggccgcatctcgtcaggggtgcacggtcggagggcagtcctcatctgttcgtgacaaagccagcgacaaggacaaggagcgggtgctgaaaaaccagaatatcatatgggaggcgctgaaaaaaaacagaatgtttgacggcaacaaagagttgaaagaatttatcatgacgctcaccggtacgctgatttttggggaagacagcgagattacccccctgccggcgcgtaccactgaccgcgatatcctccgggcgattatggaggggggaacggcaaaaatttaccactgcaacgattcggacaagtgtctgaaggtggtggcggatgcaaatgtgaccatcgcccgggataaagccctgaagtcacagattacaaaactgctcaccagtattcagaataaagcagtgagtgacactccgcttgacgcccgggaacaggggtttatttccagcaccaccattcccgtttttaaatatctgattgacccgcagatgctcggtgtgtccaacagcgtcgtttaccagctgacggactatatcggctacgacatcatgctccagtacattcaggaactgcttcagcaggcccgggccatgattgccaccgggaactatccgcaggctgtgatggacaatgttctggagaatctgaatcaggcacagcaacagattgccattttccagagccaggtacaggtccagcaggatgcgctgctggttgtcgaacgtcagatgagctacatgcgccagcagctttccgcccgtatgctcagccgttaccagaacaactatcacttcggagggaattcactgtga

SEQ ID NO: 14040 - DNA, 420 bp, Escherichia coli; identical to SEQ ID NO: 11035

SEQ ID NO: 14041 - DNA, 192 bp, Escherichia coli; identical to SEQ ID NO: 13008

SEQ ID NO: 14042 - DNA, 1374 bp, Escherichia coli
atgcttcgcattaaacctctttttattctttgcgccgccttactgacggccatacccacagcgtcagcggatgtgaacagcgacatgaatcagttctttaacaagctgggcttcgcctccaataccacacagccgggcgtctggcaggggcaggccgccgggtatgcctatggtggctccctgtatgcccgcacccaggtcaaaaatatccagctgatttccatgacgctgccggatatcaatgccggatgtggcggcatcgacgcctatctcggctcgttcagttttattaatggcgatcagttgcagcgttttgttaagcagattatgagcaatgctgccggttacttttttgaccttgccctgcaggcaacggtgccggaaatcaaaaccgcaaaagacttcctgcagaaaatggcaagcgacattaacagtatgaacctcagctcctgtcaggtggcgcaggggattgtcggaggattatttcctcagactcaggtgtcacagcagaaggtctgtcaggacattgccggtgagagcaatatttttgctgactgggccgcgtcccgtcagggctgcacggtcggaggacagtcatcgtctgttcgtgacaaggccagtgacaaagataaggaacgggtgctgaagaacatcaatatcatctgggactcgctgtccaaaaacaggatgcttgatggtaacaaagaactgaaagaatttattatgacgctcaccggtacgctgatttttggggaagacagcgagattacccccctgccggcgcgtaccactgaccgcgatatcctccgggcgattatggaggggggaacggcaaaagtttatcactgcaacgattcggacaagtgtctgaaggtggtggcggatgcaaatgtgaccatcgcccgggataaagccctgaaatcacagattacaaaactgctcaccagtattcagaataaagcggtgagtgatactccactggatgacagggaaaaaggcttcatttccagcaccaccgtccccgtctttaaatatcttattgatccgcagatgctcggtgtgtccagcagcgtggtttaccagctgacggactatatcggctacgacatcatgctccagtacattcaggaactgcttcagcaggcccgggccatgattgccaccgggaactatccacagaccgtgctggacagtgtgctggagaatctgaatcaggcacagcaacagattgcggttttccaggggcaggtaaaggtccagcaggatgcattgctggttgttgaccgtcagatgagctacatgcgccagcagctgtccgcccgcatgctcagccgttaccagaacaactatcacttcggagggagcacgctgtga

SEQ ID NO: 14043 - DNA, 534 bp, Escherichia coli
atgccgtccctgaccgcagaagaactgcgcggcaaccgttctcagtggctgtatgccgtcgatgtgctgattgaaactcagggcgaggtctgccttcttccccttcccggcgatgcagcagagcggctgttcccgtcggtgcggttccgtgtcagggagcgcagtcgccacaaatccgcactggtcatgcaaaagtacagccgccagcaggcgagggaggcagagcagaaagcccgtgcgtaccaggcgctggtcgctcaggctgaaatcgaactggcattccattcgccggaaacagtcggaagctggcatgcccgctggagtgaccgggtggcagagcatgacctggaaaccctgttctggcagtggggtgagcgttttccgtcactggccggaatggaacgctggcagtggcaggatatgccgttctggcaggttattgcggaagccagtcttgcagcaagagaggccggtcacgctgtccgtgagatggagcggtggatggtgccgaacaaactccgggaggcggcgtga

SEQ ID NO: 14044 - DNA, 822 bp, Escherichia coli; identical to SEQ ID NO: 8707

SEQ ID NO: 14045 - DNA, 786 bp, Escherichia coli; identical to SEQ ID NO: 9416

SEQ ID NO: 14046 - DNA, 915 bp, Escherichia coli; identical to SEQ ID NO: 8343

SEQ ID NO: 14047 - DNA, 645 bp, Escherichia coli
atgagcagcattatcaccatcacagtgtatacgctggatgaactttcctgcccggcacggggaaaagcccgcgactggtaccgtcagcatcatgctgacagcaactggtatgaaaacgtgtatgaagacttcagggaggtctgtggcattttcgggattgacctccgccagcgcgttttccggctcagcaatggcaggtttatggaagagccgtgcatctggttcagcggattctgcagccagggggacggagcctgttttgaaggacgctggcactggcagccagcaacaccccggaaaatcagggaatatgcccctcaggaccgtgagcttcatcgtatcgcggataccctgcaggcggtgcagaaacgtaacttctggcagcttcaggctgaaatcagtcaccggggacgttactgccatccgtacagcatggatatcaccgtcacccggaacagtccgactggtcaggcaatgacaaccgatgcggaagccgctgtcagcgaagccctgcgcgacctggccttctggctgtaccgccagctggaaaacaagtacgactggctgacctcagacaccgctgtggatgaggcccttctcatcaacgaatataccttcaccgaagccggtctgcgcgccggctga

SEQ ID NO: 14048 - DNA, 318 bp, Escherichia coli
atgctgggcgaaacccggcactacggtattccggccacactgcggggcatggtgaacaatgacctgaagaccaccgctgaagccgtgttgtccctggtgaaagacggcgcaactgatggtgttcagatcgacccgacgctgttttcacagtacggcattcgcagcgtaccggcactggtggtgttctgcagtcagggatacgacatcatccggggaaatctgcgggtcggccaggcgctggagaaagtggccgccacgggtgactgccggcaggtggctcatgatttactggcagggaaaggagattccgggaaatga

SEQ ID NO: 14049 - DNA, 516 bp, Escherichia coli
atgaaacagatttctttatttattcctctgctgggaacgttattactttccggctgtgccggaaccagtacggaatttgagtgtaacgccaccacatccgatacctgtatgacgatggagcaggccaatgagaaggccaaagaactggagcagtcctcagaagcaaagccggttgcggcatcactgccgcgcctggctgaagggaacttccggaccacgtcggtgcaggccgttgcggcgacaacgccgtcccgcagcaggcctgcggtgacagcacatccggagcagaaactgctggcaccacgtccgttgtttacggctgcccgggaagtgaaaacgattgttccggtcagttcagttgcgccggtaacacctccccgtccgctaagaacgggtgagcagacggctgcattatggatagcgccttatattgataatcaggatgtttatcatcagccatccagtgtgttttttgttattaaaccgtctgcgtggggaaaaccacgtattaattaa

SEQ ID NO: 14050 - DNA, 231 bp, Escherichia coli
atggtcacagaatataaagggaatataggtgatactcagaacagcatacgtggcgaggaaaatattgtaagaggacagtattctgaactacagaatcaccataaaacagaggcattatctcagaataataaatataatgaagaaaagtcggttcaggaaagaatgcccggggctgacagtccacaggaactgatgaaaagggcaaaggagtatcaggataagtataagtaa

SEQ ID NO: 14051 - DNA, 528 bp, Escherichia coli; identical to SEQ ID NO: 5333

SEQ ID NO: 14052 - DNA, 573 bp, Escherichia coli
atgctgcgtctgcgccgtaacggagagataaacggagaacatgtccctgaaatcattctgctcaactcccatgacggtacctccagctaccagatgctgccgggttacttcaggttcgtctgtcagaacggatgcgtctgtggtcagtctccgggggaagtgcgtgttccgcatcggggaaatgtggtggacagagtcattgaaggggcttacgaggtggtgggcgtgtttgaccggattgaggaaaagcgtgatgccatgcagtcgctggtcctgccgccaccgacacgccaggcgctggcacaggcggcactgacttaccgttatggtgacgaacatcggccagtcaccaccgctgacattctgacaccacgacgccgggaggattacggtaaagacctgtggagcacatatcagaccatccaggagaatatgctgaaaggcgggatttccggtcgcagtgcaaaaggaaaacgtatccacacccgtgccattcacagcatcgacaccgatattaagctcaaccgcgcattgtgggtaatggcagaaacgctgctggagagcctgcgctga

SEQ ID NO: 14053 - DNA, 432 bp, Escherichia coli; identical to SEQ ID NO: 8375

SEQ ID NO: 14054 - DNA, 345 bp, Escherichia coli; identical to SEQ ID NO: 5105

SEQ ID NO: 14055 - DNA, 129 bp, Escherichia coli
atgcatcatatgatgctggaaaccacgcattacagggaaaacatcaccgatgcccgttgtatccgtgaaatgcatgaagctccattacaggcgctcaatattctggccagatacccgcacgaggtgtga

SEQ ID NO: 14056 - DNA, 297 bp, Escherichia coli
gtgctgactgacggtaagctccatgctgatgacacgcctgtcccggtgctgttgccaggcaataagaaaacgaagaccgggcggttatggacctacgttcgtgacgaccgtaacgccgggtcaacgctggcgccggcggtgtggttcgcttacagcccggacagaaaaggcatccatccgcagacccatcttgcggggttcagtggtgtactgcaggcggatgctgtcacgaacggtgcaatagtgctccacacccaacgcctgaaatcagatccagggggtaatctgctctcctga

SEQ ID NO: 14057 - DNA, 135 bp, Escherichia coli; identical to SEQ ID NO: 8586

SEQ ID NO: 14058 - DNA, 282 bp, Escherichia coli
atgaccgaatctgaaatactgcgattaatccgccgtgctggtggaatcagccagctggctgacgaacaggccaagcagccggatacagtcaccgctgaaaattacgcgcgtgtggtggctgaggtaatgtgccgtgacggtattgagcttaacggcgtggatatgcgcaacatacgaaccagagttcttgagttgctggcataccgtcgccgttctcaacaacggagggagagcgcgaaaaatacttaccagtggaggaagccggagcacttacggcggtaa

SEQ ID NO: 14059 - DNA, 486 bp, Escherichia coli
atggatcgagaactgaaaaatctgatgctgaacattaaccaactggcggcgatagcgggaatatgtcgtcagactgcggcggcaaggctgaaaaacatccagccagccggagggcatgacaagctgaaactctatcgggtgactgacattctgacctgttttcttgatcttcccgttccggcatcactggaagaaatggagccacatgaccgtaaggcctggtatcagtccgaacgtgagcgcctcaagttcgaacaggaaacggcgcaactcatacccgccgatgatgtgcgaaaagagatggctatatggggggaaatcgtaagcgaggaactggcaaaactccccaatattctggcacgtgatgccgggcttaaaccgatggcagtaaacagagtgcagtcaattattgacgatttgtgtaatcagattatcagccggatggtaaaaaatgacgtagtgaatgaggtcgcaaaacaggcatga

SEQ ID NO: 14060 - DNA, 183 bp, Escherichia coli
atgccggaaaacattaaaggaatgattacatcgctacagggggaggcaaatattgctggtggagagcagaagcgcattaatggaatcagtgaagtgttcaagggcggctatagccgccttttttacgggtcctcccggtggggtggcctgccacggggcgggagcggcgcggaaaaaggctag

SEQ ID NO: 14061 - DNA, 294 bp, Escherichia coli
atgtttgacgggatcgctatctacaaccttctcaataaacacccggcaaaagtcatggtgcatatcgatggcctggccgcttctatggcgtcagttatagcgatggctgacgatcgcatcattatgccagaaaatgcgctcatgatgatccacaagccgtggggtatctctggcgatatgcgtgattatgctgatttgctgggtaaggtagaaaccgtattaatccctgcttatgccagaaaaacgggcaaatcggcacaggaaattgccgacatgcaggaagatgaaacttag

SEQ ID NO: 14062 - DNA, 714 bp, Escherichia coli
atggaactcacttatgatcaaaaggttttgctgaacaatgtcgcaaaaaggtctttcagagacatagccgatcaagattatctaactgctcgtatttgctttaaaaacaatcttccattccaatttttatggatgtctcaacaagcaattgaaaaatatataaaatgcattcttatttttaatagaatccctgttaaaaaaattggacataatcttgttgcaggaattaaaaaaattaatgatattccatatattaaactagatctgagtgataaaagcatagatttcatagagtatctaaatgaccaagggccaaatagatacttccaaaaagtcatgtatactaatgggtttgaaattattaccttagatagaactgtatgggagttacgcagatactgccgcttactgaattatcaactcaaaacccctaaaggtgatctaatagatatgctagaagtagaattgcggggaattgagcattcaagaaatgtaccaccacataaatataaaatcacagatggttatttggaaaagcgattaaaagacaacaaatataaccacggaaatattttaacatggaagaatctattttttgggaagacgaaaaagaacactataaaaattggacgctcacaacgtatcagttaccctactcaacatatacatcctgaaagcttggagttattcaataaatttttcaaaactaactaa

SEQ ID NO: 14063 - DNA, 1818 bp, Escherichia coli
atgaaaaaagcgccaaatttaaaacaccagccgcgtgacaaaatgacggaagtcatcatttttgcgggtagtgatgcgtgggcacatgcgaagcagtggcaggaacaggacgggcgactggctggcgataacgtgcctcctgtctggcttggagagcaacaacttgccgaactggacaacctgcaaatcgtaccggacggacgctatcgcgtgcgtctctatcaggcggggttattgcgtccggggcttgttaataccatcgggcagaaactggcagcggcaggtgtcagggatgctgattattatcctgaaggaatgcacagccagaaacgggagaactggcgcgaatatctggaacgtgaacgggcagagctggcggaaaagaaaaaggtagttgaactgcctgtaaagaaaaaagagcggataaaagacgataacgcttcaccactggcgcttaaccagatgggagcaagtcaacgcggcgaagtcctcctggcacgttatggcggtgaactggcgattcatgctgactctgacactgttcaccattacaacggcgttgtatgggagccagtacaggataaagaattacagcgagctatggcacagattttcattgatgcggagatcagctattcgcagaacgccattaaatcggcggtcgataccatgaagttaagtttgcctgtaatggggaatacagcccgtaacctgattggattcagtaacggggtatttgataccagaacaggtaattttcgggtgcataacaaaaacgactggttgttaattgccagtgaattacctttcagcccaccagcagagggggaaatgctggcaacacatgcgccgaatttctggaagtggttgcgccgttcggtggctgagaatgaccgcaaggcagatcgcgtactggcggcattattcatggtgctggccaaccggtacgactggcagttattcattgaggtaacagggccggggggaagcggtaaaagcgtgatggcggagatttgtaccatgttggcgggtaaggccaatacagtatcggcaagcatgaaggcgctggaagatgcaagggaacgcgcgttagtggttggcttttcgctgattatcatgccggatatgacccgttacgctggtgatggggcagggattaaggccattacaggcggtgacaaggtggcaattgacccgaaacacaaagccccctactcaacgcgtattccggcagtagtgctggcggttaacaataacgccatgtcattcagtgaccgcagcgggggaatctcacgtcgtcgggtgatattcaatttttcggaagttgtaccggagaacgaacgcgatccgatgctggcggaaaaaatagaaggtgagctggcggtagtgattcgccacctgcttacacggtttgctgaccaggacgaagccagacgcctgttatatgagcagcagaaatctgaagaagcactggcgataaaacgagagggggattcgctggtggacttctgcggctatctcatggcgtcggtaatgtgcgatggcctgttagtaggtaatgctgagattgtgccattcagcccacgcaggtatctctatcatgcctatctggcatatatgagggcacatgggtttggtaagcccgtaacactgacgcgcttcggtaaagatatgccgggggcaatggcggaatatggcagggagtatatgaaacggaaaacgaagcacggtttgcgttcaaacgtgacactgacggaggaatcagaagactggatgccatcatgtgtatcggtcactaatgacgatagcaaaaattaa

SEQ ID NO: 14064 - DNA, 300 bp, Escherichia coli
atgagaacatatttatctggcttgactgccagcggttatgcacaccccaaaattatccccggcgctatttatctggataagaacggtaacagagtaacggtaaaagaactgatgtttgaccgtgtgtattttattcgtgatggctattcatttcatagttcgctgaacgtggagatctttattagcagattcaggcgggaaatcccgctttccagaaataaccatgtgtcacgtgtgaatgtggataaaaaactacaggaactgaaaaacatgattgccgcgtggagagagcagaaatga

SEQ ID NO: 14065 - DNA, 321 bp, Escherichia coli
atgcctgatatgtcaaattaccagtacctgattaatccgcattttaactgtgagcatgatattgctaaaaaggtttattccgctgcggatggggctactgacaatatatcaatggctgttgcgtcaattggtagcctgatgtggcatgcgtcagaaaatgaggactatgacgaaaaggctatgcgcattgacatggggaatattggcttgttactggcaatgcttgggcagtttgatatttcgttacggtgcaccattgaaaatgccacagatgcattaaatgccataaagaaagcgaatactgattcaaatcggggataa

SEQ ID NO: 14066 - DNA, 204 bp, Escherichia coli
atgttaaatcataccatacacccgcaagggcgggactcacacaacctgaataaatacatctggcgttttatcgccctgagcacggcacaaccgcgcgtgattcacatcgtggccaccagcgaacaggaagcacgccagcaatccccggctggctgcgtgatggtattcgctgcccgtattcgtcagggggtgtgccatgcctga

SEQ ID NO: 14067 - DNA, 180 bp, Escherichia coli
atggcaactggtgcaaagaacgcaaaatcacaaatgacaactgtcagaatcccacatgaagtaatggatgatattgagcaacttaaagaacctggcgaaagtaccgctggttttttagttactgccgcaaaaggcgagatcaaacgccgccagcggcgcaaggccaaagagcaggagtaa

SEQ ID NO: 14068 - DNA, 225 bp, Escherichia coli
atgaatcaaaatacacaatttcaatcactaacagatcgcgtaattcgtgaggatgaatgtcgtaagttaacaggcgtcagccgtactacacgctacgaactggagaagaaagggggctttccgtctcgccgtaatcttggggggcgttctgtaggctggttgctttccgaagttatagactgggtgcaaagccgtgaccgcgttaattcaggtaaggcagcctag

SEQ ID NO: 14069 - DNA, 855 bp, Escherichia coli
atgacgaaaaaagtaaatagtaaaaaagatttaccaaagtcatttgatttaggcaaatatgattgcctagaaaacttgtcggataaagatctatttcgccaattatattggcgacaagatgatttaacaatgaaacattctgagatgcctgaatatggttttatgtttggtgctgaatacccgttgcataataattacggggatccatttggagagctgaacgaagacgattggttttgtgataaacaaaaagaatatgaccataaagtgcagccgaagttaattgagctaagttatgatgatggaattaaacctgtaacaaggtttgatatatcaatgattaataaactgactgcggaaagaggatattggaaggataaaccaatcatcatagataatgagatggttggaagtttaatatcagaagataatgggatgttttgggctgtgatgcgtgaaccagtgaatctcctttctgatacattagataatatgcttgtttctgttgacttactacataacagagatgatgagttgattgaagcgtttacaaaactattaccaaaatggcgtagtgaactttcaattgttgagccagacaaaccaattgcaggaagttgggaaagcatacgacgtaaaattattgattataagataatcccattaattgacttattatcttgggagttgtctacagatagaaaaatttcattaggggtgcttgccgtatctttgtaccctgatggtgaaaaggacacctttgctattgctcagactgtaaaacccttcttagaaaaaataatgcgcagcgattctttagaaaaaataagaaaaatgttatctaatgaaaattaa

SEQ ID NO: 14070 - DNA, 1221 bp, Escherichia coli
gtgggaaaagcactaaacaaactgagcgattcaacgttaaaaaaattggtggctgtccaggcagaaaaagagcgtttttactccgacgggggtgggctggagattaaacactcaaagggaggcaaattaacctggtatttccggtaccgaacgggaggccgtgaggttgccgcagagcggttaaagctgggggcttacccggaattgtcgctgaaatctgcaagggaaaagcgaacacagtgccgggcatggctggctgagggtaaaaaccctcggtatgagttgtgcgccacagtacaggaagcactaaaacccgttacggtgaaggaagcgattaactactggctggaggaatacgcgaaggataaccgcaaagattacataaagctggtgcagcgtatggataagcacatcatttgccatataggggcaattccccttgataagtgtgatacaaggcagtggatcgtatgttttgaccgcgtacgaaaaaaagcaccagtagcagcgggccatgtcatgcagacatgcaaacaggcgctaaagttttgccgcaggcggcgctacgcgtttagcaacgccctggacgatttgatcgttactgatgtggggaagagagcagaaatccgcgagagagtgcacagcaacagcgaactaaaagaaattctacgcgctattgatggtgatgtgttcgctccctattacagtgcgttaatgcgcttgttaattgtgttcgggtgcagaacggcagagatcagactttcagagatcaaagaatgggatctgaaagaaatgttgtggacagtgccaaaagagcacagcaaaacgaaggtaacaatattccgacctattcctgatggcattttgccgttcattcagaagctggtggagcaaaacgcacacactgggttattactcggcgaactgaaaaaagataccacggtggcgcaatatggacgaaatgcgcataagcggcttaagcaggaacactggacgctgcatgatttccgacacacgtttacaactatgctgaatgatttaggtgtcgatccgcatatcgtggagcacatcacagcgcatcagatgccaggtcagcaaaaaacctataaccattcacgctatttgcaggcgaaacgggacgcactgaatctatgggttgagcgtcttgatatgattgcgggatataatgaaaatattgtgatattgagagggatacaatga

SEQ ID NO: 14071 - DNA, 168 bp, Escherichia coli
atgcacttccgagtcacaggtgaatggaatggagagccattcaacagagttgtcgaagcagagaacatcaacgactgctatgaccactggatgctatgggcgcagatagcacatgcagacgtaaccaatattcgaattgaagaactgaaagaacaccaagccgcctga

SEQ ID NO: 14072 - DNA, 243 bp, Escherichia coli
atgttctctctgattcaacgtggtcagatatacaccgatagcgctggctatccagtaaaaatcattcgtagtactgatcactcagtgttcttcaagaggatggatggctatcctggaagagtgtgcatcagaaaattcaataatttattcgaacacattgatcacagagaatatcaccagatcctggctgaaacagagcaggagaaccatctgaaaaaattacgtgccatgcaaaggagataa

SEQ ID NO: 14073 - DNA, 288 bp, Escherichia coli; identical to SEQ ID NO: 11880

SEQ ID NO: 14074 - DNA, 585 bp, Escherichia coli
gtgagcgagattaactatcaggcactgcgtgaggcggcacagaacgcgaaaaatttaggtgggattaagaattacaagcgaggcgagcaagctgttgccgaatttaagtccttgataacgccacatattgtgctggcgcttctggaagaacgggaaagaaacctgcaatacatcaaacgccgtgaccaggagaacgaggatattgcgctaacggtagggaagctgcgcgttgagcttgaagcagcaaaatcaaaactcaacgagcagcgtgaatattacgaaggtgttatctcggatgggagtaagcgtattgctgaactggaagcacgggaaataaaaccagccaaaggtgaagttcttgtcgttgtttctggttttactggttgcggaaaaagcgccattgccggggaaatagaaatcgcgatgaaggctattggtgtaccggttaagtggactaatggcgatgcagaaaagcgcatgactggcgctgactggctgacagcgattgagatgtacaaaccaactgtgcgcatcgtggaagttaatgtgccacgcgccgctggcattcgcatcaaaggagagtga

SEQ ID NO: 14075 - DNA, 297 bp, Escherichia coli
atgccagcgcctctgtatggtgcggacgacgcgcgccgctgttccggcaattccgtattggaggtgctggaaaatatcaaaaacaatttcgatgcatttcttactctgccaccagaaacaaaagcagaacggatgtaccgacgcgatatacaactcgcgctaaaacaggagaaggaccgaacaaacgaaacagcaatgagaccgttgcgaaaagcgacaatagacaaattccctgaatatatcgacccgcgcctgcgtaattaccgctcacgctatggcgctatcagtaatgactga

SEQ ID NO: 14076 - DNA, 516 bp, Escherichia coli
atgggaagtagaggcgtaaataaggtgatcattattggtcgccttgggcatgatccagaaatcagatattcaccatcaggaacggcatttgcaaaccttacagttgctacgtcagaacaatggcgtgataagcaaactggagagcaaaaggagcagacggagtggcaccgtgtggtaatgagcgggaaactggcagaaattgccagcgaatatctgcgaaaaggctctgaggtttatcttgaaggaaaattgcggacaagaaaatggcaggatcaaagcggacaggatcggttcactaccgaagttatcgtgggcgttggtggaaccatgcaaatgcttggtggcaagcaaggaatcaatgaacagtcttcacctcagcgaaataacggtcagcaacaaaaacagcagcctcagaagcaggtaaatcacagcgaaccacctatggagtttgacgacgatataccttttgcgccagtaaccctccccttccctcgtcacgctattcacgcaatttaa

SEQ ID NO: 14077 - DNA, 708 bp, Escherichia coli
atggatttgaataaattcaatgagccattcagccctgaagatatcgaatggcgaatacagcaaagcggtaaaacacgcgatggcaaagtgtgggctatggtgctggcttatgtcacgaaccgggcaatcatgaaacgcctggacgatgtttgcggcaaagcaggatggcgcaatgaataccgcgatattcccaacaacggcggcgttgaatgcggcatatcaataaagattgattccgaatgggtaaccaaatgggatgctgctgaaaacacgcaggtagaagccgtcaaaggtggtcgttccggtgcaatgaagcgcgctgccgttcagtggggaatcggtcggtatctgtataaccttgaggaaggtttcgcacaaacatctatcgataaaaagcagggatggcacagggcaaaactgaaggatggaacaggattttactggctccctccatcgctgccgggatgggcaatcccagcatcagataacaaaccatcaccagaaaataccaaccagaaatctccatcggttgactgcgaacaaatcctgaaagacttcagcgattatgcgtcaacagaaactgacaagaaaaaactcatcgcgcgttatcagcatgactggcaattaatggctggcaacgaggaggcgcaggctaaatgcgttcaggtaatgaacatcagagttaacgaactaaaacaggcggcataa

SEQ ID NO: 14078 - DNA, 171 bp, Escherichia coli
atgtcacttgcaaccacagtgaaggagagcaagttacagagacgcatgtacacgcagcaggcgttaatgtatcgccagaagggagatcgtgaaggtgttcgcgtatttttaaatgcggcaaagaccgaagtattaaatcagcgttatttacttgggccgtgtccattctga

SEQ ID NO: 14079 - DNA, 363 bp, Escherichia coli
atgggtcaggaagaaaaatatgagcttaaaaagctcattgaagaagacgccatagaagaaattgcagcattaacaacagctataaagaatattaggtatgcgctaaatacgcttatctcctcatgcgacaaaaatagcagggaatttttgatacttggcgcagctctaggaatagttgatgcggcaacgcttcacctaattactcatgacgatattcttattgagccgtatgaaacactactgcttgtcaggcaaaaaatggctgatgccgcagcaaatggagaccttcaactttacatcgacttaaggaaagcattaaggcgaatggtcagaactgaaggagatatccccctgacaaaataa

SEQ ID NO: 14080 - DNA, 309 bp, Escherichia coli
atggcggtaatcgtgtacgggaaatcaacattcgcaggaaatgccaaaactcgccgtcatgagcggcgcagaaagctggctatcgagcgtgatgccatctgcaacatcattgattctatcttcggcacagacagtgaggaacctgttcagaaaggcacgagaaagcgtttaagcctttctgaaaaagcaatatcactcggcaacattcgtaaccaaaataccgacgaatgcagtggaagtatttgcctgccaaacgtagccatttacgcggcaggctaccggaaatcaaaacaactgacagcgaggtaa

SEQ ID NO: 14081 - DNA, 372 bp, Escherichia coli
atgagtttagataacaaggttgctcagcttcgtccaaatcaaaacatatctcgcccaattggacactattccactgatgatgcatactctcggcatggtggaggaaacggcggaggtaacatgcttgaggctagagttgcaaagctagagtctgatgttgaatacatcaagcgcgatctcgctgaggtaaaatcagatataaaatctgttgattctcgtctgtcaggtattgagacaagtattagctcagcaaaaaccaccattaaggcatctgcggtcgttgtcagtttcgtgttcgcattttgcgcctacatttttggaagttatgtttccaaaatccttgatgccttaaacggactcgttcttaagtaa

SEQ ID NO: 14082 - DNA, 438 bp, Escherichia coli
atgattaaagaacgtatttcttatatcattccgattgcgatggatgaaggcaaccccgtaactccagttcttatctatgaaatggataaagactcccatgaagtggatctgtcatttggcgctttttttatcggccttaaggctacaaaaaaatattccataggcattgaggttttcaatgctcaagaaataccgataccaattgacacaaaactgtactccaaccataagttttttacggtagcagaagccaacgatggagaaaccatcgtatcaacttctatgagaattaacttcccaagggtgaaaattatcaagcctgggatattcgaagttagagcatcactggttaatcctgagaaaggcgaagtaattgatgtaaaaagttcgttttttgacgtgaagataacaggatcagttcgcgatgagtttagataa

SEQ ID NO: 14083 - DNA, 714 bp, Escherichia coli
atgagcgcaaaaaagaaaccgttaacacaagagcagcttgaggacgcacgtcgtcttaaagctatttatgaaaaaaagaaaaatgaacttggcttatctcaggaatctgtcgcagacaagatggggatggggcagtcaggtgttggagctttatttaatggcgtcaatgcattaaatgcttataacgctgcattgcttgcaaaaattctcaacgttagcgttgaagaatttagcccttcaatcgccagagaaatctacgagatgtatgaagcggttagtatgcagccatcactcagaagtgagtatgagtaccctgttttttctcatgttcaggccgggatgttctcgcctgagcttagaacctttaccaaaggtgatgcggagagatgggtaagcacaaccaaaaaagccagtgattctgcattctggcttgaggttgaaggcaactcaatgacagctccggcaggatcgaaaccaagctttcctgatggaatgttaatcttggttgaccctgagcaacctgttgatcctggtgatttctgtatcgctagacttggtggtgatgaattcacattcaaaaaactgatcaaagatagtgggcaagtgtttttgcaaccacttaacccgcagtttccaatcatcccatgcaatgagaactgcaacattgtaggcaaggttatcgccagtcaatggcctgaagagacgtttggataa

SEQ ID NO: 14084 - DNA, 300 bp, Escherichia coli
atggaacaaacaagttacagcaaactatcacagcgcgacgttgatcgcgcagaaacagatttactcatcaacctgtcaacgcttacacagcgcggtctggcaaagatgattggctgtcatgaatcgaagataagcagaacggactggagatttattgcttcggtcctgtgtgctttcggaatggcatcagatatcagtccgattagcagggcttttaagtatgcgcttgatggactcaccaataaaaaacgcccggtgtgcaagaccgagcgttctgaacaaatccagatggaattctga

SEQ ID NO: 14085 - DNA, 846 bp, Escherichia coli
atggcaaatacagcaaaaatactcaacttcggcagaggtaactttgccgaacaggagctaagagtggctgatatcgatgatggttacaccagattcgctaacgagctgctggaagctatcgcaagtgccgatttaaccgctcgccagttgaaagttatgctggcctacgtccggaaaacatatggattcaataagaaaacagatcgaatagccgatgagcaaattgctcagttaacaggactgtcaaggcagaatgttaacaaggctaaaaaagaactgatttcaatgaattgcttgtttatggatggaaataaaatcggtgtaaacagggaggtatctgcgtggcaattcagcaagtgtctccaagttagcaactttgtctcgaagttagagacaaaaaatgtctccaaattagagacactcaatgtctcgaagttagagacacacaaaagacattctttaaagacaaaagaaaatattaataaaccccctatatcccccaaaaaagtttctcagaagttcgacccgctagaaacagagttgcctgattggttatcagcagaaacatggttgtcgtgggttacctatcgcaaggagataggtaagtcgatcaagtctaagcaaagtgtcactcaggctatcaacgttctaagcagaagtctggagaagggatatacacctgaagaaattataaaccagagcatcgccagtggttggcaggggatttttgagcccaagactccaaaggggaaacctcaacctaggccgcagcatcgagctatgcaggaaaactttgccgctaaagattacggacaaactgaaatgccttcatgggcgcaggagtga

SEQ ID NO: 14086 - DNA, 894 bp, Escherichia coli
atgaatacgacaaatggttacaatctggcactgcaaaggcaacttgtagactcaaaaatcaatgacatttctgatctgaaacagaaacttgagtttagcaaaattggatcagcatcagatggaatgtcagttaccagcacagtggaagagtgcgagaaacacggtaaatatacttcctatgagaaatatctgaccatctcaggaaaaagaattacttcaagtaaatctgagtgcccacagtgccttgaggagaaaattcgtaagaaagagattgaacgtgagcaggcagaacaaagagcaagacaatcaaaaattgaatacttgttgaattctctcaatattccagagaggttcaaaaattgcactcttcagaattatgagcctgttaacgatgatgcaaagcgagttcttaaggtatgccaggcatatgccagtaagtggcctgaacgccttcaaaaaggtggcggactggtcatgtgtggtaagcctggaactggaaagaaccatcttgcactggctatcgctaggaacgccattatcgagcatcaaagctctgtgatatttaccactgcgttgaaaattgccagagagtacaaatcaacatggtctaaggccgcaaccagaactgaagaagaagtcattaggcaatttacgcatcctgacttgttaataatcgatgaggttggcgtgcagttcggcagtgatgctgaaaagctaatcatgttcgaaattatcaacaccagatatgaatacatgaagccaacaatcctgattagtaatcagagcaaagatgaactttcggcattcattggtgagcgtgttattgacagaatgaatgatggcggcgggtgcactcttgcgtttacatgggatagttacaggagcagatcgtga

SEQ ID NO: 14087 - DNA, 291 bp, Escherichia coli
gtgactggaaaagaaatcatcctggaatatctgaaaactcatgaacaattctccccacatgaattagcactgatcaccggaataccaaataacagaatcgctcaagcagcaaggcatatggtgaaacaagggcatttgagtgttgttgagcgtaagtggaagacggttatttatgcaaaacgcaaagtgaagaaggagccaattaaaagaaatccagatggtacggggtggggatgtgcaaatccaatgacggcgtttattaatagggcgcttatggaggtaaggcaatga

SEQ ID NO: 14088 - DNA, 207 bp, Escherichia coli
gtggctgagtttatgctcgtcgcactcaaatgcgttggcgttggatggattcttctgacgttttttattgttctgcatggctacattcgtcttgttaatgacggtaaagagccatggtgtacgttgttttgcgctgcatttgtctgggtgattatcggtgttatgcctgtcgctgtagcaaaaatggcgtggcgttttttgagttga

SEQ ID NO: 14089 - DNA, 378 bp, Escherichia coli
atggacgaatcaagaaagcagtttgaagaaagttggttgcgacgtggaggcgaatcttcagaccttatccgttaccctgaaaatcaccatgaaattggcagtggtgatattggtggtcaatacgtgatggacgatgttcaaggccactggcaaacgtggcaggcatcgcgagcagctattgaactggatatcgactggcccgaatcgaatgacgacttttggaaagatggtgaagaaggtgcttatgcgatgggttatgaggatgggagagacaaaacggtaattgcagtaatgaaagctatcagagccgctggaattaaagagaagaatttcgatgaagcaaatatacatgcttcgcaacgaagcaatcagaaataa

SEQ ID NO: 14090 - DNA, 447 bp, Escherichia coli
atgaagcaaatatacatgcttcgcaacgaagcaatcagaaataacgccatagacgcaatactctcacttccgatcgacgacaggtcacctcacgaagtccacgttaaagaacccaagcgcagcaaagcgcagaatgaccgtatgtggccgatgctgaacgatgtttcgcgtcaggtgctatggcatggtcaacggctggcgccggaagactggaaagacctgttcactgccctgtggcttaagaccaaaaaactgaagcaacgaagtgcgcctggtatcgacggtggcgttgtcatgtttggcgtgcgtaccagcaaaatgcgaaaggccagcatgactgagcttatcgaaatcatgttctggttcggctcagagcgcaacgtgcgatggagtgatgattcccgacgagagtacgagtggtcacaacgaacagggagggcagtatga

SEQ ID NO: 14091 - DNA, 333 bp, Escherichia coli
atgcttttaattcaacctggatttggccttagcatcaaaaaagggcacatgtttggcgagatagagtctcaacgaaaaatggtgtcgatacagttgccatttatcagtatttattggctaaacagggaggcaacaaattattggtatgcaagcgccagagcagcatttaacgaccctgactggtttgtgaaaaaccaccacgcagttcgtcaggcaaagagaaaggccaatacgacatacatgaaggcgtatcaaaaagcatggaaagaacactgtcacgaacggtgcaatagtgatccacacccaacgcctgaaatcagatccagggggtaa

SEQ ID NO: 14092 - DNA, 228 bp, Escherichia coli
atggaaaaaacaaaaaagtccacagttgtaggctttcatgtcactagggaaccgcgctcttttgcgtatccttttgtctcctcaccgtatgatcggtgttctgctgagactgctaatttcctgtttttgctagtgctgtcctgtcacagcccaatcattatccatgcactggtggagttaaaaccgcaggcacgtcgtatgcaagaacgtgctgcggctggctggtga

SEQ ID NO: 14093 - DNA, 1884 bp, Escherichia coli
atgagcttagatactgcagatcaagaccttatgtggccgatggacgttgaatattcattagtcgataattcatccacaaaagcgataatacaagtcggaccaggtattacaacgatggtcgggccaaatggtagtggtaaaacccgagcactgcgtgcaataaaatcaaaattattgagtgaaaaccgaataattggacaaaatagaaaagtacattttctttcggcaggacggtgtagtccatttgaatcctatagatctagctcagattctccttatggcatcaattctagcgatgctgctattggaaacgcgagttacgttgagcaatggtggaattatgaaagtgttactggtgacttaatgatcttagaccagagaccagacctcaaactaaagattgaagcacgcctacagcagttgtttgatcgaagcgttgagctcaagtggtctcaaaatggaatgactattagaataacatccgtcactggcggcgatggctacgcagctaatcacgaagccagcggtatactgcaggttgtctcgttactaactgcaattcataatgacgaaataggtgcattgattatcgatgagccagaaatctccctacacccacagcatcaagcatttctgctcgaagagatggaactggtagccggtgatcctcaaaatccaaagaaaaaaatgataatcatagcgacacattcaccttcaatactaccgctgcgacgaattgaagagttatcaaaaataatctttttcaactccgcacagcaacctccagttcagataccaaaaaatgcagatattctttgcagcacaaaactggccgcattaatagcacgccttagcgctacccatcgaacagctatgttcgctgagcatgttttattagtcgaaggtcctagtgatgaaataatagtaacacaacttgcaagaaagttcggtctccgtctccttgcacgtaatgctcagatacttccagttactggtaagggagagtttatcgaagctgccaaactgtttcgcttgatgaataaacgagttagtttgcttgcagatctcgacgccttagctgacgataataatttagtcaactatttcagtggattaacagaagctagggcgattgcagaccaagtcggaagaacaagtctcgctgatcttgacagagatttgcgtgcagaaattacaaccttcatgactgactttaaggaagaggttgagatagcagctgaaagttatcctaattggtcaagtaaagattctggggctgatagcaaacgtcgcgtgacgttagctcgtattcttactgatccaacaagctttggtacagaagcatcttctcgagccgaaagtctttgtagaaaatacaatgtgcttttgaaggcattaagtaatcttgggtgcttttttttacgtcgaggagcaattgaaaactattacgggacgatagaagaaattggaactggaaaaccagatcgtgctgcactagaagctgctggatttgatgctaaaactcagaaagaacttgcaatgtgttataatgatatttatgatgccttaaatcatacggctccaaatcagtttgtcgatgaagatcgtctccttcgtatgaagctcggtgctatgttgacaccagtgatgcttgaaatgacattgaacagtagcgatcaagaacttgatacactagctagatctaccatcggggttgatgcaacagtattcaaattaacgaataaatctactgagcaacagcttaagcttaaagttgatatagtctcaccattgtttgagcgtacgactttcccatttgaaatctccccatcccaaaacccaattaccattataccggaagtattaccaggaattcaggagtaa

SEQ ID NO: 14094 - DNA, 2175 bp, Escherichia coli
atgacagacattacagccaatgttgtagtgagtatgccttcgcaactcttcactatggcgcgttcttttaaagccgtagccaatggcaaaatttatatcggtaaaattgacactgacccggtaaatcctgaaaaccagattcaggtttatgtggagaacgaagacggttctcacgttcctgtttcgcaaccaatcatcattaacgctgctggatatccggtatataacggacagattgccaagttcgtaactgtgcaaggccattctatggctgtttatgatgcgtatggtgcgcagcagttctattttccgaatgtgctgaagtatgatccagacatttttcagcagaaactaaatcagattgacggggtatcgtatttaggaggtggtaattatacagacatacgttcatataatggcacaaatgacaaaataatctgttatggaagaaataatttgttcgatggcggtgatggggtgttctatgctgacccaacagatacgacatcagaagataatgacggaacaattcttgtaggttttaacggtagaaggtggaagagggtttacgggaatgaggtttcaccgtcatggtttggggttacaggtgatggtgtaagcgacgatagcgatgccttacagaatgctttaaatatcgcaaagataaacggatgtttgaatttaacttttcgtagtgaatggcttataaaaataacaaaaaaaataatgatatactcaaacacaagtttacatctacgaggtgcaactattattcgtgcttttgataattcagacacaggtgtaaatacatttgcttgcatatacacatctgaagtcgaatgtggtaataatatatctgtatttggtggtgtttttaataacaatggcaatatatacaaaaaccaagccagtatatttgaatttgtttttactaatgggattatatttcgggattgcacattccttaatgtttctggggcgcatgctatagacttgtctcgcgtgagaaatgttagtattgaaaactgccgttttatggggtttatggattgggcaggtaacagacgtttttcagatgctattcagattgaaacaccattgtccagcaatgataatatcgctagcattaaagtgtctggttgttattttggaccgtcagaatctctaccgtcatgggctgttggcgtagggaatcacggttcaacagatggagcgcagccagttattgatataaaaatccaccattgtacttttgatggtaattcttattctggcattcgtggcttttctaggtgggaaaatgttgacattggttcaaacacatttataaacttcactaatccagcaataatatttaccgggaggaaagtaagcacaactcttcgggaaacatcaagagatgtgtgtatacatcataatacatttaaaaattgcactggaaattctgtgatatcatgccttacaccaacatttattgagagcggattgaaaggtagtagaatatttcacagagactggaggatatcaggaaataattttgagtcctgtgatggcaccattcttgatatgagatgggttgacggagtttccatcactggaaacacagtcgattcatgtaatgggatattccttagagggaattacattgctaatgtgattgcaagcaacaataaagttgatacgactaaggcgatattctatatatttgaggatgatggcgaatacaaaggaactttgttaagtagaaacatatcaattgtaggtaatacagcaatgaacggaagaagagccgtccatattaactgcgaatgccacggattcactgtgacatcaaattcatttgaatctataactggagacgcagttataggtattgattcatctgctaaaaatggtgtgattagtaacaactgttatcacaactcgataagcaatgagttttttgtagatgtaacagcaagttgctcaaatattattgttgcagataacgtttaccctcctgctaacattgttaggaatttagccacagacgttagttacagtataattgctggcactggaaatcctgaaggagtacaaatagccacacctggaagcgagtatcgagatatcgtaaatggaagactctacatcaaagaatcaggtcgctggaattctggttgggtggtgaaatga

SEQ ID NO: 14095 - DNA, 258 bp, Escherichia coli
atgatgtacagcaaatacgatgaggcgcagttccacttgaggcttacgcacgagttgcacgctaagattaagcagcgtgcaaaaatgaataacaggtctatcaattccgaaattgtggctacgatggaagaatcactctccaaaccatcacctgtaagcgggtatcgtgatgaagaagagagattggcctcattaatctcggagcgagtaaaagaagttgcggctgatatccttagaaaagaaaaaacccgcgattaa

SEQ ID NO: 14096 - DNA, 222 bp, Escherichia coli
atggcaaagaaaaaatatggcattatgccgccaagaatcaaaggaagagccagggtaaaaggcgatgctggaaggtatcacattcttggagttctgtggcatgagagagctttaattttaagtagacctcatgggtacattgaaaaggtatctatagatagagtagagattcttccccttacacctgaagaagaagaaacgtacggactttttgataactaa

SEQ ID NO: 14097 - DNA, 726 bp, Escherichia coli
atgacttttaagaatgtagcaaacatcggatccgttgtcacggataaaaccattgacagccaaagtcttctgatgatggttaatgaagctcgcaagttatgtggagagccatcagtacgtaacaacaaattcatcgagaaaattgaggatgaattggaaggcgagacctacacaaaaagtgtaggtcggaaaaacggggctgacattgatgttatctccatgactatcaagcaggcgcttcgtgttgctgctcgcgaatctaaagcagttcgccgaacacttgtagacaaacttgaaagtatgcaggaagcgcacattaaaagcggtaaatcagcgagtggacttgttgagtatcgtcaagcgcgaacattgaaaatgacggttgaagctgttaccaatctgttcgatctgatgccaaatcttgcgccggaggcaaagcagacagcggcagcaagtataatcaacccgctcgttggttttaatgcaatacctcttccggcaatagaagagcattactactcagcaggggaggttgcagagcagcttggagtaacggccaacaagattggtcgcattgctaacgcaaacaacctcaaaactgagcagtacgggaagttcttcctggataaatctgcgcattccagcaaacaggtggaagcgttccgctacaatgaggaaggtgttaaagcactacaacacctgattcatgggagtaatgttgcataa

SEQ ID NO: 14098 - DNA, 717 bp, Escherichia coli
atgttgtcatccaataaaaatagtgaagcccggcagtgcgcgaacacaaaccgggcctctatgtcagtaaccgtatgcaaggaaactaacatgaatattgtagcaaaatcagattacaacttccacggagttgagttggtgcccacccgtgatatgcatggtgtttggtttacatcatctaatattgcatctgcacttaaatacgcaaatagtcgtgcagtaacaatgatttataacaagtatagcgatgagtttagcgccggaatgactcaggtactcgaagtgagtacctcaggaaattatcgcaaaaaagtgcgagttttctcactacgcggtgcccacctaatcgcgatgtttgctcgcactccggtagccaaagagttccgccgctgggtgctggatattttggatcggcaggcagaatgctcaccgattgcaaaacagtttactgacgaagaactggttaatctctgctacttacaattgtggatggagaagagtcaacaaatgtgcaaacacatctacccaggaatgaagcaaattggttctgagctttcaggaaggatttacgatattgcatatgagactcgctacatgtcagaagaaaccaagaaatcacttcttcgtgaaatgaagaatcttgataccaacaattttgtcgtaaagaacgctcagccaatgctggcaaaacttcgcggcgaggaatggattcattga

SEQ ID NO: 14099 - DNA, 174 bp, Escherichia coli
atgactgaaaagatatcttccatcaagccgcgtcaggttcgttttacagaaaaggttgattcacatatccgcgaatcagcaaaaagatgccataggtcaattcaggcagagatagcttatcgaatggagttattgatgaaacttgaggcaaagggcgatgttgtcatccaataa

SEQ ID NO: 14100 - DNA, 642 bp, Escherichia coli
atgaattttgacgatcaattcccatcaagagtatctctggcaagacagtccaggggtatgacgcaggcgcagttgtcgaaattagctggtgttgttcaacgtcaaatagctgcatacgagggtggtgaggctaaaccacggcttcgggtattgcaggcattagccaacgcattaggtactacggctgagtggttagctctaggtgaaggtcagggtccgggaacaaaaaacgtcatgcctgacgttctggtaaagcaaataccaatcctcaaactagatgaagttatgcattacctaaacacaggtgaacattcatcgtctagatttcatccagcaatatacaatgttggtgactctgcatttgcattgactattgaaggtgaagctatgactacaagttcaggtattagttttcccagaggatcggttgtcacgttcagccctctagtaaaagctaaaagcaaagattatgtaatagcatcattggataaagagcaaatattgagcttcaaacaggtttacattggtgaaatagagacaaacctagtatccctaaacccaatgtatcctaatattcttgttagaaatgaagatgttagtattttggcaaccgcagtttaccttgaaatcccgttgctttga

SEQ ID NO: 14101 - DNA, 1413 bp, Escherichia coli
atggctacttggcaacaaggaatcaactcaggcggttttcttgctggtatcggtgggcaaaactcaaatgcgccaaaggcaagtgatgtaagtgaggcgttggcctatattcgccagaacaacgaaatggagcgttcaggtcgcaataacatcggccttcaggcgttgcagggacttggtagtgtcgctcaaacatatcaagccgcaaagcaacaggaagcggatgctgcattccaaaaagaatatgcggcagccatccagtccggtgatcgacagcaggttcgagatctgatgaccaaatatcctcgtcaattagagaagattcagtctggtatgaagtgggcagacgaagaccagcgcaattctatcggcaccttagcggctggcgcacgccttgcggcctcgtctccagaagcaatgcaatcatggctgcaaaacaacgccaaggaactgactcgcgtcggtgttgaccctaacagcgttgctcagatgtatcagcagaacccttcaggatttggtgagtttgttgatcaccttggaatggctgcacttggtccgattgattacttcaatgttcaggacaagatggctggtcgtgaaattgaccgaggcaggctggcagagacaatccgcagcaatcaggctggtgaagcacttcaggcgagagggcaaaacctttcctatcagtcagcaatgactgggcacaatatcgcagcacaacgcttggctctggatcagcaagagttcgggtttaagatgcagcaagcgcaggaaaaggctcagcagttgattagcgaagcacctaagctgtcagtaaacatggaaaaaggaatcgagacggctgtaaacaatgccacagcatcatcaaactcagccaattccatgagtgcgcttgctcaacagttcagagcagaaaaaccaacgacaggtttgttcggtaacgcacagaacatgttcgcaaaacttaccggaagcgatacgacattgcgtgatttgcgcattcgccaaaatgcccttgttaacagtcaggttcttaaattcctacctcccggcccagcaacggataaagacgttgagatcgttagacagggtgcgccaactgacatggataaccctgagacggtcgcaagatggcttgatgcaatggcaaaccttgagcgacgaaacgcgcagtttaatgagtttaaagccgagtggatgagcgcgaatggcaaccctggacaatcgcgtaatggcggtcagatattggggttggatgttaaaaaaggtgaatcattggggagtgccgttaagcggtatatgtcaatgaatactgacgcagcgccagcacaagattcgacaccttcaggagaaccacggagtcaggttggatcatatacctcaaaatcaggcattcaatttacggtggaatga

SEQ ID NO: 14102 - DNA, 675 bp, Escherichia coli
atgttaattttccagattgccaataagcacctcagcaaaactgtttactgcaaaggtggcagtgatggcggttcaaaagcccaggcacgcgcaactgaaaagggcatcgaactgcagcgtgaaatgtggcagacgaacatgcaaaaccttgcaccgttcacgccactcgctcagcagtacgtatcacagttgcagaatctttcctctcttcaggggcaaggtcaggcgcttaaccagtattacaactcccagcagtataaagaccttgcagggcaggcgcgttaccagagtctggcagcagcagaggcaacgggtggattaggctctacagcaacaggaaaccagttagcagcaatcgcacctacactcggtcaaaactggctgtcaggtcagatgaacaactacaacaatctggcaaatatcggccttggtgctcttacaggtcaggcaaacgccgggcagaactacgccaacaacgtcagccagttgtatcaacagcaggcagcagcatctgcggctaatgctaaccgaccatcaggactgcaatcagccttgggaggtgccatgagcggtgcggcatcaggggcgatgattggctctgtggtacctggaataggtacagctgttggcgctattggtggcggtattatcggtggtcttggatcattgttttaa

SEQ ID NO: 14103 - DNA, 480 bp, Escherichia coli
atggaaataaagctcatcgataatccggtgaagcttgcagaattccttaacaacccggcaaacacgggaaatatcgtagacagtggagataaatactacatcaagcctgatgcggtatacctcggcatctacgaaggattagtgctggctggcgttcatgaagtgcgtaacttctggcatagcgttgttgaatgccatgcggtgtacgaccccggattccgtggtgaatatgcactgcaagggcatcgattattctgcaaatggcttctcgaaaactcaccattccttaacagcatcaccatggttcctgacacaacgaaatacggacgggcaattatccgtttgcttggcgctacccgtgttggtcaccttgatgatgcttataccagcaatggaaagcctgtaggcatcacgatttatcagttaccgcgctcaaaatacgaggagctaaagaatgttaattttccagattgccaataa

SEQ ID NO: 14104 - DNA, 954 bp, Escherichia coli
atggctgattcgaatctcaatgagccggtaatcatccaggctacgcggctcgatacatcagtccttccacgcaatatcttctcgcagtcgtatctgctgtacgttattgcacagggcactgatgttggtaacgtggcgaacaaggccaacgaagcagggaagggcgcttacgatgcacaggtgaagaatgatgagcaggatgtcacccttgcagaccatgaatccagaattgaaactgctgaagaaactctcgtcaatcatgaacatagaatcacagcagcggaaagcactcttgcagatcatgaaacaaggattacggctgccgaaacagagctggctgatcacgagacgcgaattgctgccaatgaatctgagttagcaaaccatgatgcgcgcataactcagaatgcaacagatatcgacgcactggataccaggctaacagcggctgaaggaagcatttcgacgcttcaaagcacagttggtgatcactcaacaagaatatctgcgcttgagtatgccactactcgcaagaagtcagaggttgtttactctggcgtatcagtaaccatcccgacagcgccgaccaaccttgttagcctgctgaaaacgctcacgccggcatccggcacgttggcaccattcttcgacaccgttaacaacaagatggttgtgttcaacgagaacaaaaccttgttcttcaagctgtcgatcgtcggggcgtggcccagcggaaccgccaacaggtcaattcagctaaccttttccggatctgttcctgacacactggtaagcagtcgcaactcggcgacaacgaccgataacatcctgttagctacgttcttcagtgtggataaagacggctttcttgccacaaatggcagtacgttaaccattcagtcaaatggtgcggcgtttactgccacaaccatcaaaatcattgcggagcagtga

SEQ ID NO: 14105 - DNA, 531 bp, Escherichia coli
atgaagtacccaacagttattgtcaatggtgtgtccgttcgtgttgatgaggacggacgctacaacttaaacgatctccatgcagcagcagttgcaaatggagaggctacagagcatcagcgaccaagccagtttttgcgtagcgcgcagataaaacgcttcataaaagcactggaagccaaagtgcaaaaaagcactttggaacaaattcagccaattaaaataatcaaaggtggtgcagaaccaggtgtgtggggtgttgaacttctggcaatcagatatgcagcatggattaagccggaatttgaaatcgaagtttatgaagttttcaaaacggttgtccgtctcggcgttggcgcaatgtcccgtctgaatagaatcgatcacatcatcaatactgaaaccaaagcgataagccagtgcgcaagccaaatggctaagtggggcgttggtgggcgaaaaagattgcttcatgttgcacgtgagagagcggcaaatgaagtgcaaatgtatttgcccggaatagtgtga

SEQ ID NO: 14106 - DNA, 504 bp, Escherichia coli
atggcaatgtcaccggcactacgaaatagcgtaatagcggcgataagtggcggggctattgctatagcatctgtgttaatcactggaccaagtggtaacgatggtctggaaggtgtcagctacataccatacaaagatattgttggtgtatggactgtatgccacggacacaccggaaaagacatcatgctcggtaaaacgtataccgaagcagaatgcaaagccctcctgaataaagaccttgccacggtcgccagacaaattaacccgtacatcaaagtcgatataccggaaacaacgcgcggcgctctttactcgttcgtctataacgtgggcacaggcaatttcagaacatcgacgcttcttcgcaaaataaaccagggcgatatcaagggcgcatgtgatcagctacggcgctggacatacgctggcggtaagcaatggaaagggctgatgacccgtcgtgagattgagcgtgaagtctgtttgtgggggcaacaatga

SEQ ID NO: 14107 - DNA, 204 bp, Escherichia coli
atgtaccgtatggacaaaatcagagaatggttcagttacagcttcggaggactgactgcgatgggtggcattctctccctgaatgactgggctgtcatcattggtattctttgtactgtcggcacatttggcatcaactggtactacaagcgcaaagagcgcgaggacagattgaatggcaatgtcaccggcactacgaaatag

SEQ ID NO: 14108 - DNA, 213 bp, Escherichia coli
atgagtgattacctgaaatggtatctctgttaccgctggttaattaagtttgctgtaaaagactggatgacagcggatgccaacaagcttaagcaaagaaaggactattactacgccagaatgaaggaaaactactgctcaattcgcactcgcatatttattaaaaaagaccttcagtcaattcttcaattgcgagggaaggtaaatggctaa

SEQ ID NO: 14109 - DNA, 1320 bp, Escherichia coli; identical to SEQ ID NO: 11799

SEQ ID NO: 14110 - DNA, 468 bp, Escherichia coli
atgaggaaagtaaagttaaataacgacgatttaattcagtatctgaacaccattaatacattaaaacaatatccaacgatgtctgaatacaaagaggaatatcgcaggctaagaaccgatggttcaccgttgagtgaagccaagaaatttaaatcggcgcataccgaacttctgagattagacaggaagagaaaatcactactcgaaaaatttattgaagaactcaaccctgtcagtcacgcatcagcccttgcatccaagagccttgagaaggttcaggaatccatactctacagaaaaactttattgggaaaaacacctgatgaactcttcgctctcgtcataaaacagcgtacagaagctgctcttgagttccaacgttctgttgaacagagtcttgagcaactttctaacatatcgtcagagttcgaacgatcaagtcaactacgacgaaaaatggccctataa

SEQ ID NO: 14111 - DNA, 153 bp, Escherichia coli
atgcttaaaacctcccttgagggaggtagactattatttaatagtgttatactgaacatcactgactgggtttttactcttggaataatctactacagaaataccaaccagaataaagtaaatgactccagcaacaataagaaagaaaactag

SEQ ID NO: 14112 - DNA, 138 bp, Escherichia coli
atgaaaaaaagaacagtaagattcttgtcatcactcaaagataataaattatatcgatactttgatgaacattttaacgttattacatgcattagtgtcatatttgtcattgtatggaacatctacttttatgcttaa

SEQ ID NO: 14113 - DNA, 381 bp, Escherichia coli
atgaagaaagataatctgagtaaaaaagatgaaacaatgatattcgccatttcagcaacgctaatgttgtatgtggacaggatatacagcatggcaagcgtaaacaaagatgatgcaatgatttatgtaaatgatgaagatgttgttgagtttgcactacgaatccacatgaaggaagtattaactgagtttgagtattacaaggctgcttttggtacaggaaaggaaaaatatgaatatataaatataacagagctattaaagagggtgatgttttttcatgatttatatatcaaggatatgttgacaagaaatatagagtcaggacgatcttttgatgactatagtgtgttggactgggatatggacataaatagataa

SEQ ID NO: 14114 - DNA, 288 bp, Escherichia coli
atgagtgaaaaactgataaaagaatcaagaaaagtattcctgcaccttgctgagttattttatgaaatgagaataaatacgctgaaggaaacacggcctaatgaagcagagatgttaatggtagatgatgccttcatggaaggtatttataaagagtgcattaaaaatgcaagtgctacttttaaaaaagcagccagagctgagtattatgagcaagggcattcagtaaaaatggttgataaggaggtggtattgataacactgcgtgttaatcataaaagaagatga

SEQ ID NO: 14115 - DNA, 387 bp, Escherichia coli
atgaacgaaaaatgtttaggctggaatgaaataccagtaaaaataaccgcgagtaatcctgagacagcaaactttactactgatgttataaatacctataacgagttaatacattacttatactttaatctaagtgaagatgtatttctgaagaaattgatggatgggttttacagggagatattcataatggatattattaatctcaagctacatgaatggcttgaaagttctgaagagataaagattaaatacatatcagtcccagaggttaaaacaatactaagtagctatcatgagtttttgattaaatgctttaatggtgatggttatgttcgttattacaaaaaagtagaaatcagcgcaaataaacagtctgtgatgtga

SEQ ID NO: 14116 - DNA, 312 bp, Escherichia coli
atgaaaagtaaaaacgtactgccttgtgtggtgactgttacgaatgatgagacagaagtatttatggaaatggcaataaataactttagaaaacatcttcaggtcatgattgattgtatggggaatgattatgagcgccattttaaaaacagacgttatattgaagaagtgattgctaaagtgattgagcgaacaaaacaagagtttgctgaatcaatgaaagataataaaggagaagaatattatctgttcttggatgaggtgagaaggaatctgagagttatttattctgcgtatcgtactaactattaa

SEQ ID NO: 14117 - DNA, 249 bp, Escherichia coli
atgattcaaaccaataaagaaaaacacccgaaacttatccggttgccggaagtaataagaaaaactggatttggcaggacatggatttatgagcttataaaggctggaagatttccaaagcaagtaaagataagtgaaaggtctattgcttttattgaaagtgagattgatgagtggattgaaaaaatgattgcgaaatctcgctgcgtatctgaatgcaaacattttaaacaaaaggggaatatatga

SEQ ID NO: 14118 - DNA, 861 bp, Escherichia coli
atgaccaaagcggagatcgccagcgctgttaatgagtggttcaacattgaaaattacagcgtcctgcaaaatttgacagtggaacagcttttccaagagatagagaacaggattgtcgcgtatcgtatggaacaaaaccgggctgagttgtctcccgaaaaccttagtaggcatcagaaatattacgaagagttgattgaaggtaaagtcgtctttggtgatgttttcggtggaccagagaaaagactatcttccagctatgccatcaagcctgtaacacaccaagggctatgggaggtggcgggttatgttgctgctttcgataaatacgtaaacccggagggaaaacccctgcctcatatggaagtctcgcactatctgaaggaagccgaggtaaacaacgaagggctgatgctggttcaaattaatctggcagaaacatcacccgaagaaatcatcaatcacctgaaagtcatggttcctgagtggaaacagcagctacaggctcctgagcctccagcgagagattttcgctttggggtcagcaaccttaaaaaaatactcgattacaacattatccccatcatggacctgctgtactgggcgcaggatgaagaggtcaggattggtatgccacaactgaccagctttttataccctgatgagtttaaagacggtatccgtgatgtagataaggtgaagtcaacagatcatcctctggcagttaagtatctgacaaaccttgctcactatcgctcttttgtcgattttacatatagatacgacgacagaagacactggaatattcaggatctaatcagagcggaacttggtaaggatgagcaatccgatcaggactga

SEQ ID NO: 14119 - DNA, 285 bp, Escherichia coli
atggaagctaaagaatgtaaggtgcaggatatccttactgaaaacaaaaagtttattattccttcttatcagcgtccttacagttggacggtagataatgcagagcaactcattgatgacatttataaaagctctcaatcagaagagaatgaatattttattgggagtatgatttgtatcaataaagggcaaaatcagtatgaagttgtagatggacaacaacgtcttacaacgttaagcattattgtctccgagctaaaaaaatcatcccgattcaggggataa

SEQ ID NO: 14120 - DNA, 2157 bp, Escherichia coli
atgtcacctcgtcagataaggggttattattgcgaaatcatcgcttcacggaaagacgtcagaatgaaagctacagaagcccgcctactcgattttttaaaacgttcgcagcagttcgttattcccatttatcaacggacttattcatggacagaacaacaatgtcggcaactttgggacgacatcattcgtgccggaaagcgtgacgatatatcagcgcattttatcggttcggttgtttatattgagcaggggttgtatcaggtttctggtatttctccgttactggtcattgatggtcaacaaaggctgacgaccgcaatgttgctgattgaggctttatcgcgtcatcttggcgaagacgaagtttttgatggcttttcagcaatgaaattgcgtaattattatttactcaatccttatgagtccggcgagaaaggatttaaattactgctgaccgagactgataaagacagtttgctggcgttaataaaacaaagaccaatgccagaaaactattcccatcgaataatggaaaactttactttctttgatgaacaaattaccaaactcggtgatgacttgatccccttatgtcgtgggttagcaaagttattaattgtcgatgtggcgcttaatcgtggtcaggataatccgcaactgatttttgaaagtatgaactccaccggtaaggcattaagtcaggccgatctggtgcgcaattttattctgatgggcctcgaaccagagcatcaaacccggttgtatgaagatcactggcgtccaatggaagtcgcgtttggtcagcaaggttacagcgaatattttgacagttttatgcgtcattatctgacggtaaaaacgggggagatccctcggacagatgaagtctatgaggcatttaaactccatgcccgcagccagagtgttgctgaaaaaggtgtagatcggctggttgaagatattcacatctacgcggagtattactgtgcaatggcattgggaaaagaaagtgacaaatcgcttgctacggcttttcaggatttgcgcgagttaaaggtcgatgtggcgtatcctttcttactggcgctttatcatgactataaaaatggcgttttgtctcacgaagatttcctgagcataattcgtttaattgaatcttatgttttccgccgtgcagtatgtgcgattccgacaaattctcttaacaagacgtttgctactttttataaggtcattaataaagaaaaatatctggaaagtattcaggtacattttctgaatctgccttcatatcgtcgtttccccaacgatgatgaatttaaacgggaattaaaagttcgtgatctctataatttccgtagtcgcagctactggttacgacgactggaaaacgataaacgcagagagcgcgtggaagagtttacgattgagcatattatgccgcagaacgaaaatttgtcggctaaatggcgtgaagagctgggaagtgactggcaacgcattcataaagaactgttgcatacgttggggaatctcacattaacgcgctataactcccgctacagtgacagacctttcgcggaaaaacgcgatattgaagacggctttaaacatagcccgctctatttgaatatcggtcttggacagtgcgaaaaatgggatgaagcagccattcgcgcccgtgcagatcgtctggccgatctcgcggttcaggtctggcaagcgcctgctcttcctgaagaggttttagctgtttatcgggcgcagccggagaacaaaaccagttacagcctgagtgattatccttttcttgctgatggttcgcatagccgggtgttatttgatcatcttcgcgatgaagttatgcgcctggacgcagggatcacgcaggaagttttaaagctctatattgcgtttaaagctgaaacgaattttgttgatgttgtaccgcaaaaaagccgactgcggttgtcgcttaatatgcagtttcatgaactggtcgatccgaaaggtattgccaaagatgtgacaaatgttgggcgatggggcaatggtgatgtggaaattggtttcagtgacctcgcacaacttccttacattatgggattaattcgtcaggcatttgaaaaacagatggagagcgcgttggtataa

SEQ ID NO: 14121 - DNA, 444 bp, Escherichia coli; identical to SEQ ID NO: 4032

SEQ ID NO: 14122 - DNA, 720 bp, Escherichia coli
atgagccatcaactcaccttcgccgatagtgaattcagcactaagcgccgtcagacccgaaaagagattttcctctcccgcatggagcagattctgccatggcagaatatgaccgctgtcatcgagccgttttatcccaaggcgggcaatggccgacggccctatccgctggagaccatgctgcgtattcactgcatgcagcattggtacaacctgagcgacggtgccatggaagatgccctgtacgaaatcgcctccatgcgcctgtttgcccgattatccctggatagcgccctgccggatcgcaccaccatcatgaatttccgccacctgctcgagcagcatcaactggcccgtcaattgttcaagaccatcaatcgctggctggccgaagcaggcgtcatgatgacccaaggcactttggtggatgccaccatcattgaggcacccagctctaccaagaacaaagagcagcaacgcgatccggagatgcatcagaccaagaaaggcaatcagtggcactttggcatgaaggcccacattggtgtcgatgccaatagtggcctgacccacagcctagtcaccaccgcggcaacgagcatgacctcaatcagctgggtaatctgcttcatggagaggagcaatttgtctcagccgatgccggctaccaaggagcgccatagcgcgaggagctggccgaggtggatgtggactggctga

SEQ ID NO: 14123 - DNA, 2181 bp, Escherichia coli
atgagttttaacgcaaaggatatgacccagggcggtcagattgcgtccatgcgtatccgcatgttcagccagatcgccaatatcatgctttactgcctgtttatttttttctggatactcgttggtctgattttatgggtaaaaataagctggcagacgtttgtgaacggctgtatttactggtggtgtaccacgctggaaggcatgcgggatttaatcaagtcccagccagtatatgagatccagtattacggcaaaaccttccggatgaacgctgcccaggtactgcatgataaatatatgatctggtgcggagagcagctatggtccgcattcgttctggccacagttgtggcactggttatttgcctgatcaccttctttgttgtctcctggattctggggcgtcagggtaaacaacagagcgaaaatgaagtcacaggtggtcgtcagctgacagacaatccgaaagacgttgcccggatgctgaaaaaagacggcaaggactccgatatccggattggcgacctgccgattatccgggattccgaaatccagaacttctgtctgcacggcacggtcggggccggtaagtcggaggttatccgtcgtctggccaactatgcccgtcagcgcggtgatatggtggtgatttatgaccgttcaggggaatttgttaaaagttactatgatccctccatcgataaaatcctgaatccgctggatgcccgctgtgccgcatgggatttgtggaaggagtgcctgacacagccggattttgataataccgcaaatactctgatccctatgggtacaaaagaggacccgttctggcagggttcaggacgtaccatttttgcggaagcggcgtacctgatgcgtaatgaccccaaccgcagctacagcaaactggtggacacactgctttccatcaaaattgaaaaactgcgtaccttcctgcgtaattcacccgcggccaacctggtggaagagaaaattgagaaaacggcgatttccatccgtgctgtgctgaccaactacgtgaaagccatccgttacctgcaggggattgagcataacggtgatcccttcaccatccgtgactggatgcgtggtgtccgggaagatcagaaaaacggctggctgtttatttcgtcgaacgccgacacccatgcctccctgaagcctgtgatctccatgtggctgtccattgccattcgtggtctgctggcaatgggagaaaaccgtaaccgtcgtgtgtggtttttctgtgatgagttacccacgttacacaaactgccggatctggtggagatcctgccggaagcccgtaagttcggtggctgttatgtgtttggtatccagtcctatgcccagctggaagatatctacggtgagaaagcggcggccacgctgtttgacgtcatgaacacccgtgcttttttccgttccccgagccataagattgcagagttcgctgccggtgagattggtgagaaagagcacctgaaagccagcgagcagtattcctacggtgctgacccggtacgtgacggggtatcgaccggtaaggatatggagcgtcagacgctggtcagttattccgacattcagtctctgccggatctgacctgctatgtcactctgcccggaccgtatccggcagtcaaactctctctgaaatatcaggcacgaccgaaggtcgctccggagtttattccgcgtgacatcaacccggaaatggagaaccgtctgagtgccgtacttgccgcaagggaagcagaaggtcgtcagatggccagcctctttgaaccggaggttgcctccggagaagatgtgactcaggctgaacagccacaacagccacaacagccacaacagccacaacagccacaacagccagtgtcttctgtcatcaatgataagaagtcagatgcaggtgtgagtgttccggcaggggggatcgagcaggagctgaaaatgaaaccggaagaagagatggaacagcaactgccacccgggatcagtgaatccggtgaagtggtggatatggccgcttatgaggcatggcaacaggaaaatcatccggacatccagcagcatatgcagcgtcgtgaagaggtgaacattaatgtgcaccgggagcgcggggaggatgttgagccgggagatgatttctga

SEQ ID NO: 14124 - DNA, 591 bp, Escherichia coli; identical to SEQ ID NO: 5774

SEQ ID NO: 14125 - DNA, 1245 bp, Escherichia coli
atggctctcactgatgtcaaggtaagaaatgccaagcccgccgacaagcctgtaaagctcactgacggcaacggcatgcatcttcttattcatcccaatggctccaaatactggcgtctacaataccgctttgcaggaaaacaaaagctactggctcttggggtctaccctgcaatctctcttgctgatgcccgtaaccgtagagatgatgccagaagattaattgctgctggtatcgacccctccgaaaagaaaaaagcagaaaaggtagagcaaagcggcgctcttgcttttgagtccgttgccagagactggcatgcaagcaacatcaaatggtcagaaacacatgctgaaagggtaatgaacagcctgaccaatcatgtgttccctgttattggtaaacgaaacattaccgacctcaaaacccgtgacctactccaaccaattaaggcggctgaaaagtccgggcatcttgagattgctgctcgtctccagcaacgtatcaccgctatcatgcgatatgctgtccataacagtattatcgatagtaatcctgcacaggacttagcaggtgccattgcaacagcaaaacgagtccatcgcccggctcttccatttgaacgcattacagagcttctcagccgtattgagagctatagaggaagacagctaacccgcctcgctgtgcgactcactttactaacttttgttcgttcaagtgagatgcgttttgcccgttggtctgaaattgatttcaaaaatgcgctctggacgatacctgcagaacgtgaagaactacaaggagtgaaacactccagccgtggctctaagatgaaaacccctcaccttgtcccattaagcaagcaggcaatagcaaccctgagagaaattcagaagctcagtggcgatcagggaatcatcttcattggtgatcattatgcctataaacccatgagtgaaaacactatcaacaacgcgcttcgtaaaatgggctatgacaccaaaacagaagtttgtggacatggtttccgctctatggcctgcagtgccttgatcgagtccggtttatggtcaaaagatgctgttgaacgtcagatgagccatcaggagcgtaataacgttcgcgctgcttatatccatcttgctgaacatctcgatgagcggaggctaatgcttcagtggtgggctgactatcttgatgccaaccgtaaagggatattacgaccttacgattttaaagactga

SEQ ID NO: 14126 - DNA, 1008 bp, Escherichia coli
atgaaaaatgaattagaggccttcgttcaaaataatggtcttacaggtgagatgtttttcatcataaacgataatgacaactatatttatcgacgtgttattttacatgatgaaaatactgaacctctcatcactgaaaatttcaaaaaatctatcactgatgaaattataaagagaatatctattaacgataatggtgatgcaataatagataatatcacggatatgaattatgaacataaaggtgtttactattttgatatcgccagcgaagataaaagcactatcattaaaataattgaagaaatatcgtcgttgacagttgctgacaaccctattgactttaaattcaatgacgtaaatctcgataacattattggtcttgtttatcacatgagtgatggtgataaaaatatttttttgtatcaacatagataccccaattttttacacaaaaaatcaaggctctcatttttaggtgagggggatgtattagttcctataccttacgatatgataaacatatccaaagtaattgatttttttgtttttgatggaattagttatgctattaacattaaattattagaagaaagatatggacttactcaagtaattgacaatatggtttctgaagtaactccaaaaatcattgaaatggagattgtcaacaaatctgtcttagccgagccagagaaaatcttcgacgatatgaaagatgatcgtggtttcatgagaaaattagccagagttcttaaaaacggaatattggaactaaatatcgatgttaacattgttaatgagataaagactagtttccccacaataggaaggaatattgatataattaatgatgataatggtatgcaatatataaagctgacaagtaaagcacgcaaaaaagcttttatcagattgttgaatgatgaagccgtacgttcagtcttaacacaaaagccatcgattgcacaaaatcacaaacctgaaaaaaatatcactcccacatga

SEQ ID NO: 14127 - DNA, 636 bp, Escherichia coli
atgacatctactaattctaacagtgcatcatgcgacaatataaagttcaaatattatctttattttttatctttgtggattttatttctatctgtttcaataatgtcctttgattgggtttttattgaaagattggttagatttattttattgaagtatacatttgaggatgtatttaacaactttaacaagttaaaagtcaggaactttgttttcattttctgtatttcgatggttttttcgggtatttcatctgtagtatatttattttcatcgttatcaagaggttggggaagcactcataaagtgagtaacgttaaaaatcaaacgcatgaacatcttgaatttttaactacttatgttatgcctcttgtattcactgacgttaatagcaaaagaacagtaatcaacctgctgctgatgatttgttttatcggtgttatttatgtcaggacaaacagattttatgccaacccatcgttggcaatacttggcttcaggttatataaatgtgttattaaaaatgatccttctggtaaggagtacacagtaatatgtagggggaaaatgtctaatgattgtcaagttaaaataaagaaaattgatgatgatactttgatcgcaaaacttatttga

SEQ ID NO: 14128 - DNA, 1008 bp, Escherichia coli
atgatcgaacgcatgctttttgaaaacttactcacgaaggcgactgaaagactctctcaggatctgaatacatcaagtaaatatcacaactcgagaggatttgagcaaagggttagggaagttttaggtgatttattaactgaaatggggttgtctgtagacatgagtcccccagcgcaagaatttccggatataattattggaaattttggtgtagaggtaaaatactcagataacaatacatggagatcaatagcaaacagtatctttgagggaagtcgaaagcaaggagtagattatgtatatctcttatttggaaaaactggcggtgtacccgatgctaaatggggtcgctatgaagaatgcataatgcatgtaagaacatcacatgttccaaggtttgaggtggaaataaatgctaaagagccgttatttgataaattgaatatagcctataatgattttagagtgttaagcccggaagaaaaaatgcctttcattagaaaatatgcaaagaatagattgaaacccggtgaaaggctttggtggattgatgatcaaccagatgaaaggactctaccattagaggtcagattatatactaaactgtcccagccagaaaagaggaaatacagagcagaatcagcagtgctctgcccgcagatagttaaatcaagccgcgcatcaggaaaatatgatgatgtgactatgtttctcctcacatactatggaatattgtgcaatcaggctagggatttattttccgcaggaagtgtcgctatgcgagcatcaccagtaagaggtggaaattatcttgaaagagcattgaaagatatagaaaaagagatgattaaagcttttgatgaattagaagatgcattatttgaagagtattggggagtaattatacacagaaatgaaagaatcaaatactggctaaatttggctgattcttatgcggtgggatggataccatctgagactttatttaccgagattgagtattga

SEQ ID NO: 14129 - DNA, 1101 bp, Escherichia coli
atgacaacagttattgcaacagaaattaaaagcgaaaaaatacatttgcgtataactccctctcagaaagaaacttggagagccttagctgaagctcaaggtgttagtttggctgcttggattgaaaataaaatatcgatagctttagcatcaaacaatgacactttccaaaaagaaaaatataaacttatttctcttttttctggttgtggcgggatggacttaggtttttgtggtgggttttctgtactaaataaacaatataaaaaaacaaaatttgaaataacttgggcaaatgaatttaatcctaatgcagttaaaacatataaaaaaaatttcagccataatatagctgagggtgatatttgggaacttatagatttagtgcctaacgaatgtgatgttttaattggtgggttcccttgtcaagatatatctatcaatggcaaaagagcgggcgtcgatggtaaacgtagtggtttatatcttgcgatggtggaagcagtcaaacgctctcgcccaaaaatttttgtcgccgaaaatgttaaagggcttcttatgaaatacaacgaggagtcgttagctcgtgttattaaagattttagcgaactcggttacaatgttagctataaactttataattcagctaattttggagttcctcaaacgagagagcgcgtttttatagtcgggactctacacggaaatccactctttaaagaacccgttgatatactgcataaaaacgaatggttgacttgttatgatgcaattcatgatttagaaaatatcgatgaagatcgtatctttaaccatatctggagtaaagcaaaaaaaagcccagaccaaggaagtaggcgtttgaaagaagataaaccatctcagaccataagggccgaatgccatggtaatatacaatttcattataaactggacagacgtatctcaatgagagaagccgctcgtcttcaatcatttcctgataactttgtttttgagtcaaatttgagagaaactgaaagacaagttggaaatgcagttcctcctgttttagcttggcatttagcgcaagccgttgaggaatatttagacaaattataa

SEQ ID NO: 14130 - DNA, 474 bp, Escherichia coli
atgagaatatctcaagaaaaaagatcacatattatgaggtcaatacactcaaagaatacaaaacctgaaataattgtagatggaattctgagtaatcttgatattaattatatggctcattgtcatagcctatatggtaaacctgattttttgtgcgaagcatataaagccgcaatatttgtaaatggttgtttctggcacggtcatcaatgtcatatgttcagaacaccagactctacgaacaaatattgggtaagtaaattgcagaaaaattctgaaagagatattcgtgtagtctctattttaaataacctaggttataaggtcattgttgtttgggaatgcgctttaatcgggaaaaggaaattagacacccttgttctacaggattgtcttgaagagtggcttttagctgggaatgggaattgtgaaatagattctaaaggtttaaaagctatggtttcgagtatttaa

SEQ ID NO: 14131 - DNA, 312 bp, Escherichia coli
atggatacgggtgataaaaacagaaaacaaagaacagaaaaaaacattaagcaaaaaatagcatcagcgcagatgcgtttgaatcgtctcaagaccaaagagaaatctttatccaagagcgctgagacacgcctgaagatcatccttggtgctgaagttgctaaagctgtgggctgtaaagtagaagacgtcgataaggagtttgtgttaggtatattaatacattttcaaaatgttggtgctgaggataaggcaagacttaaattaaaagggaaaaaatttcttgagtctatagtgggaaggaaggaataa

SEQ ID NO: 14132 - DNA, 996 bp, Escherichia coli
atgaaagatttatttggtcttcttatttacattataaaaaaatatggatttattatagttgttgccataatcatggtttcacctgtgatgaattttgtgcttaaaacttcgctttcagacattcaactggaatcatcatcaatagtaaatttaataaacgagaagaaagagtttattttatttacagcaactgccctagtttttgttggttcttttgtcgcaataatgacttcttatttaaacaaaggaattggtggtagagatattgaaaacacgagatatatttttcacaaagaaatagttaagctaaataaaaaattgagcgaaattgaaaatagaacatcttccggagtttccattgaaataacagagagtgaaagggagaagttaatatccgatgcaaaaaagagaataattggaaacacaatacttctggcagataacagcctaaaaagcgatatatctgattttaagaagagctacagcttacataaactccatactgatatggttctaagattagagtctgaaatagacagactcaatcgacgaggtgggcttaaccttgcaatcggaacaataattgcgttgacagggatattatctcttgcttactttctttacagcgcgccagacattgtggatggggtgggattttttattcatcaccttcctaaattatcatttgtaatagtcgttgaattgtttgcttatttttttctacgcctctataaaaatgggtttgacgaaatcaaatattttcagaatgaaatcacaaatattgagatgaaagtcatgtctctaaaatatgctcaagaattcaagaacgaagacatgataaaagagttggcaatgcttttaatgaaaacagaaagaaatttcatattagaaaagggacaaactacagtttctattgagaaagatagactgcagaatctttccgattcaaagctaacaactatgatatcagaaattataaagctaaaacaaaagtga

SEQ ID NO: 14133 - DNA, 1056 bp, Escherichia coli; identical to SEQ ID NO: 11859

SEQ ID NO: 14134 - DNA, 2562 bp, Escherichia coli
atggctgaaccggtaggcgatctggtcgttgatttaagtctggatgcggccagatttgacgagcagatggccagagtcaggcgtcatttttccggtacggaaagtgatgcgaaaaaaacagcggcagtcgttgaacagtcgctgagccgacaggcgctggctgcacagaaagcggggatttccgtcgggcagtataaagccgccatgcgtatgctgcctgcacagttcaccgacgtggccacgcagcttgcaggcgggcaaagcccgtggctgatcctgctgcaacagggtggtcaggttaaggactccttcggcgggatgatccccatgttccgggggcttgccggtgcgatcaccctgccgatggtcggggccacctcgctggcggtggcgaccggtgcgctggcgtatgcctggtatcagggtaactcaaccctgtccgatttcaacaaaacgctggtcctttccggcaatcagtcgggtctgacggcagatcgtatgctggtcctgtccagagccgggcaggcggcagggctgacgtttaaccagaccagcgagtcactcagcgcactggttaaggcgggagtaagcggtgaggctcagattgcatccatcagccagagtgtggcgcgtttctcctctgcatccggcgtggaggtggacaaggtcgctgaagccttcgggaagctgaccactgacccgacgtcggggctgacggcgatggcgcgccagttccataacgtaacggcggagcagattgcgtatgttgctcagttgcagcgttccggcgatgaatccggggcattgcaggcggcgaacgaggccgcaacgaaagggtttgatgaccagacccgacgcctgaaagagaacatgggcacgctggaaacctgggcagacaggacagcacgggcattcaaatccatgtgggatgcggtgctggatattggtcgtcctgataccgctcaggagatgctgattaaggcagaggctgcgtttaagaaagcggacgacatctggaatctgcgcaaggatgattattttgttaacgatgaagcgcgggcgcgttactgggatgatcgtgaaaaggcccgtcttgcgcttgaagccgcccgaaagaaggctgaacagcagagtcaacaggacaaaaatgcgcagcagcagagcgataccgaagcatcacggctgaaatataccgaagaggcgcagaaggcttacgaacggctgcagacaccgctggagaaatataccgcccgtcaggaagaactgaacaaggcactgaaagacgggaaaatcctgcaggcagattacaacacgctgatggcggcggcgaaaaaggattatgaagcgacgctgaaaaagccgaaacagtccggcgtgaaggtgtctgcgggcgatcgtcaggaagacagtgctcatgctgccctgctgacgcttcaggctgaactccggacgctggagaagcatgccggagcaaatgagaaaatcagccagcagcgccgggatttgtggaaggcggagagtcagttcgcggtactggaggaggcggcgcaacgtcgccagctgtctgcacaggagaaatccctgctggcgcataaagatgagacgctggagtacaaacgccagctggctgcacttggcgacaaggttacgtatcaggagcgcctgaacgcgctggcgcagcaggcggataaattcgcacagcagcaacgggcaaaacgggccgctattgatgcgaaaagccgggggctgactgaccggcaggcagaacgggaagccacggaacagcgcctgaaggaacagtatggcgataatcctctggcgctgaataacgtcatgtcagagcagaaaaagacctgggcggctgaagacctgcttcgcgggaactggatggcaggcctgaagtccggctggagtgagtgggaagagagtgccacggacagtatgtcgcaggttaaaagtgctgccacgcagacctttgatggtattgcgcagaatatggcggcgatgctgaccggcagtgaacagaactggcgcagcttcacccgttccgtgctgtccatgatgacagaaattctgcttaagcaggcaatggtggggattgtcgggagtatcggcagcgctattggcggggctgttggtggcggcgcatccgcgtcaggcggtacagccattcaggccgctgcggcgaaactccattttgcaaccggaggatttacgggaaccggcggcaaatatgagccagcggggattgttcaccgtggtgaatttgtcttcacgaaggaggcaaccagccggattggcgtgggaaatctctaccggctgatgcgcggctatgccaccggcggttatgtcggtggcaccggaagtccggcgcaaatgcggcgttcagagggtatcaggtttgagcagaacaacaacgtggtgattcagaacgacggtacgaatggtctgccaggtccacagatgatgaaggcggtgtatgacatggcccgcaagggtgcccgtgatgaaatccaggcacagatgcgcgatggtggtctgttctccggaggtggacgatga

SEQ ID NO: 14135 - DNA, 3045 bp, Escherichia coli
atgggtaaccaatggcaacaaaaatatcttcttgagtacaatgagttggtatcaaatttcccttcacctgaaagagttgtcagcgattacattaagaattgttttaaaactgacttgccgtggtttagtcggattgatcctgataatgcttatttcatctgcttttctcaaaaccggagtaatagcagatcttatactggatgggatcatcttgggaaatataaaacagaagtactgacactcactcaagccgctcttattaatattggttatcgttttgatgtttttgatgatgcaaattcaagcacaggaatttataaaacaaagagtgcagatgtgtttaacgaagaaaatgaagaaaaaatgctcccgtcggaatacctgcattttttacaaaagtgtgattttgcaggtgtttatggaaaaactctgtcagattactggtcgaaatactatgataaatttaagcttttactaaaaaattattatatttcttctgctttgtatctttataaaaatggagagcttgatgagcgtgaatataatttctccatgaacgccttaaatcgcagtgataatatatcactattattctttgatatttatggatattacgcatctgatatttttgtagccaaaaataatgataaggtaatgcttttcattcctggtgcaaaaaaaccttttttattcaagaagaatatcgctgatttgcggcttacccttaaagaacttattaaggatagtgacaacaaacaattactttcccaacatttttcattatatagtcgtcaagatggagtttcctatgcaggagtaaattctgttctacatgcaatagaaaatgatggtaattttaatgagtcttactttctgtattccaataagacacttagcaataaagatgtttttgatgctatagctatttctgttaagaaacgcagtttcagtgatggtgatatcgttataaaatcaaacagtgaagctcaacgagactatgctctgactatactccagacgattttatcaatgacccctatatttgatatcgtagtcccggaggtatctgttccgcttggactggggattattacttccagtatggggatcagttttgatcaactgattaatggtgatacttatgaagaacgtcgttctgctatacctggtttggcgacaaatgcagtattgcttggtctgtcttttgcaattccactcttgattagtaaggcaggaataaaccaggaggtacttagcagcgttataaataatgagggcaggactctgaatgaaacaaatatcgatatatttttgaaggaatatggaattgctgaagatagtatatcctcaactaatttgttagacgttaagcttaaaagttccgggcagcatgtcaatattgtaaagcttagtgatgaagataatcaaattgtcgctgtaaaagggagttctctgagcggcatctactatgaagtggacattgaaacaggatatgagattttatcccgaagaatttatcgtaccgaatataataatgaaattctctggactcgaggtggtggtctaaaaggggggcagccatttgattttgaaagtctcaatattcctgtattttttaaagatgaaccctattctgcagtgaccggatctccgttatcatttattaatgatgacagctcacttttatatcctgatacaaacccaaaattaccgcaaccaacgtcagaaatggatattgttaattatgttaagggttctggaagctttggggatagatttgtaactttgatgagaggagctactgaggaagaagcatggaatattgcctcttatcatacggctgggggaagtacagaagaattacacgaaattttgttaggtcagggcccacagtcaagcttaggttttactgaatatacctcaaatgttaacagtgcagatgcagcaagcagacgacactttctggtagttataaaagtgcacgtaaaatatatcaccaataataatgtttcatatgttaatcattgggcaattcctgatgaagccccggttgaagtactggctgtggttgacaggagatttaattttcctgagccatcaacgcctcctgatatatcaaccatacgtaaattgttatctctacgatattttaaagaaagtatcgaaagcacctccaaatctaactttcagaaattaagtcgcggtaatattgatgtgcttaaaggacggggaagtatttcatcgacacgtcagcgtgcaatctatccgtattttgaagccgctaatgctgatgagcaacaacctctctttttctacatcaaaaaagatcgctttgataaccatggctatgatcagtatttctatgataatacagtggggctaaatggtattccaacattgaacacctatactggggaaattccatcagactcatcttcactcggctcaacttattggaagaagtataatcttactaatgaaacaagcataattcgtgtgtcaaattctgctcgtggggcgaatggtattaaaatagcacttgaggaagtccaggagggtaaaccagtaatcattacaagcggaaatctaagtggttgtacgacaattgttgcccgaaaagaaggatatatttataaggtacatactggtacaacaaaatctttggctggatttaccagtactaccggggtgaaaaaagcagttgaagtacttgagctacttacaaaagaaccaatacctcgcgtggagggaataatgagcaatgatttcttagtcgattatctgtcggaaaattttgaagattcattaataacttactcatcatctgaaaaaaaaccagatagtcaaatcactattattcgtgataatgtttctgttttcccttacttccttgataatatacctgaacatggctttggtacatcggcgactgtactggtgagagtggacggcaatgttgtcgtaaggtctctgtctgagagttattctctgaatgcagatgcctccgaaatatcggtattgaaggtattttcaaaaaaattttga

SEQ ID NO: 14136 - DNA, 195 bp, Escherichia coli
atgcgtattcaccgtcagcatccggcatcccgtcttttcccgttctgtaccggcaaataccgctggcacggcagcactgaagcgtataccggtcgtgaagtgcaggatattcccggtgtgctggccgtgtttgctgaacgtcgtaaggacagttttggcccgtatgtccggctgatgagcgtcaccctgaactga

SEQ ID NO: 14137 - DNA, 198 bp, Escherichia coli; identical to SEQ ID NO: 4462

SEQ ID NO: 14138 - DNA, 570 bp, Escherichia coli; identical to SEQ ID NO: 4461

SEQ ID NO: 14139 - DNA, 483 bp, Escherichia coli
atgaatataataattgttacgcacaataaatatcttgagttaggattgaaaaaattattgagcaggcattctattactattggtgctgatttttttataccagataatcgtgagcatataatacacaatgatgtttttgtcatcctttgtgataaaaaaaacagtatgttaatgagttatatttttaacggttataaatttcacttattaccagtagaatcaataagtagcctatcatcgatttatgaatatatttttagtggcagattgttgtttgggtactctccacataaattaaccatgaatgagatgattatactattctattatgttttccatgggggtaatgtagcaagtattgcttatcagcttggtattagttcaaagactgtgtatactcatatatatagagccaagaaaaaaaatggaatactagggggaaatctcaaatataagtgtgcttatgaaagatttgtctgttaa

SEQ ID NO: 14140 - DNA, 702 bp, Escherichia coli
atgagcattgattacaatacaataatgacctccagcagtgaagaagtggaagaatatataaacagaaatcattttacagacaagcagaaactggagatttacagtttttacaacagaaacagaaaagataaaataaccgtaaatgtaaaaaaagagcgaagttctgatatacaaccgggaatagcctatgttcatgctttccttgataatctggaaaaactaggaaaaaatatgtctggtgcagaatacacaataatgatccgcttatgtaaactcatgcagcatggaaacctgattgccagtatatctcagtcggcactcgcagaagagcttaatatgagcaaatctaacgtgtgtaaatgctggaacaagctaataaataaaggcattctggtcaaagaagggaagcataccatgataaacgcaaatctcttcctaaaaggccagtacagaacattaaatgccacaaggaaagaatatgttaagaagtcgctgagaacgaccagtgaaggcatagaagacgtattcgtcaccgtttataaagatacggtacttacaaacagcgcagaaaaacccatcgataaaggagatgataaacctttactttctactcccgacgaagatattgactgggactctgtttcagaagatgacatttttgttgattatcctgaagatgttgatcaagaagaaagaatatag

SEQ ID NO: 14141 - DNA, 336 bp, Escherichia coli
atgacccagcgagaatcccatagagacatcttttgtaagcgtttaaaagaagcgcggcttgcagctggtttatctcaaaaaaagctcggtatcgctgccgggatcgatgaatttgtagcaagtactcgcatcaaccgatacgaaaaaggtgtacatgaagcggatatccatactgcacagaagttggcagaaacgctaaatgtaccattggcatatttctatgtcgaaaacgatcaacttgcctcagtagtgattaactttgatatattagctgaagaagataaagaagaaattaaaaacataataaacaaatataacaaaactgcatcactttaa

SEQ ID NO: 14142 - DNA, 531 bp, Escherichia coli
atgaagaagatccttcttatggcgggtgccgcactgtatctgacgggatgtggcgaaaaaggtgactttgagaaagcgatcaacgcgaagattggtcaatcgaaaacctgtttctcactgagaaacaacaatgtcacattccctgtccagctctccaaaccgcgatttgatgaaacaggggctggaacaggttctgtaatccttgacggcctcgtagagcagggcttaatggcctttgttaaaggctgggataacaacacgcttgggataacagatgaaggtaaacaagccaaaatctgggatgccaaagaaggtgtttgcattggtcgccgcgttgttgatgaagtgaaggaatggaccgagccgggcaacggtaatcagaaagttgttcgcgtgtcatatacatggaagttggcggatgttccttcttgggtggacaaaaaagcgttctccagcgtcaagggtatgaatgaacctgaagacggcatgattaatcttgttaaaaccagcaatggctggaaagcgatctaa

SEQ ID NO: 14143 - DNA, 282 bp, Escherichia coli
atgcgtatccagatctatagtaccaaatcgagatatgtttggtattgctttgtgctgcaaattgataagcaacagcagcatcaagatacttttgacttctctctaaaacaaaccctagcctataatgccaatgaggatgattttcatcgagtgataatgctttgcgataattctctgcggctttatcccattgataacatctatcataagataatccgagcctataatatagctctgcacataatggatttatggatgtatgtttttcatacgcatcaatag

SEQ ID NO: 14144 - DNA, 1752 bp, Escherichia coli; identical to SEQ ID NO: 11847

SEQ ID NO: 14145 - DNA, 600 bp, Escherichia coli
atgtcgccggaggactggctgcgggcagagacgcagggtgagattgtggcgctggtccacagccaccccggtggtctgccctggctgagtgaggctgaccggcggctgcaggtgcagagtgatttgccgtggtggctggtctgccggggtgagattcataaattccgctgtgtgccgcatcttaccgggcggcgctttgagcacggggtgacggactgttacacgctgttccgggatgcttaccatctggcggggattgagatgccggattttcatcgtgaggatgactggtggcgtcatggtcagaatctctatcttgataatctggaggccacagggctgtatcaggtgccgttgtcagcggcgcagccgggcgatgtgctgctgtgctgctttggttcatcggtgccgaatcatgccgctatttactgtggtgacggcgagctgctgcaccatattcctgaacaactgagtaaacgagagaggtataccgacaaatggcagcgacgcacacactccctctggcgtcaccgggcatggcgcgcatctgcctttacggggatttacaacgatttggccgccgcatcgaccttcgtgtga

SEQ ID NO: 14146 - DNA, 585 bp, Escherichia coli
atgatttttgtttttagcgtcatttttgtgattagtgaatttatctcaatgtggcgcactggagggagtttttttcaattaatgcagggtaataatcctgttataaactttgtatacggcatgggagtatcatatctttccatttatcaatcagtaaaactacaactattgtcagggggatataatgttacctatctattcagccagttaataataacttgctcgtcaatatttaatgttaaattgagcttgccggaaataagctatagccatttagcctcatacacagcaaacccagaactatataatcttgggttcggacttggggggagttatttagcagaatcgtttttagcatttggtctgattggatgtttcattataccctttttacttttacttaatttaaatgtattggaaaaatatacaaaaaacaaaccaattatatattttgtttattatagtgtgttgccacctatattattcacaccaagagagactttgttctatttcttcccctatcttgtcaaaagtatatttgttgcttttttagttacattatacatccagtataaaaaggattga

SEQ ID NO: 14147 - DNA, 489 bp, Escherichia coli
atggcgaagcccttctgcacccacgctgaagtccacggtctgcgtttccagcagctccgttttaatcagccacagcccggcgcggtgtgcctgcccccggctggtacagccaaaggcatccatcttcgtgacgttacgaccgtaacgggcaatggcctgcgtgtcctccacaagctctgtcgccgtctcccagccgttatccgggtcaatccagttcacctcaacggcattatggcggtctttcagggcgctgaagctgtagcggaacggcgcgccatcatccggcatcaccacattactgcggttataggtccacaccttatccgacggtcggtcctgcacgaacgtcagcgtctgcccgttccataccggcatacagcgcatcgccgagcaaaaatcactgagcacatcccacgccttgcgctgtgtggtcaggtacgcattacaggtgatgcgcggctccgtgccgccaaagccgtccggcactga

SEQ ID NO: 14148 - DNA, 654 bp, Escherichia coli
atgtacagggatgatgtacatttttaccgcaagggtaaacccaattactgggttcctaaccttaatctgaaaccagaaaataacatcacccgtgagattggcgcaggtattcaactggatggcctgcttacagacaatgaccggctgcagttaaaaggcggatatttcggaacggatgccagaaactatattgccacacgcgtggatatgaaacggatgcgttcttattcttataatgtatcccgggcccgtatctggggatgggatatgcagggtaattaccagtctgattatgttgactggatgctttcttataaccggacggaaagtatggatgccagcagcagggaatggctgggctccggcaatcctgacacacttatcagtgacatcagcatacctgttggtcatagaggcgtttatgccggatggcgtgctgaactttcagcatcagccacgcatgtgaaaaaaggcgatccccatcaggctggttataccatacattccttttcactgtcttataagcctgtaagtgttaaaggctttgaggcgtcagtaactctggataatgccttcaacaagcttgccatgaatggcaaaggtgtgccgctttcaggcagaactgtcagtctttatacccgttatcagtggtaa

SEQ ID NO: 14149 - DNA, 477 bp, Escherichia coli
atgcaacagatttcctttctgcccggagaaatgacaaccagagagcgcagcctcattcagcgggccctgaaaaccctggaccgccatcttcatgaacccggtgtggccttcacctccacccgtgcggcacgggaatggctgattctgaacatggcgggactggagcgtgaagaattccgggtgctatatctgaataaccagaatcagctgattgccggtgaaaccctcttcaccggcaccatcaaccgcacggaagtccatccccgggaggtgattaaatgcgccctgtatcacaatgccgcagccgtggtgctggcacacaatcacccgtccggtgaagtcacccccagcaaggcagaccgccttatcacggaacgtctggtacaggcactggccctggtggatatccgggtaccggaccatctgatagttggtggcagtcaggttttctcttttgcggaacacggtctgctttaa

SEQ ID NO: 14150 - DNA, 510 bp, Escherichia coli
atgagctatcgtaataaaacatatgtagcgtttgcgagtgaaaatataagttcttatcgtctaatggaggcgtggaaagcaaatgagaacattgacttcaacttttttgatgcacacgacctttttatttcaagagatacgagcaaaccagaaacgataaagaaaaatctccgcgagcgtatgaaaaatgctaaacaggttgtacttcttgggagcagcgatgcgaagagaaaaggtggtgatggtgactcattccttgcgcatgaaatagatctcattattgagtttaatctccctgtggtcatcgcaaatctggatggtgataggaaggtggatcggaattttattcctaaaccattactggatgcagaccactatactgtctctgtttcgttccagccaaaaattatcaaatatgctttagataactattgtgcgacttattcttcaagcacaaataaagggcctcatcaatatccagatagcgtctatagtggtttggatatttaa

SEQ ID NO: 14151 - DNA, 600 bp, Escherichia coli; identical to SEQ ID NO: 10080

SEQ ID NO: 14152 - DNA, 195 bp, Escherichia coli
atgcgtattcaccgtcagcatcctgcatcccgtctttttccgttctgtaccggtaaataccgctggcacggtagcacggatacatataccggccgtgaagtacaggatattcccggtgtgctggctgtgtttgctgaacgccgtaaggacagttttggcccgtatgtccggctgatgagcgtcaccctgaactga

SEQ ID NO: 14153 - DNA, 195 bp, Escherichia coli
atgcgtattcaccgtcagcatccggcatcccgtctttttccgttctgcaccggtaagtaccgctggcacggcagtgctgagacgtataccggtcgtgaagtacaggatattcccggtgtgctggccgtgtttgctgaacgccgtaaggacagttttggcccgtatgtccggctgatgagcgtcactctgaactga

SEQ ID NO: 14154 - DNA, 387 bp, Escherichia coli
gtgcgccagcaccacggcagcggcattgtggtacagggcgcgtttaatcacctcccggggatggacttccgtgcggttgatggtgccggtgaagagggtttcaccggcaatcagctgattctggttgttcagatacagcacccggaattcttcacgctccagtcccgccatgttaagaatcagccattcccgtgctgcacgggtggaggtgaaggccacgccgggttcatgaagatggcggtccagggctttcagggcccgctgaatgaggctgcgctctctggttgtcatttctccgggcagaaaggaaatctgttgcattgttccggcccctttcagtcaatgatgcgcataatggcgctgcattccggatgctgcagggcgtaa

SEQ ID NO: 14155 - DNA, 246 bp, Escherichia coli
atgaccattctggactatatcgccgccaatccggggtgtagcggtggagaaatcgccgcagcactgaataccccaaccacagccattaatgcggagttacgccgactctggcgcagcggttcagtcataagaaaagagcgcaaaacaggcggtcgcttttcttaccagataaacctgatgccgttcgggtgcggcaatccacttaccaacatgtttaaccagctactgaaggaagccagagcatga

SEQ ID NO: 14156 - DNA, 846 bp, Escherichia coli
atgacaaagccttctcattttagaacccctcttcgttatccgggaggtaaggcaaaattcttgccacatattgaacaaatactccgcaacaatgatctcattggtggatgttatgctgaaccttatgcaggtggagccggtgtagcattaggtttgctccttaacggtcttgttgaaaatatcttcataaatgatattgatcctgccctttattctttttggtttgcagtggttaatcataacgatctgttatgtgaaatgattgatgaagttcctgtgactattgaaaattggcatactcaaaaggagatactcctaaacaatgataaatatagtatgcttgaagtcgcattatctactttctttttaaatagaacaaaccgttcaggaatacttaaggctggcgttattggagggaaagaacaaaaaggaccatggaagttagatgcaagattcaacaaaaaagagttaattaaaaggattgaactaattggtgcatataaggagaaaatttacgtatcgaattttgatgctgtagattttctgctacaccaaaaagcattgctacccaaaaatagtctaatatatcttgatccaccttattatgttaaaggagcagagttatatagaaatttttataaacatgatgatcatgtaaaaatcgctaatacactacgggaaattcaactaccttgggttgtgtcttatgacaatgtgcctgaaataaaaagcatatatcatgaattcaatatgactgattatacgcttaattatactgcacaagataagaaaaaaggtctagaaattatcatttataatcatggtataaaaatccctgacatttaa

SEQ ID NO: 14157 - DNA, 1698 bp, Escherichia coli
atgattaaagaaattagttttaaaaaatttaagaaactgatagatattgacttctcattcaatgaagacatcaatataatatcaggaaccaatgggacatgtaagacaacattgcttcatttaattagcaatggtttccaaatgccaccatctcgatcacaaaattattcaaatagtaattgtgttagagttataaaatctataaacaaaatagccaaccccaaaatggaagcaattgttagggaatcaaaaaattacaccgatccggcagagggaacaaaaggcgtgttattttctattaactatttggatcatagcacactagacttcagaaagcacaactcaaaaaatccagacgaagcgcaacggtatgctatcaaaccagtatacccacgcggaaaagaaaaacaatcacttccagctaaaccagttttatatcttggattatcgcgactattcccaattggtgaaactaaagacgacgcccttacaaaaattccgttaaacctaccagaagagtatgttggttatatatcgaaaatatataatgaacttttgggcattaatattataaatatagaatcaaacaatatcggagattttaaagctggcccattatttgataccgataacccagcaattgattctaataccatatcatccggggaagacaatatattcattataatcaaggcattagttagccttaggtattattttgaatcacttattcaatccactgatcaaaaagaaagcattctgttaatagatgaatttgatgccactttacatccttctttacagataagattattagataaaatttatcaatacgcaaaagattataagattcaagtatttttcacaacgcacagtctgacattgctagaatatgcttttcataaaaaataccatgttgtctatctaattaacaatattacaaaggctctgcttttggataatcctgatatattaaaaataacaatgtatctgaaaacacaaacaaaggatgagatatacacaaggaacaagataccagttttcacggaagatgaagaagctcgctttttatttaatgaaatacttggttattggataagcaaatatccaaattttgctatagttagtaattcatttcacttaattgattgtttcattggtgcaaacaatttaaaaactatttttaatgattctcatcttaaggaaacctcgttaaaatcaatttgtattcttgatggagatcacagccctgaggatcagagaggaattatatcactgccgggtgaaaaagctccagaacaattgatatttgagcattgtgagcacctttataataccgacgactcttccttctgggaaaatcaggatataattaacaatggtttttcgaaagagttatacttactcaagatacgtcctcaattacaatcaattgaaactgaaattcagaaaagaaaagacaaccatgagtctacatccggtttaagaagaagattaaataagaaaatattcaatcagcatattgaattctttagaatgattacaagaaactggttagacaaaccagaaaatcagaaatctctccagtatttttacaatggattacgatccttattctaccgggttacaccaacaaacggcattgacagaaaaatttgggattttgactataacaaaatcattaaagaggataaataa

SEQ ID NO: 14158 - DNA, 786 bp, Escherichia coli
atgattctgtataaatatatagataagacatcattggaacgattttttaaagatggttacatctctataaaattcactccatatagtgagtttaatgatccttttgaaagctatggctatgaactttcattagatggtgaatcgcttgaaccattagctatgaggggggagatcaatcaaaatgttgcctgcttatgcctttctaaaaatcctctcaatgtactgatgtggtcacattatgctgataaacatcaggggtttgttgtagcaattgacacagaaagggcagggtttgatgatgaagaaaaatgcctaattacggcacagaaaggtgacattaattatttagagagtcgaataaaaagcaaactaaaaatcagtcaagaaaacatttatagcgctgatgtaattagtaaattattgcttactaaatcattgcattggaaatatgaagaagaagttagaataataaagcgagtggggctattacaaaagcaagagaatattttaattgacaagataactgatttaagttcggtaacagctatctacattgggattaacaataaagacattgacaaaatcattaagaaaagcagtgtgttagaagggttggttttaaacaagactgtgcgattatatcagtgtgaattcaagaaaagtacatgggatctcaccatagaagattatgaatatacagaatccccacatgctatgcagaggtggggatttgaatctttagagaagattgtaagatatatagaacgtaatcacataggtgattga

SEQ ID NO: 14159 - DNA, 261 bp, Escherichia coli
atgttccgttgtccgctttgtggcgcatctgcccgtatccgcaccagtcgtccggaaaatgattcaaacaccgtgcgacaaaagtattaccagtgcaacaacctggaatgcggcgtatgcttctcaacactggaagctttccataaattcacatcgaaacacgcctccggcgttcactcttcagaaggtatcccgtggcatgagctgccagcttcacacaggggaaacaatcagatgagtttgcctttacctcagaattaa

SEQ ID NO: 14160 - DNA, 786 bp, Escherichia coli
gtggggatcgcaatccagcaccaaccagcacatacaccggaacacactaaggtttatcagactgacaatgccacgctctgtcgtgggaatgcgctggaaatattgccgctgattgagccagaaagcattgatgccttaatcactgacccgccttacagttcgggtgcgacacacaaggccggacgcaccaaccagggcagccatgcaaaatatctgaacggcgagaaccttcaccgctttgatgggttcgcgggtgaaaacatggacgcccgttcgtgggcttactggacacaattatggatggcacaggcacaccgcgcagtcaggccgggcggttatgccctggtatttactgactggcgacaactaccagctttaaccgatgcgtttcaggccagtggctttacatggcgcggcatcattgcgtggaacaaagggagggggtcacgaacaccacataccgggtatttccggcatcagtgcgaatacatcgtctggggcagcaaaggccatttagataaatcgccttcgggaccgttcgacggctgcatgacgttcccggttatctcgtcaaagaaaatgcacccgaccggaaaaccagaagaactaatggcggaactggtcaggacagtgaatagtggcggaacagtccttgatccttttatggggtcagggacaacgggtgtggctgcactgaaagcaggacgcaaatttattggtatagaaacctgtgatcattattttgatgtagcaacacaacggctcaaaacggcgatcgaaccataa

SEQ ID NO: 14161 - DNA, 2946 bp, Escherichia coli
atgacagacattacagccaatgtgatcgtatcgatgccttcgcaactcttcactatggcgcgttcttttaaagccgtagccaatggcaaaatttatatcggtaaaattgacactgatcctgtaaatacagaaaaccagattcaggtctatgtggagaatgaagacggttctcacgttcctgtttcgcaaccaataatcattaacgctgctggatatccggtatataacggacagattgccaaattcgttaccgtgcaaggccattctatggctgtttatgatgcgtatggtgcgcagcagttctattttcctaatgtgctgaagtatgatcctgatcagttacggcagcaattagaagacacagatggagcgaataaatacccaaaacttcagatagcaagatggagagacagttatgatgtaagaggttggggggctattggtgatggtgttcatgatgatacatcagctctatcagaattactttctgttgcaacaggtggtgaaaagatagatgggcgagggcttacttttaaagtatcaactcttccagatgtcagtcgatttaaaaatgctcgttttttatttgagagaataccgggtcagcctcttttttatgtttctgaagattttatccagggagagttatttaaaattacagatacaccgtggtacaacgcctggacgcaggataaaacgtttgtatatgacaatgtcatctatgcgccttttatggctggagaccgccatggtgtaaataacctccatgttgcatgggttcgctcaggagatgacgggaagacctggacaacgccggaatggcttacagatttacatgaaaactatcccacagttaactatcactgcatgagtatgggggttgtcagaaatcgcctttttgctgtaattgagacgcggaccgtgagcggaaataaactgcaggttgcagagttgtgggatcgcccaatgagtcgcagccttcgcgtttatggtggtataacgaaagcagcaaatcagcaagtcgcttatattcgcattactgatcacggattatttgctggtgattttgtcaacttctcaaactctggtgttacaggtgttaccgggaatatgacggtgactactgttattgataaaaatacttttacagttacgacgcaaaatacccaggatgtggatcagaataacgagggtagatactggagttttggtacatcatttcactcgtcaccatggagaaaaaccagtcttggaactattccttcttttgttgacggaagcactcctgttactgagattcacagttttgcgacgattagcgataacagttttgctgttggctaccataatggtgatattggtccacgcgagcttgggatactctatttctctgatgctttcggttctcctggtagctttgttcgcagacgcatacctgcagaatatgaggcgaatgcatctgagccatgtgtaaaatattatgatggcattctgtatctgacgaccagggggacattaagtactcaacccggtagttcattgcacagaagctctgatttaggtacatcatggaattctcttcgcttcccaaataatgttcatcactcaaaccttccttttgccaaagttggcgatgagctgattatttttggcagtgagcgcgcatttggtgagtgggaaggaggagaacctgataaccgttatgcaggaaactatccaagaacatttatgaccagagttaacgtcaatgagtggagtctggataatgtagagtgggttaatgttactgatcagatttatcagggcggaatagttaactctgcggttggtgttggttcagtttgtatcaaagacaactggctgtactacattttcggtggggaagactttctaaacccatggagcataggggataacaacagaaaatatccttatgttcacgatggtcacccggctgatttgtattgtttcagggtgaaaattaaacaggaagaatttgtttcaagggattttgtctacggagccactcctaacagaacgcttcctacttttatgtcgacgtcaggcgtgaggacggttcctgtacccgttgatttcacagatgatgttgccgtccagtcactgactgtccatgcaggtacatcaggacaagttcgcgcggaagtcaaacttgagggtaattacgccattattgcgaagaaagtaccgtctgatgatgttaccgctcagagattaatcgttagcggcggtgaaacaacgtcttcagcagatggtgcaatgataacgttgcatggttccagaagcagtactccacgtcgcgcggtatataacgcactcgaacatctttttgagaacggagatgttaaaccttatcttgataatgtaaatgctcttggtggtccgggaaacaggttctcgatagtttatcttggctccaatcctgtggttaccagtgacggaacattaaagacagagccggtctctcctgacgaaacattgctggatgcctggggtgacgtcaggtatatcgcttataaatggctgaacgctgtcgctataaagggggaagaaggggcgaggatacatcatggtgtaatcgcgcagcaacttcgtgatgttcttatttctcacggactcatggaagaagaaagcacaacatgccgctatgcctttctttgctatgacgattatcccgcagtatatgatgacgtcattactggccaaagggaaatgccgctgactgataatgacgggagcatcattgttgatgaggatgataatccagtgatggtaatggaagacatcattgagcgcgttgaaataacgccagcaggatctagatggggggtcagacctgatctcttattctatatcgaggcagcatggcagcgcagagaaatagaaagaataaaagctaggttagacttaatagaagggaagcactaa

SEQ ID NO: 14162 - DNA, 249 bp, Escherichia coli
atggctagagatgatccgcactttaacttccgtatgcctttggaagtaagagaaaaattgaaattaagagccgaggctaacggaaggtcaatgaactctgagttattacaaatcgttcaggatgcgctatcaaaaccatcaccgattgcaggttaccgtgacgaagcagaacgtatggctgatcagcaagcagaaattgttaagaagatggtgtttgaaaccctgaaaaaaatgtacgagaccagatag

SEQ ID NO: 14163 - DNA, 1434 bp, Escherichia coli; identical to SEQ ID NO: 971

SEQ ID NO: 14164 - DNA, 948 bp, Escherichia coli; identical to SEQ ID NO: 2070

SEQ ID NO: 14165 - DNA, 408 bp, Escherichia coli
atggtcaatgccattttttgcgcccacggcaaattagcctgcgccatgctggaatcggttcagatggtgtacggcgatgccagggtcgaggcagttgaatttgtgcccggcgagaacgccggagacattgtggcaaagctggagaagttagtgagcattcacaatcatgacgagtggctaatcgccgtggatttacagtgcggcagcccgtggaatgcggcagcgatgcttgcgatgcgcaatcctcgtctgcgggtaatcagcggcctttctctgccgctggcgctcgaactggttgataaccaggacagcatgaatgttgatgaactgtgtgaacacctgacgcaaatcgcaaagcaaacctgcgtcgtctggagacaggtagcaacagcagaggaggatttctga

SEQ ID NO: 14166 - DNA, 171 bp, Escherichia coli
atggaaataagtaccctacaaatcattgctatatttcttttttcctgtattgccggaatgggcagcgtgctggatgaatttcagactcatcgtccgttaattgcctgtacggtgattggtttaattctcggtgatttaaaaaccggaattatgctcggtggtacgctgtag

SEQ ID NO: 14167 - DNA, 219 bp, Escherichia coli; identical to SEQ ID NO: 12572

SEQ ID NO: 14168 - DNA, 2262 bp, Escherichia coli
atgaacgagctgcctgagcgcgttagccataaaacacagcatcttgatgagaaaaaagagctcggtcatttgagtgccggggcgcggcggttgatccttggtatcatcgtcaccttctcgctgattctggcgttaatctgcgttactcagccgtttaacccgctagcgcagtttatcttcctgatgctgctgtggggggtagcgctgatcgtacggcggatgccggggcgcttctcggcgctgatgctgattgtgctgtcgctgaccgtttcttgccgttatatctggtggcgttacacctcgacgttaaactgggacgatccggtcagcctggtgtgcgggcttattctgctgttcgctgaaacgtacgcgtggatagtgctggtgctcggctacttccaggtcgtatggccgctgaatcgtcagccggtgccattgccgaaagatatgtcgctgtggccgtcggtggatatctttgtcccgacttacaacgaagatctcaacgtggtgaaaaataccatttacgcttcgctgggtatcgactggccgaaagacaagctgaacatctggatcctcgatgacggcggcagggaagagtttcgccagtttgcgcaaaacgtgggggtgaaatatatcgcccgtaccactcatgaacatgcgaaagcgggcaacatcaacaatgcgctgaaatatgccaaaggcgagttcgtgtcgatattcgactgcgaccacgtaccaacgcgatcgttcctgcaaatgaccatgggctggttcctgaaagagaaacagctggcgatgatgcagacaccgcaccacttcttctcgccggatccgtttgaacgcaacctggggcgtttccgtaaaacaccgaacgaaggcacgctgttctatggtctggtgcaggacggcaatgatatgtgggatgccactttcttctgcggctcatgtgcggtgattcgccgtaagccgctggatgagattggcggtattgctgtcgaaacggtaaccgaagatgcgcacacttctctgcgtctgcaccgtcgtggctacacctcagcgtatatgcgtattccgcaggcagcggggctggcgaccgaaagtctctcggcgcatatcggtcagcgtattcgctgggcgcgcgggatggtgcaaatcttccgtctcgataacccgctcaccggtaaagggctgaagtttgctcagcggctgtgctatgtcaacgccatgttccatttcttgtcgggcattccacgactgatcttcctgactgcgccgctggcgttcctgctgtttcatgcctacatcatctacgcgccagcgttgatgatcgccctgttcgtgctaccgcatatgatccatgccagcctgactaactcgaagatccagggcaaatatcgccactctttctggagtgaaatctacgaaacagtgctggcgtggtatatcgcaccaccgacgctggtggcgctgattaacccgcacaaaggcaaatttaacgtcaccgccaaaggtggactggtggaagaagagtacgtcgactgggtgatctcgcggccctacatcttccttgttctgctcaacctggtgggcgtagcggttgggatctggcgctacttctatggtccgccaaccgagatgctcaccgtggtcgtcagtatggtgtgggtattctacaacctgattattctcggcggcgcagtcgcagtatcggtagaaagcaaacaggtacgccgatcgcaccgcgtggagatgacgatgcccgcagcaattgcccgcgaagatggtcacctcttctcgtgtaccgttcaggatttctccgacggtggtttggggatcaagatcaacggtcaggcgcagattctggaagggcagaaagtgaatctgttgcttaaacgcggtcagcaggaatacgtcttcccggctcaggtggcgcgcgtgatgggtaatgaagttgggctgaaattaatgccgctcactacccagcaacatatcgattttgtgcagtgtacgtttgcccgtgcggatacatgggcgctctggcaggacagctacccggaagataagccgctggaaagtctgctggatattctgaagctcggcttccgtggctaccgccatctggcggaatttgcgccttcttcggtgaagggcatattccgtgtgctgacttctctggtttcctgggttgtatcgtttattccgcgccgcccggagcggagcgaaacggcacaaccatcggatcaggctttggctcaacaatga

SEQ ID NO: 14169 - DNA, 753 bp, Escherichia coli
atggccgtactgggattgcagggggttcggggaggcgtggggacaacaaccatcaccgccgcattagcctggtcattacaaatgttgggagaaaatgtcctggtggtcgatgcctgcccggacaacttgttgcgcctgtcatttaacgttgattttacccaccgtcagggttgggccagagctatgctggatggccaggactggcgtgacgccgggttgcgctatacctcgcagctcgatttgctgccttttggtcagttatccattgaagaacaagaaaatccacagcactggcaaacccggctgagcgatatttgcaccggcttacagcaactaaaagccagcgggcgttaccagtggattttaattgacttaccgcgtgatgcctcgcagataacccaccagctgctgagtttgtgcgatcactcgctggcaatcgtcaatgtggatgccaactgccatatccgactgcatcagcaagcgctgccggatggtgcacatattttgattaatgacttccgtattggcagccaggttcaggacgatatttaccagctttggttgcaaagccagcgccgattgctgccgatgctcattcatcgtgatgaagcgatggctgaatgtctggcagctaagcaaccagtcggtgaatatcgcagtgatgcgctggcggctgaagagatactgacgctggctaactggtgcctgttaaactattccgggctgaaaatgccagtcgggagtgcatcatga

SEQ ID NO: 14170 - DNA, 222 bp, Escherichia coli
atggcagacatcattgattcagcatcagaaatagaagaattacagcgcaacacagcaataaaaatgcgccgcctgaactacctggctgtatctgccactcattgttgtgagtgtggcgatccgatagatgaacgaagacgcctggccgttcagggttgtcggacttgcgccagttgccagcaagatctggagcttatccgcaaacaaagggggattaagtga

SEQ ID NO: 14171 - DNA, 378 bp, Escherichia coli
gtgtcagacacactccccgggacaacacttcccgacgacaatcacgaccgcccctggtgggggctgccctgcaccgtgacgccctgtttcggggcacgtctggtgcaggagggtaaccggttgcattaccttgcagaccgcaccggtatcagaggccggttcagcaatgcggatgcataccatctggaccaggcttttccactgctgatgaaacaactggaactcatgctcaccagcggtgaactgaatccccgccatcagcataccgtcacgctgtatgcgaaagggctgacctgcgaagctgatacccttggcagttgtggttacgtttatctggctgtttatccgacaccggcagcacccgcaatcaccgtataa

SEQ ID NO: 14172 - DNA, 222 bp, Escherichia coli
atgaaaattatcacccgtggtgaagccatgcgtattcaccaacagcatcctgcatcccgtctttttccgttctgtaccggcaaataccgctggcacggcagcactgaagcgtataccggtcgtgaagtgcaggatattcccggtgtgctggccgtgtttgctgaacgccgtaaggacagttttggcccgtatgtccgactgatgagcgtcaccctgaactga

SEQ ID NO: 14173 - DNA, 882 bp, Escherichia coli
atgcactatttaaaaaaacgcttttctttgattgaactgaatgtgtttatcccagcaatattatttattgcggtaatcattctgtgtttgacgatatatccacaagataccagccggtatataaataaaatacatcattttttaacctgggaaatgggcgggatttttctggtcatgacttttctggttgtactttgttgtctgtggctggccttctcacgttatggcgatatcttgttaggtcagtcgggagaaaaacctgacttcagcttgttaacctggcttggacttatttttacttctggaacggggggcagcttgttatatctggcctctgtagagtggatttggatcattcagcaaccgccttttggcgcaacagcaggaagcgctcaggctgctcgttgggcctctgtttatggcatgttccattgggggccgtccgcatgggcatggtatttgatttgcgccgttcctattggttggtttatgcatgttaagaaaacaaactcattaaaggtcagtgatttatgtcgtggatgtttgggagcgcgtgcggatggtttttgcgggcattgtgtgaattttttctacatgtttggtttgctcggcggcgcggtaacgtctctggcgctgggaacgccgatgatttctgccgtattttgccatgtgttccatctggatcctgccgggcagtttatcaatgtcatggttatttttatctggacgctagtaccattattcattctcttttttggacttaaaaaaggtgtggcatgggccagtaactggaatattcgtgctgacattttgatgctactggcaatactgatttgtggaccaacggcatttatacttaatcaattgatggtctcggcctga

SEQ ID NO: 14174 - DNA, 1143 bp, Escherichia coli
atgaagatagttatctcccccgactcctttaaagaatgccttcccgcatggaaagtcgctgaagcgctggcaaccggctggcgcaaggtcctgcctggcagccaactggtgtgtttgcccgtggctgacggcggcgaaggcacgctcgaaacactcattcatgcgactgacggtacgttttacactaaaaaagtcaccggaccgcttggcgaatcaatacatgcgcaatacggtattttaggcaaccaaaccaccgcagtgatagaactggcacaagcttcagggctggaactggtttctcctgtccagcgttctcccctttatacgacgtcgtttggcactggcgaacttattctcgccgccctggaacacaatattgataccgttattctatgcctgggtggcagtgctacaaatgatggcggtattgggttgatgtcggcacttggcgcatcgtttacagacgccgaagggctatcagtctctgttaatgggatggggctggcggcaattcaccacattgacttacagcacctcgatccacgattgaaaaatgtgaaatttattgcggcctgtgatgtcaccaacccactaaccggcgataacggcgcgacccgggtttttgctcaacaaaaaggggccagtgctaacgaccttgagcaactggaacagggaatgaaaaactatgcccgttgcatctaccgttgttgtggtaaagacgtcgatacgatacccggttctggggcggctggcggcgttggcgcggccttgatggcttttctcgatgctcgcttacaaccgggtatttcgctcgtgctggaagcgattcaatatacccaacatttaaaatacgcagcattggccattgtcggtgaagggaaattagatagtcagagcctgaatggcaaagcgcccgtaggcgcagccaaagttgcccagatgatgggcgttccggttatcgcaattgccgggtatatcgatgatcaacttgatctgaatgagttacgccagtgtggaatagaagcctgtttttctgtcgtcaacggcccttgcaatttaccgaccgcgctgagtcagggagaaaataatttaattcgtcttggagaaaatctggcgggatattttcgtgcgatcctgagttaa

SEQ ID NO: 14175 - DNA, 1110 bp, Escherichia coli
ttgtctggagattcagggggccagtctagtgagtacctcagctcgcgtaatggcgatgagtcaatcgataatgaaaaagagagttatgtcatttccttgaaccagtactttgaaacgctggaattaaactcttatctcaacgttacacgcaatacttattgggacagcgccagcaataccaactactccgtatctgtaagcaaaaactttgatattggcgatttcaaaggtatatctgcatcgctggcagtaagtcgaatccgctgggatgacgacgaagagaatcaatattacttctctttctctctacctttacaacaaaaccgcaacatctcctacagtatgcagcgaacgggaagcagtaatacttcgcagatgatttcctggtacgattcatcagatcgcaacaatatctggaatatttcagcgtcggcaacggacgacaatatacgtgatggcgaaccaacactgcgcggcagctaccagcactattcgccgtggggacgtctgaacattaatggcagtgtacagccgaatcagtacaattctgttaccgcaggctggtacggttcacttaccgctacacgtcatggtatcgcccttcacgattatagctatggcgataacgcccgcatgatggtcgataccgatggcatctccggcattgaaatcaactctaaccgtaccgttaccaacgggctgggcatcgccgtgataccttcgttatcgaactacaccacctccatgttgcgggtgaacaataacgatctgccagaaggtgtcgatgtcgaaaactcggttattcgcaccacgctcacccagggtgccatcggctacgcaaaactgaatgccaccaccggttaccaaatcgtcggcgttattcgtcaggaaaatgggcgcttccctccactaggtgtgaatgtcacggataaagcgacaggtaaagatgtgggcctggtcgcggaagacggcttcgtttatctcagcggtattcaggaaaatagtactctgcatttaacctggggtgataatacctgtgaagtcacgccgccaaaccaaagtaacattagcgaaagcgcaataattttaccttgtaaaacagtcaaataa

SEQ ID NO: 14176 - DNA, 411 bp, Escherichia coli
atgacggagacagcggcgattgcattgatggttctcgatcgtcgcccggaccttgcgccacctcttgggcgcgccgaacgtcaacagtttcaacggctattggtctggctggttgctaatgtctatccaacgttcactttcgccgattaccctaagcgttgggcatctgacgcacctgtaattgaatatcgcaaatcgctttatatctggctgaattcgcaattgactgctgaaccgtatgtgtttggagagcaactaacgctggtggactgttatctctgcaccatgcgcacatggggaccgggacacgaatggtttcaggataatgccccgaatattaatgcgattgctgatgctgtatgtcagataccgaaattacaagaagtattaaaaaggaatgtcattatttaa

SEQ ID NO: 14177 - DNA, 822 bp, Escherichia coli
atgcgattagcaagtcgttttggttatgctgcaaaccagatacgccgtgaccgtccactgacacatgaagagctgatgcaccatgtgccggggattttcggggaagagaaacacacgtcccgaagccagaactatacgtacatccccaccatcaccgtactggaaagcctgcagcaggaaggttttcagccattcttcgcctgccagacctgtgtgcgcgacccgggccgccggggatacacaaaacacatgctgcgcctgcgccgtaacggagagataaacggagaacatgtccctgaaattattctgctcaactctcatgacggtacctccagctaccagatgctgccgggttacttcaggttcgtctgccagaacggctgcgtctgtggtcagtctctgggggaagtgcgtgttccgcaccggggagacgtagtggagaaagttattgaaggggcttacgaggtggtgggcgtgtttgaccggatagaggagaagcgtgatgccatgcagtcgctggtcctgccgccaccggcacgccaggcgctggcacaggcggcactgacttaccgttatggtgacgaacatcagcccgtcaccaccgccgacattctgacgccacgacgccgggaggattacggtaaggacctgtggagtgcttatcagaccatccaggagaatatgctgaaaggcgggatttccggtcgcagtgcaaaaggaaaacgtatccatacccgggccattcacagcattgataccgacattaagctcaaccgtgcattgtgggtgatggcagaaacgatgctggagagcctgcgctga

SEQ ID NO: 14178 - DNA, 204 bp, Escherichia coli
gtgaaaatgaaattatctgggctggtgggtgagttgctgatctgcaactcggctatgaaacttaataatcgaacagcatgtaaattcatttctgtgtattgcagcatgtattgcaacatagtcattctggtagagattatgctctatttttcctcttatatcattcacatacttacgtcattgactcatgtagccgaagcatga

SEQ ID NO: 14179 - DNA, 282 bp, Escherichia coli
atgactgaatccgaaatactgcgattaatccgccgtgcttgtggaatcagcaagcagcatgacgaacaggccacgcagccggacagcgtgatcgccgaaaattacgcgcgtgttgttgctgatgtgatgcgccgtgatggtattgagcttaacggcgtggatatgcgcgacatacggatcagattccttgagttgctggcataccgtcgccgttctcaacaacgaagggagagcgcgaaaaacacttatcagtggaagaagccggaacggttgcggcggtag

SEQ ID NO: 14180 - DNA, 450 bp, Escherichia coli
atgacggcgcaaatagcagcttacgggcggctggtggacgacccacaggtaaaacataccagcaagggaacacccatgacactggcacggatggcggtatctttgccatgcagccaggcagatgacggaacggcgacgatgtggttatctgtgctggcgtttggcagacaagccgacgcgctggcaaagcatcacaaaggcgaactcctgagcgtggcgggtaatatgcaggtgagccagtggagcggacagaacggggaaacgcggcagggctggcaggttatcgcagacagcgtaatcagtgccagaacggtgcgaccgggcggcaaaaaaggtcaacaggggcaggctactgatgcactgaacagagcaaaacaacaggcagatcagcaaggaagccatccaccagtgggagataatgagcaatggggagatgatattccgttttaa

SEQ ID NO: 14181 - DNA, 243 bp, Escherichia coli
atgcacacatcaggaaaactgaacaaacatataaagccacattaccgcgcccttgatatggctgaacactggctaagggtggcgattaaggcaatagaccgcaacgccggggaaggatacgcgaaagcacatcccgaactgataagcgcattcatgacaacggcggctgcaaactttgccacgctgaccgaacgggagattgccgaagcggaggaagtgacaaccatcaatattaagtcctga

SEQ ID NO: 14182 - DNA, 1752 bp, Escherichia coli
atgaaactggcaccgaacttaaaaaaacagccacgcgacagactgacagaggtaatcatctttgcaggtagtgatgcgtggagccatgcgaaagagtggcaggaatgggcgggtaaacatattgccgccgacgatgtgccgcctgtcgtgctggctgatgagcaactgaaaaacatcatcgattaccggatcattgatgaagatcgtcagtgtgtgcgtgtttaccgcgcaggacatatcacagagcacagcatgacgcagattgttacgttactggctgtggctggagtgaagaccgtacacgaatacgcggggattactgacaccagccccgtggatttatccgaccagttgccgcgactcaaagaggaatgcgagcgtggggaaagtctggtgcttaatcttccgacgaagcaaaaggcgcaactttcacagatggcagacagtgaacgtgcacaactacttgccgatcgctttgatggtgtgtgtgttcatgcagaaagtgaaatcgtccacgtatggcgcggcggggtatggtgtccggtcagcacaatggagctgagccgcgaaatggtggcgatctattcagagcacagggccacgttcagcaaacgtgtaatcaataacgccgtggaagcgttaaaagttattgccgaccccatgggggagccgtccggtgatttactaccgttcactaatggtgtgcttaacctgaaaacgggggatttttctccgcacttaccggagcactggagcaccacgcacaatggcattgagtacacgccaccagtagcaggggaaaacatccgcgataatgcgccaaatttccataaatggcttgaacatgctgcaggaaaagacccgcgcaagatgatgcgtatatgtgccgcgttatacatgattatggcgaaccgctacgactggcagatgttcattgaggccaccggagacgggggaagcggtaagagtacatttacccatattgccaccctgcttgctggcaaacagaacaccgtaagcgcagagatgacatcactcgatgatgcaggagggcgcgcgcaggttgtcgggagtcgtcttatcgtccttgccgatcagctgaaatatacgggggaaggcacgggcatcaagaaaatcacgggaggcgatcccgttgaaattaacccgaaatatgagaagcgattcacgacgataataagggcggtggtactggcaaccaataacgacccgatgatctttaccgaacgggccggaggtgtgtcacgccgtcgggtgattttccggttcgacaacattgtaagggaggacgaaaaagacaaggaattaccggaaaagatagcggcagaaatccccgtaattatccgccgcttgctggctaattttgctgaccctgaaaaggcacgggctttattactggaacagcgtgacggtgatgaagctctggcaataaagcagcaaacggatccggttgttgagctttgcgcggcgctggagtttctggaggaagctcgtgggctaatgatgggcggtggtggtgacaccgtgaagtacacgaccagaaacagcctttaccgtgtctatatggccttcatggcatatacaggaaaggggaaatgtttgagcgtgaatgagttcggaaaggctatgaggtcagcggcgaaagtttacggatatgaatatattacgcgaaaagttaagggagtcacgcagaccaacgcaacgactactgatgattgcgatgcgtttttataa

SEQ ID NO: 14183 - DNA, 300 bp, Escherichia coli
atggaaatgaaaaattctggctttattgccagcggccccgctcggcctgaatttatgaacggcgatatttaccgcgataaatacggcggcacggtaacgattaaaggcgtggcagaacggcgcatcacttaccgccgtgaggggtatagctatgactgcgtgatgcctgtttatcagttccggcgtgatttttccctggtatatgccgcacctcgcagtaagcccaccagcagggaaaaagcgcggggaaacatccagaaaatgaaaagcatgattaacgcattcaggggcaaaaaatga

SEQ ID NO: 14184 - DNA, 222 bp, Escherichia coli
atgaatacagaacgggaagtcttttttaaattgttagcatgtgcagaaagttcattaactttaaataattcagcaaaagcaatattaaatatgtggcttgattgcataaatgacaatgaagatgcaaatattgcttatggcctgttgtcacttattgatgaagcagcagaaaaactcaatgacgcaataaatagtgccctgttatcaaataagtcgagttaa

SEQ ID NO: 14185 - DNA, 192 bp, Escherichia coli
atgcaggaaattacattacacgaagccgctgaacgtgcgcaccagacagaaattatttgccgccttcttgaggtatacccgaacaaaattacagatgctgatatatccgcactggcgagcctactggcgcgtctttcgggaagtgtcgctagttttttgattgaggaagaaagtaagctggtgggggattaa

SEQ ID NO: 14186 - DNA, 186 bp, Escherichia coli
gtgcttaaaaccttccgtgtatttgcccgagcggttaacccacgaggccacacaattggtatcactcagaacgtgaaggctgttaatgttcagacggctattgctgtggtgagaagcgaatcatcagaatatggcttatcacaagtcattatttcagcagtgtatgaattaaaagaggtgcattaa

SEQ ID NO: 14187 - DNA, 303 bp, Escherichia coli
atgtctgtatacaaaaatgcaaaatcgcaaatgacaacgatcagggttccccacgatgttatggagggcatggaatccgtaaaactggacggcgagagcaacgccggattcatagtaaccgccatgcgcggtgagatcgcccgccgccaggcagaaggaagcggagaaaatcccctcgtgtcttcactggatgccttagctaaggtcgaacaaatcggcatcaaggcagcggaggaaatcgggcaactcgtagccgtcgctcgtgaagaactccagcggcgtaaagccaaagaatctgaataa

SEQ ID NO: 14188 - DNA, 537 bp, Escherichia coli
atgaatctaaaaaaaatagccacaaacacaaaaaacaagataacagaaacattcaataaacttatattagaggcatctaaaacccccacacaagatgaaattaaaatacttgagagaaggagtaagaagtttaattactcctttttctcatacgcagtcacaggagctataatagttttttgctctcaaccattaataaaatacgcaaacccaatacttattttattgagtggcctgctattgtctctcaccattatccacatcagaattctttatatttcacaaacaaatagatcatggacaaaaaataaaaaaaccgcatatgttactttaattttatctgtatgtttcctagcgtcaacattgacgttgctatatcaggcttacgataataacatcacacacaaattgtactgtaaaaatatacaacaacttattgaaaaaaggatagaaacagaaaaaaacatcagcatattcagtggaatgcaatgcaccccggtatatgattactctttatttggatttaatctcttataa

SEQ ID NO: 14189 - DNA, 276 bp, Escherichia coli
atgtcgatgtacacaaccgcccagctgctggcggcaaatgagcagaaatttaagtttgatccgctgtttctgcgtctctttttccgtgagagctatcccttcaccacggagaaagtctatctctcacaaattccggggctggtaaacatggcgctgtacgtttcgccgattgtttccggtgaggttatccgctcccgtggcggctccacctctgaatttacgccgggatatgtcaagccgaagcacttagcatggctttctgaggctttcgtgtag

SEQ ID NO: 14190 - DNA, 1230 bp, Escherichia coli
atgaaaacaacagctctgcgtctttatggcaaacgtgacctgcgtctggaaacctttgaccttcctgaaatgcaggaggatgaaatcctcgcgacggtggtcactgacagcctgtgcctctcttcctggaaagaggccaatctgggtgaaaaccataaaaaagtacccgacgatgtggcgaccaatcccatcatcatcggccacgaattttgcggcgatattctggccgtgggtaaaaagtggcagcacaaattccagccgggtcagcgttatgtgattcaggccaacctgcaactccccgaccgcccggattgccccggctactccttcccgtgggtaggcggcgaagcgacgcatgtggttattcccaacgaggtcatggaacaagattgcctgctggcatacgacggcgaaacctattttgaaggctcgctggttgaaccgctttcctgcgtgattggcgcgttcaacgccaactatcatcttcaggaaggtagttataaccacacgatggggattcgcccgcaagggcgcacgctgatcctcggcggcaccggaccaatgggactgttggcgattgattatgcgctacatggacccgttaacccttcgctgctcgtcattaccgataccgacaacgacaaattgagttatgcacgcaagcactatccatcagaaccgcaaacactgattcattatctcaatgccgccgatgcagcatttgatacgttaatggcactgagtggcggtcacggcttcgatgatattttcgtctttgtgcctaatgaaggactggtgactctcgcctcttccttgctggcgacagatggttgtctgaatttcttcgccggaccgcaggataagcacttcagcgcgccaattaatttctacgatgtgcattatgcatttacccactacgtgggcacatcaggcggcaataccgacgacatgcgcgcagcggtcaaattgattgaagagaaaaaagtgcaggccgcaaaagtggtaacacatattcttgggctgaatgccgcgggcgaaaccacgcttgaattgcctgccgtcggcggcggcaaaaagctggtgtataccgggaaatacctgccgctgacgtcactcacgcagattcaggatcaagcactggcggcaattctggcgcgtcatcaggggatctggtccggtgaggcggagcaatacctgctcgcccatgcagaggcaatttcccatgattaa

SEQ ID NO: 14191 - DNA, 1134 bp, Escherichia coli; identical to SEQ ID NO: 12660

SEQ ID NO: 14192 - DNA, 180 bp, Escherichia coli; identical to SEQ ID NO: 8008

SEQ ID NO: 14193 - DNA, 600 bp, Escherichia coli
atgcagccattaccgttaaaacaaatacatcctctgtggttacgctgttgccactggattaatgctgttactgtcgcaggcatgatatgtagtggatggcgcatttataatgcttctcctttgttttcttttaactatccggcagcattaactctcggtggctggcttggcggtgcgttactgtggcacttcgccctgatgtggattctgctgattaatgccacgatctatcttactctgggaatttgtagcggacgtttccggagcaagtttttcccgctgtcatggacctcactgaaaaaatcccttacgcaggcactgtatggaaagctgcatcatacgaatatgcaggaatacaatatggtgcaaaaagtcgcctatattctgattattttagatggcgctgctcttctattgtctggtctggttttatggaaacccgttcagttttcccttctgactatactattcggtggttatgatacagcgcgttatatccactttctgtgcatgaacattatggtactgttcattattattcacctggttatggtgttattggttccgcgtgcattgttatctatgatacggggtcactaa

SEQ ID NO: 14194 - DNA, 732 bp, Escherichia coli
gtggcttattacagcattggtgatgttgctgaacgttgcgggattaatcctgtcactctccgggcctggcaacgccgctacggtttgttaaaaccacaacgcagtgaaggcggacaccgactctttgatgaagaagacatacaacgcatcgaagagattaagcgttggataagtaatggcgttcctgtaggcaaagttaaagcattactggaaactaccagccaggatacgcaagatgactggaaccgcctgcaagaagagatgatgtcaattcttcgtatggctaatccagccaaactacgcgcgcgaattatttcactgggtcgagagtacccagtagatcaattgattaatcatgtttaccttcctgttcgccagcgtctcgtgcttgatcacaacacctcccgcattatgagcagtatgtttgacggcgcattaattgaatacgcagcggcctcacttttcgaaatgcgccgtaagcccggtaaagaggccattctgatggcgtggaatgttgaagagagagcacgattgtggctggaagcatggcgtttatcattgtcaggatggcacatttctgttcttgctgatcccattgaatcgccgcgcccggaactgttcccaacgcaaacattgattgtctggacaggcatggcaccaacgagaaggcaaaacgaacttttacaacactggggtgagcaaggttataaagtcatctttcatgccccctaa

SEQ ID NO: 14195 - DNA, 1890 bp, Escherichia coli; identical to SEQ ID NO: 974

SEQ ID NO: 14196 - DNA, 327 bp, Escherichia coli; identical to SEQ ID NO: 12719

SEQ ID NO: 14197 - DNA, 195 bp, Escherichia coli
atgaatgaagccgttaaacagattgagcaggaagtgcttaccacctggcccgcggaggcaatttctcatgctgaaaacgtggtgtaccggctgtccggtatgtatgggtttgtggtgaatgatgcccctgaccaggcagaggactccgggcctgcagagcctgtttctgcgggaaagtgttcgacggtgagctga

SEQ ID NO: 14198 - DNA, 240 bp, Escherichia coli
atgaagttaaaattcatctccatggctgtattttcagccctgaccctgggtgttgcgacaagtgcgtctgccgcacctgctactgtcaatggtggcactgttcattttaagggggaagttgatgcgccgcgcgataaatgcactctatcttgtgcgataaatggcatccacgcggcgtttcattatttgaaaaagaattacatttcaggttgcgttatgacagtcccaacagggtggtag

SEQ ID NO: 14199 - DNA, 330 bp, Escherichia coli; identical to SEQ ID NO: 986

SEQ ID NO: 14200 - DNA, 789 bp, Escherichia coli
atgatttcaatacttacacctacttttaatcggcaacatactttatcaaggctattcaattctcttatattacaaactgataaagattttgagtggataataattgatgatggtagtatagatgcaacagcggtacttgtagaagattttagaaaaaaatgtgattttgacttgatttattgctatcaggaaaataatggtaagcccatggctttaaacgctggtgttaaagcttgtagaggcgattatatctttattgttgacagtgatgatgcactaactcccgatgccataaaattaattaaagaatcaatacatgattgcttatctgagaaggaaagtttcagcggagtcggttttagaaaagcatatataaaaggggggattattggtaatgatttaaataattcttcagaacatatatactatttaaatgcgactgagattagcaatttaataaatggtgatgttgcatattgttttaaaaaagaaagtttggtaaaaaatccattcccccgtatagaagatgaaaaatttgttccagaattatatatttggaataaaataactgacaaggcgaagattcgatttaacataagcaaagttatatatctttgtgagtatcttgatgatggtctttctaaaaatttccataaccagcttaaaaaatacccaaaggggtttaagatttattacaaagatcaaagaaaacgagagaaaacttatataaaaaaaacaaagatgctaattagatatttgcaatgttgttattatgagaaaataaaatga

SEQ ID NO: 14201 - DNA, 1107 bp, Escherichia coli
atgaaaatactatttgtcattacaggtttaggccttggaggtgctgagaagcaggtttgtcttttagctgataaattaagtttaagcgggcaccatgtaaagattatttcacttggacatatgtctaataataaagtctttcctagcgaaaataatgttaatgtcattaatgtaaatatgtcaaaaaacatttctggagttataaaaggttgtgtcagaattagagatgttatagctaatttcaaaccagacattgtacacagtcatatgtttcatgcaaacattatcactagattgtctgtaattggaatcaaaaacagacctggtattatatcaactgcacataataaaaatgaaggtgggtatttcagaatgctcacatatagaataaccgattgtttaagtgattgttgtacaaatgttagcaaagaagcagtggatgagtttttacggataaaagcctttaatcccgctaaagcaattactatgtataatgggatagataccaataaatttaaatttgatttattggcaaggagggaaattcgagacggtattaatataaaaaatgatgatatattattacttgctgcaggtcgtttaacgttagctaaagattatcctaatttattgaatgcaatgactctgcttcctgaacactttaaacttattattattggtgatggtgaattgcgtgacgaaattaatatgcttataaaaaaattgcaattatctaatagggtgtccttgttgggagttaaaaaaaatattgctccctatttttctgcatgtgatatttttgttctctcttctcgttgggaaggatttggattagtcgtggcagaagctatgtcatgtgagcgaattgttgttggcacggattcagggggagtaagagaagttattggtgacgatgattttcttgtacccatatctgattcaacacaacttgcaagcaaaattgaaaaattgtctttgagccagatacgtgatcacattggttttcggaatcgtgagcgtattttaaaaaatttctcaatagatactattattatgcagtggcaagaactctatggaactataatttgctcaaaacatgaaaggtag

SEQ ID NO: 14202 - DNA, 798 bp, Escherichia coli; identical to SEQ ID NO: 8888

SEQ ID NO: 14203 - DNA, 1173 bp, Escherichia coli
atgctgagcagagaggacttttacatgataaagcaaatgcgccagcagggcgcgtacattgtcgatattgcgactcagattggttgctctgaacggacggtcagacgctacctcaaataccctgaaccgccagccagaaagacccgccacaaaatggttaagctgaaaccgtttatggattacatcgacatgcgcctggcagagaatgtctggaatagtgaggttatctttgcggagattaaggcaatgggttatacgggcggacgttccatgctgcgttactacatccagcccaaacgtaaaatgcgtccgtcaaaaagaacagttcgcttcgaaactcagcctggataccagctccagcacgactggggcgaagttgaggtggaggttgccgggcaacggtgcaaagttaactttgcggttaatacgctggggttctcccgccgcttccatgtcttcgccgcaccaaaacaggatgctgagcatacctacgaatcactggttcgcgccttccgctacttcggtggttgtgtgaaaacggtgctggttgataaccagaaggctgcggtgctgaagaataacaacgggaaagtcgtgttcaactccggattcctgttgctggccgaccactataacttcctgccacgggcatgccgtccacgcagggccagaacaaaaggtaaggttgagcggatggtgaaatacctcaaggagaacttcttcgttcggtaccgcaggttcgacagcttcactcatgttaatcaacaactggagcaatggatagccgatgtggctgacaaacgggaacttcgccagttcaaagaaacgccggaacagcgcttcgcgctggagcaggaacatctgcagccgttaccggatacggacttcgataccagttacttcgacatccgccatgtgtcctgggacagctatatcgaggttggtggtaatcgttacagcgttcccgaagcgctgtgtggtcagccggtatcgatacgaatatcgctggatgacgagttgcggatctacagtaatgagaaactggtggcctcacatcgcctctgttcggcatcgtctggctggcagacagtgccggagcatcacgccccgctctggcagcaggtcagtcaggtggaacatcgaccactgagtgcctatgaggagctgttgtga

SEQ ID NO: 14204 - DNA, 648 bp, Escherichia coli; identical to SEQ ID NO: 8717

SEQ ID NO: 14205 - DNA, 300 bp, Escherichia coli
atgacaaaaacagtatcaaccagtaaaaaaccccgtaaacagcattcgcctgaatttcgcagtgaagccctgaagcttgctgaacgcatcggtgttactgccgcagccagtgaactcagcctgtatgaatcacagctctacaactggcgcagtaaacagcagcaacaaatgaattcgtcagagcgcgaaagcgaactggccgctgaaaatgtccgccttaaacgacaactggcggagcaggctgaggagctggctatcctccaaaaggccgcgacatacttcgcgaagcgcctgaaatga

SEQ ID NO: 14206 - DNA, 741 bp, Escherichia coli
atgccaacaccaaatcctctggcaccggtgaaaggggccgggaccacactgtgggtttataacgggagcggcgacccttatgcaaacccgctttcagacaatgactggtcgcgtctggcaaaggttaaagacctgacgcccggcgaactgaccgctgagtcctatgacgacagttatctcgatgatgaagatgcggactggaccgcgaccgggcaggggcagaaatccgccggagataccagcttcacgctggcgtggatgcccggagagcaggggcagcaggcgctgctggcgtggtttaatgaaggtgatacccgtgcctataaaatccgcttcccgaacggcacggtcgatgtgttccgtggctgggtcagcagtatcggtaaggcggtgacggcgaaggaagtgatcacccgtacggtgaaggtcaccaatgtgggccgtccgtcaatggcagaagatcgcagtacggtgacggcggcaaccggtatgaccgtgacgcctgccagctcctcggtggtgaaagggcagagcaccacgctgaccgtggccttccagccggagggcgcaactgacaagagcttccgtgcggtgtcagcggataaaacaaaagccaccgtgtcggtcagtggtatgaccatcaccgtgaacggcgttgctgcaggcaaggtcaacattccggttgtatccggtaatggtgaacttgctgcggttgcagaaatcactgtcaccgacagttaa

SEQ ID NO: 14207 - DNA, 786 bp, Escherichia coli
atgagtacagcactcgcaacgctggctgggaagctggctgaacgtgtcggcatggattctgtcgacccacaggaactgatcaccactcttcgccagacggcatttaaaggtgatgccagcgatgcgcagttcatcgcattgttgatcgtcgccaaccagtacggccttaatccgtggacgaaagaaatttacgccttccctgataagcagaacggcatcgttccggtggtgggcgttgatggctggtcccgcatcatcaatgaaaaccagcagtttgatggcatggactttgagcaggacaatgaatcctgtacatgccggatttaccgcaaggaccgtaatcatccgatctgcgttaccgaatggatggatgaatgccgccgcgaaccattcaaaactcgcgaaggcagagaaatcacggggccgtggcagtcgcatcccaaacggatgttacggcataaagccatgattcagtgtgcccgtctggccttcggatttgctggtatctatgacaaggatgaagccgagcgcattgtcgaaaatactgcatacactgcagaacgtcagccggaacgcgacatcactccggttaacgatgaaaccatgcaggagattaacactctgctgatcgccctggataaaacatgggatgacgacttattgccgctctgttcccagatatttcgccgcgacattcgcgcctcgtcagaactgacacaggccgaagcagtgaaagctcttggattcctgaaacagaaagccactgagcagaaggtggcagcatga

SEQ ID NO: 14208 - DNA, 330 bp, Escherichia coli
atgaagaccttccgctggaaagtgaaacccggtatggatgtgacatcggctccttccgtcagggaggtgcgctttggtgatggctattcccagcgtgcgcctgccgggctgaacgctgacctgaaaacgtacagcgtgacgctgtctgtctcccgtgaggaggccacggcgctggagtcgtttctggctgagcacgggggctggaaggcctttctgtggacgccgccttatggttacaggcagataaaggtgacctgcgcaaaatggtcgtcgcaggtcagtatgttgcgtgttgggttcagcgcagagtttaaacaggtggtgaactga

SEQ ID NO: 14209 - DNA, 600 bp, Escherichia coli; identical to SEQ ID NO: 12853

SEQ ID NO: 14210 - DNA, 642 bp, Escherichia coli
atggcagcgacgcacacactccctctggcgtcaccgggcatggcgcgcatctgcctttacggggatttacaacgatttggtcgccgcatcgaccttcgtgtgaaaacgggggctgaagccatccgggcgctggccacacagctcccggcgtttcgtcagaaactgagcgacggctggtatcaggtacggattgccgggcgtgatacaggtgaaacggaattatcagcccgtcttaatgaaccgctggcaaatggtgctgtgatccatatcgtgccgcgtctggcaggagccaaaagtggcggtgtgtttcaggctgtgctgggggcggctgttatggcggttgctatatggatgccgggggtaggaattatggcgagtaatctgctgttttctctcggtgccagtatgacgcttggcggtgttgcacagatgctggcccctaaacccaaaaccccccgcacacagacaacggataacggcaaacagaacacctatttttcttcactggataatatggttgcccagggcaatgttctgcccgttctgtacggtgaaatgcgcgtgggatcacgtgtggtatctcaggagatcagcacagcagatgaaggtgatggtggtcaggttgtggtgattggtcgctga

SEQ ID NO: 14211 - DNA, 753 bp, Escherichia coli
gtgcttcgccgtatacaccatgttatcggagagctacccacatatggttatcgtcgggtatgggcgctgcttcgcagacaaacagaacttgatggtatgcctgcgatcaatgccaaacgtgtttaccggatcatgcgccagaatgcgctgttgcttgagcgaaaacccgctgtaccgccatcgaaacgggcacataccggcagagtggctgtgaaagaaagtaatcagcgatggtgctctgacgggtttgagttccgctgtgataacggagaaaaactgcgggtcacgttcgcgctggactgctgtgaccgtgaggcactgcactgggcggtcacaacgggtggcttcgacagtgaaacagtacaggacgtcatgctgggagcagtggaacgccgctttggcagcgagcttccggcgtctccagtggagtggctgacggataatggttcatgctaccgggcgaatgaaacacgtcagttcgccaggatgttgggacttgaaccgaagaacacggcagtgcggagtccggagagtaacggaatagcagagagcttcgtgaaaacgataaagcgtgactacataagtatcatgcccaaaccagacgggttaacggcagcaaagaaccttgcagaggcgttcgagcattataacgaatggcatccgcatagtgcgctgggttatcgctcgccacgggaatatctgcggcagtgggccagtgatgggttaagtgataacaggtgtctggaaatatag

SEQ ID NO: 14212 - DNA, 306 bp, Escherichia coli
atggaccgtctgtgcgaaaactactgcggtggtatctggaatctgtacaccctgaacaacggcggggcatttatggcccctgaaccggatgactatgatgacgaaacatgggtactgttcaatgccatgaacggtaaccgcgctgaaatgagcccggaagccgccggcattgccgcctgtctgatgacgtacagtcatcacgcctgccgtacggagtgttatgccatgacggttcattattaccgtctgcgggattacgccctgcagcatccggaatgcagcgccattatgcgcattattgactga

SEQ ID NO: 14213 - DNA, 291 bp, Escherichia coli
atggtgaagaccatcgcgccatcagccagaaaaccgaattttgcagggtgggctaacgatatccgcctgatgcgtgaacgtgacggacgtaaccaccgcgacatgtgcgtgctgttccgctgggcatgccaggacaacttctggtccggtaacgtgctaagtccggccaaactccgcgacaagtggacccaactcgaaatcaaccgtaacaagcaacaggcaggtgtgacagcctgcaaaccaaaactcgacctgacaaacactgactggatttacggggtggatttatga

SEQ ID NO: 14214 - DNA, 183 bp, Escherichia coli
atgacgcatcctcacgataatatccgggtaggcgcgatcactttcgtctactccgttacaaagcgaggctgggtatttcacggtctttctgttatccgaaatccgctgaaagcccagcggctggctgaggagataaataataaacggggggcggtatgcacaaagcatctcctgttgagttaa

SEQ ID NO: 14215 - DNA, 183 bp, Escherichia coli; identical to SEQ ID NO: 1007

SEQ ID NO: 14216 - DNA, 336 bp, Escherichia coli
gtgaaagatctgggcgcagtggtgtccttcaaggggtattacggcgatctggccattgtggtggcgaaaacgtcttatgtggcagaggacggtaccgaaaaacgttatctgccggagggcatgctggtgttggggaatacggcggcagaggggattcgttgctatggtgccattaaggatgcacaggcgttgtccgaaggtgtggtggcctcttcccgttatccgaaacactggctgacggtaggggatcccgcccgtgaatttaccatgacgcagtccgcgccgctgatggtgttgccggacccggatgagtttgtggtggtacaggtgaaataa

SEQ ID NO: 14217 - DNA, 318 bp, Escherichia coli
atggtttacgagtattgccggaagcgaggcctgtatccggatgcagagtcttatccgtggaaatcgaacgcgcactactggctggttaccaacctgtaccagaacatgcgggccaatgcgctgactgacgcggaattacgacgcaaggctgccgatgaactgacctgtatgacagcgcgaattaaccgtggtgagacgatacctgaaccagtaaaacaacttcctgtcatgggcggcagacctctaaatcgtgttcaggcgctggcgaagatcgcagaaattaaagctaagttaggactgaaaggagcaagtgtatga

SEQ ID NO: 14218 - DNA, 123 bp, Escherichia coli
atgaaaaatgtactgattcttggtgctggcggtcagatagcccgccatgtgattaatcaactggcagataaacaaaccattaaacaaacatcgtactgtactatgtgcagtacgatttattaa

SEQ ID NO: 14219 - DNA, 195 bp, Escherichia coli
atgagcgacgggcagcattggggtatgattttgtggtgctctgtgacgttgtcactgctctattttattgtctatatgtgttcatggagtactctgctctggaagggattagtgggtattctgctggcccattgcctgttatttgtaatcggcgtaggacgtaaatcgctaaggaaacagtatgaacctgtttaa

SEQ ID NO: 14220 - DNA, 459 bp, Escherichia coli
atgaacagagtaaccgcgattatctccgctctggttatctgcatcatcgtctgcctgtcatgggctgttaatcattaccgtgataacgccattacctacaaagcccagcgcgacaaaaatgccagagaactgaagctggcgaacgcggcaattactgacatgcagatgcgtcagcgtgatgtagcagaactcgacgccagatacacaaaggagcttgctgatgctaacgcgactatcgaaagtcttcgtgctgatgtttctgctgggcgtaagcgcctgcaagtcgccgccacctgtgcaaagtcaacgaccggagccagcagcatgggcgatggagaaagcccaagacttacagcagatgctgaactcaattattaccgtctccgaagtggaatcgacaagataaccgcgcaggtcaactacctgcaggagtacatcaggacgcagtgcttaaaataa

SEQ ID NO: 14221 - DNA, 726 bp, Escherichia coli
atggaagaacgtgggaattacctaatagaacccctagaagtaattggttctggcggttttggccttgtagaaaaaataaggttatataactcacaaagaaaaatttgtggtctatatgccagaaaaattttacgacctgatgcaacagatcctgaactctttaccagatttgaacgagaagtaagatatcaaactgaatgcctgcatactaatattgtccaaatattcatatgccacttacagaatgctcagccttggttcgtaatggaactagcagaaacaaatcttgaagaagaaataaaaagtggaactcttacaaaggctgaaaaaatctctattgtaaaaatggtactaaatgccgtcggatggattcataagaaaggatatcttcatcgggatataaaaccactaaatgtactaaaatttaaagatggaatttataagttatctgacttcggccttgcaaaaaatgtgtcaccagatgccaatacacagctattaacacaaattggccaataccccgctactcctaaatactttgattacaacgttttcctcaacggatattcaaaacaatcagatatatattcaattggtattttaattgaagaattaaatattgatggttttgatgatataataaacaaatgtacgcatagacaacttaacaaaagattcctgaccgtagagcagatctttgaggaattggagttgaaacgcttatga

SEQ ID NO: 14222 - DNA, 744 bp, Escherichia coli
atgattagcatactctcatcatccatattttctgtaccaaaacataatggcagggaaaatcaagatagcgtgctttatccacttcaaacaccaaatggttatcttatggctatagctgatggggttggtggttataaaggaggaaaagaagcatctgcagcagtaataaatcatttgtatagtattaaagacagcttcactcatgaagacaatgtcttatccttacttaagaccctacaagaaaaggtggcatctctttcgtcagttgataaagaattagcatctgctgctacaactttaacaatgtgcctacttcacaatcaaggtctaacaattatacatgtaggtgactgtcgtgtttatttaaaaaatggaaataagctaatccaattaacaacagatcatactcaacatcaaatgttgatagatagcggtatttatacagctcgacagctcaaaaatgcaaaaggtaaaaatattattacaactgcacttgctgccaagatcccccttcaacatcaagtcataaatattgataaagatgaacttcctcttgacgatggtgttctatctctattcatcatgtctgatggcgcgcataccttttgggagcaacgcccacgattttcttaccgtacattgtcaaccgcatcaaggtttgcctccagcctaatgcgaagaatagagacaaaaggcccgactgacgattattctcttatagcggtaaatgtaaagtatttgtaa

SEQ ID NO: 14223 - DNA, 612 bp, Escherichia coli
atgattcattttcacggtggtccaataactcccgatacctgtgcgttgaaagcctggaaaggcagacacgcattcatcagttttgctaatccagctcagattgatctggcttccgaagtcacccaatcatttgctcttgataatggtgcattcacattctggacaaaaaacaaggccgtagactggaatgaatattacagatttgttgaacgctggggtaatcaccctcgtttctcattcgcggttatcccggatgttatcggcggaaccagtgaagagaatgacgccctgattgcggcatggcctcacggtaaatttattggtgctccggtgtggcacatgaacgaaccagatgagcgatttattcgtctgtgccatgagtttccccgcgtctgcatcggctcgatgggggaatacgatgcaaaacgaccgagagcgtgtcgggctaaactacgcgatcttatacgtcatgttgtagatcagtacggctacccaatcaccaagattcatgggttacggatgttaaataaagacatttttactcatgtaccgctttcgtctgcagacagcacgaacgtcgcaagaaatataggcatcgacaaatcctggtag

SEQ ID NO: 14224 - DNA, 216 bp, Escherichia coli
atgacaatagaacataataacgcccttcgcagcattgcccgtcaggctaattgtgaaatcaaaaaagccagacagcagtttccggataaaaacgtcgatgacatttgccgtagcgtactgaagaagcaccgcgaaacggtaacgctgatgggattcacaccgactcatttaagcctagcgatcggcatgttaaacggcgtttttaaggaacggtga

SEQ ID NO: 14225 - DNA, 198 bp, Escherichia coli
gtgcgcctgtttaatccagttactttgactgaagtaatccccggtcttcatgacgtgaccggggctattgaattaccggaggacaactggttttttactatgacagaaattcctcagggcatggagctaacaattaatgagaaaggcgaaccaatactaattgaggttaatcagtctcagggaatacaggccaaataa

SEQ ID NO: 14226 - DNA, 390 bp, Escherichia coli
atgtctgtagcccttattcgtgacggcgtcatccgtccatccgaaaacgattcgcatgtgcttaccgccatgctgccctcgtcctgcccgcaaaaccacgcggcgaatattctgcctttgccggatggcgcgttaatgtgcgtctggtttgcgggaacgcaggaaggtattgccgatatttctgtctggggatcgcgattgcccgctggcggaatgcagtggagcgatgcggtcaaactttcccacgatgacacgcgttcagagcaaaacccggtgctgtttctcgcgccggataacgtgctgtggctcctatggaccgcacaaatatccggtaatcaggacaccgccatcgtccgctaccgtaagtcagacgacctcggacaaacctag

SEQ ID NO: 14227 - DNA, 1326 bp, Escherichia coli
atgaaaactgatatcactgccatgtctgaaaatatagttggattctttgagaaaacaacactacgtgaccacatcaaaaaaacatggctatacaatgaaaactgcttcgttattgacttcgaatataaaggggtgaaatttgcattagatttcacagccagccagccagccagccagccagccagccagccagccagccagccaggtgtgaatgtggattttgtactacgaaataattgcccttattatactataaaaggcaacactaaaaaagaaaacatttcatcttctgctgttttaacaacagccctgcatacttctcttctaaaaatcacaacggtaattaatgaaattaattctatttatccctttgatgtctcagttgttattccggttcacaaccgagaaacccttattctcgaatgcattaaatctttaaacaatcagactatagataaaaattgttttgaagttattttcattgatgactgttccactgacaggagcattgccgccattgaatataacatttcgagagaaataaattatcgtattatccgtagagcagttggttcagggaatgcatcagcgccgcgaaatgagggaataaaatccgcaaaaggtcgctatgtgtttttcttagactctgatgattccattcactctgacttactgtccgatggtattcagatagcttataaaaacaatagtgacattgtatatttcaagcaggtttcctctacagggagaggggttcctgtacgcccatttaaggcagacacgaataaagcagatattataaaaaaccatctttttagatcattaaaaatcttcaagttctttaaaagagagttgctaatcaataacaacatcttatttaacccatcaatttcagtctatgaggatatgcttttttcttgccagagcctaactgtagctaatacgatatctatactggcaagaaagggctactactctctgaatcgccatgaagaaccacatctatctaaaacatctttctccattaaacaaagagccttggtattacaaacaggtttgatttatatcttatcaagcaataaaaatgaagcagaaatagtaaaaatgtttaatgcatggctggttatttgcgttgagcacttggcatccatattatccaaaaaaagtttaacaactaatgagaagtctcacgtttttaacttgatacataaatcactcttaccatatacagggcttgtaaatgagtcccaaatatatcccgcacaaagagagcttgtcagttgcttaatctgtggagattattcttctttttgcgaaaaaatataa

SEQ ID NO: 14228 - DNA, 531 bp, Escherichia coli
atgagtgattcgcgactgctgccgaccggctcatcaccgcttgaggtcgccgccgcaaaagcctgtgcggaaattgaaaaaacaccggtcagtattcgtgagctgtggaacccggacacctgcccggcaaatctgctgccgtggctggcgtgggcgttttcggtcgacagatgggatgaaaagtggccggaagcgacaaaacgcgccgttatccgcgatgcgtatttcatccactgtcataaaggcactataggtgcaatccggcgtgtggtggagccgctaggctatctaattaacgtaaaggaatggtgggagacaaacgacccgcccggaaccttccgccttgatatcggcgtactggaaagcggcatcacggaggagatgtatctggaaatggaacggctgattgccgatgccaaacccgcaagtcgccaccttatcggtctgaacattatccaggacattcccggctatctgtatacaggcggtgtggtctgtgatggtgatgttattactgtttatcccggataa

SEQ ID NO: 14229 - DNA, 786 bp, Escherichia coli
atgttcagtgataatgtgactaatgcgtggtggtttatctctttgtatctatttttattaatagcattaacatttattacctttggtaaaagtaatcttatgaggtttattgcacatcatttcaattttgagtattcagacagaaagttaaaaatgctcgacaaaaaatggcgcgacattcaactatttaaaataattaacggaatcaatgtatcaggcatcgaagatgtgagaatgatacagcaggggctgattgatggaaaactaaaaacatcgtatttttttcttactcgcttctggggtgacataacaaaaccaccacacataattaaaacaataattgtaattctgtccagcattatttatattctcttcgcatgttatatacacaacaaacaatccgctatagtaagagatgccataggcataccatataaaaatatgatgtactatgtttatagtgacaaagttcttttatccttcaacaataaaacagttgaattcaataaaacttatagccttgccgattgcaagaggctacgaaacatatttataaaagacacacttcctgagatcgcctgcaataagctcttacggctaaacgaggaggactcggaatggttaagtcaggaaattaaagataataacagccaaaaaaaagcattattaataatatccctcatctatttcatttcaggcctggttatatttctgtcatatacaaaattcctttacgccaataagaaggttgtagaatacaaagcatcaaataaaaatcactcataa

SEQ ID NO: 14230 - DNA, 453 bp, Escherichia coli
atgaatgagtttaagcgttttgaagaccggctgaccgggctgattgaatcgctgtcaccgtcagggcgtcggcgactgagcgccgaactggcgaaacgtctgcgtcagagtcagcagcgtcgggtgatggcacagaaagccccggacggcaccccctacgcgccacgtcagcagcagagcgccagaaaaaagaccggtcgcgttaagcgaaaaatgtttgcgaaacttattaccagtcgttttttgcatatccgcgccagcccggaacaggcatcaatggaattttacggcgggaagtcgccgaaaatcgccagtgtgcatcagttcggtctgtcggaagaaacccggaaagacggtaagaaaattgattatccggcgcgtcctctgctcggctttaccggtgaggatgtgcagatgattgaagagattatcctggctcaccttgagcgttag

SEQ ID NO: 14231 - DNA, 426 bp, Escherichia coli
atgaagaaattatccctttcactgatgctgaacgtgtcgctggcgctgatgctggcactgtccctgatttacccgcagagcgtggccgtcaattttgtcgccgcctgggcgattctggcgacggttatctgtgtggttgccggtggtgtcggcgtgtatgccactgagtatgtgctggaacgctacgggcgggagcttccgccggaatcgctggccgtgaagattgtcacgtcgctgtttttgcagccggtgccgtggcgcagacgggcggtggctctggtggtgatggtggcgacgtttatctcgctggtcgctgccgggtggatttttaccgcgctgatttatctcgtggcgtcggtgttcttccggctgatacgtacggcctgccgtcagcgttttgaggggcgggaaccatgtcaaagctga

SEQ ID NO: 14232 - DNA, 1032 bp, Escherichia coli
atgtctttttattataagttggaaacgacagatggttgtttgttagtcaataatattgagagggagcttttagagcacttcaactctctgaaggcagagtcagttaagttctcatataataaagttgcctatagagctgtaagagtatccaatcaatttggagttgtaacattaatatcagcaaatgatgcaatgcttaagagttcgaaagttgcacgagctaaagctgagatgttgcttgacggtattccttccgtgcaagaagctcaccgtaaggctaaggaagaggcaaagcaacatgttaatcgattgattcataacttggttactctcaatggtcatattatccaagaggtttactctattatccctcaagaagttatgcaggataagcgagcgggttggaaaaatagaataaaagaacaggtggctgaagacccatatgatgcaggattgtcattagttaatattgcaaaaaatacactcaagatgaaggctgagatagatgtttataatgctttattgagtgagcatccaaaaatagcattgagaaatcatagtattcatcgagttttaatgaatatagtgtatgtctttttccctgagtttacggataagggaattcgtgttgaagtggctgaatctaatgatacggtatatattgattatgagacttttcaggttgctgtgtatcatttaattgaaaactctgttaaatatattaagcctgattcgaggttggtgatttgtttcgataaaaacacagagacaaaaaaattatctatttcatttaagatggttagccttgtaattaatcctgatgagatcgataagatctttattgaggggtactctggtgttatggctaaaaagagtaatcgtgcgggaagcggaataggaatgtacagggctaaaactttgttgaaacataataatgcatctttaaaagttaagccaaattatgaaacggcacatgaagttatgttaggacgtaagtatcaagagaatgaatttgtaattgagttcttgtga

SEQ ID NO: 14233 - DNA, 618 bp, Escherichia coli
atggatttcgacccgtcttctcatcctttaatcaactgggcttttggtggtgttggtgtaactattgttgggtggcttgggagtgtcgtgtggaaaaagttcttttcaggccaaacacaggctgttgttcaggactccaaaccgattacaaatgaacaaaatgtcaatttgaacatctataatggtaacttagactcttctaagaaggatgatgccatggtggatgataaaaaagatctggattataaaaaaaacactacaaaaatactttttattgatgatgaagtgagatttaaagtagttaagattttacaaaaggccggttgggtgcatacgaagctaattaaggatgcagatagtattgatcaagtcgaaataagggaagctaagataatctttgttgatatacaaggggttgggcttgaaattacacctaacgaagaagggttgggcttggctctcgctttgaaaacaaaatatccagaaaagaaaatcattatctactccgcagagcaaacaggtgatagattccataaagctcttcgagaggtagacgattttttaccaaaggatgcagatccttatcagttccagacaattgtagaaagttttgcttga

SEQ ID NO: 14234 - DNA, 276 bp, Escherichia coli
atgaatagacagcttgtaagcgtgactgatgccgtgccttatcaggagtttgcaaaactcattggtaaaactccaagagctgtaaggggcatgattgagaaagggaaattaccagttattgagattactgaccctcagtcagtatcggggcgtgctggtgaatattgggtataccttccggcatggaataacggactaaaactggcttatgaaagccgtcctaaagagattcgtgacggctggttgatgtggttaggtctcggtgaaccacgttaa

SEQ ID NO: 14235 - DNA, 300 bp, Escherichia coli
atgtcaatagacgtttcggagaagttgaagctaatccgtgaatctgaaaggttaaaccgtaaagaattcagtgaattaactggtgtagcctacagctcactttcgagctatgagagccggtcaaaaaacgctggagttgaagccataatgaaggtcttacaacatcctagatttactaaatatactttgtggttcatgactgatcaggtagctccagaagccgggcaaattgcgcccgctctcgcacactttgggcaaaacgaaacaacgtcgccccactccggtcaaaagactggttaa

SEQ ID NO: 14236 - DNA, 663 bp, Escherichia coli
atgattaaacatacaaaacctttcttaggaatagattatgacttactagcaatcacttccctagtgattaacggcaaaacaaaagaagtaaaactacatcataagatcatttattcttatttgttaagtttatctggcacatatcaaaaggtaacaccatctttgaaaggtattggtgagcggttaggagtaggtacagatcagacggtacgccgtcatatcaaagatcttgtttcttttggatggttgaagattgaggaaagggcaggtagcacaaatgcttatattgtccttccttatgaacaagaagcccagacacaacaagaagctaccgttaaagctgttcaggaacagcttccccctacggaagataataaagagttttcttttgatgttcttgatgattgggatgcgcctttaccttgggaaatggaagaaacgccatctgatgaaaaggtagctaatgataatgaggaggatgtgttagagaattttgcctctcttatcatccaggagaaacacacaagaacaggaggggcatcatttatagaatttgcaacatcgttagcctgtaagcacaggataaagctaccaaatggtattgaggcatattttgctaagaaacatcccaaagtatatgaagactttgatattccattttaa

SEQ ID NO: 14237 - DNA, 189 bp, Escherichia coli
atgaaatggtttacaccggaacacgtcgtagaggcatttaaaaaaggtgagctaacacgacatcaagtagtaatgaatcgtaatatggcaaggagtcgaggttatccagagcgtgaaaaatgtttcgatgcagcactaaaaattattgataaattaagaaaaaatgaaaaaggatctgaaacagagtaa

SEQ ID NO: 14238 - DNA, 540 bp, Escherichia coli
atgagcaatatcggctataagcgtgtgagcactgtagatcaaaatactgatcgccagcttgcaggactaactctcgataaagtctttgaagataagctgtctggtaaagacactaaccgcccaggcttacaagcgtgtttagcctatctgagagaaggcgacaccttacacgtccactctcttgatcgtttagggcgtaacaccttagacattcttgccttagtggaacaacttaataatcgtggtgtaattgttcgctttcacaaagaagggatcattgcagacattacaagcgcgatgggaaaaatgatgcttactatgttgtcggcagtggcaacgtgtgaacgtgaactgatgttagaacgtaaacgagaagcgcaagccgtcaatcctagaaagcgtggtaaaggtaaggcagtggatcgagaaggtataaagaaagccctttctgatggcgtgtcagtgcgtaaaaccgccgagatctttaatgttgctccttcgacggtacagcgaattaagaaggaagaagaggaggcgtaa

SEQ ID NO: 14239 - DNA, 348 bp, Escherichia coli
atgaaaaaactagtatttgccgctttgttaattccagtgatgggccacgccacaaccttttcctgtaaagcaatacaggaaggtcatattgactcgggaagtcagaaagtttctgtagattcaacttttgatatacaagataaaaaaatgaccatacatcttggtggtaagacttggagacttgattttataggtcaaaaaagcatcgcaaaaatgtatgccacacctgatggaggggttgcagtcacatacattgataatgggagtcagcctgttttcgttatgagaccgactaacaatgatgggcaaactgctgtctatacgcttagcctatgttctgaaatttaa

SEQ ID NO: 14240 - DNA, 1572 bp, Escherichia coli
atggttgctcgttctaaccttgtaaatttagatgcactgattaagcgtgctgatttaggtttaaagatccaagataactcttcatttgaaacgctaaacagtattcctgcaagagaattgaaatcaggaagtggaattgctgcgcttctgagaaaaccagatttccagcgtgaaacaaatcattgggggcctgagcaggttgtatcgcttctcgaatgctacatcaatggtgatttgataccttccgttattctttggcggtcttcaacccatctttttgtgatcgatggtggtcatcgtttaagtgcgttacgtgcttgggttgaagatgattatggcgacggtcatatatcccatcaactttttgggcatgatattcctcgtgaacaacgccgcgctgcagatagaacgagaaagcttgtgaaggagagggtcggtagctgggaatattatcagaagttgcttgccgatgatgcttcattgaccgaggaacagcagagaagaatcagcgtattaacatctcgtggaatctcagtccaatgggtagtgggtgatgtagataaggcagaaacttcattttttaacatcaatatgaagggaactcctcttgatgctatcgaagagatgcttctaaaaaatcgcaagaaaagtattccgatagcaacccgagcaattattcgtgccggtagaggtcatcgctattggtcggggtttgatcagagcattgcccagcaacttgaagataaatctgcaaagctgcatcgtttgctgttcgaacctgaagttgatcgccctattaaaactcttgatcttccattaggcggttctaggggggtcaggacagcgatccaagttttgaaagatttcttactgatcactgattgcaaccagaatggtgttttgaaaaaaatcgaagcctaccctgatgatgcgtcgggtgctgatacgttaagaatcctttccaaagccacatcattaagcaatagaattacaggcaatggcgatggtagcttggggcttcatccagcgatttatttttatggtccgactggaatccactcaacgccaatgtttctaggaactgtgctactggtggcaaaacaactctctaacaataatggtcaattctttaaagacttcacaacaatcagatctaggcttgagagaataatgatcgaatttaaggacttgatcgcaatgatagtacaaaaaccaggtagtaatgtccgagtggctcgctactgtgattttttaaatgcggtgatcaaatcactcaagcagggagagaatattgatgagagtaagcttatcgagctggccgaattggaggggagaatactctctggagattttaagagaacatcagcaaaaatcagcgatgaacaaaaaagtaaggtgttcattgatgtggctctgcgcaacgctttgaaatgtccgatttgccaaggttaccttgatactgaaaagtcagtttcttatgatcatatcgtacgtgtccgtgagggaggagatggtaattctgacaatgtacagttgacacacccttactgtaaccagtcagtgaagtgttaa

SEQ ID NO: 14241 - DNA, 717 bp, Escherichia coli
atggaatggttaagtgaaattcgcaaacttcgcgagaacgtacctgtcggtatccaggctgccaggcgtttgttagagaggactggcggtaatgttgatgaagccattaagttctttcatattgaccaagtcaatatattgatggcaaaagcagacatcactcatcaggaagcagagactgttttactggcgacaaactacgatatggcagaagctttacggcgtattgctgaacaacgctatacgctgacggaattgattttgcgtaaaaataagaatgccggagatgctttaagtaaaatagcgttagcgatagagtatgagtgggaactcaaacgtaagttctggtttagttatgcagatattcgaacattacctccacttttacaaacctttatgttggtatatgagtggcaggaatatgtcgattgggaaggaatgaatagtgggatattctttgaaagtgattatgttctccagcaattgcagacgttgggattgtttgagcttgtaaaaaaagtgtctgttgcaagaatcagatatggggaattaaaagagaaagttaatacttttaatgaaattacaaatgatgaaatattcaaaatactgataatgcaatgtgaccaacttgcaagagatgttgactctgtattactgcaatttgtgaaagataatattgatgcttttccttgtcgccataaccaacacgatctataa

SEQ ID NO: 14242 - DNA, 423 bp, Escherichia coli
atgacacctttagaacgcattacccaacttgttaatatcaacggtgatgttaatgatcctgataccctgcgtccattgttatctcttgaggatttttttagcggcaataatatcgtcggttcgatatgttgcaatgtgactccagaacaatctccgcaaactatctatcaccatttacagaaaattcgtgagcgtaacgatgtcagtgatgttttggtagagattacgatgttcgatgacccagactggccctttagtgaaagtattttagttatcacttctgcttcaccagaagaagttcagtgttggtttgtagaagaaattgcccctgatgagtgttgggaaggatggtcagaagatacggatcatagatgggttgaggtccctgcgggtatgcatccggttatttgttggtgggattaa

SEQ ID NO: 14243 - DNA, 999 bp, Escherichia coli
atgatggaaggtcaattaattttctgctcggactcaatactacgctttcgctctgactatgatgaaacgacggcccttccgttactctcaatacagaaagccatttcagataccgatcccttttttcttctcaggttctttcgtcataccgtgatgattgaagaaggaacaacgctggcgaatatcttttttgccattgagccttggaaggaactgctaaccgcttatttggatcgggatgttggggcctatattggcgaagtaagaaaaccatccaaacccactgcatgggatcttgagtggattggcattgatcgccgaagctctgtttaccgcgcatatcagcatcaggatatgggagacggtgaggattttacagcctggctcaatcgtgagcggatccccattgacgaatttgatatagaaagtagctgcgatgcttctggttttatcaaaggtgataaggaacgctggagccttagtgaaaatgtccacgaaattaaaaatctgccagtaatcctctataacaagcaaacgctgatgaccttgcagaaggaggaactgctaagagaaagtgtttctggggtgagtagtaacgactgtagtcgttttgtttatggtgatacttctttttccttctatgaagtgatggaagctattttcattagtggtttgtttttccatactccaagtgctgctacaaactgctttgaagggttaaaaaacagtcttgatggactggaaaatgaagcgtcgaaagagactgaacctgatcttacagacagtgacgaagagaaaccgctaaaagtggaagtcgccgagggagcctttgattccctgattactcacatggagtctgaaactgaaaactggcagcttatcaagaaacaatgccaaaaagagggctctttgcccgtcaggattggggttattacatcggcaaagccgccggaattgcgcttgtgtggagagatttaccgggatagcggtgaagtttaa

SEQ ID NO: 14244 - DNA, 1401 bp, Escherichia coli
atggacaatgtcgcacctacaccacagcagtttactagcccactaagctgcatactgttaaaaatcagtaaacaccagccgaatttgcatcttactcctaatgagtttagctacctggcggcgatggcgatgtggggtatggaggagtcaggtgtcgaatcaaatagtgagcattactttgtacaatccggctacgatgagaccacctgtcacagcatcatccgttacgttgatgaaagaataaatgaggatcctaatacctccgatgttcgagttaataactttctgaaacgagcgctggaacagggattgttgtcactggccggaatgtctgtcgcagatgtgggtggaacatatcgtctgactcagttggcacatgatttgttaaaacctttccaacaatctgatgaattagaggataaagaaacattaagccaacgttatctgagaattgatcaggaactgtccagtttaaatgccgccagcgaacgagaaaaaaatactgatagtgaatggttgatgaaggtagaactttttttaccgagcttgaaggatctgctgacgggtgtttttaaaaatcaggaattcctcatctctaaatttcattcaatgcgctccgagatacaaaccgaaattggtatttctctggaaacggaaattcagcaacttctgaaaataatacgtacgctggctggtcagatcaacgatttgagaatgttagtaatgaaccgtgccgatgcggtattaatgcaactggaaattttgcaaaatacagtcgtacaaaaaggtggagctcagcgattaaaaaatacattatcctctttgtttggttcattaatggatgttcgggaattcgctaatcattccttaagggatttatccggattctttagcagcgtgctggaccgtatacgcatccgtatcgcgttagatcccaatgctaatctggggtatttaatcgatcgtactatcgagttgtttggtcggtcatcatggtcgttagcattaccttcgaccgttaagctaatgcaattacgtgaatgggacacaccgccgcctccggcggataatgcgttgttcctcgatgataatgatgatgaagaattggtgcgggagatgcctgcgtttcagttagagagtttcgcaagggagtttgttgaaaaggcattaagtgataataagccggtgagtaacgtttctgttatcagaaatattttaagtaaattcccattcaatgaaacggatcgctttcgcttggcacagtgcacaataaaagaactgatgaaacagagtgacaatattcaggatgatatctccccggaatgggttttaatggatgagtcagcaaattacgaaatcgaagagcaatggctaatttcacaaggtgatctcaatgactga

SEQ ID NO: 14245 - DNA, 774 bp, Escherichia coli
atgactgagcttgaatctacacagggtgatcaatttaatacatttctggatgtgatgaaatcacctctattccccgttgtggattataaattacgtagagggattaacatattacctgtggattatatgctgtattcatttgttaatcaggcatttaatccgcttagtgaatattatgactgtttgtctttatctttatgcttttccaatgaatctgtttattacttactgcctcagcgccgtggaaaaatacccttagagcgatttaatgagttgcagatggtcactggtttgattattgttgcaatggaactcgaaaaacagcttagccaaaaagagtggtttacaacgaaccaactacttgagcgaatgagcaatcaattatccgaaaccagactgctggaattatttcgccgtcgtccaggccaacagacccaatacgatttatctaaaatccaggatgaaatcagaaagtcgctcatagtattcgaacgctatgcttttattcaactctctaaggatcggcaatccttccagacaacacccgctatctatcgttttattgaaccgttgcgaggattacaacaagagtcagaaattccccaacgcctggctgaactgattcaggaaggttatctggtcaatattgatgagaccgcgcgggatagtgtagatgaagatttggcagagagcgatcgtatctctgccgaagaagaaatggatacaacgggtgatttatttgcttccgggactcatgaaggggaacaattgtga

SEQ ID NO: 14246 - DNA, 4584 bp, Escherichia coli
gtgaaccactaccctctgatacgtagccttagtattgtcaacattaatggcattatggcccgaacgttaaatctggtgaatcctcacgcactgcgtacatcgcgacagtatggcggtactgtttcattgttaggcaataatggtgcgggaaaaacgtctttgttgggcgcgtttatgttcagtcagatccctgatattcgctacattagcttagggactaaggatgatttcaaagtttcaacatcaataaaagatagcgaaatgtttccacgcttagggcagcccagtattgttgctctggagattgaggcccgagggacaggccaacggcatctgtacgtcgttagggctgaaaaaaagacaggaacaacattagatacccagctattttgtttgaaacttcccgatagcgttaacccactggactgtttacttgctcgtaaaggacaagtggctcacgcggtaacgatagatcagttacgcgataaagcagcactattaggatgcgcgattcagtcatttaaagacccaaatgcctacatgttggcactgtttcagcatggtattttaccccgggcctgccagtcatccgatgataaataccgtctggcccagatccttcattcggcaatggccgggcgtctggataaatcgatagaaaaacatctcagcgcttatttaatggcccatactcgcgggaatatacattccgtagtgaatatggtgcatgagtccatgattaaagtcagacttacgcagcaagatctgcaaaattatcaaaaggattatcaattttttaattcattacttacgttgagcttatcattttcagccaatacgtggtcagttattgagaaaacactggcgatgaatgatgaagagcgcgcgactactcagagagaaaagtatcggattgaacgtgagctggaaaaaattgaggaaaccctgagtacactgaggcgcaaggaagacgccataaaatcggaacagtcaatatcgcaacaacagatgagtgatattgagtcccggttgttatctgctcgtgatggtaggatatactttgatcacgagcaaaaagcaattggcgaactgagtaaactggaaccgcagttagagagtgcagaagaagcaagcaaactccagcaaggtattgttgatgagctggaaagaacaaaaagtgagaatgaagagagccagctacgcacggctaaacagttatctaatgtcgtgtcgcgttatgacattgctcagaaaatggcatcgcaatataaccacgcaaaacagctctatgatgagattaaccaatggaatatgacttttacgctgtctgaattaagcgcattcattgaacaactcgtgaagcaggaaaaagaggcggaaaatgccctcaaccatgtggagcgtcaattacgatctcatcaggatatcctgaatgcttatactttcgccgcaaacagcgcacgaaaattgggggatgatatctctcctccagacgctcagcgctggtttagagaaaaatgtggtcaactggcaaaatggtgtatcgaagacgctcaactgggcgggaggcaacagcatcaaaagacgttacagaacgatcatcaaaaacagcggcgtcttcagcaacggcttcgtgatgcaggtatgctatcgttgccattgaacgatgaggacttcacgcagcaactggcgatgcaacaagagctagaattaaacttaaatgaacaaaatgaacaattagcacaacgtaagagcgaagttcaggaacaaattaatcagcttgacatcgatattgtacgctatgagcaacagagtcagcagtggcaccagtatcggccatcagtgagctatttacgcactatttttcctgatgatgatttgacgccgcaacgctgcgaacaacttattcttgaccatgtgttacacgttaaatcacttcgacagatagtcattggctacgaaacggaaatcaaacaatgccaggggcgtcgtgacaaactgagtggaagagaagccggaagccttgagtatttacggactcttgccgctgatgtatcgggaatatcggttgctgaactgtacgcagatatcgaagtacaggaggccgggtattttgaggcggcattagggtcgttaatgtttgccatacttgtcaatggtgatgtcgatgatgccgccagacaattgcttacacaatacgatgagcaatggccgcttcccgatattttgttgatcagtgtaacccaaccgatagacgttttgcgcaacgggtcgttcgagtcggaattactttttaaagatatcaccgacgaatataatacggtggagagtatcctcccgccctggtgtgttatcgatgaaccgcgataccgccgcatcagccagatacgttcagagcctgtattaggtgataaagcccgcgaagcgctaattcttcaattgggccaacagattcagctggcagaagaaaaaagcgaggcgctggaacgtgagattgaagacgttgaacgcagcaacgaacatcttaaggccgttagcgcggctccctcatttatctggagtgacgaaccgccgctggaggatgcacgccgacagcgcggtcatcgtcttactgccctgacagatatcgacgaaaaacacagaagcgtgtccagtcagtggaaaaaaaattgggatctcttgcaggcgctacaggaatgtgagccagacagtaaaatcctgtttcgggattatcctcaggagctggccgggattgctgatcagataaagcgggctgaagctgccgggcgtgatatcaaacgctatcagtcgttaattaatcagatagaaaaagagtatccattgctacgggaagaatacccggagaatatagcgcaaatacgtcagcaggttgagcagaatgagaaaacctggcaaacctccgcaatgcgcgttcgactggtgaaacagttagacagtgtgcgtgctcaccttaacccggaatatgttaatgctcagaaaatactggaagatgaagcacaagcgcaaatcctcttgtcaggcgatcaaaagcggctggaacaggaaggcgactggattaaacaagaactcacaaatgcaaaaaaagagttagctaaaacagataagttttatttagatataacatccgcgattactcgccaccgccagaatcgtgatgatgcaaaaaatgacctggataatttgccatttccttacacatttggcctggaaactaatcttgcctcacaactggcgcatttacaggacaaacttgaaaaactgaataacaatttaagagagtacaatacaaaaacgtctgagacgcatcagcaacgctcaaaagaagaattaaacctgacaaatcaaaataacaaactcactaccctgacagaagaaattgaacggataactcagcaacgcaacggaattataagtgcattaaaagccgatggctcttatggagagctggaacctgaaatgcgcgaaatgctgataaatggtaaagcgccatcaccaagagcgcttttgctggtcaatcagccattactgactcaactgacccggttaactattgaatattctatttcttcagccgaccccttcatgcagcaattagcgtcctgcggtcaggatacatctgatatcgctgaagtctgtgccacgctttatagccgcgcagtggcgctgtttcgccgacgtgcccgtcaggatatccagcgcaccacgcaacctcgggaaatgctgcaggccttgtctcaggcagcgaaagatgcacagaggatgttggcggaaaccgaagccgcgttccagatgcgtagggatgaactggccgacgcactatcacgccggatcaacgatgaaaaaagggcgataagccggttaagcgctgaacttaccggaattggttttgggcaggttgccagtgtgcgtctggaagccaggacggttaaacattttcaggataccctgaacgcacttaaatcaggcggttatggcatggacgatctcttttccacggcaggaaccgttaccgaagcgctggctggcctgtataaaaaaatcaatcaacatgaaattgatggttcacatttgctggatcaccgtaactacctggatgtaaaaacgctaatacagcgtcgcggtgcagagcaatttgaaccactgaacgcttccagcctgtcaaccggggaacgaatcggctccgggctggcagtgctgattgccgtgctcaggcactggggacgcagctctcatggcaataaagaacctttcactttaccactggtgatggacgaggtttcccgtctggatgccgcctctcaggcgacagtccacgaactggcggtaagaaccgggtgccaaatgttggttgcggccccggaaacgttagggaaaattaccggaaccggctaccagttggtgcgcatagtcaggaatgagaacacgggagccaacgggcaaactgttacgcgtcatcaggtgaaaattaccggtgtccgcgacgcccggcagttgccgtttgacgttgatagctatctggctacagcagagaaggctgaaagtgacgaggtgaaaacaatttaa

SEQ ID NO: 14247 - DNA, 1008 bp, Escherichia coli
atgcataatgaattgtttcagttaggtttcccggtcagtgagcttggcgatattcttcagcaactgaaagaacggcaaatgatgttcgagaatgctaaggaagagtcgctacgaaattatctggctgagctgggtattatcatcccttccacgcgcaatcgctggcggctggtggaaagtgaacgcctggaaattctgctctcgcaggtacagcaacagatacaacaacagatcattggcagaaaagagcatcgtccggctatccctcgccgaatgcagaggatccatcataaatcagcgtcagcatggcgaggtaacagtaaagcaggtctgatccaccccttagtcaaagggcagaccgttacctatgatgatgtcttacggtttcgtagtcaggggacggagctgctgttaacgtttacctgcaataacagggaaaacgttttgtttgccgatgatgagagtcgatggcgttcggaatgttgtctgccagaacgaatgctacttgatttactctctgtggacatgtcatcggcgcaattgatcatgaccgtcgaaaatttaggtgcttatgttgatatgccgcttgtcgatggtttgatactgatttttgctcccggcctgaattatcaacccgcctgccggtggatttctcagtatgggcagaatataccctgggtacattttcccgatcttgatccgaatggtctgacgattgcccgacaactatcccactcattagcccgaccctgccggatctggttaccggacttttggccgtcagcacataaggttaatgacatgataggggccggaaaatatgcctgggataccgcgccggattgccctcaacttacgcaattaatgcaggaacagcgctggattgaacaggaggtgctggttgtggattaccgttttaatgcagcgatgcacaggttggtcaatcattcaggtgatgagatagtacttatcgaatcgacggaaaactcaatttcacaagatgtgtag

SEQ ID NO: 14248 - DNA, 1803 bp, Escherichia coli
atgattgatagattagaacttacaaaaaacgtccagttttatgaccttaaaattcctctcgacaatttggaaaggagaatgacaaatgacgaaattctgagtatcctgaatgctgccgatgataatattgaaccggattctgactatctgatcaatgatttcagaatggaaaggaatttgatggatgccgacgttaactttatttattccctgcgcgttttctctacactaagacctgtctattttatgggggaagctgaaggcggtgaggatttttacgatacaatatatgcgttcatattgattctggaatttgataacagcattgctataataaagaagagctgtgcaaacatatctgataagttagagaaggattttaatctaatcacaagtcactcattggcaggaacatttaatgattctgatgtttcatttcagaaaatatccacgcgaagcatgacgaattcggataaagctatcaggagtcgttcttttgaatcatcagatcttaagggagctttttctacacatgctgctggcagatctataccttactatttgaaacttcgacaaggcccaacaattaagacaatttcaggcagtggcagattagttgaagcatcacagagaattagtttcgatgatattgcctcatggtcttacaatcaattatgtcttgtcagacaaggtggcggtgtcaaagattttttaagttactttgcgcaacagaaagaattaaatgaagtcatggcattaactcagccgaacgcactcctcattgaaagtacagctttgtatgaaaagatagagtctgaagggctaaggattaaatataaacttcctgacggtgaagattgttatctatctgagaaaaagctcaataagcttttccaaaaactcgaaaaagtttatgaaatcaaaaatgacttgacgcttgattcagctattggcagtgcaaaaataaaaaggaataataaaacgcttacaatagagtctactatccttagacggttaaaagttgtatcgaatggtaaagagtatacgctccagagttttatctttaaaaatggattctatagcataacattccaggatcctcgttatatgtattttatggggaattgtttcgaggatgcgtctggaatttcagaaataaacagcattttggacattcttatgcctgttgacaatatggataaggtactaagtgagaaaggcacttttacaaaactgagtagtaagttctctgtagaatcaatgtttgatttggttgaagaaattcataagaatgatgactatatattttgcgacgatctggggaacgaatgggctgaccacataacgtttaataaacaagattcctgcatcagtttcattcattcaaaacatggctcgaagactacgtcagcaagcaagttacatgatgttgtcggacaggcaattaaaaatctggggcacatgtattttagtgcgcctgatcttttagataaagttaaaaataaaataaagaaaaattatgtaaataacaataccggaaccaagatcaaaagaataagaaaaggcgatgcaagaaaactcaaaaagtatcttgatgatttatcaaaagatgtcaaattgcacaggaaatgtattttgagctgttcatttatttcaaaaagcgaagttaagcgtgagtttggtaaattacgacgtaatcagccagtaaagccgcatgtgatacaacttttatggatactgtcttctttttctcatgcggttaaagaagttaatgcagtaccagtaatatattgtgaaaaatga

SEQ ID NO: 14249 - DNA, 1902 bp, Escherichia coli
atgaaattcatttcccctgagcaatggcgtccgaaagagattgatgatctggaacccaacgcatggaatgctttaagaacatccggttctgtaagcattatcgccggaccgggggcgggaaaaacagagtttctggcccaaaaagctgcctatttactggaaaccgggatttgcccaccgagccaacaaattttggccatttcctttaaaactgacgcagcaaaaaatctcgctgaccgggttaagttacgttgcactgaggaactgagtcaccgtctggtttcgatgacattcgatgctttcaccaagagtctggttgatcgtttcagattagcgcttccgcaggaatggagaccgtcaaaaaagtacagcatcagttatcccaataagagagatgttgcccagttctgggcgcgacgacagcaccgcgtatcatccagtgatgccagagatattgaatacgaaacccgccatatggacgccgcttcatttgagtctcatgttgttggttcatatcgaattccggaaaatatgtctccaccacaatcaatcaaacattatctggtgttctggtggcttcgcgagcaaataaaaaacgagaacgaagaagaatcagcactgtcatttatgacgatcaatcggttagctgagtatattgttcgctctaatatccatattctgcgggcattaaaagcaacttatccttttgtttttgtagatgaatttcaggatacaacctacggtcagtacgattttctactgtctgcttttggtcaggcaaagaccacgataaccactgttggggactataaacagcggatcatgggttgggccggtgccaaaacagatgcttttcatcagtttgagcatgatttttctgctacccgatatcagttacagttaaaccatcgctcatcgccagaattagtcagactccagcatattgttgcaagggaaattgaacacggcgtttgtatggcccatacaaaagttccccaaagaatagagaacggatgtgcttttattctgaatagtcgctctgttgcgttggaggtgaattatattgccaaatggataagtcgaaatatgcagtcaagagaactgcggcctcgtgattatgctattttagcgcgacaaaaaccagaaaattattatgatcaattaaatcagtcattgattaattatcatttaaaactaagaaatgaaagtgttaaaattggcaacacaacacttcaggatttgctgacagaagaattcaccattcttttttcaaatctacttaggtttgtgatcgggcaaaaagaaccacggatctggggacaggtatactcaagtattgaacaattaagaggtactttgccagatgatatccgcgcgcacaaaacaatagaaaatcagcttgttaatttaaaacattctatgcaagctcttcttgagcaaccttacagtacaacgactgctcaacccgtcctggagcgcattatttcatttatatccccttccgatatgcgtaaagcgtttagccgttataatactggtgatcttttgaagattacgctagaagcgttggaaattcattttttacaatgtgtcagcagtaccagtaactggcaagactgtgtggatgaatttgatggagtagatcatataccactgatgactattcataagagtaaagggcttgaatttgataccgtcatttttatagggttggatgacaatgcgtggtggtctcaccagccaggcaatgcagagagtatggcgacattttttgtcgctttatcccgggcgaagcaaagggccgtgttctctttttgctccgaacgaggagaacgccaaaagatatcagatatttatgctttattggaaaagtcaggtgttaaagagtataatatcaattaa

SEQ ID NO: 14250 - DNA, 1971 bp, Escherichia coli
atgttgattgaatcagtgaaactgaccaattttcgtagttttggcccccagggccaacaaatcaagcttgatcccatgttaacaacgctgattggcgcaaatggtacgggcaaaacagcagtgctacaagcgcttcagcggctattcggcgtgaccagtgaacagcgaactatctcccgacaggatttccatgttccgtccacagaaaccgatttacccaacgctcgtaatttatcattagaagccattattgcttttcctgaactggatgacgcacaaggagaccattcggccataccggagttttttagaagtatgagcatcgcggatgagcatgggaggcttaaatgtcgtttacggttagatgcccaatgggatgatgatggaaccattgacggttatgtaaccagccagtttcatgccataacgtgttggggtaatgatgaacctgatgattcggatttccacaaggtgcgccccgccgatcgcgcaaaaatccagcttatctatatccctgccacccgttcggcaactgcgcaggtctcctcgtttcttaaagggagattatggaaggccattaactggtcaacgcaagttcgggcatctttcgctgaaaaagcgcacgagcttaatagtgccttcgaaagtgagtcagcaatcgatgctatcacgggaaggctgacgcaacgctggcaacagcttcattcagccggtaccgacagcacgcctaaatttcgacctgttgatgtccgttttgaggagtttgtcaggaaagtggatgttttgttgcaccctgatgaaagcggcagagatcgcagcatcgaagaattaagcgacgggcaaagttctctttttcatatcgccatgacttcggcaacgcttgatgtcgaaagggaaatccggctaaattcaagaggttctgcgtttctctacgatgacttgccattgccctcactcaccttattggcgcttgaggaaccggaaaataatctttcaccacattatttgtcccgcatcgttagtcaacttaatgagctgacaggaaacattcatgcgcaagccattatctcaagccattcatccagcattctggctcgaatcgccccaactcagataaggcatttccgattagacgttgtttcaaagaacactattgtaagagcgctgacattgcccaaagaggataatgatgccgcaaaatatatccagcaagcagtacgcgcctggcctgaactttattttgctaaagtggtggttttgggtgaaggtgcttcagaggaggttattttgccagccgtggctggagcgatggggactcctattgaccgatcttttgtcgcgatggttccactcggagggcgacacgttaaccatatgtggcgattgctcaatgacttgcagatcccctttatcacgttgcttgatttggattggggacggcatggggggggctggggcaggattaaaaatattatttcgcaacttattgaagttggaactgtgccacaagttttctttcaaaatgtagatccaaggggatataaatataatttgttagagttcgacacgtactctccttcaaacaaagcacacattgatagctgggtcgattttttgaaacgttttagtatattcttttcaaacccattagatatcgattactcaatgctaaaagcattttctggttactatcaaacaccgccagaggaaaacgctagtgggccgtcaatggcgggagatcccagagatgccgtcttagggaatgagggaatacctgcattctacgccgatgatattcatattcttcgctggtatcgttatttatttctgggacgtggaaagcccagtacacacattagggtattgggccagatcccatcggatcaactggcacaaaatgcgcctgatgagctaaaagctcttgtccaaactcttcaacaccacttaagcaatcggggcagccagcaatga

SEQ ID NO: 14251 - DNA, 4407 bp, Escherichia coli
atggctaattatatcgacgtagatcggcgtttttataagcacaccaatccactggaagagatccctaagcagatctacgttgactggtttgaggataacggaagcgcaggctggagtgagctgctgaaatattcacgagttatcattctggcggaggccggaatgggaaaaacccgggaaatgaaagaacagtcaataaagctgaatcaggcgggtcagttttcatttgttatcccgacagaagcactcacagaagagcgcatcgtggatatactgccccctgatgataaagcccaatttgagcaatgggaaaaatgttccgaacacgcttacttctttctggatgctgtcgatgaattaaaattaaaaggcgataagtttgaaaaactgttgcgaaaattacgtccgcagttagaaaaacatctttccagagtccgactgattatctcctgtcggcccagtgactggaataattacgactcagatcttcttgaacaatggctacctgttaattcacatacagaaaatcagatcatgtccgcatcacataaatccggacgcgaattttttaaggacatagtttccggctggttcagccagccagtccacaacgatccgctggaagaactggaaaagggaatggagccagaagctgaggaatatcatcaggtccattgttttcatatgcgtccgatgactaatcagcaaataaaaaaatttacccgcggatcggttgtttctgaaccagaacgtttcctgcaacagcttcatgccctgaacgccgaagttttcgccagccgcccacaagatttactctcactgattgcatactggaatacccataagcagtttgactccgaattagtcctgcatgaagcagatattaaaaacaaattaacagaaaattatgagcgttgtgagcaggtaataaaatccccacgtgaaatacgggatgccgtggagcgactggcgctggcgatgagcctgacgcggaagtacgctatcactattgttgaatcatctgtaatcgatggcctttcactaaatcctgcgaaaatattaactgactggttgcccaaagatattaacgcactcctcagattggctatttttgaacctgccacctacgagcgcgtccgctttcatcaccgctcagtacaggaatatctggccgcctgccggttacggcatttgaaagataagggtatgtcgatcggcgcgtgttttaatttattattttcagagcgctgtaacttttctgttgttgtcccctctatgcgcccggtagcggcatggttatcactttgggaccgtgacgtacgagaagagctgacacacagagcaccagaggttttacttttattgggcgatcccggctccctgccagttgaagtccgttcagaattgctaaaaagttttgtttggcactataagcatggcttgtcaagggggatcaatattccattgatacaggtggcgcgattttcacacccggaacttcagccagtgattaagcaattatgggctgaagggtatccgaatgaagatgtcagggaattactgctggaaattatctggacggggaaacttcaggattgcaataagttgctggaacgtaccgtctatgattcaaacattgacattaccgatcggatcgtcgccataaaagctattgcggcagccaatgatttaacgcttcaacagaaaatagtacacgatgttataaacgttcctgaattatggcctgataagttcattttccatttcgccgaagaattattccctcagttgatctccgttgacgatttattgacgctgataaagcgaacggcagagccgaacggttcaaccaacggttttaaatgggcattatgtaatgtggccgcagagatagtatctgattctgatgccgcgattgcttttcgggatcggatagcattgcttatcgttgataattccgaagagagcaggcattactatccagaaagccagtacgggcatttaacccgcgcactggctaagatttgtgccagacagttagccagtaatgttaagcctgacgatgaatctctcattttcgcatgtttagtttgccgtttgtttagtaaagcagaatcccattatatcaatgatgaactctctgcaattaagagtgtactaaacagtacaaccactattcgggaggttatttttcttaccgaatggcgtttgttaacacgcgttgttaagcatgatattgatgactttcagctcaaggaatacagcgtgttgtccgattttgggaaagatgacttaccgtggatgatttcattgcttgacaataaatcattcctacagtcacgaacaatattactgaaatttctgtttcagttcacgccgttaatcgataatctttcggaattccaggcgccattaaccaatgcgattaacgatgatgaggcattactatccttagcctgtgagcgattaaaaccgagatctgacaatgcggaatatatccgcagtcaagaggatcgtaaagaaaaagagagaatcagacaaaaagtagaaaaagagaaacaaaataaagaaatagaggaatggctgaactggtacgatacatttacaactgatatcacatggactctttccggggataggcaatattcagtattgagtcgtattgtgaatatcatgcagaatacgcatagaggctatttccctgaggacttctgggataaaagattactgcatacctcttttaatgatagttatgtgaaacaaattgaaaaatcttttcaacaatactggcggaatacccccacgcaattatggcacgccagagatagggaacataaaaattcattaacgcagagcgaaattattgcattcacgggattatttgttgaaagtgaatctcagggatgggagaaaacgctcagtcatgacgaagcatcactggctataaaatacgcgacattatcatgcaataacttcgcacctttcatttatgagctggctgtttcattccctgatattgtaaaggcaaccattggcatcgcgcttcaggatgcgattcattacattgataatgataattacatcccgataatcagccagatttccagtgctgacatctcgctacgaaagttattatccgatgacttattaaaggcgactaactgctatttgttaaataacaaaaaatgtgcgataaataatatacctctttcggttgaacaacttttaacatctttagctgatgttgtttcagacgataagcggatgtttactgccaaaatttgcgctgatttttataaaacagccccttataatcccggatattattcattcctgaaatatgcttttattttctcacctgatacgggcctcgaaattttccaaaaaatgctcaggagatgtcaggacaaagatcagtatattacaggactctacgccgccttgttttcacatcgcgcttcacgaaggcatcatttgctgtttgatgataatgacccttcgcaacaaatttccctgaccgggaagctactgaacattgcataccagtttatcagacgtgaagatgatcgggagcatgatgatgtttatatgcctgatacccgggacagggccgaagaagcgcgtggagtcctgctggaccgtctcctgaatacccgggatgataaagcagtagttgagcttttacgaattgccaaaaagccacactgccgtttgtcaaaagagcggcttgaatatctcgcccgggaaagggccgcactgaattcagacgaatcttctttgacagaaggggccgtactggaactggaaagccatttagaacaaccgccccatagccagaaatcactgtatcaggtaatggtcaatcgactgcatgatttgcagtatgctttatcccatagcgatttcaccgatcgggatattcttcgtacagtaaaacttgaagcgcacatgcagcctacgctggcatggcgtttagaagccactgctaaatccgcctattctgtcgtgcgggaaagtgaggtcgccgacggtaaaaaaaccgatatacgccttatcagcccgtgtggaaagcataaggctgtgattgaactgaaacttgcggataaaaggtggaacgtcgctgcttttgtgcgagcactggagcatcaactggttgggcaatatctaagatatgacggttgtaagactggatgtttattgctgatctataatggcaacaaaaaatactggcaaaaacccggttcccgggatcgattgtattttaaagatttaatcaactatctcaatgaaaaggcaaatataatcatgactgaaaatagagcgctgcaattaattgttattggtcttgatttgactgcccccaaactggtaccagctcataagtcgattttatctcgttctgaatga

SEQ ID NO: 14252 - DNA, 330 bp, Escherichia coli
atgtttgatcactggtttacctcgctcaacgataccgacagggccagcgtgcttgcggcgctgttggtcctgcgggaaaaggggccggggttatccagaccttatgccgatacgatcagaggttcccgctacagcaacatgaaagagttgcgtattcagagccggggcgatccgatacgggcatttttcgcttttgacccggcccgtactggcattgtgctttgtgccggaaataaggtcggcaatgaaaaacgtttttacgatgagatgctcccgatcgcagaccgggaattcacgaactggctgaacacattaaaagagaaggagtaa

SEQ ID NO: 14253 - DNA, 303 bp, Escherichia coli
atgggcagaacgctggaacagcttattgcggatgaaaaacctgaagtcgtggacgaagctcaggcgatggcgacggacatcctgctcaacattcatcttgctgagttgcgtgagaaagtacagaaaacgcaggtggaaatggcgcaggcgctgggtatcagacagcctaccgttgcaggaatggaaaaaccgggccgcgacctgaaactttccacgcttaaacgctacgttgaagcgaccggcggcaaattacgccttgatgttgaactgccggatggttctcactacggattcgtactgtaa

SEQ ID NO: 14254 - DNA, 885 bp, Escherichia coli
atgggaatactggagcaggaaatgaagcggatggcgcagcaggcaggcggcagccacaaaaccgttcacgaccgcattaagctggcgcagcggttttgtgagcgtctggttctggcgcagaacgtacaaatccgccgggtggagcagcttaaggcgcggcatattgaaggctatgttcgtgaacggctggcgcagggcatcacaaagcgttccctgcaaaatgagatggcggcggtgcgctgcattctgaaacaggccgggcgtgacaggctggcgcagagtgagcggctgaataaccgttcgctgggcctgtctggcgcatcccgtagcggtacgaagaaggccatcacgccggagcattactaccatgtgctggaaactgcccgtgcaaaagatccggggatggcggcagcgctggaactctcaaggctgatgggcctgcgttcgcaggaggcggtgcaaagcgcacagtcgctgaaaacgtggaaacaggcgctggagcgtgatgagtcccggttaaccgtagtgttcggtaccaaaggtggaaggcctcgtgagacgattattcttgatgctggtgtagtcagaaaggcggttgataatgccctgtctgttgcagaacagcgtaacggcagactgatagacaaatcagatttgaaatcagcaatgaaatactggcacagccaggcgtcgggtcttggtttaactggcgcatattccccgcactcgttgcgctatgcctgggcgcaggatgccattcgtcattatctggcacagggattttgtgagaaggaagcgctggcgatgacggcgatggatttgggtcacggcgacgggcgctggcggtatgtggcgcaggtttacgggagaaaggatactgactga

SEQ ID NO: 14255 - DNA, 594 bp, Escherichia coli
atgaaaaaaacactactcgcagccgcgctagtgatggtttctggttccgctctggctgtagatggtggtcatatcgattttaacggtctggttcagtccggtacttgtaaagtcggcgtggtagacgcgggtatgcacggcatcactaccgatggcgtagtcacgctggatactgcaaatgttactgataactttgcggaagttaacgcgactgcggttggtttgctgccgaaagaatttatgatttctgtaaattgtgaagcaggtaagtcagaagcatctttaactatggggtctgcaagctacgcaaacaccagtggtaccttggataacaatatgaacatcactgtaaatagcatccagccagcaaaaaatgtgaatattgcggttcacaacatgaccaacaaatctggtgcggcagagattaaacaggtacacatgaacaactctgcagaaaaacatctgctgactttagatgctaatggtgacggtcaatatgtgttcaatgcttcctatgtaaaagcaccgaacagccaggatgttacttctggccacgtaaccactaacgcactgtacaccattacttataactaa

SEQ ID NO: 14256 - DNA, 726 bp, Escherichia coli
atgtttccctttgtaagaaaaaccgttagcacattatttattagtacgttgctggccagtgcccctgtattcgccgatatcataatttccggcacacgtatcatttatatcgcagataaaaaagatgttaacgtccgtctggaaaacaaaggtaatcgccccttgttaattcaaaactggttggatacaggtgatgacaatgctgatcccagccaaatcaaagttccgtttacctctacgccgcctgtatcacgtattgaacctaaacgagggcaaacggtaaaagtgatgtttactggtacaacacaacttcctgcagaccgggaaagtgttttctggtttaacgtactggaagtcccgcccaagccgaaagatgccgaatcagacaaaaacttattacaactggctttccgtacccgaatcaaacttttttatcgcccaagtggattacaaggtgaacccgctgaagcaccagccaaactgacgtggaagttaaacaatgcgcagcttcaggtaaacaatccaaccccttactacgtttcattcaatgacgtcgcaattgaaagtggcggtaaaagctacaaagtggactccagcatgcttgcgccctttggtcaggcaagttttgttgtgactggtatggcgagcagtgtgtcttcaggaaaagttatttacaaagccattaacgattatggtggcaatattgatggctccacatcgctttaa

SEQ ID NO: 14257 - DNA, 2598 bp, Escherichia coli
ttgtatacgttaactcatcagaaaagtcgtctaccgaaaaaaacattactggcagcctgttgtacatttttctatagcggtaactgtgcagccacggaaaacgtggaatatgacagttcatttttgatggggactggggcatcaagcattgatgttaaacgttattcacagggtaatccaacgccgcctggcgtttataacgtccgcgtgtttgtcaatcagcaacccgttgccagtttagagctcccttttgttgatataggggaaaacagcgccgcggcctgtataacacgtaagaatctggcacaactgcatattaagcagccggaatacgccattacgctgcttgccagagaaggcgaagaaggcgattgtctggatatcaaaaaatcgattgaacaggcagaagtcagctatgacggcggtgaacagcatctggagatctcggttccacaggcgtacgtctataaaacttatggcggttatgttgatccttcactttgggagtcgggtattaatgccgccatgctttcctactcattaaacgcctaccactctgactctgataatggcgaccgggacagtatctacggagccttcaacactggcctcaatttcggagcctggcacctgcgtgctcgcggcaactataactggtcgcaagataacggtaataatttcgactttcaggatcgttacttacagcgtgacatcccggctatgcgctcacaagtgatcgtgggtgatgcctataccactggtgaaaccttcgactcagtcaatgtacgtggtatgcgtctttatagtgacagccgtatgctaccatccgcgctggccagttatgctccaatcattcgaggcgtagcaagctctaacgccaaagtgtcggtgactcagaatggctacaaaatctatgagtccaccgttccacctggtgaattcgtaattgacgatctcagcccttcaggatttggtagcgaattggtcattactattgaagaagcggatggctctaaacgctcattcacccagcctttctcttctgtcgtgcagttgcaacgccctggcgttggccgttgggatattagtgctgggcaaattatcgatgacagcttgcgtcatgagcccaatatggcacaggcctctttttactacggtttcaataatttgttcaccggttataccggcgtacaaattacagataacgattatatgtctggccttttggggcttgggatcaacaccagcatcggtgcctttgcggtggacgtcacacatgcccgcaccgaaattcctgacgataaaacatatcaggggcaaagctatcgtattacctggaacaaattgttcgaagctacaagcacctcatttaaccttgctgcttatcgttattccaccgagaattatctcggtctacatgatgcgttagccctcattgatgacgccaatcatctgtcgtccgacgaagacaaagacaccatgcgtacctattcacgcatgaaaaaccaatttaccgttagcgtaaatcagccattgaattttgcttatgaggactatggttcactctttttatccggtagttggacagactattgggcaagtaacaataaccgaactgaatacaacgttggctacagtaaaagtgtttcctggggaagtttcagcgtcaacttccagcgtagttggaatgaagatggtgataaagatgatgcgatgtatttgaacgttagcattccgctggaaaatattttcggcggtaagcgtaaatcctcagggttccgtaacctgaacacccaattcaataccgatttcaacggctcgcatcagttaaacgtcagtagttcgggtaacagcgaagataatctcatcgggtacagcgtgaatacgggttataacctcgataaagcatctgaagatgtcgcttccgttggtggatatcttagctatgcctccacatggggaggtttttccgcttcagcttctgccagtaccgataacagacaacaattctctgcctctaccgatggtggttttgtgcttcacagtggcggcctgaccttcaccaataacagtttcggtagcaatgacacactggtcgttattaaagctcctggcgcgaaaggggcgagggtcaataacagtactgatgaaatcgatcgctggggttatgccgttacttcatccttaagtccgtaccgcgaaaaccgggttgggttaaatattgaaactatggaaaacgatgttgaactgaaaagtaccagcaccaccactgtacctcgtagtggttccatcattcttgccagttttgaaactgaccagaggcgttctgcagtcctgaatatcagtgccagtaacggtaaatctattccttttgccgctgaggtttatcaggatgaaattatgattggcagcatgggacaaggtggtcagtcatttgtacgcggtattaatgacagcggagagttaattattcgctggttcgaaaataataaaacaataaattgcaagttgaattatcaactccctgtacgaccagaaactctgggaagcatagatactttattgttaaaaaatcttatctgccaagtggctaactaa

SEQ ID NO: 14258 - DNA, 558 bp, Escherichia coli
atgaaaaaaatcataataatctccacgttaattggcttggagtttcccataaccagttctgcgacggatattaatgtcgactttaccgccagattattggcaaccacttgtacgataaccattaaagaagatggtggtcctacggtgaataatacggggggagatgactacagtatgaccatccctagtgttggactggataaaatagctaatgcacatgcagatgcccaggctaactttcaattagtggccaaagattgtagtgcaggttatttgaaaatcgttaccaagctttcaggtgcaaatatttcaggtaacttgattaaaaacgaagcaaccaacacacctatagcgactaatattggtatgggcatcaagcgacgggatgctgctgatgctgcatttatcacgcccaataatagcgtcagcgttgagtggaccacagcagataaaacggatgggatgaagttaactgtcgccctgcgtgaaactaccgccgggacaggaaatattggcaaattccatgctaaagccacctttaacttcacctacgaataa

SEQ ID NO: 14259 - DNA, 606 bp, Escherichia coli
atgaatttaaaaacaatagcgataatgattgttactgttattacagggagtggaatagtaacccataacgccctggctggaacctcgtcagcatccttaacggtagacagtattgtcacaatgggtacctgtatcgcccaattactggataccaatgatacagagatttcacaagtggcttttggtgacgtttatatttctgaactgagaaatgaaaccaataaaaaagccttcaaaatacgttttagtggttgtgccgggctcccggaaagaaaagcactggtaaaattaactcccagagggataggttgcggaggcttatacgctagcgccgctggttttgctaataaaaataatggtgcaggcgctgcaggaagagtatcagtcgaagtatggaccaccaaagatgcagaaggacctggcagtgaaatatttaactgcttccatcctgcaaataaaacggttgttctttctaccgtaaccgccacagaaccttacgattatgatttaagtgccaagatggttgttgccgaaggtagacggttgcaagatgtcactccgggggagtttctttctccagccaccttcaccatcacttaccagtaa

SEQ ID NO: 14260 - DNA, 591 bp, Escherichia coli
atgcttttacggcatcataatttcgcattctttttagggctggtaacagccctctattcctctattagctatgctgataaggatgtagatcttaccgcgaatattgtatccagcacttgtcaggtagaagttaataataatggtgttgttgatctcggcaccgtgaccctggattattttgctgacaacgtaaccccagatactgattatgctggaggtaagaattttactgttaatgtcgtctcttgcgataatttacaaaccacacaatcgcagattaaattggattttcagccgcaaacgggatctctgtcgcaacaaaaccaacaaattttcagtaaccaatatgaattgcaatctaccggagctaaaaatgtagggattgttattttttcggcacaacccaacgagcaaaaatttaacgttcggggaactgacggaacatcaaaagctatctatgctttaccctcaaatcaagtcattccctcgacatggacattttattccagaatgcaacgtgttgataactctctcgcacctgtagctggtattgtgagaagtcaggttattgttaacgtttactacgaataa

SEQ ID NO: 14261 - DNA, 1113 bp, Escherichia coli
atgcaagggaaagtcaataaacttttgcttcatatatgcagcgcaatgttgttatttttgacatcgtcctggtgtgtgtttgctggcacgggttctgaatgctatatagaaagcaattcagccgggggttacactatgttaattaatactcccacctataatgttgtaactcgagaggtcactaatcctcaggaaatggccgatgctaccaaggatgtacctattacacttcggggtgacggtgtggcctgtaaagccataccaaatggtgatgagactatacactttcttaatactgctgatgccggactgatatcaggatatacgtcagggcgaggctctacattattaaaaacgacggtccctggtattgtttataccgttgaattaatttgtgatagctgtcctgaaccaatcgacttataccttccgacacttggcgaggacaacttcacgcccaactctgatacatggtgggtatggagccaaacagatgacaaatggaagttacgttttcgttttttctatactcctgagttcaaacctaagaatggagtttccagtggaacattatcaccgggaaaaatcgcttcctggtatattggtatcaacactcaaccctggatacacttttacgttgacacaaatacatttagatttaccgtggctcaacctacatgtactaccattgcgctggactcaaccagccaaaatgttagcggtaataaaataaatttgggagactattatatttcccaggttaagcaggaaatcacccgagtagttccattttctattcgcgccgattactgctacgcaagcaaaattacagtgaagctgaaagccacaactgaggcaccaaataaaaaattaattggaaaatcatccggttcagcaaccggtgttggcgtaaaagtctactcaaccgcgaacaaaaatgaggttcagctaaacgcagacaacagcaatgagattatttttaactacgcccactggtcaaacaaccttatttattttccctttacggcgcaactggtaaaagatggtggtaatggcacaattagcccgggagattttaccggtaatgcgacattctctttttcctatgaataa

SEQ ID NO: 14262 - DNA, 1464 bp, Escherichia coli
atggacgacaatatggagatggtgacggaactgcaacgagcactggctttttaccaaccgccaccggaaagttggtattcaggtattcagcgaaaaattgaggcgaccgggcagtggctctgggaaaccttgcaaggagattttaacgacaatcagagtaccgctcaggttgtgacgggaacagtcatttccatgattccctttgtcgatcagatctgcgatgttcgcgatctgatagctaattgtaagaagataaaggaaggcaacgataaaaacgaggacaccacctgggcatgggtagcgatgatcctgacactggtcggtcttattccagtggcaggttctttaattaaagggatcttcaaagtgctgtttaattcgataagaaaggcggcgctttccagtagggatattgtacgagcgattgatgcttccgtttccctgtttaataaatttatcgatttgccagccgtgcaggcgacaatgaagtggatgaagatttataacccgtatacgtatgctgagaagcaggtcagggaactgatggcgcaacttaacgtatcggtgctgttaagcaagctggatgagttaatggacgtcactggttcgctactcgaaaaggctaaatcttgggggccggagtccattcgccagccgatagaggtgatatgggaactgctggtgtctatccgcagccaagccaacaccatgcttgcaaaagcgctggcaccgttaaatgatgtgctggaaaagctggctgcccgtctgcaccgggaaggggacgattattataaagcgcatactggtgctaatccgcatcggccttctcgcctgaaagatgctgaagaggtggaattgctggctaccaaaaagccagactgggcggatattgggggtaaagaaaaatatccacaactggaaaaagccagtgcggaacagaaaagattaatggacccggagaataaggagggcggctacccgaatattcctgatgataaagtgcagacttttcatcagatggctcccgttgaatttaaagaaggcgagaaactctaccgggtgcttgaccctggcagtagcgataatagtttttgctggatgcgtgaagcagagtttaaagcactgaagagtaagtctcagtggcgacgacgctttgcggtctggaaaagctggaatgaaaatggtgagtatgtagtttataccgtgccacccggtacaacaatgaaggtttgggaaggtccagctgcctctcaggtgcgtgaagtcacaggtaagaatggagagaacattaaagtcgtgctggaaggcggatcacttcagatagtgatagatccgaccgttctgaatttggactatttggggaaacgtcagtctacaggatgggggtatagagatttttctgatgaagtggatatgtatataggtgtgcctcagttgcaaacaaatatttatgtacctaaataa

SEQ ID NO: 14263 - DNA, 381 bp, Escherichia coli
atgaggatatcactggcaagcttgttttttctttgctgtacagtatcagacagtgtttatgcggatacagatcaaacatatgatattttttggggaatgctggtaaaggataaaaaggatactatgtttgttcgctgtgacagtccgtcattgaaaatgaaaattgtgagaatggcggatgcaaatacagaaaacattgataaggcataccagatatttaatcagaaaacgaaaaaatcagtttattttgcttttatcggtaatgtgactgatgccgggagtggaaagtatattttcaatatactggacgtaatggaaacgagagaaggctattgtaatctgtccgatgcgcttaatgcaatagatgaacagtttcgatag

SEQ ID NO: 14264 - DNA, 264 bp, Escherichia coli
atgaaaggtattgttgttctgggagataagacaacgcatggtgggcaggttatatctgtgtcatcttcgatggttatcaatggaaaaaaagttgcgcttgtaggtgataagataaactgccctgttaaagggcatggtattaataccattatcgaggggagttctgattggatttctgatggcaaacaggtcgtcgtgaatggctgcaggtgtgaatgtggctgtgttgttatatccagtattgctgatgccttgattggatga

SEQ ID NO: 14265 - DNA, 1140 bp, Escherichia coli
atgggatggaaacggacgtatacagaagaaatagacaggccacaggatatttactttcataagtggttattttctttatttattttatgtgtattattactcattatttattattttttccatgaatttgttgtagctaataacgcatctttgttagcattcttttccccattattattgtgggtattgattctttcagtacaggtcatattttattccagagctattcaggattattcaatttggctggagaacagacttagtatcaacagagagtgggaggcatggggatcaagatatgtttctgttatgaatagtagtcttcatcttcctggaaaagtcgatgttttattcttgtctggtgatgaattagaaactcagtatggacttgtcaataagtcagatgatatcacatggaagcaacatgattggtatgcctgctttcagacccttactaatcatcttgaactttataaactcccatatcaacttacacaagaatttattattcttactgattgtgatgaaagtatgtactctcagattgaagaggactttttcagaacagtggagaaaaccagcagaacagaggggcattttttgttgcatatttccccttcaatgtcctttggagagcttgatttatggttaaaggattccgaagagaaaatatatattgtcatggtgttgcagatggaggagcaaacatcctgttcggacgctatggcttgccttatgtttgcaactgatgatgttactgctaagtacaaactcactgaaaaggccagaatttatcgcccaatggtagtaaatagtaataatttcaatagtgacttgaatatttttattgacacacaaaaaatatccaaaaatgccgccgggttagttggggacagtcagcgtctgttttctgtgagtagtaatgtattgcagtgttttaatgataataatgctcaattgaaaattgataatatccatcttttagaaagcctttgcggattaccagggggaaatgcggtctggttaacggcagcgctgactatttcggtggttgttcacaaaaattcagattacttgatgatgtccgaaaataatgatgactggatcattaccaccattcatcctatggagcattcatga

SEQ ID NO: 14266 - DNA, 960 bp, Escherichia coli
atgaatgcgattaagaatttatatctcttgttgttgttattgttgtgttttaatgttaaggcaagcatcacttctgataaagatgttattatagatgataattatatatttaaaaaaataaagctacatcggttggggaaaggtaagaataacgttactcaaggttttgtgattgatgataaaactgatggtctatacacactacatgtaacagggaaaccagaaaaaggagttgtaaattattttttgcttgttgacgaatctaataaaattacggcttgttcttttcagaaccctacggattttataggtcatcaaggtttaacttttgattatagcaatggatatttagtttcttcggctggtgatgcatttagttacaagggatggtttatcacgcactttaaatatcagcagcaaacgtttccgtatgatatgaaatttacaaaagtattcgatagaccatataatactcgtgttagtacaatgcctgttttaaccttagatgctaaatatttaatagtaagaagtaagttgaatggtagagacttattaagagtctataatagtgaagaagttaactttcgaatcgagagtgatatttcatcagaacaaaatatagaatggtttatcgatgcaggtttaaccaatgataattatgtattgcaagccattaccgctgataataaatatatatatttgttgagtgggggagggaatagagaaaacaaaagaatctatatttacacgttaaaaggagagcttgtaagaaagtttaataatgtaacagtagggaaaaaagattctcttaatagtggcaaagaaaaacattgggaacctgaaggtttagctattgatcgcaaatcaaaatcattggttatcatgtttgctcttggggatcataaaaaaagatttgctcaattatattatattcctttagataaacttattgaggagtga

SEQ ID NO: 14267 - DNA, 654 bp, Escherichia coli
gtggctaaactcgccacgctgtcagatggcacagtctttgagcctgtaaacagttttcagaaaaaccagaagacgctggcgagacttcagcgacagttaagccgcaaggtcaaattcagcaacaactggcagaagcagaaacgcaaaatacagcgactacattcctgtatcgcaaatatccgcagggactaccttcacaaagtcacaacgaccgtcagcaaaaaccacgcaatgatagtcattgaggatttgaaggtcagcaacatgtcaaagtcagcagcgggtacggtcagccagccggggcgcaatgtccgggcaaaatcaggtttaaaccgttcgatactggatcagggctggtatgaaatgcgccgccagcttgagcacaagcagctctggagtggcggtcaggtgcttgctgttccgccagcgtacacaagccagcgttgcgcgtgctgtggtcatacagcgaaagaaaaccgcctgtcacaaagtaaattcagatgccaggtatgtggatatacagcgaacgccgatgtaaatggcgctcgtaacattttagcggcggggcacgccgttcttgcctgtggagagatggtgcagtcaggccgcccgttgaagcaggaacccaccgaaatgattcaggcgacagcctga

SEQ ID NO: 14268 - DNA, 744 bp, Escherichia coli
atgagtaactggccttatccccgcatcgtcgcccatcgtggcggcggtaaactggccccggagaacaccctggcagcaatcgacgtcggggcaaaatacggtcataagatgatcgaatttgacgcgaagttatcgaaagatggcgagatcttcctgctccatgacgacaatcttgaacgcaccagcaacggctggggcgtcgcgggtgaactgaactggcaggatttactgcgcgtggatgcaggcagttggtacagcaaagcgtttaaaggtgagccactgccgttgctttcgcaggtggcggaacgctgtcgcaaacacgggatgatggcgaatatcgaaatcaaacccaccactgacactggaccattaacgggcaaaatggtggcgttggcggcacgcgaactgtggaccggtatgacgccgccgctgctgtcatcgtttgagattgatgctttagaagccgctcaacaggcagcaccggaactgccgcgtggtttattgcttgatgaatggcgcgacgactggcgagaattgaccgcgcggctgggctgcgtctctattcatctcaattataagttgctcgataaagcgcgagtgatgcagttgaaagatgcaggactgcgaattctggtttataccgtcaataaaccccagcgcgcggcagagttgctgcgctggggcgtggattgcatctgtaccgatgcgattgacgtgattggtccgaattttacggcccaatag

SEQ ID NO: 14269 - DNA, 378 bp, Escherichia coli
atgaccattcagtttatctcagcggaggagataatttatttccacgataagttgcttagcgttacaccaggtgtaacaggaatgtccgatccagggcgagcagaagcgcttttgtaccgggtactgaataagtacgagtatgaaggcgtttctgatctttggctgctggcggcgatgcatctattggcaatctcgcgcggtcatatctttaatgatggtaataagcgcaccgcactgtttatcacgctattattccttaaacgtaacggcctcatacttgctgcaaacccagagtttgtggaattgacggttgatgtggcggcgggaaaagtatcgttagaagatatcgttacccgcttgcgtcaacacggaacctga

SEQ ID NO: 14270 - DNA, 222 bp, Escherichia coli
atgcataccatgaactacagcgaagcgcgacagaaccttgcattggttctggaaacagcggcgacaggtactccggtaacgatcacgaggcgtgggcataaggccgctgtgattattagcgcagaagagtttgaacgttaccagaaggctaaactggacgcggaatttgacgccatcatggctattcatggcagcgaaattaaggagttagcggataaatga

SEQ ID NO: 14271 - DNA, 192 bp, Escherichia coli
atgagcacaagagtatgggtactcggtgatgcggttgttgatttattacccgaaagccaggggagactactacagtgtcctggtggggcgcctgctaatgttgcagtcggtatcgcaaggctgggggggaaagtgcctttattggcaaagttggcgatgatcctttcggtcgctttatgtatcagacactga

SEQ ID NO: 14272 - DNA, 1374 bp, Escherichia coli
atgaaaaatattgctgttattctttctggtggttcaggtgcgagatttggaggaaccttaccaaagcagtttacaaagttagcaggaagagcagttatagaatatactatcgatgctttcgaaagaacagagttaattgatgaaattattatagtttcacaaccaaattacactgaactgacatgggattatgtgaagaaaaaccaatggaataaagttacaaaaatttttaatggagggaaggagcgatttgattcaacatattcagcgttacaaggcttggaaggcgaagacgataattgcaatatccttttccatgatgctgtaagaccattaatcgatgagacaataattagtaattgtatcgaatctctgaaaatttttgaggctgtagatgttgttattccatcggcagataccttagtcgaggtctatgatgacggatgtatttctaatataccaaatcgcgcactaatgcggcggggccaaacaccacaagcatttaagttaggaacaataaaattggcatatcaacgtgcaattgctgaaaagcggtttagttttacgtgtgattgtggtgttgttcgatcaatggtacctggtgtccgggttgctacagtcatggggactgaagcaaatatgaaagtaacacaacctattgatctttttatcgcagaaaaattacttcaggaagcgaataaaatatctttttctacaggtgatgatttaagttttattaaagggaaaaatattgtcatctttggtgggaacagtggtattggattggaaatacaaaaggaggcaattttattaggcgcaaatgttgaagttgcaagtcgttctttcaataatgttgatattgctaatatcaagaatatagaacacttccttaataatgttaatgaaaagttgggatcaatagattatataataaatacagctggtgttttgataaagaaaccaattgatgcacttacatttaatgaagtgaattctctaataggcattaattatgttggcgctgttaatatagctatcgctgcaaaaaaatatttaaaaaaatcttcagggatgctattgaattttacatcaagttcgtatactcgtggacgttcttattatgctctttattcatcttcgaaggctgcaattgtaaactttacccaagcaattgcagaagaatggacctcagacaacataaaagttaattgtattaatccagaaagaactgcaacaccgatgagaacatcgaattttggcgttgaaccaagcgacttgcttcttgaccccaaagatgttgcccttacaagccttaaagtgttaggctcaaacagaacagggcttattgttgatatccgtaaagatggaagatga

SEQ ID NO: 14273 - DNA, 1353 bp, Escherichia coli
ttgtcaaagttaagcaagttagtaacaaagcctgatatgttcttcagagatatgattaagaaaagacgtggggatacaataaaagactcaaataataaaaaacaacctgataaatcagaaaaagtcaatattgtttcaaaaacacctaagttggctgaaaaagataagaaaaaaaacattactaataacttagctaaaaatgaacctaaaatgattacaacaaacattaggctgtttacaaaaataaaccacttgatacatacgggagaaggtataaattgttcatttcatattgaacaatggatcggtgaatttatagcctcaaatgaaaggtttgcattattaattagagacattaatctttataattgggctattacaaaatatcccaatgtggatattgtgtatgcaaagtcagccatcgcagtggaacaggttctgaatcagttaccatatcttaaagcaatttactatctttctaatactggtaatttgattcatactctaagatataatatttaccaacatatatttttaggacatggcgatagtgataaagcagcaagtgcgcataagttttttagggtgtatgatgaaatttgggtagcagggcaggcacatattgatagatttaaaaatgcaggattcaatgtagaacatataaagtttgttaaagtagggcgtccttccttaaagcaaattgtaaaacaatctgttagtaataataatgtgacagaacatattattaaaacactaacttactttccaacatgggaaggtgcttttgaggagaataattattcatcagctagattgtcacctatatttctctctgaattacaacaaaaacttaattgtaaaatagtagctaaataccatccacttacaggctcacgagataaaacattagaaacgatccaagatgcattacaaaatagtttcatagatcgttcttgcatgctttcaattgctaacaagtcagaaccgatacccaacttggttgttaacagtgatttgtttatttgtgatatttcagctgtagtaagtgaatgtatatcttcattatctccaattttcatttatattcctgaagatcgtaatgtgattacttctggaagtgatatgcattattctgattatgcatacaccttttcaaatatagagcagttgatgcaactaatagaaaacataattattaatgggaatgatcatctagctgaagccagatataaagcattagattatcttttgagtgtaaatgaaacagtaaacgatgcatttttaagtgagcttaagagaataagttcaactgtttcagaaaaagaaaataaacgtgaatttgtcattcaataa

SEQ ID NO: 14274 - DNA, 513 bp, Escherichia coli
atggcagcagcaaattctggtacaaccatcggaacaggtacattagcggtaacaggcactgttgggacgtctacttgttcagtgacttttccacaaagtgtgacaatgccaagtattaccactgcgctgtacaatacaacgccgaacgggagtgccatgattcaacagtctgctggcaatatccagttttcaggatgcaatggtcaatccgttaatcttaaagtgatggctaacaatgttacgcttgccgggagtaaaacaatcggttatccgaaagttgacgatagccaacaagggtggctaggtctggcttttgctgtatcaacagataacggctcgtcttttaataatttgaagttggacaatagcccatcagagccaatcagtgttacgagcgaagcatttgcattacctgtgcgtgttaaagcagttagattgtcatcaaatactgcaactgatataggtcaaggcaattatagcgcatcttttgttgtaactgctacatacgcttaa

SEQ ID NO: 14275 - DNA, 501 bp, Escherichia coli
atgcctgatgcgacgcttgccgcgtcttatcaggcctacgccagacagcgcaatagcctgatttggcgtgatttttgtaggtcggataaggcgtttacgccgcatccgacatcaatgcctgatgcgacgcttgccgcgtcttatcaggcctacgccagacagcgcaatagcctgatttggcgtgatttttgtaggtcggataaggcgtttacgccgcatccgacatcaatgcctgatgcgacgcttgccgcgtcttatcaggcctacgccagacagcgcaatagcctgatttggcgtgatttttgtaggtcggataaggcgtttacgccgcatccgacatcaatgcctgatgcgacgcttgccgcgtcttatcaggcctacgtcagacagcgcaatagcctgatttggcgtgatttttgtaggtcggataaggcgtttacgccgcatccgacatcaatgcctgatgcgacgcttgctgcgcctaccttaaccgttggttaa

SEQ ID NO: 14276 - DNA, 570 bp, Escherichia coli
gtggatttcaatagcggcggtaagaaagccatagaacgtttagttgaagcatatgggttcggtactcgtcaggctctctgtgatcatttaggtgtttctaagagcaccatggcaacgcgctatatgcgtgatatttttccagcagattgggtaatccagtgcgcccttgaaacgggcacctcgcttaattggctaacaacagggcatggttcaaagcaagcatcagcaaatacaaatactatagaagtagaaaaatatttattgtctgatggagcattgcagaaagacggtttttatatttttgataagggatttctaccctctacgtttaaaaaaccttttgtcatcacagataacaattctgaatttatttgtgataaagaatttgatgatatacgtgatggtaaatgggtaataagtattgatggcgaaataacgatccgtgacattactcgtttacccggtggaagaatcttcgtcgagggtggaaacagagccttcgaatgcaagatagaagacattgaaataattggtaaaattataagtttaacagtcaagtatgttaaatag

SEQ ID NO: 14277 - DNA, 216 bp, Escherichia coli
atgtcaagcatcgccgcatttagcctgggtaacccagttgaacgtctggcaagggttcttaaagagaaccaggacaaactcaatcttagtaaagatggttttgtgtccgtagacttgtctaacaaaagagcaatggatgccatcaaggcacagatggataagcttgaaggcatcaaaacgagcactgtaaaagagaaaactaatagaaccagataa

SEQ ID NO: 14278 - DNA, 843 bp, Escherichia coli
atggcaacattacttttagcagtgattttggttagtggttttatttatgtaaacctatcactttcaacaagataccgatataagcgttccaacggctgggacgcttatttttttgtggctgcctggggtatcgttttttttctccttggcggttttttcacctttattttgaacgtcagcggagggtttcgttggctggctaatgccttgaatctaacacctgacagttttaatggcatgttgtcttcatcgaaagacaaacttcaaagaataaatgaaatcaaacagatagcatgggttatgatttcaattgtcctcgctgcgatttcaggttttggaaataagttacgcacatcacgtggagatcgtcgctgggatgccttagctaaagctgtgggtaataacgctttcgaatcattactcatggaagcgtccgcaagacagtttccgatcatagcaactctgtcgtctcgcaaaatctatgttggtcttgttacttgtccggcgttagaaaacgggctttcagagcaccttgaacttctcccgatgttaagcggatatcgggataaagatgatctaacgattagtatcacgactaactatcaccaacattatcttgatagtggtgtgataagtggaatgtctcggcttaatatcgaagatttccgtgtgctcataccaaaagatgaggttgaaacaatttcgttttttgatactgagacatataacaaatttaaagaaaatgaagccagggatagaaagagctgtcgaaagattggtagtaaaagtgcatcttcgcgcagcaagcgtgcagcagatgctgagtcaaatgatcgtgcatga

SEQ ID NO: 14279 - DNA, 546 bp, Escherichia coli
atggacgttataactggagttgcagagttttttcgaaaagtacctgcagcatttcttgtggctattacatgtgttttaggtcttatactttttctgccagactctttggcagtaaaagtggctgttgatggctttcgtaatgagtataggatttttattggacctgcatttttactgtctgtatcttatttagttgcaagagtctatctctctttctatgacttacttggtgaaaggcaggctaagaaggtacgcacttcctaccttgagaagctaacagcagaagaaaaaggatatttaaagtcttatattaccgaaggtgttaattcacttatgtgtgggcctgaggatggggtcatggggggacttgtggctaaggggattacttatagagccaccagtgttggggatatgatctacggttttgctttcaacttacagccatgggcgcgtgaacatttagagaaaaatagtcatttattagatggggctattgggcgtgcaatgactccaagagaaaaattaaactttagattgggacgctaa

SEQ ID NO: 14280 - DNA, 429 bp, Escherichia coli
atgacgcgtgcgctggcagtagtggtggcgctggcactcgttgcgctgggctggcagtcgtggcggcttaacagcgccagccacaccatcgaaacgcagcgcgcggcgctgaaaagtaaagcgcaggaactgacgaagaaaaacagccagcttatcagcctgtccattctgactgaaaccaataaccgggagcaggcgcggctctatgccgaagcagaacagaccagcgcactgctgagacaacgacaacacctgatcgaggaactgaaacgtgagaacgaggatttacgccgctgggctgatactcctttgcctgctgacattatccggctgcgggaacgtccggcactcaccggaggtacagcttaccgtcagtggttgtccgcgagtgacgccgtgtcggctggatcaggcaacgccgcgcactaa

SEQ ID NO: 14281 - DNA, 654 bp, Escherichia coli
atgttcaaggttaatagaacatatcctgcaccaaagtcgctttccaagaaagtacgttatgacggtgctgatgtacatgaagcactacaggaatgcttttatggaaaatgttacatttgcgaaacaaagaaccctttggatataaacattgaacattttaaacccaagggtgatgatgtggaaagagcttttgattgggataatttatatctatcatgctccagatgtaacaatataaaactatcaaaatatgacaacattcttgattgctgtaaagaaaaggtatgggatcgagtaaaattactcccaggatattcttataaagcaaaaaaaataacagtaacagcactatttaatgatattgaaacgcagacgaccgcagagttacttgagaaagtatataatagcgatcataccatgagtaaaaaattaacttctgcggcacttcgtactcaagtagtgaaaacaacccaaaaactaataaaaaatattaatgaatattatgaagaagatactccaacagaacaaaaaaaatacttaattgaaaaaatgaagatgatgataaaaagagacgcagctttttcatcattttgcagatggatcattatggaagatgctgaattaggtccaattcttgaaccatttatggattag

SEQ ID NO: 14282 - DNA, 1230 bp, Escherichia coli
atgcttacatcaataaatgaaattcatgctccaattccatacactaataagacagcaaacttatttcttgagggtaaaaatctcataataactggtggtaacgggtgtggaaaaactagtttcattagatctatttatgatttccttaaaagtaagatagatacacctaatgatcataatattaataatttatacagtacgttagagtcctacaaatatcaattgaatagcggcgggcgtgacggctttaattacgacttttattctgaagaaataaaaaagattgaattaaaaattgaacaattaaaagccattagaatagaaacaaaagaaaaagaaggtgaaattcgttcactattgagatttcacaaagctctacgtgaagcatcaattacctcgccagtcgccgttcctaggctatcagctttaattaaagaaaagtcacatttttctaatgaagtagatggtgatgatttctttgagaattatttggttagcttaaaaaccgctcagagctatgcaatttcttttgataatgaccataataaagctcagcggatacaggaatggtttgataaaattgaaactgatatgcaggaactttttgaagataaaaacctcttactaacgtttgatagtaacgaaggaaaattttatctcaatcaagatggtaaagataagtttacttttcaaacattatcttctggctactcatcaatattgagaatttatgctgacttaataatgagagtagagatgtgggagttaacacctgacagtatcgaaggtattatttttattgatgaaatagatgcgcatttacatgtttctttgcaaaagcaaatattaagattttttagtcacgcctttcctaaagtacaattcattgtgactacacattctccgtttgttgttacatccgtcacaaatgccatcatttatgatctgtcgaccaacacgcaaattagtgatgtatcttcatattcttacggtatcatccttcaagagttatttggagtaagtccaatatctaaagttctttcagataagttagaacaacttcaagatattattgataatattaacaacaacaatattgaaactgccaataacataatacaatccttagcacctttagatgaatccatggacataaatgcaagtgcatttattgactatgcaaaaatgcaggttttaaaatataaaaaagcaaattctcaggagaaataa

SEQ ID NO: 14283 - DNA, 1221 bp, Escherichia coli
atggaaaagcattatgttggttctgaaattggacaactacgcagcgttatgttgcatcgcccaaatctcagtctgaaacgtctaacaccatccaattgccaggagttgttatttgacgatgtattgtccgttgagcgggcaggtgaagagcatgatattttcgccaacacgctgcgccagcaagggatagaagttctgttactcactgatttactaacacaaacattggatatcccggaagccaaaagctggttactggaaacacaaatatcagattaccgactcggccctacgtttgctactgacgttcgcacctggcttgcagagatgtcacaccgggaccttgctcgtcatttaagtggtgggctgacttatagtgaaattcccgcctcaattaaaaatatggtggttgatacccacgatattaatgatttcattatgaagccgttaccgaatcatttatttacgcgtgatacctcatgctggatttataacggtgtatcgattaatccaatggcaaaacctgctcgccaacgtgaaaccaataatctacgcgctatttatcgctggcatccacaatttgctggcggcgaatttattaaatatttcggcgacgagaatattaattatgaccacgccacgttagaaggtggtgatgtgctggtgattggtcggggggccgtgttgatcggcatgtctgaacgcaccacgccacaaggagtcgagtttcttgctcaggcattgtttaaacatcgtcaggctgaacgggtaatcgctgttgagctgcctaaacaccgctcctgtatgcatcttgacaccgttatgactcatatcgatatcgacaccttctcggtttatcccgaagttgtgcgcccggatgttaattgctggacgctaacacctgacggtcacggcggcctgaaacgtactcaagaaagcacactcctccatgctatcgaaaaagccctcggtattgaccaggtacgtttaatcaccacggggggtgatgcctttgaggcagaacgcgaacagtggaatgacgctaacaatgtgctcacgcttcggccgggagtggtagtgggctacgagcgcaacatctggactaacgaaaaatatgacaaagcaggcatcaccgttttacccatccccggtgatgaattaggccgcggacgtggcggcgcacgttgcatgagttgccctttgcatcgtgacggtatctaa

SEQ ID NO: 14284 - DNA, 1257 bp, Escherichia coli
atggctctgagtgatgtgaaggttcgttcggcaaagcctgaagcaaaagcctataagctgactgacggcgaaggcatggtgttgctggttcaccctaacggttctaaatattggcggctgcgttatcgcttcggcggtaaagaaaagatgctggcgctggggaaataccccgaagtctcgctagcagatgccagggctcgccgggatgaggcgcgtaagctgttggctaacggtgtcgatcccagtgagaacaagaaagccgttaaggtagagcaggagcaagaggcaataacgtttgaagtggttgccagagactggcatgccagcaatcagaaatggtcggcatcgcatagcgctcgtgtattgaaaagcctcgaagacaatttatttgcttcagttgggaagcgaaatatcaaagatattggtactcgtgacttactggtcccaattaaagcagtggaaaagtcaggacgccttgaagtggctgcgcgtcttcaacagcgaacaacggcaataatgcgctttgcggtacagaacggcttaattgattacaatcctgcacaagagatcgctggtgcgatcgcaacagctaaacgaaagcatcgcgctgcgctagatctcaaccgcattcctgagttactccatcgtattgataactacaccggcagactattaacgcggttagctgtggatttgacgttactagttttcatccgttcgagcgagttacgttttgctcgctggacagaagtggattttgaaacggctatgtggacgattccgggcgagcgtgagccactggaaggagttaagcattctcaacgtggttcgaagatgcgtactccacatcttgttcctttgtcgcgacaagctctcgctatcttgcaaaagatcaaaagcatgagtggaaaccgtgagctgatctttgtgggcgatcacgatccgcgtaaacctatgagtgaaaacacggtgaacaaggcgctgagagtgatgggttatgacacgaaaacggaagtatgtgggcatggtttcaggacgatggcgtgtagctcgttgatcgagtcgggattatggtcgagggatgcggtagagcggcagatgagtcaccaagagcgtagctctgtgcgagcagcttacatccacaaggcggagcatctgggagagcgcaggttaatgctgcagtggtgggcggattatctggatgcgaatcgggagaagggggtgagtccgtttgattactctaaagacaaaaaatga

SEQ ID NO: 14285 - DNA, 228 bp, Escherichia coli
atgatccgctgccatcttgctcggctcatgggcgaacataagatgcgaatagccgatgttgtcagagaaactggcctgagtcgcaacactatcactttgctttacaaagagacggctcagaaggttgacctgcatacattagaaaggctttgcgtgctttttgactgtgaaatacacgatttactgcaaaaggttcctgcttcgcagaatcgtacagagaaaaattaa

SEQ ID NO: 14286 - DNA, 1194 bp, Escherichia coli
atgatggagcagcaattacctgaaggctggcagatggtgaagtttggtgatatcgcaaaacatatctccaaacgtgtagaaccgagcgaaacagaccttgaaatttatgtcggtttggaacatttagatccggaaagcctgaagatcatacgtcatggtacacctagggacgttgaaggccagaagcttttagtaaagaaaggccagattatttttggcaagcgtcgtgcttatcaacgtaaagtcgcggtagcagattgggattgtatctgttcggctcatgctatggtgctggaagccaattcagcaagggttattcctgagtttttgccattttttctgcagtctgatgtatttatgaatcgcgcagtagcgatttctgaaggttcattatctcctacaattaaatggaaaacgctagcaacgcaaaccttcttatttcctagtattaaccaacaaaagaaaatgctcaaagtctttcaatcaattgaagagactataaggcagtgttggcgtttaattagtagttcaattacacttcgtgctgcaacaagagctgaggttttatataaaggtggaagctcgaaaaacttaatttcaactcattggggaaatgttcctgaggggtgggaaattaaacccttgtcttatttggcaacgataaacccaacttacaggtatggcgatcagtcggaagtcactttttgcgaaatggctactctggctaccgactccatgaaaattactggtgatttaagtatcaagaagataggaagcggtggttcgagatttaagaatggagacatattgtttgctcgtattacgccttgcgccgaaaatggaaaaatggccatagttgattttttagaggataattcagtggggcaaggctccactgagtttatagtgctgtccccgaaaaatatatcttcagagtatctttatcatctttgcagaacaaaccgtgtgcggcaatttgccataaacaatatggaaggttctaccgggagacaaagaatacctgcgcaaatttttgaaagtattatgttgcctgtccctccgaaaaacgaaataaagagacttgaaaattgtttatcagacacggagaaattacatttagtcgttctgtcaaaattagaaagtatcattagaacgaagaaatcttatatgcaaaaaatatttgaggtgatataa

SEQ ID NO: 14287 - DNA, 1302 bp, Escherichia coli
atggcagggttaaataaatatcaggcgtatccggagtatagggattctgggatggagtggtgtaatgaattaccactaaactggaaaaaaactaagctgaggtggctatccaatatttttgcaggaggaactccctccaaaaatgttattgattattgggagaatggtacagttccctggattagttctggagcagtaaatcaaggttatatagtcgagccatccacatatatatctaacgctgcacttgaaaatagtagtgccaagtggataccaaaaggggcacttgttgtcgctttagctgggcagggaaaaaccaaaggtatggttgcacaacttggtattaataccacttgtaaccaatccatggcggccattgtattgtataaaaagaatcaatctcgctatatattttggtggctcatttctaattatcagaatatacgtaacatggctggcggtgatttacgagacggtttaaaccttgaacttttaggcgatatacaatgcccaaaacctcgtaatgatgaatcttctaagattgcacttttccttgatcatgaaaccgcaaaaatcgataacctaatcgagaaacaacaacaacttattgaactactgaaagaaaaacgtcaggccgtgattagccatgcagtgaccaaagggctaaatcctgatgtgccgatgaaagattctggggttgagtggttggacgaaatccctgaacactggaggatatgcaaattaaaaaacctagctaaaatatgtaatggacaggattataaactcgttcaagcagaaaccggttatccagtaataggctccggggggcagtttgcatgggcgaatacttttctatatgataaaccattagtcctcttgggtagaaagggtacaattgataaaccattgtatatagacaaggcattttggaccgtcgatacaatgtattacacggaagtatttgattgcattatagagaaatatttatattatttagcactgacaattcagtttaatcgttatgcaactaataccgcactgcctagtatgactcaagaacacttaggtaattactcattttcattgtcattcaacctcagtgagcaaaaactaataattaatagcattgaaaaatcattaattaaaatagatgccctaaccgaaaaacagttaaaacaaatcgaactcctcaaagaacgccgcaccgcccttatctccgccgccgtcaccggcaaaatagatctccgcaactggaccgcccccatcgccaaaacggaagcacccacggaggccagcgcatga

SEQ ID NO: 14288 - DNA, 1734 bp, Escherichia coli
atggaaatcatgttaccaaaaaacaccttatatgatagagagcaaaatatcttttttgaaaaggttacggccttaattggagaaaatggtgctggtaaatcctcgattttacaatccgtatttattaactgtttaacaaaaaaatatctaccagaaacaaaggttgtttgtttttcttctggacaaaatgagaaatactcaacgtacttctctgattatctttctcatgaaaggcaagcaaatagaggtcttagcttagattgttgttattacgataaatcatggtcaaagttactaatattcatatccacaatttgtaaatcaaatggtcttgttagaaattttttatgtgagaaaggctatattgatgtatcagatgataaaaatgatgatatatcaagcaagcttacattgacggtccgagtaaattcggcttacgttaatcgagtaaaaatggcattagcacaagaagaacaaggtattgaaaatactttaaggtattcagcttatcataggactttagaaagtttcattaataatattgttaatgctgattatgatttcgagtctccacttgaagctcaagagatcttgctaactcattcaaattttttcaatccatcatttgaggaagcagaagattccttttttgatcctatcataacatttttcactcaagcagcagataatgattactttataataaaaccatcattacagctagagtttaaaaataatatcgaactgaatgatattagtgatggggaatatcaagtactttttttatactctttgcttgatatttttgatagtcctaatactttattcttattagatgagatagattcccatttacattacaagaatattgagctcttatggcatcgactacatagtattaatggttatgcgataacaaccacccatctattagactcaattacagctactgataatgattttaaaaacttaaagattgttgacaaaggaaaaataaaagaagacgataaaataaaaactataatagaacgtttatctgtcttgacaagaatatcagacgtacagttcgaagtgtgtcgtaaactagaaaacatagtattgatggatgattataatgattggactattttttatgccttagcaaagaaaaaaggacttgatgtatcaaagttagatggcctccatgcaataaaacagtcctctggttatgataatttaaatcaagagttcgcaaaaccaaaaatagagtggattaattcgcttttaaatgtaaatactgataaaaaagtcaaaagaatattcatgatctgcgacaaagatgaggctccaattacctatcagaaagatggagttcaagtcaatggaagtgaatattcaaaacatatagcgaagttagaaaataaaaacaaaaataaaatatatctccttgcctggaaaagaagagaaataaaaaactacttattatcttatacggcattgacccatcatggatttatcgagaaaataaacaatggagatctgccagctaacagttatttaaaagaaaacgatcctggagataattcagcaattagccggcttaacgtaaaacattgcatcacaaaaataattgattctgatggtataggattagatatatcaaaactttactcatatatagaacttataccacctgctgagatcagtgaagatatagtgaacatgtacaattttttggtggagaaattaaaatga

SEQ ID NO: 14289 - DNA, 1212 bp, Escherichia coli
atgcttaaaaatatattctttctttttttgattcagatttctaattatatttttcctttgcttacactgccatatttagtaagggtcttaggagcttctcaattcggttctttaatgttagcacaagcattaatacagtactttattactgtaacagagtatggttttaatcttagtgccacaaaaaaaatagccttgtctaaatctcaggatgagactaataaaatatatacaaatacattatatgccagaataatattggcgttgatatgttttattatagctattttatgtacgcaatttattgaaatgtttgagcgtgaatttaatgttataataatactattccttggtgtaattggtaattgttttttccctatttatcttttccaaggactggagttaatgaaaaaaatagcttggataagtattgtttcaaaaacatttatgaccttaagtgtatttgtgttagtcaaagatgcaaaagatataaataatgctgcattagcgttagcaatacctttattactccccggaattatttcttttatttatatttacaatagacagttagcaagagtagtttcatttagctttaggggtattgtaaaagagttgaaggatggaggggccctgtttatttcacaaatagctattagtttttatacgacatttaatgctttaattctggggtatatttttaacccaactatcgtaggcgtttttagcgcagctgataaactaagaatagctgcgcaatcatgttacgtgccaattcaacaggtagttttcccaagaataaataaggaagcaggagaactttcaacaaagttgttaaagtatgggggattttttgtattaatatcattcttgggatcttcattggttttcttttttggagaacaattagcactattatatctaggtaatgaatttattatatcggcaagactctttaaatggatgtcacttttgttgtttattattagtattgcaatagtatttggtcaatggggattaataacattagggaaagaaaaattacttacaaaaatttatgttataggtgcactatgtcatgttggctactctattcctttagttatgggctacaatgtttatggcatgttagtttcagttctcattactgaatttatcatcacactaatgatgatatttagtttttataaggttactcattcggcgatatga

SEQ ID NO: 14290 - DNA, 1425 bp, Escherichia coli
atgattatacccataattatggctggtggtaatggtagtcgtctatggccgctttcaagaacattatatccaaaacagtttctcagtttcgataatagacattcgatgttgcaagaaaccctgcttagattagatggcttacaatgtagtcctcctctgattatttgtaatgaagagcatcgtttcattgttgcagaacaactccgtggtttaaatctgttatcaaataatattattttagaacctgtcggtaggaacacagcacctgctatagccttagcagctttttctatccataaaaataaaccagatgaagatccttgcatgcttgttcttgctgctgatcattctatcaaaaatgatatgttattccgtaaggtggttgaagatgctactaaatatgcacttttaggtcgcttggtaacttttggcatagtacctacaaccgcagaaacagggtatgggtatatccatcgtggtcagagtatgattgactgtaataatgattttgcttttaaggttgataaatttgttgaaaagccaactttggaagtagctcaaagatatattgaatctggtgagtattattggaatagtgggatgtttcttttccgagttagtcgttatctggaagagttaaaaaaatatcgtcctgatatctatgaagcatgtgataaagcgactagttgtattgattacgacttggattttattagaatcaatgaatcggaatttcgatcctgtcccgatgaatctattgactatgctgtgatggagcatactgaggatgctgtggtcattcctatggatgtgggatggaatgatgttggttcatggtcttctctatggagtataagtgataaaaatgctgatggaaactcatgttatggagatgtcataagtcattcaacaaagaattcttatatttattctgagtcttgtttagtaacaactttgggagtagaggatcttattatcgtacaaactaaagatgccttattggttgccaataaaaactcagttcaagatgtcaaaaaaattgtagaaaaaatcaaaaatgaaggacgtcaagagcattttgttcaccgcgaagtttatcggccttgggggaaatatgattctatcgatgaaggatctcgttatcaggtaaagagaattacaattaatccaggtgaaggtatctcgttgcaaatgcattatcaccgttcagaacactggatcattgttgctggtacagcaaaagtcacgctcgatggtgaagttcgtttgcttactgagaatgagtctatttatattccttcaggatcgcctcactgtttacaaaatcctgggaaaatccccctcaatcttattgaagtacggtcgggttcatatcttgaagaggatgatataattcgtattagagatgaaaacgggacagtttaa

SEQ ID NO: 14291 - DNA, 1182 bp, Escherichia coli
atgaagaagattctggttcttaccccccgctttccttatcctgtaattggtggagatcgccttagaatctataaaatttgcgaagaattatcaaagcgatattcattaacattattatcgttatgtgaaaataatgatgaaatgtcttatcatccggacgatggtgtttttactgatattattagaattaaacagtcaaaaatattatcatatttgaacgtattaaaagctttgatatcaggtaagcctttgcaaatagcatattataagaatagacattataaaaataaattaaagcatataatagatgattatgatgcaacgttgtcacatcttattagagttggtgattatgtaaaggatatgagtggtattcatattctcgaaatgactgatgcgatctcaatgaactatgaaagagtcagacaaactgctccttccgtttctttaaaaagtattctttattctattgaatataaacgtttgtttaattatgaaaaggaaatcaccaaaaagttcgcgcttacttctattatatctgaagttgataaaaactatctatcaccatcatttaatgaaaacgtaattgtgtgtgggaatggagttgattttgataaatttcgttttttaaatcgtagaatcgaaagagaagataaaatcaatctcgtttttataggtaatatgtattccttgcagaatcttgatggggtgatatggtttattgataatatatttcaagagttaaacataaatcaagaatatagattttacgtattagggaaaatcaagaatcaagataagaaacgtcttgagaaatatatggatgttattgtcagcggtactgtagaggatattataaatgaagccagtgttggtcatgtaggaatatgccctataagactcggagctggtatccaaaataaagtattagagtatatggcgctcggtatgccggtgataacatctagggtgggttatgaaggtattggtgctaatattaatgaagaaatattaattgctgataatattgatgaatataagtctgctctggaaataattaaagatgatacacaatataaaaatatagcaaaaaaagctcgtttttttgttgagaataaatttaggtggtctcaacaattatcaacgcttaccgataatatcgaggagttattaaaaaaatga

SEQ ID NO: 14292 - DNA, 981 bp, Escherichia coli
atgtcagcgacaatttacttcatcacaaagagagggaactcatttaaatattgtcaaatttctatatacttaccttcaaagcttatacttcaatgtttcttttttttctttatcgcattaaacttttctgaatttatctttgtagctactcatggtggtcatcaagctttgtatatggctgatcgacctttgtttccttttttgatctttaagctattagcattccctgctttttatttcgcgacaattattattcttactaaaaattatgtggtttcaagattgttagtttggattgctctattcagtcctctgttgacaggtagtagaggaatgaccatttttttattattggcctatctatttgttacttttgggccatttttctttatcagattcaaatttgccattcttggttttttaatgattattagctttattggtataggttattatcgtgaaccgattaatatgagtatagcggattatatattattggttgtatcatctttaaatgagttcgcatttgcgtctatgaatatttctaattgccaaatccctttttcaaatgtgtttactcaattcggtgatatattcttaggagcaaaaagtgactttcgagttgctactcttctgaccgaatgtgtttcccctggcgctagtgagaaaggttatggcatttcatccagcattgtaggtgagtctaagatacttggtggcaatttatggtttctttactttattgctattttgtctataaattcaattatgatatcgattttgttgcgatctggctcacgtctttcgcatatggttggcatttcattattaccatttatcctctattcagtacgcacagagattgtttatccttatgtttttttaataaaaatccttatttatatcttaatagctatgataattaatcagatcttagtaaaaagcagtgctgtaaattacaagcagacgtggggaaattag

SEQ ID NO: 14293 - DNA, 558 bp, Escherichia coli
ttgggatatcataaggtttctaatgtagagattgaaaacttcatcaaggcagggagagagcttgatgcgatatgtatcgtaactatctcgggttccggtaaaaataaagactttggtggtttagttgaaagattaaataaccttaacgttcctgtatatttagttgcttttggttttgccaataatttttgtgaagaatttaataatgttaatgttttttcaccaggagttgtggattcgaatttaattggttcggtaataacaaatagcgatttattcgtgtttcactcaactagtgaaggttttgggagaccaattattgaagcacttgaattaaaggctaaagtaatatgttcagatgtttctccttcccttgattatattaatgaagagtatctgcctaatctctatatctatagtttaagagacatgaatgaattcaagtatcaatttgataaagcactacggacgccaaaaaggttaattcaaagtgactcagttttgacttataatgacgaggatttattcaatgaaatatctcgaataattgaggcctaa

SEQ ID NO: 14294 - DNA, 123 bp, Escherichia coli
atgaaattgttctacaaaccgggcgcctgctctctcgcttcccatatcaccctgcgtgagagcggaaaggattttacgctcgtcagtgtggatttaatgaaaaaacgtcctcgaaaacggtga

SEQ ID NO: 14295 - DNA, 144 bp, Escherichia coli
atgggaaaccggacaaaagaggatgaactgtaccgagaaatgtgcagagttgtcggtaaagttgtgctggaaatgcgcgatctggggcaggaaccaaagcatattgttatcgcaggcgtattacgtacaattgatatatgctga

SEQ ID NO: 14296 - DNA, 444 bp, Escherichia coli
atggcggaacatggtgcgctggcgaccctgaaagatctggcagaaaaagaggtagaggatgccgctcgcctgctgggtgaaatgcgtcgcggatgtcagcaggcggaagaacagctcaaaatgctgatcgattatcagaatgaatatcgcaataacctcaatagcgatatgagtgccgggatgaccagcaaccgctggatcaactatcagcagtttatccagacgctggaaaaagccattactcagcatcgccagcaacttaatcagtggacgcagaaagttgacattgccctgaacagctggcgagaaaagaaacaacgtttgcaggcctggcagacactgcaggaacggcaatccacggcggcactgcttgcagaaaaccgcctcgatcagaaaaagatggatgagttcgcccagcgcgccgccatgaggaaacctgaatga

SEQ ID NO: 14297 - DNA, 708 bp, Escherichia coli
gtgggaaaagagaaaaaatcacgcattctgacgaaaccgtgcgttattgagtatgaaggccagattgttggctatggttcaaaggagctgcgcgttgaaaccatatcctgctggctggcccgcacaattattcagacaaagcactattcccgccgttttgtgaataactcttacctccacctgggagtattcagcggacgcgatctggttggcgttctccagtggggatatgcccttaaccccaactcaggtcgtcgtgtcgtgcttgaaacggataaccggggctatatggagttgaatcgcatgtggctacacgacgacatgccccgcaactctgaatcacgggccatcagctacgcgctgaaagttatcagattactgtatccgtcagtggagtgggttcagtcctttgctgacgaacgctgcggacgcgcaggcgttgtgtatcaggcgtcgaattttgattttattggcagccatgaaagcacgttctacgagctggatggtgagtggtatcacgagataacgatgaacgcgattaagcgaggtggacaacgaggcgtgtatttacgggctaataaagagcgtgccgtggtgcacaaatttaatcagtatcgctacatcaggttcctgaacaagcgagcaaggaagcggctaaatactaagctattcagggttcaaccataccctaaaagcactcccgattag

SEQ ID NO: 14298 - DNA, 189 bp, Escherichia coli
atgaaatcaattcgctgtaaaaactgcaacaaactgttatttaaggcggattcctttgatcacattgaaatcaggtgtccgcgttgcaaacgtcacatcataatgctgaatgcctgcgagcatcccacggagaaacattgtgggaaaagagaaaaaatcacgcattctgacgaaaccgtgcgttattga

SEQ ID NO: 14299 - DNA, 582 bp, Escherichia coli
gtgctgattggctatgtaagggtatcaacaaatgaccagaatacagacctgcaacgaaacgctcttgtttgtgcaggatgtgaacaaatatttgaagataaattaagcggaacaaggacagacagacctggattaaaacgcgctttaaagcgccttcaaaaaggtgacacacttgttgtctggaaactggatcgcctcgggcgaagcatgaaacatttgatttctctcgtaggggaattacgagagcgagggattaattttcgcagtcttactgacagtattgatacgtcatctccaatggggcgttttttcttccacgttatgggtgccctggctgagatggaacgagaactaatcatcgagcgaacgatggctggacttgctgccgccagaaataaaggccgtattggtgggcgaccacctaaactaaccaaagcggaatgggagcaggccgggcgtttattagcacaaggaatcccccgcaagcaggttgcattgatctacgatgtggccctgtcaactctgtataaaaaacaccccgcgaaacgagcgcatatagaaaacgacgatcgaatcaattaa

SEQ ID NO: 14300 - DNA, 534 bp, Escherichia coli
atgatgcacttaaaaaacattactgctggcaaccctaaaacaaaagagcaataccagctaacaaagcaatttaacatcaaatggctttattcagatgatggaaaaaactggtatgaggaacaaaagaatttccagccagacactttgaaaatggtctatgaccataacggcgttattatttgtattgaaaatgatgtttcagcaattaatccggaaggcgcaagcgtcgttgaattacctgatattacagcaaatcgccgggctgatatttcggggaaatggttgttcaaagatggcgtagtgataaagcgaacttataccgaagaggaacagaggcagcaggcagagaatgaaaagcaaagcctgttgcaacttgtcagggataaaacccagctatgggactcacagctacggctgggcatcatttccgacgagaataaacaaaaattaaccgagtggatgctctatgcgcagaaggtcgaatccacagacacctccagcctgccagtaacgtttccagaacaaccagaatga

SEQ ID NO: 14301 - DNA, 531 bp, Escherichia coli
atgatgcagcatttaaaaaatattaagtctggaaatcctaaaacgaaagaacaatatcagctaacaaagaattttgatgttatctggttatggtccgaagacgataaaaactggtatgaggaagtgaaaaactttcagccagacacaataaagattgtttacgatgaaaataatattattgtcgctatcaccaaggatgcctctacgcttaaccctgaaggctttagcgtcgttgaggttcccgatataacagccaatcgtcgtgccgatgattcagggaagtggatgtttaaggacggagctgtggttaaacggatttatacggctgacgaacagcaacaacaggccgaatcacaaaaggccgcgttactttccgaagcagaaagcgttattcagccactggaacgcgctgtcaggctgaatatggcgacggatgaggagcgcgcacgactggagtcatgggaacgctacagtgttctggtcagccgtgtggatacggcaaatcctgaatggccacaaaagcctgaataa

SEQ ID NO: 14302 - DNA, 543 bp, Escherichia coli
atggctgtaacaccctatcagacggcctttctgcaattactgccgtcagggcttgcctggaataaaagccccgacagcaaattatctgcgctggcgcaggccattagcgacgtgattgccactgcggcggatgatgcgcggcaaatgctgcgggagcgtttcccgtccacatcccgctggtatctgggggagtgggaatcatttctggggttgccggactgtaccagcgaaaacggcaccctgtccgaacgccagcgggctgccgcgaataaaatgcgtatgaccggcaatctgagtcggcgcttttatgaatggctggctgcgcagtacggttttaccgtcaggctgacggattccacagaaggccagtgggttacgcaggtcaatatttacggtattaaaaattatcgcaacgcaacggtgctggataatgttctgacgccgttacgtgtttatgaatcgggtgcgctggaatgtttactggagaaatataaacccgcgcatcagatttataaatttgtttaccatgacggagataactaa

SEQ ID NO: 14303 - DNA, 1083 bp, Escherichia coli
atggcttattcaccaccgacattatcatcgctgattgcccgtacagaacagaatattgaacagcgcctgccgggtagctggcctcaggcccgtgaaaaaacgctgagtgccattgcttatgctcaggcaggccttgctgccggttgtcacgagcatatttcatgggttggacggcagattatcccgtcgacagcagatgaagatgagttgctggagcactgccggttctggggcgtgcgccgcaaacaggcgacagccgccagcggcccgctgactgtcaccacatcggcagcgaccaccattcctgccggtacacgctggcagcgtgctgatggtgtggtttacagcctggctgatgccattgtgattgaccgtgcaggaacgacggaaattaccgttaccgcactggctgccggtgaagcaggaaataccggtgagaatacccttttaacgttgatcaccccggttgcctgtgttgtttccgatgccatcactgtaaaagggttttccggtggggctgatattgagagtgcagcggagctgctgtcacggctggaatatcgtgtccagtatcctccgttcggcggtaatcagtttgattacgtccgctgggcacgtgaagtcagcggcgttacccgtgcctggtgttttccgacatggaaaggcggtggcacagtcggggtgacgtttgttatggataaccggagcaatatttttccacaaccggcagacgtggaacgcgtggcagattatatcgccggtcatactgacccgatcaccggtctgattgtcggacagcctgacggtgtaaatgtcactgtatttgcgccaaaggcaaagccggtaaatccacggatttatatatcaccgaagacagccgaactgaaacaggctattacccacgccattaataccatgttttttaatgaggtgacgccgggcggcgcacttgccccctcccgtattatccgtgcggtggcaggtgttaccggtctggatgattttgaagtgcgtttcccgacagagatccagcgttcggagaatacggaactgttaacaccggggacaattgaatggctgtaa

SEQ ID NO: 14304 - DNA, 438 bp, Escherichia coli
atgaccgatttagccattatctggacgaacggacgcggcgatattgcacaggatggcattgatatgctgaccgacgacagtctgacgaccgatgtgacaatctccctgtttaccgaccggcgcgcgctggattctgacacgctgccggatggttcagatgatcgccgtggatggtggggtgacagttaccgcgaccgccccatcggttcgcggttgtggctgttatcacgtgaaaaagccacaccggatacgctggaacgcgccagagggtatgccgaagaggcgctggaatggctgaaaacagcgggccgggtaagtgcgattaacgtcagagcggaacagttacatcagggctggttatacctctacattgcactgacattaccggatggttccgttattccttatgagtttaaagcagcatttaacggggtttaa

SEQ ID NO: 14305 - DNA, 594 bp, Escherichia coli
gtggaaagagtaaatgattccgccatgaaccgcctgctgacaccgctgatgcgtcgtgtgcgtctgatgcttgcgcgtgccgttgttaacgtgattaacgacgggcgaaaggttcagaacctgcaggtcggtctgctggatgatgaggaatctgatgaagtggagcgcctgcaaaattacgggcatttcagcgttcctctgccgggcgcagaggcgctgattgcctgtgtgggtgcacaacgtgatcaggggattgccgttgtggtggaagaccgccgctaccgcccgacaaatcttgaaccgggtgatgcaggcatttaccaccacgaggggcatcgtatcaggctgacaaaggacgggcgctgcatcattacctgtaaaacggttgagatttacgctgatgaaagcatgaccgttgatacacccagaaccacgtttaccggcgacgttgagatccagaaaggtctgggcgttaaaggtaaaagccagttcgacagcaatattactgccccggatgccatcatcaatggcaaatcgacggataagcatatccaccgcggcgacagcggcggaaccacggggccgatgcaatga

SEQ ID NO: 14306 - DNA, 1140 bp, Escherichia coli
atgagtaataccgtcacgctgcgaacggatggcaggctttttaccggctggacgtcagtctctgtcacccgctcgattgaatccgtagccggatattttgagctgggggtgaacgtgccaccgggcacggatttatccgggctggctccggggaagaagttcacgctcgaaatcgaggggcagattgtctgcaccggttatatcgattcacggcgacgccagatgaccgctgacagtatgaaaatcactgtcgccggacgtgacaaaacggctgacctgattgactgtgctgccgtttacagtggcggacagtggaaaaaacgcacactggagcagattgcgcgtgacctgtgcgctccttatggcgttaccgttcgctgggagctttccgataaggaaagttcggcagcttttcccggcttcacgctggaccattcagaaaccgtttatgaggcgctggtgcgtgcctcccgcgcacgcggtgtactgatgaccagcaatgccgccggagagctggtattcagccgggctgccagcacagccactgatgagctggttctcggagaaaatctgctgacgctggattttgaggaagacttccgcgaccggttcagcgaatacaccgtcaaggggtatgcccgcgcaaatggtgctgagggtgatgatattgatgcgaaaagtatcgtctcccagaaagggaccgccactgacagtgatgtgacccgttacagaccgatgatcatcattgctgacagcaagattactgcgaaggatgcacaggcccgcgccctgcgtgagcaacgccgcagactggcaaaatccatcacctttgaggcagaaattgacggatggacacgcaaggacgggcaactctggatgccgaacctgctggtcactattgatgcctcgaaatatgccatcaaaaccacagaattactggtcagcaaagtcaccctgatactgaatgaccaggacgggctgaaaacccgcgtcagccttgcaccacgcgaaggctttctggtgccggttgaaagcgaccgtaaaaacaggaaaggcggcgacagtaacggcggtattgatgcgctggttgaagattattatcgcagacacccggagaaaacgccgccgtggaaagagtaa

SEQ ID NO: 14307 - DNA, 1488 bp, Escherichia coli
atgtttgaagatgctttaaatgtcgttaatgctgtccgggataaaaccggtggaggcaggaaaacaaccggcaaaggcacgttccgtaacgtgccgtttctcgtcatcgaggagcaaaaacaggctggcggacgtcgcctggttaaacgcgagtacccgttacgtgataccggcggcgtcaatgacctggggaaaaagcttcgctcccgtacattcagcgcctgcattctgaacagcaacgcagaaacagccagagatgaagcgggtgcgctgatggatgctcttgatgctccgggtagcggtgagctggtacatcctgatttcggcactgtggacgtcatggtggattcatgggaatgccgcactaaagcggatgaactgaattattacgcgttcaccgttaccgtttatccgtcgttgcaggatactgccccggacgcagagacagacaccagtgcagccgtaccggcacaggccgttgctgtaaccggttctctgggagatacgctgtcctctgtctggcagaccgtaaaagatggcactgcggcggcaaccgccgtgatggaagctgtaaccggtgtcatcgatgatatcagtgatgcggtggacaatctgggggttacgcagactgtcagcggtctgatgggatcgctttctgcgatgaaaggctctgtgaccagcctgattaaccagcctgccatgctggcctcctcgctgatggggacgctgtccggcgtttcatcgttatgcgatacccggacagcattttccacatggaaccgtctggcgcagcgattcgaacgtcgccatgctgccaccgcaggcagacaggggacaatcacaacctcgtacaacagtccggttgcagaaaaaaatattgccacactgaactacgtcatgctggcagcggcgcagacataccgggcagaagctgccagccaggcactgactgcggcactggatttcagtcgccggatggataatgccgcccgtgcacctgtactggatgccccgtccaccacaaccggcacagccatcggggccagcagcacatccgctaccgtcacacagggacagttacagttaactgccataaccccggacggcggtttttcacaggtatccttttcagacagtggtacagccacgcccccggtatttgaaagtgtgtccgatatcggaaaaacagccgccatgctgggggctgcactggataccgtcattctgacggcatctgagcagggcttttcgacagacagcgttcagcttacgcaactgcgtctgctggttgttgccgacctggaaaaacgcgggctgcaactggcgggcagtgaaacgcaccgcctgccggagacgatgcctgcaatggtggccctgtaccgttacacaggaaacagccggaactggcaacggctggcccgcaggaacggtatcagcaacccgttgtttgttcccggtggtgtcagtattgaggtgattaatgagtaa

SEQ ID NO: 14308 - DNA, 2073 bp, Escherichia coli
atgaccgggaaacgcttaaaggcgtctgtcattattgatcttaatggcaatctttcccggcgttcccgccagtattcgaaccagataaacgccctgtcccgtagcgggcaaagttcccttcgtgccctgcgtatggaggttgtgcgcgtttctggtgccattgacagaatgggttcactgtcaacccgtacattccgaatgctgtcagccggggcgctgggtatcgctggcgtgggttacaccgccaataaactgtttattggtgcagccgcccagcgtgagcagcagatcatcgccatgaactcgctgtatcacggcgataaggtcagagcgcaggccatgatggcctgggcaaagcagaacgcgaaggacaccacgtgggggctgagtggtgttctggatgagatccgttcgtcgaaaggcttcggcatgacggatgaacagacgaaacagttcatcaccatgttgcaggatcagggggccatgcacggctgggatttacccactgcccagggtgcctcactgcaactgaaacagatgtttgcccgccagcaaatcacagcggcggatgccaacctgctgaccggttacggtatcaacgtttatcaggcgctggcggatgcaacgggaacggacgttaaaaaaatccgtgatctgggtacaaagggcaagctgggcctgaaatccattctgacggtattcagaacgctgtcagaacagtcaaaaggtgcacaggccagtgcgatgaactcctgggacgggatgttcgcccagatggaagccaacctgcttgaatttcgcataaaggtggcaaacagcggcccctttgaagaaatcaagaacgagatgcgccgggtgcttaactggcacgacatggcggataaatccggggaacttgacgcactggcagaaaacattggtcagaaatttctgaccacgttcagaacggtaaaaatcgcggcgcaggagttatggcgctggctgaaaccgggtaaagatgcgctggcatgggttgaccagaatattgtcagcctgaaaaaactggctgctgttctggtgtctgtctggcttgccaataaagccctgagagcaggctgggccgtggcaaaaccctcatggcaggttgccagttatccgtttaaaaccgggcgtcgtatgtggcgctggatgcgaaaccgcaaacgtgggcaggcagggctgccggtcccggatgccatgacgtctgagacgctgttgcagggtatcggcattcagcgtgtgtttgtcatcaactggccccgtggatttggtggctacgggagtggcggcggtcgtcgcgtacggagcggcggaagaatggccccgctgttaccccgccagccgttattgctgtccgggccacagccgctggcattacctgcaccacgccctgtactggcattacccccacccggcgtaccggtaacggcacggcctgcaccattacctttacccggtaaatccggtcttctgagcaggcttgcaggcagtgctgccgggcaactggttacgggaacggtcggaaagctggctgatgccgggcgtgccgctggcgggtggttttccggtatcggaaacaaacttgcaggcagtgcgatcggtcgggttgtgacaaaaggtgccggggcgctgggctggatggggaaaggtgccggtcgtgcgttgtcacgtctgggtggcccggtaatgggggcactccagcttgcccccgtcctgatggatgagcaggcgtcaacccatgaaaaagcaggcgcaattggcagtacagccggtgcatggctcggcggtgccgttggcagccttgccggaccgctgggtacggttgccggtgccacgctgggcagtgtcgccggggagtatctgggcggttttgtaaccgacctgtatcagaaatggacggccacggataaggaaccgcaggaacaaaaagtcaatgcggaagcctcgctgcgcgtcgaacttggcgaggggttacgtctgaccagttcccgcgtcaccgaggacggtatggggctgaatatttacgcgggcgataactacattacgggctggtaa

SEQ ID NO: 14309 - DNA, 435 bp, Escherichia coli
atggacgaaatgaatttaggtcctgaagcacaggaactgcatgacagcattgtggcagaaattcagtcaggcgtgctgaaactgaaagacggcctgccgttcggcaccggtgacgagactgaaatgcagtatgacgtgacactgcgtgaactgaccgcaggcgatatgattgatgcacaggcggctgctgaaaagctggtaatgagcaaggaaggtccggtgctggtcagttccccgtcccggatgggactggaaatgctgcgccgacagattgccagcgtgggctgcatcaaaggcccgttgtcgatggcgctgattcgtaagctgtctgtcgatgacttccagcgtctgtcgctggccacagaaatgtacgacatggctgtggcggcatcgctgacgcaagaacgggggcgagtggctgcggtgccggaatga

SEQ ID NO: 14310 - DNA, 357 bp, Escherichia coli
atggctggaaatcagcgtcagggggtggcgttcatccgtgtcaatggcatggagcttgaaacgatggaaggggcctccttcacaccttccggcatcacccgtgaagaagtgaccggctcgcgggtttatggctggaaaggtaaaccacgtgccgcaaagctggaatgcaaaattccgggcggtggtgatatcggtctggatgaaatcatcggctgggaaaacatcacagcagagtttcaggcagacaccggtgaaacctggatgatggcgaatgcctggcaggcagatgaaccgaaaaacgacggcggcgaaatttcgctggtactgatggcaaaacaaagcaaacgcattgcataa

SEQ ID NO: 14311 - DNA, 1488 bp, Escherichia coli
atgagcgatatttcatttaacgcgatcccgtcagatgttcgcgttcctctgacgtatatcgaatttgataacagtaatgccgtcagcggaacaccggccccccgtcagcgcgtgctgatgttcgggcaaagcggaagtaaagccagtgcggcaccaaacgtgcctgtccgtatccgttccggctcacaggccagtgcggcgtttggtcagggttccatgctggcactgatggcagatgcattcctgaacgctaaccgcgtggcggagctgtggtgtatcccgcaggggaatggcaccggtaatgctgctgtcggtgaaatttcactgtcaggaacggcaggcgaaaacggctcgcttgtgacttacattgccggtcagcgactggcggtatctgtcgcagcaggtgcaacgggagcggcgctggctgacctgctggttgcccgaatcaaaggccagcctgatttaccggtgacggcagaagttcgcgcagacagcggggatgatgacacccatgcagatgtggttctgagtgcaaaatttacgggtgcattatctgccgtggacgtgcgctggaactattacgcgggtgaaacgaccccttacgggattatcacggcattcaaagccgcctccgggaaaaatggcaacccggatatcagcgcaagtatcgcgggaatgggcgatctgcaatacaaatatattgtgatgccctataccgatgaaccgaacctgaatctgttacgcactgaattgcaggaacgctggggaccagtcaatcaggctgatggctttgccgtgacagtgctgtccggcacgtatggggatatttccacgtttggtgtcagccgtaatgaccatctgatttcctgtatggggattgccggtgcaccggaaccgtcatatctgtacgccgccaccctgtgtgccgttgccagccaggcgctttccatcgacccggcgcgtccactccagacgctgacgttgcccggaagaatgccgcctgcggtgggggatcgtttcacctggtcagaacgtaatgcgctgctgtttgacggcatctccacgtttaacgtgaatgatggtggtgaaatgcagattgaacgcatgatcacgatgtaccgcacaaacaagtacggtgacagcgatccgtcttatctgaacgtgaataccatcgccacgctgagttatctgcgttattcgctgcgaacccgcatcacgcagaaattcccgaactacaagctggcaagtgatggcacccgctttgccaccggtcaggccgtggtaacgccatccgtgatcaaaacggagctgctggcactgtttgaagaatgggaaaacgccggactggtcgaggatttcgacacgttcaaagaggagctgtatgtggcacgtaacaaggacgacaaagaccgccttgatgtgctgtgcggcccgaatctgattaaccagttccgcattttcgcggcacaagttcagttcattctgtaa

SEQ ID NO: 14312 - DNA, 207 bp, Escherichia coli
atgatgctgaaaattaaacccgcagcgggaaaagccatccgtgacccgctcacgatgaaattactggcgtctgagggagaagaaaagccccgtaacagtttctggatacgtcgccttgcagccggtgatgtggttgaagtcgggagcaccgaaaacacggcggatgataccgtcgctgtgccgaaaaaacggagtaaatcgaaatga

SEQ ID NO: 14313 - DNA, 549 bp, Escherichia coli
atgctggaagaaaccgaagccgcactgctggcgcgcgttcgtgagttgtttggggcaaccctgcggcaggtggaaccccttaccggcacatggactaacgaggatgtgcaccgtctctttctggccccgccatcggtatttctggcatggatgggctgtggtgaggggcgtacgcgtcgggaagttgaaagtcgctgggcattttttgtcgtggcggagttgctgaacggggaacaggtaaaccggcccggtatttatcagattgtggagcgactgattgccggtgttaacggtcagacgtttggcccgaccaccgggatgagactgacgcaggtcagaaatctttgtaacgacaaccgtatcgatgccggtgtggtgctttacggtgttctgttcagtggcactaccccgttaccgtccgtggtggatacggactcgctggatgattatgagcgtcactggcagacctgggaatatccggacggaaccccggaatttgccgcacatatcaatgtgaatcaggaaaaggatcatgatgctgaaaattaa

SEQ ID NO: 14314 - DNA, 426 bp, Escherichia coli
atgaattacgcgacggtaaatgacctgtgcgcccgctatacacgtacgcggctggatattctcacccgccctaaaacagcggacgggcagccggatgatgccgtggcagaacaggcactggcagatgcttcggcctttattgatggctatctcgccgcgcgctttgttctgccgcttaccgtcgtcccctcactgctgaaacggcagtgttgcgtggtggcctggttttatctgaatgaatcacaacccaccgagcagctcatcgcaacttacagggacacggtgcgctggctggaacaggtgcgcgatggcaaaacagatcccggcgtggaaagcaggacggcagcctcgccggatggtgaaaaccttgtgcaggtgcagtctgacgcgccggtcttctcacgaaaacagaaggggtttatctga

SEQ ID NO: 14315 - DNA, 411 bp, Escherichia coli
atgtcaggcacttcgcttaattcacaacggctggacacttctcgcatcacttgcacggcgattattaaatgccttcgtccggtctaccgccgcgccggaatcgcctttacgcgtggcgaaaacaccgtggaagtcaccgaagaacaactggcgatcattcgtgccgacagcgtgctgtctgtggtatctgcatcgtcagcagaaacgctcgctgaggctggggggctggacgttctgggtgtgggcgatctgaatacccgtatccgtgcgaccgttgccggtctggataaggcaaacccggaacactttaccgcagggggggaacccaaagtgaaagccgtcagtgcggcgctgggggaaccggtgagcggtgcgcaaatcaaagcggcgctggctgaggtggatgcatga

SEQ ID NO: 14316 - DNA, 918 bp, Escherichia coli
atgattgtcaccccggcatccattaaagccctgatgacctcctggcgtaaggattttcagggcggtcttgaagacgccccgtcgcagtacagcaaaattgcaatggtggtgaactcttccacccgcagtaatacctatggctggctgggtaaattcccgaccctgaaagaatgggtgggtaagcgaaccattcagcaaatggaagcgcatggctactccatcgccaataaaacgtttgaaggcaccgtgggtatttcccgtgatgacttcgaggatgacaatctgggtatttatgcgccgatttttcaggagatggggcgttctgcggcagttcagccggatgagctgatttttaaacttctgaaagatggctttacccagccgtgctatgacggtcagaacttcttcgacaaggagcatccggtatatccgaatgtggacggcacgggcagcgcggttaatacctccaacatcgttgagcaggacagcttcagcggtctgccgttctatctgctggactgctcccgcgcagtcaaaccgctgattttccaggagcgccgcaaaccggagctggtcgcacgtacccgtatcgatgacgaccacgtttttatggataacgagttcctgtttggtgccagcgcccgccgtgctgccggttacggcttctggcagatggctgtcgcggtaaaaggcgatctgacgctggataacctctggaagggctggcaactgatgcgatcttttgaaggtgatggcggtaagaagctgggcctgaagccgacgcatatcgttgtaccggtcgggctggaaaaagccgcagagcaactgcttaaccgtgaactgttcgcggatggcaataccaccgtctccaacgagatgaagggcaagctgcaactggttgtcgctgactacctgtaa

SEQ ID NO: 14317 - DNA, 1086 bp, Escherichia coli
atgaaaaaacacgcgattggcattgccgcactgaatgcgctgtccattgacgatgacggctggtgccagctattgcctgccggtcatttcagtgcccgtgatggtcgcccgtttgatgtgacaggtggtcaggggtggttcatcgacggtgagattgccgggcgtctggttgaaggcgttcgcgcgctcaaccaggacgtgctgattgattacgagcataaccagctacgtaaggacaaaggattacccccggaacaactcgtcgcggctggctggtttaacgccgatgaaatgcagtggcgtgaaggtgaagggttatttatccacccacgctggacggcggcggcccagcagcgcatcgatgacggcgaatttggttatctctctgcggtttttccgtatgacaccgccaccggtgcggtgctgcaaatccgccttgctgcgctgaccaatgaccccggtgccaccggcatgaaaaagctgaccgcactggcggcagaccttcccgacatccttcaacaggagaacaaacccatgaatgaaacgctgcgcaagctgcttgcgcgtcttggggtgactgtccccgaaaatgcagacatcaccgatgaacaggccagcgcggccctgagtgcgcttgatgcgctcgaaacagatgccggaaaagtggcgtcgttatccgccgaactggaaaaggcacagaaagccgccgttgacctgacgaaatacgtccctgtggaaagctacaacgccctgcgtgatgaactggcacaggcgactgcacaaagcgccacagccagcctgagcgccgttctggacaaggcggaacaggaaggccgcattttcaaaagcgaacgtacctacctggaacagcttggcggtcagattggcgtggcggcactgtcggcacagcttgagaaaaaacagcccatcgctgcgttatctgccatgcagaccaccacagcgaaaatcccgtcgcaggaaaaaccggcggtggcggtgctgtctgctgatgaacaggcagcagtgaaggcgctcggcattactgaggctgagtatctgaaaatgaaacaggaacaagaaaaatga

SEQ ID NO: 14318 - DNA, 471 bp, Escherichia coli
gtgagtcttgatatgaacgttgccgtggatgtgcgacgtattcagcttgcactggatgaactgggaaccgttacacgtgaccgcgccattccccgtgtgatggctgcggcgctgctgtcatccacggaacaggcatttgaacggcaggcagacccggatacagggaaaggctgggaagcgtggagcgattcgtggcaggcatggcgtcaggatcatggttttgttccgggcagtattcttaccctgcatggcgatctggcacgcagcattaccaccgattatggacaggattatgctctgattggttcgccaaaaatttatgctgccattcatcagtggggcggtacacccgatatggcaccccgcccggcaggcgttcctgcgcgtccttatatggggctggataagaccggggaacaggaaatttttgatgccatcagaaaacgcgtcagcgccgctctgaggcaataa

SEQ ID NO: 14319 - DNA, 1320 bp, Escherichia coli
atgccgcagcagaccattgatctggcgtatgccgcacgcctcccgccaaaggaggctgtcgcgtatttccgcgccaaaggctacaacatcacctggaactggtacgaacaactggcagacgcgcacgcccgcgcctttaccgttgccaaagccacccggatggatgtcctgaccacaatccgtgaggaagtggagcgggctgtcagtgaaggcatcacccgtgaggaatttacccgcacactggccccccggctgcaaaaactcggatggtggggaaaacaaatcatcgtggatgcagagggaaacgcaaaggtaatcgagctgggcagtccgcgtcgtctggcaaccatttataacgtcaatacccgtacggcgtatggggcaggacgttatgcgcagatgatgaataccgcagatttgtatccgtactggcagtatgttgccgttatggatggcagaacacgcccggaacatgcgcggctgcacaatatggttttcaggtatgacgacattttctggcagacgcattacccgcccaatggctggaactgccgctgtcgcgtccgggcggtgtctgcggcccgcatgaaagaactggggctacaggtcagttatggtgcgtcattcatgaacacccgcgaagtggatgccggtacggatgaaagcaccggagagattttccgcacatcgtcaaccacatttgacaacggtcgggtaaaaatgacgccggatgtaggctggtcatataaccctggttcggcggcatttggtacggatcaggcactgattcgaaaactggtggaaattcacgacgcgcagctgcgtgagcaggttgtgcagacactgaataacagccgggagcgtcagcttgccttttccctctggcttaaacgcctggcaggatcacgtcaggccggtcatgaaatccgggcactgggttttatgacggaatcggtagctgaagccgtacatcagcgcaccgggaatatgccagcccgtctgcttgtgatgaacgggaaaagtctggcgaccactgctgatgccgccctgaaaccggaggatttacagcatctgccgtcgctgatggcaaaaccacaggcagtattgtgggacagggagaaccaccagttgctgtatgttgtggcaacccgtgacggcatggcccggattgaggtcagaacatcacagacagtcggcaggcagaatgaccgggcggatgtgctggtcagtgtcagccgcgtatctgcacagtcgcttgaagccgcgattgctgacgggatgattgacatactggaggggcatgtggaggtgaataagtga

SEQ ID NO: 14320 - DNA, 1539 bp, Escherichia coli
atgggccgtattctggatatttccgggcagccgtttgattttgacgatgaaatgcagacccgcagcgatgagctggcaatggtcatgaagcgcacgcaggagcatccttccagtggtgtgacgccgaaccgggccgcgcagatgctgcgtgatgccgaacgcggtgatctgaccgcacaggctgacctggcctttgatatggaagaaaaggacacccaccttttttccgaactgagcaagcgccgccttgccattcaggcgctggaatggcgcatcgctccggcacgtgatgccagcgcacaggagaaaaaagacgccgacatgctgaatgaatatctgcatgatgcggcgtggtttgaagatgccctgtttgatgccggtgatgccattctcaagggttattccatgcaggagattgaatggggctggctgggcaaaatgcgcgtgccggtggcgctgcatcatcgcgatccggcgctgttctgcgcgaaccccgataatctgaacgaattacgtctgcgtgatacgtcttatcacgggctggagctgcaaccgttcggctggtttatgcaccgggccaaatcccgcaccgggtatgttggcaccaatggccttgtgcgcacgcttatctggccttttatttttaaaaactattccgtgcgtgattttgcagagtttctggaaatttacggactccccatgcgcgtcggtaaatatccgaccggctccacaaaccgtgagaaagccacgctgatgcaggccgtgatggatatcgggcgacgtgccggtggcattattccgatggggatgacgctggattttcagagcgccgcagatggtcagtcagacccctttatggcgatgattggctgggcagaaaaagcgatttcaaaagccattcttggcggcaccctgaccacagaggctggcgataaaggtgcacggtcgctgggtgaagtgcatgatgaggttcgccgggaaatccgtaacgcggatgtgggccagcttgcccgcagtattaaccgtgacctgatttatcccctgctggcactgaacagtgacagcaccattgatattaaccgcctgccgggcattgtatttgataccagtgaagcgggtgatattacggcactgtctgacgccattccgaaactggcggcgggaatgcgtattccggtctcctggatacaggaaaaacttcatattccacagccggtcggtgatgaagccgtgtttactgctcaaccggttgtcccggataacggtccgcagaaagaggccgcattatccgctgaagatatcccgcaggaggatgatatcgaccggatgggcgtctcaccggaagactggcagcgttcggttgatcccctgctgaaacccgtcattttttctgtgctgaaagatggcccggaagccgccatgaacaaagccgcttcattatatccgcagatggatgatgcagaacttatcgacatgctgacccgtgccatttttgttgccgatatatgggggcgtctggatgccgcagcagaccattga

SEQ ID NO: 14321 - DNA, 1656 bp, Escherichia coli
atgaacaccagagaaaacaatcttaaagcccttcatgccccccgaaaaatcgacctgcgtaaggaagccgaactgctgggcgtgaatatcgttaccgatatcggggaagcacagcctcgcaatgaaccggtttttctgggttatcagcgccgctggtttgaggatgaaagccagatttgtattgctgaaaaatcccgtcgtaccggtctgacatgggccgaagcgggccgcaatgtcatgacggcagcaaagccgcgtcgccgtggcggtcgcaacgttttttatgtgggttcccgtcaggaaatggcgctggaatacattgccgcctgtgccctgtttgcccgcgcctttaaccaactggcaaaggctgacgtatgggagcagaccttctgggacagcgacaaaaaagaagaaatcctcacttatatgatccgtttccctaacagcggatttaaggtgcaggcgctgtcaagccgtccgtctaacctgcgtggtttgcagggagacgtggtgattgatgaggcggcatttcatgaagccctggacgaactcctgaaagcggcttttgctctcaccatgtggggtgcccgcgtgcggatcatatcgacacataacggcgtcgataacctgtttaaccagtacattcaggatgcgcgcgaggggcgcaaggattacagcgttcaccgcatcacgctggatgatgccatcgctgacgggttgtaccgacgtatctgttacgtcacgaatcagccgtggtcgccggaagcggaaaaagcctggcgtgatggcctgtaccggaatgcgccgaataaagagagtgccgacgaggaatacggctgcattcccaaaaaatccgggggcgcttatctgtcacgcgtgctgattgaagccgccatgacgccagtgcgggatatcccgattctgcgttttgaagccccggacgattttgaatcgctgacaccacaaatgcgccacggcatcgttcaggactggtgtgaacaggagctgctcccgttgctcgatgcgctgtcgccgctcaataaacacgtactgggcgaagactttgcacgccgtggcgacctgacggtgtttgtgccgcttgccatcactcctgacttacgcaaacgcgaatgtttccgcgtggagctgcgtaatgtgacctatgaccagcagcgacaaatccttttattcattctgtcccgtttgccccgttttaccggcgctgcatttgatgccaccggtaacggcggttatctggcagaagccgcccgtctgatttatggcccggagatgatcgactgcatcagtctgaccgccgcctggtatcaggagtggatgccgaaactgaaaggcgagtttgaagcgcagaacatcacgattgcccggcatcagaccacactcgatgacctgcttcatatcaaggtggacaaaggtattccgcagattgataaggggcgcacaaaagatgaaagcggtaaaggccgacgacatggtgactttgccgtggcgctctgtatggctgtcagggcgtcttatatgaatggttttgttatcgacgaggacagcatacaggcgctgccaccacgccaccgtggtgatgatgttgataacgatgattttgatgattatcaccagtttgaacgagggggctggtaa

SEQ ID NO: 14322 - DNA, 576 bp, Escherichia coli
atggacaggaaaacacggggccgggcttcaaaagtggatttactgccggaaaacgtacgtaaaacgctgcatgaaatgctgcgtgataaagcgatcccacaggcccgcattctggaagaaattaacgtactgattgaagacgctggcctgccggatgagatgaaactctcccgttccggtctgaaccgttacgcgacgaacgtcgagcaggtaggccataacctgcgacagatgcgtgaaatgacgtcagcactgaccgcagaacttggcgacaagccaatgggagaaaccacaaagctgattctggaaatggcccgcagccagctttttaaggccatgatgcggcaaatcgaaaacccggaatctgacgtggatattgacctgctgaaaaatgccatgctggcggcacagcgtctggaatccacggcaatgtccagccaccggcgcgagaaagaaatccgccaggcattcgcagaagaagcggcaaacgccgtcagtgaagaactgcgcgggcaggatggcatcagcgaagagctggagcagcgtatccgtgatgtgctgctgggtaaggcatga

SEQ ID NO: 14323 - DNA, 291 bp, Escherichia coli
atgattaacgatattctgaccgaagaccgtcgtctggtcatcctgcgttccctgatggactgcaataacgaagcaaacgaatccatccttcaggactgtctggatgcatacggacacaacgtttcccgcgatgtggttcgcggccagattgactggctggcagagcagcaactggtcaccgtggaaaacctgcgcggcttttatgtcgtaacgctgacctcccgaggtcaggatgtggcagaaggtcgtgcccgcgttgccggtgtcaagcgtcctcgtccccgtgcatga

SEQ ID NO: 14324 - DNA, 300 bp, Escherichia coli
atggatttgatttcagttttagcgttatggccttacctgttgcctgttgtggccggtggggccgtctgggcaatgcgtcgtagttttgccagcactgagcgtgtggagcgtcttgaaaaccggatgaccgaaatggaaacccgctacgccagcatccctggcacagaagatgtacacgaaatgcgcctgcgaattgcagagctgtccggcgatatccgggtgctgtcccagcgggtgcagtcattttcccatcaactggagctgctgcttgaaaacgcagtaaaccggagtaattcatga

SEQ ID NO: 14325 - DNA, 195 bp, Escherichia coli
atgaacgaagaccagaaccgggcggtggcgctgctgctcgctgaactctggcagggggatacccgtgatattccccgcccggcggcgtatgacccgcctgtattgtgtgccggttgcggtcgtgagctgcggcctgatgtgctgagacagcagccgatggcgaactactgccactggtgccgtggagcagaataa

SEQ ID NO: 14326 - DNA, 387 bp, Escherichia coli
atgaccttcgccagtaaaagtttactgctggcagccgtgtttgccgccgttctgtccggggtgttgtggcacaggctggacagcacccgccacgataaccagacgctgcgccgtgaattacagacggagcaacaggcccgcaacacggctgaatggttgttacacggtcaggaacagacgatgcaggtattttccgctatccgtgccgcaaatcgtgccgcgcggctggcagatgagacagaacatcatgatgcaaaacaaaaaattacaaccgccattaccggtgacaattgcagcactcgtcctgtgcctgccgttgctgctgacaggttgcgggaactcgaaaaacgcacccgtgccatcggtggtgatcctgcccgaaactga

SEQ ID NO: 14327 - DNA, 516 bp, Escherichia coli
atggcggggataccaaaaaaactgaaagccacactgctggctgtaacgattgccggtggcggtgtgggtggttatcaggaaatgacccgtcagtctctgatccacctggaaaatatcgcttatatgccttaccgcgatattggcggtgtgctttcggtctgtgtggggcataccgggccggatatcgaaatgcgccgttacagccatgcggagtgtatggctctcctcgacagtgatttaaaaccggtttatgcggcaatcgatcgtcttgtcagggtgccgctgacgccatatcagaaaacggcgctggcaacgtttattttcaacaccggtgttaccgcattcagtaaatcaacgctgctgaaaaaactcaatgccggtgattacgccggagcgcgtgaccagatggcccgctgggtgtttgccgcaggccataaatggaaaggactgatgaaccgtcgcgaagtggaaatggctatctggaatatcaggggggcggatgaccttcgccagtaa

SEQ ID NO: 14328 - DNA, 423 bp, Escherichia coli
atgcagcatgatttatttgaacacgatccggcaattcgccagttaatcggacatattgataacatcccggccccggaactggaatcacgctggccccgttcggtggttgatctgattgatgttctggaaaacgaactgaaacgccagaacgtcagcaatccccgtgaacttgcccgtaaacaggccgttgccctgtcctgttttctgggtggacggcagttttacatcccctgcggcgatacgatcctgaccgcgttacgcgacgatttgctttactgccagtttaatggtcgtaacatggaagaactgcgtcgccagtaccgcctgtcccagccgcagatctaccagattattgcccgccagagaaagctgcatacacgacgtcatcagcctgatctgttctcacctgaaagcccaaaataa

SEQ ID NO: 14329 - DNA, 231 bp, Escherichia coli
atgggtaaagggtgggatgcgtcctttcagttcggcaggcgtgaacgtttacgacaggaggtattacatcgggaggccggaggcccaccaccaaagccaatggattacacagggcacgatggcacccacggcagttattacatgaaaggctggcagtcagttgatatgccggaaattcttcaccactgtcaacgttataaggaaaaatattgtgtacagaaaattcagtga

SEQ ID NO: 14330 - DNA, 561 bp, Escherichia coli
atgcctgagttttcccctgcattccttcattcgctgaatttcgttatacgccctgatgttgaaggtggctatgttaatgatcctgccgaccgtggcggcgaaacgaaatacggtatttctgaccgtcgcgacggcgttattgatggcaaaaccgatgttaacggtgacggaaaacctgatacccgcattaaggatttaacccgcgagcaggcggcgcagatctactggcgtgattactggctggcggcaaagtgtaacgaatggcctgatggcgtttccttattcgtttttgatgctgccgttcagcacggtgttaaacgcgcgattcagatcctccaggcggcagcaggtgttgatgatgatggcatcgtcggtaaaaacacacgcgcagccgttctgcgtgccgatactgactggctgctgttgcagtgcttcctgcgtcgttcccgctattacgcagggattatcaaatccagtgcctcgcaggggaaatatctgaatggctggtttaaccgtctggatctgctcgccagcgcctgtcgggaggttctgcatgggtaa

SEQ ID NO: 14331 - DNA, 390 bp, Escherichia coli
atgacggaagatttatttggtgatttgcaggatgacaccatcctggcacatcttgacaatcccgcagaggatacgtcacgctttccggcactgctggcggagctgaacgatttactgcgcggggaattgtcccggttaggtgttgacccggcccattcactggagattgttgtggctatctgtaagcatctgggcggcggtcaggtctacattccacgcggtcaggttctggattcgcttattcgggatttgcgtatctggaatgatttcaacggtcgcaatgttcacgaactggcaatccgtcatggtgtgacatttaacacagtctataaagccatccgacgaatgcggcgtataaagtatcgtcagtattccccccctttgttttaa

SEQ ID NO: 14332 - DNA, 552 bp, Escherichia coli
atgaatcgcacatccctgattaaattaatccatgtcgcccgtcgggagctacaactcgacgacgacacttaccgcgcttttctgatgcagaaaacgggcaaaatcagttgccgcgagctgacggttacgcaactggaacaggtgctcgatgccatgaaagaacgcggctttaagaagctgaataaacatccacgtcgccgctttaaggggcatgtcacgccccgcgagaaggtatacaaagtctggcagcagatggcagaagacggttttattaccgatggcggtgatgtggcgctggataaatatgttcagcgcctgacggcgaaacgtaatggcggacagggtgtttccacgctggcgtggtgtcatggcgacaccctgttgattgttctcgaaactctcaagcagtggcatatccgctgtattcgtgaagccttttcccgtcacgggcttccgttgccagtcagtccgtccgggcgtgaactgcgcggctatgatgccatgacggcggcttatgcccgtgccagaaagacacggaggatggcacaatga

SEQ ID NO: 14333 - DNA, 267 bp, Escherichia coli
atggaaaataatgtacaaccttatgatgttgcaggttatgcgattgcatcagcactggtgcgccttctggtgaagaaggcgatcatcaccgcagaagagggccaggccattttcagctcttcagcagagattttaaaagatgcgcctgcaataagaacaagccgccgcgaaaacatgcaactgtcaaagatcatggaagacattatcagttcgttagacccagatgctgacggatctcaaaagcctcaaacacatgagcgtcagtaa

SEQ ID NO: 14334 - DNA, 303 bp, Escherichia coli
atgaacaatgaagataaatttactccccttaatattgataacgtcatggctgaaaaagggatgctggaacgtgttcgcgctatcgttgaatatggtattaagcataatctcaccgccagagaagtccgtgacattatcaaccgcgaaatgaatcgtctggaaacagtagtggcactgcaaaatgaaacagcccgcgaggagtacatccgccgcaggctggggttatcagaccaggatattgttactgacgctcatgtgtttgaggcttttgagatccgtcagcatctgggtctaacgaactga

SEQ ID NO: 14335 - DNA, 309 bp, Escherichia coli
atgaataatggtgtattttcaaaatcagaagagcttgccgccctgctgattgccggtggtttgccgaaaaaagaagtgcatgactttgtgaattttgtatatgagccgtctcatgaaaaagctattgatgaggtcatggcgtaccggtttggcattattgctgagtcactgagtcctcactggattattgaaaatctccgcgctattgctgatggcaacgataaatcagcagccgttgctgcactggatgtgttacggcaaatgagtctgaaattttatcctgaatttattctgagggccgcaaaatga

SEQ ID NO: 14336 - DNA, 183 bp, Escherichia coli
atggaaaacaatgaaacatcgtattcgtggctggggaaatttaccacggtgaaacaggaatgcccgacctgcggtaatgaatcccctgaatatctgaaagagtgccctcattgtggcgggcagaaatgtaaccactgcgatatgggcgatgacacggcgtgcatgaattgtgaaggtgagtga

SEQ ID NO: 14337 - DNA, 531 bp, Escherichia coli
atgttttttaaaacgtcaaatcccgcagcactgctggcatgggaccagtttatggcggactgcctgaaactacgcgaagaagcccgccatcttgataaggttctgggttgtggttgccggtcagtattcagcacaggtattggtgggcgtcattttcatggcgtgaattttccggggaatgagcgacctttctcgccggagttgtggactgtacaacgctccgcatcaggtaacagttgcaggccaagaacatcgcgcattcctgcacatctgcgggagcagtcaaaagagctggcgaaaatatggcaggagaatattccggtcacttatgcccgtactgacgctctcttacccgcactgggactggatttcagcgcaacaatattcggcccgctccggtggttccgtgttggtgatgtgatttacgtcatgacagggatgactcccgcacagggccgcatgactgaaatcctttctgacgaatttatccgggcgcaaaaacaggcggaggtaaacaatggaaaacaatga

SEQ ID NO: 14338 - DNA, 531 bp, Escherichia coli
atggttgatgcaaaaattctgaatggtgtcagcacattattacgggcttacggacgcctgacctgcggagttctggctgaaaaaatgaatatgctgccctcgtcaatggtgtatttcctgcgtgatgcggttgatgccggagtgctcaccgaatgcaacggattttatgacgttccgcgcccgcgtccgacgccgcctgtaagacgaaacgcaactgagcagcctgctgttgatgatgcggtgtggtgcaactggcgtcgctcattaccctgggtggaaggtaataccatccccgcgctggcaaaagagtttgcgacgggcgtgctgacctgtgagtcagttcacattgttgctgaggtggataacagaatgtgcgaacagggaatgccccgttttgtgatggcttatatcgatatccggctggggcgttttatttgcagttccagcgcctggaatatcaccgaccatgtactgcgttatctcattcttgattgttctccggctcccgcagcggtgcaggaggtggcgtga

SEQ ID NO: 14339 - DNA, 525 bp, Escherichia coli
atggctaaaccagcaaaacgtatcaaaagtgccgcagcggcttatgtgccacaaaaccgcgatgcggtgattaccgatattaaacgcatcggggatttacagcgcgaagcatcacgtctggaaacggaaatgaatgatgccatcgcggaaattacggagaaatttgcagcccggattgcaccgattaaaaccgatattgaaaccctttcaaaaggcgttcagggatggtgtgaagcgaaccgcgacgaactgacgaacggcggcaaagtgaagacggcgaatcttgtcaccggtgatgtatcgtggcgggtccgtccgccatcagtaagtattcgtggtatggatgcagtgatggaaacgctggagcgtcttggcctgcaacgctttattcgcacgaagcaggaaatcaacaaggaagcgattttactggaaccgaaagcggtcgcaggcgttgccggaattacagttaaatcaggcattgaggatttttctattattccatttgaacaggaagccggtatttaa

SEQ ID NO: 14340 - DNA, 300 bp, Escherichia coli
atggtgactgacatgaagtgtaatcgtaagcgctggtcacgcgaagaccgggaatttatcgaagccaacgtcgggaaaatgaccattgaagaaatggcggaaaaactgaaagtcgccacaaccgccctccgggcacatgccagaaggcacggaatatcattgtgtgtataccgaatcagtgaacacgacaaatatttatgtcgtgaactttataaagaaggactggatattcatgtcattgcccgaaagatggaattaagcaatcgagctgtatccagcattgtatacagcggatattaa

SEQ ID NO: 14341 - DNA, 420 bp, Escherichia coli
atgaacgtcaaaatccgaaatgaaattcaggcattaatccgaattcaggaacgcaataacaacggtggtgaattacgcgagtttatttgcgcccggaaagttgatgattgtggtgaaaagacttacctgattgctttcgaccattacagcatctgtgcacgttattgcggcgaaagcatatcccgcgccattgcatttggcggtgcgttcaacgtggatttatgggagtacgtcatggaccgggaatacatctgcgcatcagaccctgaagcccgtgaaatgtggcagcgtatctggcgcgattaccggttaatggcaaaaggctgggcgcgctgctgttattcctcgcttgccctgaaagcggttcagttatcgctgcggcatattccggcatcactgcgcgagcctctgctgtactga

SEQ ID NO: 14342 - DNA, 270 bp, Escherichia coli
atggcaaaagttatctttgagtttacatggctggaaagtagtgacggttgcaatgggcgcagagaagttctggatgcaaaagcatgtcttgcagatatctcgccaacggaaaatatcgggcctcatgatttactggcaaatatcgtcctgactatggctcctgaaattattaaaaaggccaaagatgagatgctgaccactatgaagaaagtgggtatggaagctgaatgtgatttagtaccacatccggtgaatgcggttaaacattaa

SEQ ID NO: 14343 - DNA, 231 bp, Escherichia coli
atgtgtactaaagctgaaaaatatattgaatgggttaaacgggtacagaataacaatgtggctctgactgcatttaattgccccaaatgcaaagagcaaattatgacgcaatgctcaccagaaaatgaagtatgggactcctttgcatgttgtccgtggtgcagcgcggttttctttaagcaggtaaaaggcgcgaaggtaaaagccagcgcagttattcagaatcaataa

SEQ ID NO: 14344 - DNA, 228 bp, Escherichia coli
atgatggcccgaaatataaaaatggcaacggatgcgcagaactggttacaggcgcgcgggagtcatgtaaatgaatcatatctcggcgtggcgcgtccgattcttgaaatcacttacccaccggtggaactggtaaaaaacgcggtcagaattatggagcataagtccggggtggcccgttctgtatggacggcccgtcttaatggttgccagattatctggagataa

SEQ ID NO: 14345 - DNA, 939 bp, Escherichia coli
atgaatatttccgatattcgcgcagaactgcgcacgcttgtagaaaatgaagaaaccacctttaaacaaattgctcttgagagcgggctttctaccggaactatcagtagttttatcaatgataagtacaacggggataacgagcgtgtttcacaaattctgcaacgctggctggaaaaatatcatgcagttgcagaactacctgagccgccccgctttgtggaaacgcagacggtaaaacaaatctggacaagtatgcgttttgccagcctgactgaaagtattgctgttgtatgtggcaatcctggtgtgggtaaaaccgaagcggcccgtgaatatcgccgcaccaataacaatgtctggatgatcaccattacgccatcctgtgccagcgttctggaatgtcttactgaactggcgtttgagctgggaatgaatgacgcaccacgccgtaaagggccgctctcccgcgccctgcgacgtcgccttgaaggtacacaggggctggttatcatcgacgaagctgatcatcttggtgccgaggttctggaagaactccgcctgttacaggaatcaacccgtattggccttgtgctgatgggaaatcaccgggtttattcaaatatgacggggggtaacagaacggttgaatttgcccgtctgttttcccgtattgcaaagcgcactgcaattaataaaaccaaaaaagccgatgtaaaagctattgcggatgcctggcagattaacggtgaaaaagaactggagttattacagcagattgcgcagaaaccaggtgcgcttcgcattctgaatcattcacttcgccttgccgccatgacggctcacggtaaaggtgagcgtgttaacgaagattatctgcgtcaggctttccgtgaattagacctggacgttgatatttcaacgctgctgcgtaattaa

SEQ ID NO: 14346 - DNA, 2094 bp, Escherichia coli
atgtttgtgtcagttaatgagcttgtagggctaccgggtatgccgggaactgcgcaaggggtgcggtattccataaggaaactggcctcatctgagcatttcaggcgcaaacgtgcgggttcaaaaaccattgaatacagcatcgactgcctccctccggttacacaacgggcgttacgtgagcgccatgtagctcaactgatggcaaccgccccgcaggagataactacccagcctcctgtaaagcgtgaacgcaaacaaaatgttgtacagcctgttgaggcatatcgcggttcgccacaattggtagaagagcgtctgaatgcgcttacggaaaatcaacgtaaagttgcagaagcgcgtattgctcttgtctgtgaagttctacgaattagccaggagccgggattcagttgtgccagcgctatacgttttattgtgtcgcggttagcgcagggtaacctggaagaacgcctggaatctttggtcattactgctaatgcccgtaaagggaaagagcgaactctgagcgcaattacgctcaaacgttggatagctgcgtttaacaaagcacagaatgccgcagaacgattgctgttactggcaccaggaaagcgcgacgaaataaaaccggaagaaattagctggctgcctgaatttctggcgcagtatcgtcaggctaacggcaggcctatgtcagaagcatacgaggattttgtcgctgattggcagcgtcgccatgcggacgaaccatacatgctggaggtgatgccttcctatgatgttgtccggtatgccatgaaaaaactgccggaagtggtgaaacaaaaagggcgcgttaccggcagtgaataccgtcagcttgaaggattcacccgccgcgactggacagctatgccggtgaattatgtctggattggtgacggtcacggtatgaagctgaaatgtgcgcatccggttcacgggcgtccattttcaccggaagttacgtttgtgatcgacggtggaacccggtttgtggttggctggagtcttgatcttgcggagaacgtgttcgctgttgccggggcgatacaacacggcattcgcaatcacggaaaaccattcctgtattactcggataatggttccggtgaaacggcagatatgctggataaagagatcgtcgggattctgccccgcctggggattaaccaccccactggtattgcgggaaatccgcagggacgcggcattattgagcgcctgaaccggacgttaccgatgcgtatagcaaggaggtatcgcacctatttcggcaagggggctgaccgggaatcgttgcgagtacttaatcgtgatctgcgttcagcgtttaatgccctgcaacaggacaagccactgagcgcccgtcagaaagccgcaatgcgcgagctgccgtcttggtcagaactgattgaggctatccgtgagggggtggagtggtacaacaaccgcccacattctgaattgccgatgaaaccaaacggaaaacattacagcccggcagagttcagaaaaaaacgcttagcggaagaagacactgaaattgagtggctgagtgatattgagctgcgtgacatgttccgcccgatggtggagcgtccggtaagacgctgcgaaatccagtggctgaacaatatttactacgcgccagagctacgtgatgaacatggtcgcaaggtacttatcagctatgacattcacgatgccgagcgaattacggtacgccgtaaggacggtagctttatctgtgaggcgatatggaacggcaataaacgcgcagcctttcctgttacggctgaatatcacaaacaacagcaacgtattaaaggaatgcgcaagcgtgctgaggaaaaaatacgtgatgctgaggatgaaggtattcaggttattgaacaaaaaacgatagaaccctggctggataatgtttatcgccctgttggtaatgtggtgaccgttcagccgttgaggtgtgaggaagagcatgatgatgaatacgaaactgagcgtgatgaatatctgaatcattcgctggatattctggaacagaacagacgtaaaaaagccatttaa

SEQ ID NO: 14347 - DNA, 237 bp, Escherichia coli
atgatgtctataaatgaagttgttaaacaggactggcaccccgcgcatgttgtcgcggcggtgcatgtaaaaggttttactttacgctctctgtccattgaagccggtttaaaccaggattctttaaagaatgccctgtaccgcaaatgcccaaaatatgagcgcattattgctgatgctattggtgttgcgccggaggagatctggcccagccgttacgctcgtaaggtggcataa

SEQ ID NO: 14348 - DNA, 546 bp, Escherichia coli
atggataagctgaaaggaaagtcactttctttgccggaagtgacaaaagaaagtatcccggagcgtttgagagaattaattggaaaaagaagtgtaagggctgctgcgaaagattgggggttgtctttttctactttaaacaattacctgacgcgaggtactgaaccttcactcagtgtggctcggcagatagctgcaattgaaggggttactatcgaatggatatgtggatcacatgatgattcatatgagaatcacccaatttcaactaacacgcataatgagaatacaaaactcattatgaacatcattaacgccttggatgcaaaggatattgagcgactatctaagactcttgccctcaatggtgctaagtatctgactcaaatgttggaacccgaaaatcaaggcttactgcgtcttgaaggacgaaaacgtgtcgccgcgctgctattagatgatttacctgatgagcgtatcagagagattttggaagaaattgagagcagcaaactctcaagtagtgtaaaatcgagagcgggctag

SEQ ID NO: 14349 - DNA, 786 bp, Escherichia coli
atgatgcaggtgacaagcgatcaatggctttcctggttaagcctgtacttctggccgttactgcgcgtgctggcgctcatttctaccgcgccaattctgagcgaacgcagcgtgccgaaacgggtaaaactgggtctggcaatgatgatcacattcgccattgcctcatcattacctgccaacgatgttcctgttttttcgttctttgctctgtggctggccgtgcagcagatcctgatcggcattgcgcttggttttaccatgcaatttgcctttgccgctgtgcgaaccgctggcgaaattatcggtctgcaaatggggctgtcatttgcgacatttgtcgatcctggcagccatctcaatatgcccgttttagcgcgcatcatggatatgctggcattactgctgttcctgacatttaacggtcatttatggttgatttcactgctggtcgatacctttcacaccctgccgattggtagcgaaccgttgaacagcaatgcgtttctggcactcaccaaagcagggagtttgattttccttaacgggctgatgctggcgttaccgctcattactctgttgctgaccctgaatctggcattaggtttactgaatcgtatggccccacaattatccatttttgttattggatttccattaactctgactgtcggcatctctttaatggcggcattaatgccgttaattgcgcctttttgcgaacatttattcagtgaaatttttaatttgctggctgatattattagtgaattaccattaatataa

SEQ ID NO: 14350 - DNA, 177 bp, Escherichia coli
atgagcgcggtgctctcaactcactcgctgtttggcacactgatggaagggatttttggctatcaggaagcaccgagcgtcagcgaagtcgccgtctggtttatttatctcatcccggcgctggtggcatttgttctgccaccacgcgcaggggcgactgcgtcccgctccatgtag

SEQ ID NO: 14351 - DNA, 153 bp, Escherichia coli
atggcagaatttcccgccagcttactgattcttaatggcaaaagtactgacaatctacccttgcgcgaagcaatcatgctgttgcgtgaggaaggaatgacgatccatgtgcgggttacctgggagaaaggtgatgccgtacgatttgtatag

SEQ ID NO: 14352 - DNA, 453 bp, Escherichia coli
atggcaaaaattcacgaggtaaagctgcacgcaaaatatttcgaccttgtgctggaaggaaagaaacgtgcagagtttcggaaaaatgaccgtaattatgagcgcggggacacgctgattttgcatgaatgggtgcagggtgtgtttacggggcgaaaggttgaagcccggataacagatgttactgacctgtcagactggctggaagattatgtcttgctaagtattgagctgcttaatacaagcgcatatgagattgtgaactggaaagaacttagtgagcgtggtctggtattcagaattaatcatgaaattatgcatcagctcggccttgctgttatgtatgaaccagagacggggatgtctggcggggcaatggttaccacggatggagcatggaactattcagatgaacagattgagagtgcaaagcaaaacgggtggcttggataa

SEQ ID NO: 14353 - DNA, 207 bp, Escherichia coli
atgcacggaataccaggcgagataccgcaacataacactaaaaatatcaagctgatggctattgttcaccgtctacagcagattatggtcaacgaaaatctgacgcctgacgagctggtcgggtgtgctgaaatagtccgggataattacgggcggtttaactatatcggtcagtccagagttgcgccaccaccacgcagacgatag

SEQ ID NO: 14354 - DNA, 942 bp, Escherichia coli
atgcaaggtgaagttgatgaacagcaaccaaatgagattatttcggagtttggatactatccagtagaagttaacattgagactgaacaattttctttgcgtactttacccggtcttattgagaaagtggaacgtattaacaatgataaaaacgttgttaatggttggatataccctgggaatcgaaaggtatataaccttaatggtgacacatgcacaatgccttatagttaccgagtattcggcatgcccaaaacgcacacactaaaattaaaaaacacatcctcgttagaaactctcaactttgttgtgtggtgcctctcttttttcaagggtataagattgacaaccactgacgctggttttcttgatgcaaccactatcaagcccactaagttaactgactttattctcgttggatgctctgaaaaagaagtaatagagctagcacttaactatataaaagacaaacaaaaagatgatcgctccattaaaagaatagctgcggtgatacactccctattcctatcacataacccactatacctttcctttgagaaattccagtatctttatatggctcttgattgctgttttgctatagcatgggatgaaagggataaagtcattaaagagaaaaaaccatctcatcaaaatagagtatattggatgtgcgaaaattacggtgtaaaaatcccgtcatgggcaacagatgaatgtaatgtttcagttatacgcaatgataattttcatgaagccatttttaatgggcaaccgcttggtttctctagtatcaatgattgtcaatatggtagcgatatattgctacaaatgcaggctctggtatgtcgtctactagcggcaatactctctgtaaatgatcgtaaatatatcgcatctacaatcagctcgatagagtaccattcattaaaattaacttaa

SEQ ID NO: 14355 - DNA, 279 bp, Escherichia coli
atggccaataatttatttattacttacgacctcattaaaacgaaagattatgcggctgtgtataatgcgattaaatctttaggaaattgggctttaacaactgaatcgaactggtatgttaactgtagttactctgccgaggatgcagccaaaattgtgagggcggttatggatagtgatgataagcttattgttgtagacgcaaccaataactcagcttattggtacaatctcccagatgaagttagtaaccaaattcagactgagtggtacaagtaa

SEQ ID NO: 14356 - DNA, 180 bp, Escherichia coli
atggctgatgataagaccaaaatcggtacccctgacaatgatttaataagtatcaaacaggattacgaaagacgtgattgggctgaaaagtttggagttagcgaggccaaacttgttcaagccgtacaggctgtaggtcattcggctaagaaagtacaggcatggcttaaagaccattaa

SEQ ID NO: 14357 - DNA, 693 bp, Escherichia coli
atgatcgaatttatcgcagagcatataaacacagtaagcacacttatctccgctttggctgcattgctaacagcagttgctacatttttcttgtggagagtaacaaggctattagcagacgagacaaaaaggatggttgacgcatcagttcaacctcacgtcgttgtgactcttgaaccaaattcttgggctgctttttattttgatatcaatattgctaataccggaaatgccccagcctatgatattgaaatcggatttaatcccccactggtaaatgcagaacatagaaaaaataaaggtataccatttagcaaggttagcgtattgaaaaacggccattcgctcaacagcagtctttgtaagtatgaacagattaaagatcaagtttatactgttagtattagttggtctaaacagccgggctcaactgaaagagagcggaatgagtattcttatgatatggcttctttcgagggggttagctacttaggtgcaaggagtccaatgacacagatagccgagcaggtgaaaaagattagagaagactggaggccgatttcccagggaagcaaaaaaattaaaacagacaactataattcaagtgacagagccgaggaacaacgagcacgtgaagagtggtatcagaccactgcaaagaaatgggataaagaaaagcaaaaagataactaa

SEQ ID NO: 14358 - DNA, 2448 bp, Escherichia coli
atgagtaacaatgtaaaattacaggtattgctcagggctgttgaccaggcatcccgcccgtttaaatccatccgtacagcgagcaagtcgctgtcgggggatatccgggaaacacaaaaatcactgcgcgagctgaacggtcatgcatcccgtattgagggatttcgcaagaccagtgcacagctcgccgtgactggtcaggaactgaaaaaagccagacaggaagccgcagcactggctgtccagtttaaaaatactgaacgaccgacaaatgcacaggcaaaggcaatggaagccgcgcgtaaaaatgcgtctgagttacaggcgaaatataacagcctgagattgtcggtacagcgacagcgtcaggagttgagtcaggcgggtattaatacccgtaatctggcgcatgatgaacgagggctgaaaaaccgtatcagtgaaaccaccgcacagcttaaccgtcagcgtgacgcgctggcgcgtgtcagtgcgcaacaggcaaaacttaacgcagtaaaacagcgttatcaggcaggcaaggaactggccggaaatatggcctcggtgggcgctgccggtgtggggattgcggcggcgggaacgatggccggagttaagttgctgatgcccggttatgagtttgcgcagaaaaactcagaattacaggccgtgctcggagtggcaaaagactctgccgaaatgaccgcactccgcaaacaggcgcgccagctcggtgacaataccgccgcctcggcggatgatgcggccggtgcgcagattattattgcgaaagccggtggggatgttgatgccattcaggcggcaacgccggtcacgctgaatatggcgctggcgaatcgccgcacgatggaagaaaacgccgccctgctgatggggatgaaatccgcctttcagctttcaaacgataaggtcgctcatatcggggatgttctctccatgacgatgaacaaaaccgccgccgattttgacggtatgagcgatgcgctgacctatgccgcaccagtggcaaaaaatgccggtgtcagcattgaagaaaccgccgcaatggtcggggcgctgcatgacgcaaaaattactggttcaatggcggggacgggaagccgtgccgtgttaagccgcctgcaggcaccgacgggaaaagcatgggatgcactgaaagagcttggtgtgaaaacctcagacagcaagggaaacacccgaccagtatttaccattctgaaagaaatgcaggccagttttgagaaaaaccggctcggtactgcccagcaggctgaatacatgaaaaccattttcggggaggaggccagctcagccgccgccgtgctgatgactgccgcctcaaccggaaagctggacaaactgaccgctgcgtttaaagcctcagacgggaagactgcagagctggtaaatatcatgcaggacaacctcggcggtgactttaaggagtttcagtccgcttatgaggcggtggggactgacctgtttgaccagcaggaaggcgcactgcgtaagctcacgcagacggccacaaagtatgtgttaaaactcgacggctggatccagaaaaacaaatcactggcgtcaaccatcggcctcattgtcggtggtgcactggcgctgactgctgtcatcggtgccattggcctcgtagcctggccggttatcactggcatcaatgccatcatcgcggcagcaggcgcaatgggggcaatcttcacgacggttggcagtgctgttatgacggccatcggggcgattagctggccggttgtggccgtggtggccgccattgtcgccggtgcgttgcttatccgtaaatactgggagcctgtcagcgcattctttggcggtgtggtggaagggctgaaagcggcatttgcgccggtgggggaactgttcacgccacttaagccggtgtttgactggctgggcgaaaagttacaggccgcgtggcagtggtttaaaaacctgattgccccggttaaagccacccgggacaccctgaaccgttgccgtgacacgggcgtcatgttcgggcaggcactggctgacgcgttgatgctgccgcttaatgcgttcaacaaactgcgcagcggtattgactgggtactggaaaaactcggcgtcatcaacaaagagtcaggcacgcttgaccagaccgccgccagaactcgtgccgccacgtatggcaccggtggttatattccggcgaccagctcttatgctggctatcaggcttatcagccagttacggcaccggctggccgctcttatgtggaccagagtaaaaacgaatatcacatcaacctgacgggcggtactgcgccggggacacagctcgaccgccagttacaggatgcgctcgaaaaatacgagcgggataaacgtgcgcgcgcccgtgccagcatgatgcatgacggttaa

SEQ ID NO: 14359 - DNA, 144 bp, Escherichia coli
atgagtaaattattttgggcgatgctctcatttattacgcgtctgcctgtaccgcgtcgctggtcccaggggactggatttcgagcattattctcgcggtattattacttttcctttgattggattattgcttggcgcgattag

SEQ ID NO: 14360 - DNA, 555 bp, Escherichia coli
ttgtgctggctggatgaatttgccgacccggctaccgcacggaagctttataccgcagcgttcccgctggtggatgtcactgtcgtgccagacgacgagattgtgcagcatcgcagagtcgccctgctggagttgatccaaaagcatattcgccagcgcgatctaatggggcttattgatcaactggcagtattactggttacagggtgcgctaatgacagccagataaccgcgctgttaaattacattttactgactggcgatgaagcgcgttttaatgagtttatcagcgaacttatccgtcgaatgccacaacacagggagcgaataatgacgattgcagagcgaattcataatgatggatggctgttgggaagggagagggggaggaaagaagggaaagaagaaggggaaaagagcctcctccgattgttgttgcagaatggggcggatcctgaatggatacaacgatataccggactttcggcagagcaaatgcaggcattagatcagcccttgcctgaaagcaagcgcgatccatggatcgagtactaa

SEQ ID NO: 14361 - DNA, 147 bp, Escherichia coli
atgaaaaataagagcgggaagggcaaggagataacacctacccgcttttatcaaaaattaagcacaatgcctaacaacatttatcaacacaacgtagaaacaatcaacaatcaaagagggagttatgattattctaaaacttcttga

SEQ ID NO: 14362 - DNA, 699 bp, Escherichia coli
atggctggtgcattgaccacagtaaaacgccaacatcgccctgcgctggatctttcacgcctgcctgaacttctgtcgcgcattgacagttataaaggtcagcctgtcacccgactggcagttatgctgaatttactggtttttattcgctccagtgaactcagatatgcccgctggtctgaaattgatattgacaatgccatgtggactattccagccgaacgcaaacctctgccaggcgtaaaattctcacaccggggctccaagatgcgaacaccacatcttgtgccactcagcaaacaggctgtagccatactggcagaactacagacatgggctggtgaaaatggtctgatctttacgggagcacatgacccgcgtaaaccaatcagtgaaaatactgtaaataaagccctgagggtgatggggtatgacacaacccaggaagtctgtggccatggattccgggcgatggcgtgcagtgcattgattgaatcaggtttgtggtcccgcgatgctgtggaacgtcagatgagccatcaggagcgtaatggtgtacgtgctgcgtatatccataaagcagaacatctggaagaacggcgactgatgctacagtggtgggcagattttctggatgcgaacagagaacaatgtatcagcccgtttgaatatgcaaagattaacaatccattaaaatag

SEQ ID NO: 14363 - DNA, 435 bp, Escherichia coli; identical to SEQ ID NO: 9005

SEQ ID NO: 14364 - DNA, 1107 bp, Escherichia coli; identical to SEQ ID NO: 9004

SEQ ID NO: 14365 - DNA, 681 bp, Escherichia coli; identical to SEQ ID NO: 9059

SEQ ID NO: 14366 - DNA, 1194 bp, Escherichia coli; identical to SEQ ID NO: 5954

SEQ ID NO: 14367 - DNA, 861 bp, Escherichia coli
atgtcagaaaaaaatgtcagcataataatcccaagttataacagggctcatattcttaaggaggtcataccaagttattttcaggatgagactttagaggttatagttatcaatgatggatcaacagataatacaaatagtgtattagctgaactgaaggaaaaatattctcagttagttattttagaaaatgaaacgaataaaaaacagatgtattctaaaaaccgagggattgaaatagccaaagggaaatatattttttttggtgatgatgactcttacctcttacccggtgttatatctcggttattggctacaaaatatgagacaggcgctgatgtaatcggcgcaagaatactttatatgaataataacgagaaaacaattgaagattgcataaatcgacataaaaaagaggggcgttttgttagtgatctaaatagattggattttagttatacatgtgatttggaccatccgattgaatgtttttatgcacagccttttgttctagctgaaagggaactaatatcgaaatatcgatttgatatatcttatacgggaaactgctatcgtgaggaaactgatttcatgctatctctatttattaaaaataaaaaatttatatatgattcaaaggctttgttaataaatttacctccaagaaaagcgacgggaggggcaagaacagctaatcgattaaaatatcattacgaaagttgcataaataattatagatttttaaaaaaatataatgataatttgaatcttctttcaggacaaaagcatgctatattttaccgacagtgtcaattcgttctgctaaaaatgaagtcgtttatcgggaagtttttaaaatga

SEQ ID NO: 14368 - DNA, 1965 bp, Escherichia coli
atgtttaatacggattcgcttgcctggaagtggcacattccggagctggcccggcagatttatccgtgggtcagctggctgtaccaggagtattacggtctggccggggctttcctagttatcggcctgtttttcggtctggctgaactttgggccggacggatgcgttttgtggggctgagtcataaggagcgacgggagtatgccgatcgctataagcgcgataataaacggccagcgccattttcggtgctggcctcgctggattcgcccgggcggatggtcagggcacgtcgacatgtctggaactacgcgtactggctgaccggcgcggccggtctggcccttctgggggggctggttgtcgccgtgtttatcgagagctggggagaaaccgtcctgcgtccggacctctacgcaaacgcagattattacctgctgcagccggctaacctgttcgggattgcctggtgcgcgggcgggctggctgtcgggattgtgttggcgcggctgctggcgttcctgctgcttgacggtcattttgcggctgctgacgaggcggtgaacgcgaaactgaatcaggagagccggcgcagcagccagcggacaggagagatgaccgacgtgcgccacctgcatttcggggagccggtaccggttaatgcgctggccgatttttcctcggagcaggcccggcaggagcaggcggtgtttctgggtaaggatgagcagggcaagccggtgctggttccgcgtgatacctggcgcaagaccaacattcagatcctcggcctgcccgggagcggcaagagcgtgatggccaccaacgcgctcattcgctgcgtacgcgatttcggggacgcggtggtgtacttcgaccccaaaggggacgcatgggcgccgcacgtcttccgggcgcactgtccggacttcaccctgctggatctgcggccggggaaaccggcgcagctgaatctgttccgcgatctcgaccagtacgcgctgaaaaacctgctgattgccgggcttaacctgggcgagaccggcgacgtggcggaccactaccgcatcagcgagcagaaagcggcgaagctgattgcggagcagtttccgcagggggcaaacattcagcaggtgctggcggcggcgtacgcgctgccggaggccctgaaaaaggacgtgaaggggttgatcactaggctggaaaacgtcgctgacctgagcgtcctgcagacggacagtggcatcgatgtggcggggattatcaacggcggcggctgcctgtacgttatcggctcgatggacgacgaggcggtgatccgtgtgcaaaaaatgctgtttgcccgctgcgcgcaaatcatcattgcgcgggacgagttccgggagtggccacacgtcagcgtgatgctcgatgaaattaaatatctgctgtcgaagtatgtactgaacgcactggggacgctgcgcagccgggactgcaatctgttgctcgcgcaccagtcgctgggcgatttcgggcagtgcgggcaggatctgcccgctgaatttgtgaaaaccacggtactggataacacgccgatccgctggttttaccgggcggccagcctggagtccgcgcagtgggcggcggggcagaccggggaaatcagggtggacgtggagcgccgccgtgccagccgggaggcggggaacgtggagcatatcagcggggacagcttcatccagaaggaggcgcggccgctgtttgacgtgaacaccctgcaacacctgccggacgggttcgcggtcatgaccgggctgggtgtggcccggatggcgttcagcagtccgctgcgggttgagcgccgggaaatcccgttgcagcgtttcccggtgctggcgaaaaccgatcccctggcggagttccggcccccggccgacggcggcgggccgaaagcggatgatgattttgcggggatttactga

SEQ ID NO: 14369 - DNA, 129 bp, Escherichia coli
atggaaaaacgccacctgcgtggccttgccgttttgcctcacatgttagtcccctgcttattcacggaatctgtgggtaactttgcatgtgtccgcagcgcccgccgcagtctcacggccggagcgtag

SEQ ID NO: 14370 - DNA, 258 bp, Escherichia coli
atggggcttaaattacatattcattggtttgataagaaaaccgaagagtttaaaggtggtgaatactcaaaagacttcggtgatgatggttctgtcattgaaagtctggggatgcctttaaaggataatattaataatggttggtttgatgttgaaaaatcatgggtttcgatattacagccacactttaaaaatgtaatcgatattagtaaatttgattactttgtatcctttgtttaccgggatggtaactggtaa

SEQ ID NO: 14371 - DNA, 1686 bp, Escherichia coli
atgagtggcggagacggacgaggtccgggtaattcaggtctgggacacaatggtggtcaggccagtgggaatgtgaacggtacatcaggtaaaggtggcccttcatcaggtggtggtacggatccaaacagcgggccgggctggggtacgacgcatacacctaacggggatattcataactataacccgggggagtttggtaacggcgggagtaaacccggtggtaatggcggtaacagcggcaatcatagcgggagctctggtggcggacagtcttcggccaccgcgatggccttcggtctgcctgccttggccactccgggggctgaaggactggctttatccgtttccggcgatgcgttgtcggccgctgttgctgatgtgctggctgccctgaaaggtccgtttaagtttggtctgtgggggattgcgatttacggagtgctgccttctgagatagcaaaagatgatccgaaaatgatgtcaaaaatcgtgacgtcattgccggcagacacggtaacggagacgccggtcagctccctgccgctggaccaggcgacggtcagcgtcactaaacgtgtggcggatattgtgaaggacgagcggcagcatattgcggttgtcaccggccggccaatgagtgttcctgtggtggatgcgaaaccgacaaaacgtccgggggtattcagtgtgtcgattccgggtctcccgtctctgcaggtgagcgtacctaaaggtgttccggccgcgaaagccccgccaaaaggcattattgctgaaaaaggtgattcacgtccggctggttttacggccggtggtaactcccgtgaagccgttattcgtttcccgaaagagagcggacagaaaccggtctatgtgtcggtgacggatgttcttactccggcacaggtaaaacagcgtctggaggaagaaaagcgtcgccagcaggcatgggacgctgctcacccggaagaggggctgaaaagagagtatgataaagcgaaagctgagctggatgctgaagataaaaatattgcgaccttaaacagtcgcattgcatcgacagagaaggcgatccccggtgcaagggctgctgttcaggaagccgataaaaaggtaaaagaggcagaggcaaataaagatgattttgtgacttataacccgcctcatgaatatggctccgggtggcaggatcaggttcgctatcttgataaggatattcagaatcagaatgagaaattaaaagctgcccagacatctttaaacgaaatgaatgaatccttatccagggataaggctgcgctttccggggcgatggagagccggaaacaaaaggagaaaaaagcgaaggatgcagaaaataaattaaatgaggaaaagaaaaaacctcgtaagggaactaaagattacggccatgattattttcctgatcccaagactgaagatattaaggggttgggagagttgaaagagggtaaacctaaaacccctaaacaaggtggtggtggtaagcgggcccgatggtatggtgataaaaagcgtaaaatttatgaatgggattcccagcacggtgagcttgaagggtaccgcgccagtgatggcgaacacctcggggcattcgatccaaaaacgggtaagcaggttaaagggccggatccaaaacgaaacattaaaaaatatctttaa

SEQ ID NO: 14372 - DNA, 420 bp, Escherichia coli
atgagacgttccggcagcaaactgtgtcttatcgccatgataacagcgacagcaactctcactgcctgtgctccaaagggcagcgtggaacagcatacccggcattacgtatatgcttcagatgacggttttgatcccaatttttccacccagaaagctgacacaacacgaatgatggtgccttttttccggcagttctgggatatgggcgcaaaggataaagcgaccggaaaatcacggagtgatgtgcagcaacgcattcagcagtttcacagtcaggaatttttaaactcactccaaggcacaacacaatttgcgggtaccgattaccgcagcaaagacctcacaccgaaaaaatcaaggctactggctgacaccatttcagctgtttatctcgatggctatgaaggcagacagtaa

SEQ ID NO: 14373 - DNA, 264 bp, Escherichia coli
atgagcaacactacacactacgaaaacgccaactttcttcgggaactggctgaaagcctgccccgcatactgccggaaggtggcccggacaaagctgcgctgttgcagcgactggctaacgaagaactggcccaggcagagtatgaagatcaggttcgcgccaaagtgaccgccgcccgtgctgacacgcgtccgggtatgaccacggaacaactccgccagcgcctgcatggccgttatcaggaactgcgcgatgccgtatga

SEQ ID NO: 14374 - DNA, 300 bp, Escherichia coli
atgccgtatgacgtggaatggaagcagggagccatcgaggatgtaacgacgctgtttgactatatcgcggaaaattcatccctgtgggatgcgcagaacgttaccgaccgggttctcgctgcggcggacaaactggccgacttcccgcgactctatgaagtggactcacgctatggcgaggacgttcgccggatcagtctgatgggacagcatgtcctctatgatgttgatgaccagaccagaaaagtccgggttctggccgtggtcggccagcgccagaatccccatattgttctctaa

SEQ ID NO: 14375 - DNA, 378 bp, Escherichia coli
atggcgtgggtgacggtgagacaggcgacggaactgacgggtaaagcccgaagttccctgtatcgggatatggcgaaaggccgcgtatcataccgtacggaagctgatggcggccgggtggtggataccagcgagcttatccgggtgtacggtgagttaagacaggatgagactcacgagcgggacgagttgagactgtcgggtgagactgaaaaaatggcctccgacgcgttgatcgcggagataaaagcactcagggaggaggtggccgggctacggcaggaaatgcagtccatgagactgctggaacacaaaccggagacagcagagaccccggccggaacaccgcgccggtggtggccgtggggaaaacgctga

SEQ ID NO: 14376 - DNA, 180 bp, Escherichia coli
atgacaaaacaggaaaaaacagccctcaatatggctaaatttattaaggagcagtcgctgctattgctcgataaactgaatgagctggatatggataccccggccgacatgtgcgagcggctacacgaggatgcggaaacactctggcaggtgatgcgggataagctcggggaggaataa

SEQ ID NO: 14377 - DNA, 531 bp, Escherichia coli
atggcgctgtacatggtatttattgaagacgcggaggaccggaacggcgagcgctgcatcatgccgaccagcgagcatctggaagatatggtggtgctcgcctggcagaccggggcgtatgttttctgttttgtcgaccgggcccagcatctggcgatgatgaaatccatcgggatgtatgacgagcggctcaacagcgacgaaaaagccacgtactttttcactggtaaaaatccgcaatgggaacggaacaaacccacaggaatgaagctgtgtgattacctctatcgcaaggtggagcggttcgccatcgagaacggtgtgcaggtggttgatgccgggaagtgctcaccggagcagattaacgcgatgattgacgtggtgagtgagcggcacggggaaagcgcggtgaacgagaagctgaaagcggagctgatgcgggaatataacagccgctattttaacgtgccggtacctgaactgccggaggacaaacctgcccgccggtggtggccgttcggcaaaaaataa

SEQ ID NO: 14378 - DNA, 360 bp, Escherichia coli
atggaagccagaggggccaccggctggcgcattctgcaccgtctgagtcttaaaggcatgaaagtgccggacgccctggcggagctggacggtaaaacggtggcgtttgaggtggagcgcaccgtcaagagccgtcgccggtatcaggaagtggtgtccgggtatctgttcaaccgcaaagctaacggcatcgatgaaatctggtacatctgcccggaccgggcgacgcaggtcagggtgcagcgggcaatcctgtcggtggatgaaatcgtgaacccacagaccggcgaggcccgcaaaacggcagagctggatcgtgaacggttgtttgcgtgctttaaatttatgacaacggagtga

SEQ ID NO: 14379 - DNA, 2010 bp, Escherichia coli
atgaaaaacataacgctgtggcagcgtttaagacaggtcagtatcagtaccagcttacgttgcgcatttctgatgggggcactactgaccctgattgtcagtagtgtcagtctgtattcatggcacgaacaaagctcacaaattcgttactcgctggatgagtattttccccgtattcactctgctttccttattgaagggaacctgaatctggtggtagaccagctaaatgaatttttgcaggctcccaacaccacggtgcgattgcaacttcgtacccagattattcagcatctcgacaccatagaacggcttagtcggggactgtcatcccgggaacgccaacaactgacggtcattttgcgggacagtcgatcactgttatccgagttggatcgtgcgctttacaacatgtttttactacgggaaaaggtgagtgagctatcagcgcggattgactggttacacgatgactttactaccgagcttaattctttagtgcaggatttcacctggcagcagggaacgctgctggatcaaatcgcctcccgacagggcgatacggcgcaatatctgaagcgatctcgtgaagtgcaaaatgaacagcagcaggtttataccctggcacgcattgaaaatcagattgttgacgatctgcgtgacagactcaatgagctcaaatcaggacgtgatgacgacacacaggtggaaactcatctccgttattttgaaaatctgaaaaaaacggcagatgaaaatatacgtatgctggatgactggcctggcaccattaccctgaggcagactatcgatgaattgctggatatgggaatcgtaaaaaataaaatgccggatacgatgcgtgaatatgtcgccgcccaaaaagccttagaggatgccagtcgcaccagggaagcgacactgggtcgcttcagaacgttactggaagcgcagcttggcagtactcatcaacaaatgcagatgtttaatcaacgaatggaacaaattgttcgcgttagcggtgggctgatcctagtggcgacagcactggcgttactgctggcatgggtattcaaccattattttatccgctcacggttggtgaaacgctttaccctactgaatcaggccgttgtgcaaattggtctgggaggcacggaaacgactattcctgtttatgggaatgatgaactggggagaattgcaggattattacgccatactctcgggcagctcaatgtgcaaaaacagcaacttgaacaagaaattaccgatcgaaaggtgatagaagccgatctgcgtgccacccaggatgaactgattcagacagcaaagttggcggtagtcgggcaaacgatgaccacgctggcccacgagatcaatcagccgctaaatgcactgtcaatgtatctgtttacagcccgcagggccattgaacagacccagaaagaacaggccagcatgatgcttggtaaagccgaaggggtgattagtcgtattgacgccattatccgttcactacggcagtttacccggcgcgccgaactggaaacatcactccatgccgttgatttagcacagatgttcagtgcggcctgggaacttctagccatgcgtcatcgctctctgcaagctacgcttgttctgccgcaaggtacagccacagtttcaggcgatgaggtcagaacccagcaggtactggttaacgtactggcgaatgcgcttgatgtttgtgggcaaggcgctgtcattaccgttaactggcaaatgcagggtaaaacgctgaacgtattcattggcgataatggcccgggctggcctgaggcattgttgccttcgttattgaagccgtttaccaccagtaaagaagtaggactgggtattggtctttcaatttgtgtgtcgttgatggagcaaatgaaaggggaattgcggctggcatcaacgatgaccaggaatgcctgtgtggtactgcaattcagactaacggatgtggaagatgctaagtag

SEQ ID NO: 14380 - DNA, 936 bp, Escherichia coli
atgagttttcttaaaacactaatggattccttaagcgcgatctcaggttctgtagccaatgcctcggagacagagaaaaaaaaggaccgtcgcagtgatgaagaatttaccgatttcaaagacgacagcagccttattaactacctgacaaaacaatatatcgacaacgaactcgcagtcgataaaagcaaaaatcattgggaggttttcagccagcacctgaagccgctcatacactgcctgaaacgctatgaagatgccagcctcagccagcgtgaaacctcacaaaaagagcaggcggcagctatgctggaagccctacagcagggtaaagaactctcggagcacagcggcaacggcacaatcattggaagagatgactatgttaacggcctgaaaaaaatcacgcttagctattgccagaagcacgtacttactatggtcgacttcctggataacgttccggatcacctgtgcgacggaaaaaatgccagtacctcatggcaatcgtttagaaaagatgccagtaaaaagcgctggaaaaactttgatcaggcgtgccgggacaattcgctttatttttctgtgggtaaggtcttgtttgataccacgctgtggggctcagggaagcatgggattatgttagggcgcgatgatattacctgcttaggcggggagcctgacaagttccgtgttttatggagcaacgtaacaagcttgtggcatcacaaaggctacctttacgtgaatgattataaaacggggtttgtcgccaatgatgacgcctgtaaattactggaactgctcgaagagcatttcgataaaatgaaacgttccgaaggaaatttgttattagcgtatctgggttacgaccgctccagccagcaagctattaaaaacgcttacgaagcggatgtgcagcagtttattgaataa

SEQ ID NO: 14381 - DNA, 2313 bp, Escherichia coli
atgaacgataaactgaaaatgtggcgagataaggcgggtttaagccaacaggaagtcgccgagcgggcaggtgaaaatgttctgtcccaaaagcaggtctcgcgtattgaacaggcaccgctgtcacaaaatttagaactggtgctggcctaccttcgcatcgttgcgcctgaaaagattcaggaattcatcactgattgtttaaagacgcagttaaacacgtcctctttaaatcaaaactacacacagcaaaaagagaatatgatgagaaataaaaaggaactgatagagtacctggaaagatcgatagccacgctgtccaatacttctaatccctttattaaaaacagcagcatcaccaaggatatcgccgagcttaaagacaatcttaaagatattcacgccaagcccgtcctgagcgctatggggccatcagatgcaggaaagtctacgctgttaaactatattttgggcagcgaaattctcccggcgaaatggcaacccgcgacctgccttgtcacgctactgatgcacactcaggataaacctgattatctggataagaataaatcagtctttattttcaaaaatggtttcaagccgcatatgatttttgatcgtcaaatgctggcagacttcctgatcgattcaggaggaaaagagctcatcaaaacctatggcgaaaaggatgaaaacgataatgtccttaatccacaagcttatatggttgtggtgtttgaaagtttcgcgattctggaaactatctggttacttgatacgccggggcaattaattgaacccgaaatgtacgatgaaattgatggatgctccagcgaagaaatccttaacgataaagccaaagccatgagcgcaatttcgctggtagatggccttatcttcgcatctgctaccaccaaatttatgcgtgacgaagatccggagttcttacaaaatattttaatgcataaggtgcctctggaaggagacaagccgctggcgaatttgatcatcttaaaaacccacagttacgatcaaattaccgccgaagcgaaccataaaacgtttcgtaccgccgcgaatcacctgacgaaaaccttttcgcataccctgtatgatgaatgggagcatcagttaaataatcccaaccatccacagaaattactacggcccgacgccgctgtctgggccagcagaatgctgccattcttccgggaaaatagacaatattgcgaagcctttgatgtccgcctgaaagaggtgatcaattatctccttgccaatcgaactgcgctgattaacaaccggatagagaccatccataaacgcatccaaaacaggattgcattagcgctgcaggaattacagcagagtagccgttctgttcaggaaagaaaggaggatattgagcaacaggatgcgcgatttcgcgagggttccggcgcgttaattgctcgctttactgaaatcagtaacttctgtccgcgctacgccgaggaagatattgagcgcatccgcgatattttctactcgctttgcaatgatgagagtatgtaccgtttcatcgacaatcgctttgaagataaagatgaagcgaaacgggctattaataaagcgctgggtaatcatttcgaaagcaaatttcgtcgcgtaatggaagagagcacccgtaggttcagccttgaggtggaaagcgtggtccaggcctggcagaaaatcgtgccttccgcccaaggcgcagcccgtgcgggaatgccggagactgatatttccctttccgccacctccgactttgatgcatactccgccttcgtcggaggtatggccggattaaccagcttcggcgctatggcgggttacgtggcaactatatcgagcaatttaggtgcctatattttagttggcaaagcggctggcgtgctgacttccctagggattaccagttcggtcacgacattaccaactctcgttgccgccactggtggcccggtggcatggggcgtagctattgccgcggttgtagggctactggtctatcgactgttcgcaaactggaaaaaggcactcgccaaatcagttgttaaggggctggaatccagtaatacgttaagcaatgtggaagcggatatcacgcgctactggcaggattcacgcaacgcgctgagagcgtcggttgattcactgaaaaatgagacagatgcctttattaggcatctgtatgcagaagccaatatcgaatatcagcagcaggatattgctgaagctgaacaaattttaaatacaatcaaaaataatctgggtagtgaggataaatga

SEQ ID NO: 14382 - DNA, 603 bp, Escherichia coli; identical to SEQ ID NO: 8328

SEQ ID NO: 14383 - DNA, 273 bp, Escherichia coli; identical to SEQ ID NO: 8089

SEQ ID NO: 14384 - DNA, 519 bp, Escherichia coli; identical to SEQ ID NO: 5755

SEQ ID NO: 14385 - DNA, 1221 bp, Escherichia coli; identical to SEQ ID NO: 5756

SEQ ID NO: 14386 - DNA, 363 bp, Escherichia coli
atggcaatttcatcgcgtaacacatttcttgccgcactggcattcatcgcttttcaggcgcaagcggtgaacgtcaccgtggcgtatcaaacctccgccgaaccggcgaaagtggctcaggccgacaacacctttgctaaagaaagcggagcaaccgtggactggcgtaagtttgacagtggagccagcatcgtgcgggcgctggcttcgggcgacgtgcaaatcggcaacctcggttccagcccgttagcggttgcaaccagccaacaggtgccgattgaagtcttcttgctggcgtcaaaactgggtaactccgaagcgctggtggtaaagaaaactcttatgacctttgtcaaatattaa

SEQ ID NO: 14387 - DNA, 663 bp, Escherichia coli
gtgaccagcctgcaccgtgaggctgaagcacagttccggcctgagctggagaaaatcgtcagcgggattgaaacaggttttcgtggcacggccctgtacgccacagaaaacattgccggtcgcatcaatgcccgcctggaggatgagggctttaccgtaaaaatcagttttccggcagtcagtcagttacagacccggctcgcggtaaaaacaaatctgagtgcgcttatggaggaaagaacggagaccgtcacccgtcgccgtcggcagagtggtttatggggaaagatttgtggagcgtttggcaccagtgactggggctgggaaacctataaagaggatgtgagccgcagtgttatcaatatcaacaccgtcaggaaggaagttatgtcactgacccgggcatatttcggggagctgcaggcatccattgagcaggatattaaccagcccgtccgccaggaaatcgatgcctttttctgcgcattcagggagaaagttgaacaactgcgtaacacgctgattcagagctctgaagatcataaacgcgatcagcaggcacaggaacggcttaccgggagacttcaggcattaaatgaaagggttcctgagctcattactgacagtaaggcgctgagggaagagctggagacaatgctgtga

SEQ ID NO: 14388 - DNA, 906 bp, Escherichia coli
gtgacttcaccatttattcaacaaattgctgataaccgggtatgtcaggtactcacctgtcttcctgaaaaatttgtggttgatttcgcaaacggaatcgatgttgcacaggagcatatccgcacggccagagagcgcacgttcttccggcgtttaaaagagggactgaccggcgaaggcgctgcacggcagaatgccatcaatgcttcggttgcacagggccttgaggcgtccctgcgctggctgacggagctgacaacgtcacttgccaccacaaactacgcgattacccgggtaaacgacagggtcagttcactggtcagtgatactgccaggctggcgcattattccgcagatacacgggagcagttactcatcctggccgatcaggttcaccataaactgaatcatcttgaagaaaaactccaccgtgttgaccaggttcagcgggcgcagttacatcttgagcagatattctcatggtggagcgccgggcgatacgcgtcattttcccctgccggacgttgttatgtggcacttgaagagcttcgctggggcgcgtttggtgatgtgatacgtcagggcgaaacaggccaggttaaccagctactggatattctcagacataaagcattaacgcagatggcacaggagagtggcggtagtgcaaccgtgcgtctgaacactctggactggcttggtggtcagggccgggagcaggcagataacgagtggcatgacgcgattaactggctgggagactggtgcagtgaagagcagcatccggtgatctggtcaaccacgcaggctgcagaacacttaccggttcgcatgcctcgcctctgctctgcagaacgcctctctgaaagtatggtcgatgaaatatttcagaagggggctgcatga

SEQ ID NO: 14389 - DNA, 684 bp, Escherichia coli
atgactgaatggcttaatgcacattttggtgcagacgcagctacctatcttagcttattagtcggcgtactggcactgtttggtattgggggcggtgttacatatagaatcagacagcaaaacaacataaaacagaaggcaaagaaaaccgagggtgatgtgaaccaggccgggcgggatattaatcagaccaccaacgtttaccacacatccaatgaatctactgaggaccctgtaaaaaaaaagcaagatgaacatgatctgaagataatcgaccagatccttgaattgctgccttatgaggatactactcaatgggttgagcagagctacctgagcggtatacggcaagatgtttgcttaaacattgaaaaagctgaaaaatttagcggtgaaaagtatcggttattcaatactgaagtgaatggtgcgaaagacgcttttttggacgctatgaccgcatacgtagatagtacgctaccatttatgagtgttgattacccgaacagaaagccagtgatgctaagccttccccatgactggaagagtaagagtgttgaatcggaggcaaacttccgctttcatcagcaaaatgtgcgtgaaacatcgggggggatgattgcgcgctatgaggattttgtcaggacatttaaggctcatggattcataagcgataaactgtaa

SEQ ID NO: 14390 - DNA, 210 bp, Escherichia coli
atgagagacgaatggaagttaaaaccagagcagttccgtcgttgttcatcccgggagacgctggaaaaagtgatttcccacacacgttataaacttacccctgcggagctggaagcctttaactctgcggtcgatcaccggctggcagaactgacaatgaacaaactttacgatcgcgtgccggcttccgtctggaaatatgtcacctga

SEQ ID NO: 14391 - DNA, 1422 bp, Escherichia coli
ttgacattagaacagattggtccggaggtgaatggaaaatcaccagcgggacaggagggagctggattgtttgtcagagatattatcggtcctcagcgacaggaacctcagtcagctggaacagaagaatatccccaggcctctaatatattgatgaatgcctttattacacagaataaaaagaatgataacttagtacagattacttcaattgttcgtgaaggagtaataaaaacatggggtaatgaaggtattacaattaagaaacagccgatcattgagaatataaactttacgcaaaaaagaaatattcatatgacgatcgagcgactaccagagaagttcatcctgaccgcttttgataccgatcgtaaagaaaatcagtcatggcaattttctgattactcaggctttatgaatcaactggataataatagtttagctattggtttttttgccgcacgaaatgcgaaactaagggtgaaaaatgcatcatttaaaccgggcaagccactggttgattacaaacaattaacttcacgtcaattcagtcgtgtccggcataaagcccctgaactttttcttgcttcacctcaatccgttgtaagaaactcaacaactcttcaatttttggccaatcaggctggaatagtcagtattgataatgataagcagactaagcaggtgcaggcgggtgaactggtacagtttccagttactttgcaaaaaaaacataatgacttcaccgtcaactttaacgttgatgggaatatatcaaaaaaagctatacgcatagagcaggttaaatcaaacctgactgatccttatgagatttacgtatgtagtgattgtcgacagggggccagaggcagcaaaaatgaccctgtagatttacagacagccgtaaaatttgtcgcacccggcggtaatatataccttaacgatggtcaatatcatggaattaccttagatcgggaattaagtggaatacctggcaagtataaaacaatttctgccattaatccacataaagccatttttataaacaagacattcaatctggatgcaagttactggcatctaaaatccgtggtctttgacggcaatgtggataatggaaataataaaccagcatatttgcgtatagctggtagctataatattattgagcatgtgatagccagaaataatgatgatacgggaatttctatttcagcgaaagataaaaaccgttttttctggccagctcataacttagttttaaactcagattcatataataatcttgatttatccgggattaatgccgatggttttgctgcaaaattaggtgtcggaccgggaaacatttttcgaggatgcattgcacataataatgcctgtctcttatacacatctccgagcccacgagaccgaggctga

SEQ ID NO: 14392 - DNA, 1134 bp, Escherichia coli; identical to SEQ ID NO: 8777

SEQ ID NO: 14393 - DNA, 501 bp, Escherichia coli
atgaataacacagacacattagaaaaaataatcagacaccaaaaaaacaaagaccccgcatatccctttcgggaacatttgttgatgcagctctgtattcgcacaaataaaagaatgcaggataatatatctgaatttctgggggtgtatggaataaatcactcagcatatatgattctcaccacattattcgcagcggagaaccattgtctgtcaccttcagagataagccagaaacttcagtttaccagaactaatattacccgcattacagattttttagaaaaagccggatatgtaaaaaggacggatagcagggaggatcgccgtgctaaaaaaatcagtctgacatctgaaggtatgttttttattcagaggctcactcttgcacaaagcatgtatctgaaagaaatctgggattatctgacccatgatgaacaggaactgtttgaagtcattaataaaaagttactggcacatttttctgatgccagctcataa

SEQ ID NO: 14394 - DNA, 783 bp, Escherichia coli
atggaaacgaagcaaaaagagcgtatccgacgtttgattgaaatacttaagaaaaccgacagaatccatttgaaagacgcggcacgaatgctggaagtttctgtaatgactattcgtcgcgatctccatcaggaagatgaacctctgccactgaccctactgggtggctatattgtaatggtgcataaacccgcaccatccatgccagtaatccaggacgttccgagaaatcatcgtgatgacttacctattgcaattctggccgccggaatggttaatgaaaatgatctgatcttctttgataatggccaggagataccgctcgttataagcatgatcccggatgcaatcaccttcactggcatctgttactcacatcgtgtctttgttgcgttgaatgaaaaacctaatgtgacagcaatactttgtggtggtacgtatcgtgccagaagtgatgctttttacgatgccagtaactcttcgccattagactctctcaatccgcgaaaaatatttatttccgccagcggtgtacatgatcactttggcgtcagctggtttaatcccgaagatcttgccactaagcgtaaagcgatggcccgtggactaaggaaaattttgctcgcccgccacgccttgttcgatgaagtagcctctgccagcctcgcaccgctctctgcatttgatgttctgattagcgatcgtccgttaccggcagattatgttacgcactgccggaatgcttctgtaaaggtcattacacctgattcagaagacgaatga

SEQ ID NO: 14395 - DNA, 783 bp, Escherichia coli
atggaaacgaagcaaaaagagcgtatccgacgtttgattgaaatacttaagaaaaccgacagaatccatttgaaagacgcggcacgaatgctggaagtttctgtaatgactattcgtcgcgatctccatcaggaatatgaacctctgccactgaccctactgggtggctatattgtaatggtgcataaacccgcaccatccatgccagtaatccaggacgttccgagaaatcatcgtgatgacttacctattgcaattctggccgccggaatggttaatgaaaatgatctgatcttctttgataatggccaggagataccgctcgttataagcatgatcccggatgcaatcaccttcactggcatctgttactcacatcgtgtctttgttgcgttgaatgaaaaacctaatgtgacagcaatactttgtggtggtacgtatcgtgccagaagtgatgctttttacgatgccagtaactcttcgccattagactctctcaatccgcgaaaaatatttatttccgccagcggtgtgcatgatcactttggcgtcagctggtttaatcccgaagatcttgccactaagcgtaaagcgatggcccgtggactaaggaaaattttgctcgcccgccacgccttgttcgatgaagtagcctctgccagcctcgcaccgctctctgcatttgatgttctgattagcgatcgtccgttaccggcagattatgttacgcactgccggaatgcttctgtaaagatcattacacctgattcagaagacgaatga

SEQ ID NO: 14396 - DNA, 570 bp, Escherichia coli
atgaaagcatcatcggacaataacgacttccgcgcccggggctggggctggctgggctcactggaaaccggtctgcccttcagtatcactgacaatctgatgctggagccacaactgcagtacacctggcagggactctccctggatgacggccaggataacgccggttatgtgaagttcgggcatggcagtgcacaacatgtgcgtgccggcttccgtctgggcagccacaacgatatgaactttggtaaaggcacctcatcccgtgacaccctgcgcgacagtgccaaacacagtgtgcgtgaattgccggtgaactggtgggtacagccttctgttatccgcaccttcagttcccggggagacatgagcatgggtacagccgcagccggcagtaacatgacgttctcaccgtcccggaatggcacgtcactggacctgcaggccggactggaagcccgtgtccgggaaaatatcaccctgggcgttcaggccggttatgcccacagtgtcagcggcagcagcgctgaaggttataacggtcaggccacactgaacgtgactttctga

SEQ ID NO: 14397 - DNA, 462 bp, Escherichia coli
gtgtcattcaatggtgaaaaaccgaagattgccatcgtcccccggagtctgcaccggctgatttatggctctgacaaacgggccacgccgcccctggatgatgatctggtggtgaacttatgtaccagcgaacatctgctggttcatcatccgatgctggaagggattctgctgtctgaatgtgaacgtctgaggcagcgttcgctggcaaataaactgatcagtctcttccgtcagtttggtggcacggaactgcgcctcaaactggtctggctctgctggcttgatttaatgaccggaaacagccttgacgactggacggagaacctgaaacggaaatcagaaaaagagctgggggaatggatcatcgaccgtcagaagcagaacgcagcactgacggatctgatggatcagtacgtgctcctggcataccgcacaacggttgacgataaccgtaactga

SEQ ID NO: 14398 - DNA, 783 bp, Escherichia coli
atggaaacgaagcaaaaagagcgtatccgacgtttgattgaaatacttaagaaaaccgacagaatccatttgaaagacgcggcacgaatgctggaagtttctgtaatgactattcgtcgcgatctccatcaggaagatgaacctctgccactgaccctactgggtggctatattgtaatggtgcataaacccgcaccatccatgccagtaatccaggacgttccgagaaatcatcgtgatgacttacctattgcaattctggccgccggaatggttaatgaaaatgatctgatcttctttgataatggccaggagataccgctcgttataagcatgatcccggatgcaatcaccttcactggcatctgttactcacatcgtgtctttgttgcgttgaatgaaaaacctaatgtgacagcaatactttgtggtggtacgtatcgtgccagaagtgatgctttttacgatgccagtaactcttcgccattagactctctcaatccgcgaaaaatatttatttccgccagcggtgtacatgatcactttggcgtcagctggtttaatcccgaagatcttgccactaagcgtaaagcgatggcccgtggactaaggaaaattttgctcgcccgccacgccttgttcgatgaagtagcctctgccagcctcgcaccgctctctgcatttgatgttctgattagcgatcgtccgttaccggcagattatgttacgcactgccggaatgcttctgtaaagatcattacacctgattcagaagacgaatga

SEQ ID NO: 14399 - DNA, 138 bp, Escherichia coli
atggaaacgaagcaaaaagagcgtatccgacgtttgattgaaatacttaagaaaaccgacagaatccatttgaaagacgcggcacgaatgctggaagtttctgtaatgactattcgtcgcgatctccatcaggaatag

SEQ ID NO: 14400 - DNA, 606 bp, Escherichia coli
atggtgaataaacccgcgccatccatgccagtaatccatgacgttccaaaaaatcatcgtgatgacttacctattgcaattctggctgccggaatggttaatgaaaatgatctgatcttctttgataatggccaggagataccactcgttataagcatgatcccggatgcaatcaccttcaccggcatctgttactcacatcgcgtctttgttgcgttgaatgaaaagcctaatgtaacagcaatactttgtggtggtacgtatcgtgccagaagtgatgctttttacgatgccagtaactcttcgccattagactctctcaatccgcgaaaaatatttatttccgccagcggtgtgcataatcactttggcgtcagctggtttaaccctgaagatcttgccactaagcgtaaagcgatgaaccgtggactacggaaaattttgctcgcccgccacgcgttgttcgatgaagtggcctctgccagcctcgcaccgatctctgcatttgacgttctgattagcgatcgtccgttaccggcagattatgttacgcactgccagaatggttctgtaaagatcattacacctgattcagaagacgaatga

SEQ ID NO: 14401 - DNA, 402 bp, Escherichia coli
atgtacgcaaaatcctttatcgctcttgatggcaacggacgtctgacgggcgcccgtactgcacaggccgcaccttatgctcactacacctgccacttgtgtggcagtgcactcagataccatccgcaatacgacactgaacttccctggtttgaacacactgacgacaggctgacagagcacggtcaacagtgcccttatgtcaggccggagcgcagagaaatacagttgattaaacgtctgcagcaattcgtaccggatgccttacccgtggtgcgtaaagccagctggcactgcagacaatgtcaccacgattattatggggagcagtactgcacacactgccagaccggaggattcagtattccccggacaactcaggaggaaatatgcgaattctga

SEQ ID NO: 14402 - DNA, 141 bp, Escherichia coli; identical to SEQ ID NO: 6191

SEQ ID NO: 14403 - DNA, 375 bp, Escherichia coli
gtgtcagacacgctccatgaaacaaattatcccgacgacaacaacgaccgcccctggtgggggctaccctgcaccgtgacgccctgtttcggggcacgtctggtgcaggagggcaatcagttgcattaccttgccgaccgcgccggtatcagagggcagttcagcgacgcggatgcataccatctggaccaggcttttccactgctgatgaaacaactggaactcatgctcaccatcggtgaactgaatccccgccatcagcataccgtcacgctgtatgccagagggctgacctgcgaagccgacaccctcggcagctgtggttacgtttatatggctgtttatccgacactggcacccgcaaccacctcataa

SEQ ID NO: 14404 - DNA, 246 bp, Escherichia coli; identical to SEQ ID NO: 4533

SEQ ID NO: 14405 - DNA, 141 bp, Escherichia coli
atgctgaaaggcgggatttccggtcgcagtgcaaaaggaaaacgtatccacacccgtgccattcacagcatcgacaccgatattaagctcaaccgcgcattgtgggtaatggcagaaacgctgctggagagccagcgctga

SEQ ID NO: 14406 - DNA, 279 bp, Escherichia coli
atgctgctggttaaccgggatacctggtgtcgtgccggtgattaccgtgctccgggatcactggccgggatgattaaacaggcgtggtgcagtgccctgggagtggatgtcgggtgccatgccacgctggtgcattttccggcctggccggcggtgtggctggaacgcgatgatgacactggctttcagcaggtgctggaacgtgctgactatctggcgaaggaacataccaaagctcactgcaccggtgagcgcaattttggctgtagccggagttga

SEQ ID NO: 14407 - DNA, 210 bp, Escherichia coli
atgtttgaagaacgtttagagactattcggtctgtttgtgaaaacttaaagttacaaactaagccagccttaagaattaaaaccaaacatcaaattatcacctcacgcaaaccaaaaacacgcaagattccaaagtggtgtatcgaccgtatcccttccgatgctcaaattataggtgaaacggaactacattatcttgtcaggcattaa

SEQ ID NO: 14408 - DNA, 396 bp, Escherichia coli
atgggccccattgatagcgcctcgctgctggttgcctatattctcagtttcgttaaagccatcgtgctgtttaaagtggtgaccttcctgccaatcatttggattgccggtttattgattctgctgaaaaccatcggcctgctgatattctgggtcctgctggtgatggcgattatgagctgggtaagccagggtcgtagcccgattgaatacgtgctgattcagctggccgatccgctgctgcgcccgattcgccgcttgctaccggcaatgggtgggattgatttctcgccgatgatcctcgttctgctgctgtatgtcatcaatatgggtgtcgcagaagtcttgcaggcgaccggaaatatgctgctgccggggctgtggatggcgttatga

SEQ ID NO: 14409 - DNA, 903 bp, Escherichia coli
atggaagcgcgggaagcaaccgctacgggtgaatcatgcatgcgcgtcgatgccattgctaaggtcaccgggcgggcacgatatactgacgattatgttatggcgggcatgtgttacgcgaaatatgtacgtagtcctatcgcacatggttatgccgtaagtattaatgatgaacaagccaggagtttgccgggcgtcctggcgatttttacctgggaagatgtgccagaaatcccattcgccacggcagggcatgcctggacacttgacgaaaacaagcgcgataccgccgatcgcgcactgctaactcgccatgttcgtcatcatggcgacgccgttgccatcgtcgtggcccgcgatgaactcacggcagaaaaagcggcgcaattggtcagcattgagtggcaagaattacccgttatcacctcgccagaagcggcgctggcagaagacgctgcaccaatccataacggtggcaatttactgaaacaaagcacgatgtcgacgggtaatgtccaacaaacaatcgatgccgccgactaccaggtacaggggcactatcagactcccgttattcaacattgtcatatggaaagcgtgacatcgctggcatggatggaggatgactcgcgaattaccatcgtttccagcacccagatcccgcacattgttcgccgcgtggttggtcaggcgctggatattccctggtcatgcgtacgagtcatcaaaccgtttatcggtggcggttttggtaataaacaggatgtactggaagagccaatggcggcattcctgaccagcaaacttggcggcattccggtgaaagtttcccttagccgtgaagagtgtttcctcgcaacccgtacccgccacgcttttactattgacggcaaatgggcgtga

SEQ ID NO: 14410 - DNA, 477 bp, Escherichia coli
atgcagcagctttcctttctgcccggagaaatgacaaccagagagcgcagtctcattctgcgggccctgaaaaccctggaccgccatcttcatgaacccggcgtggccttcacctccacccgtgcggcacgagaatggctgattctgaacatggcgggactggagcgtgaagagttccgggtgctgtatctgaacaaccagaatcagctgattgccggtgaaaccctcttcaccggcaccatcaaccgcacggaagtccatccccgtgaagtgattaaacgcgccctgtatcacaatgccgctgctgtggtgctggcacacaatcacccgtccggtgaagtcacacccagcaaggcagaccgccttatcacggaacgtctggtacaggcactgggcctggtggatatccgggtgccggaccatctgatagtcggtggcagccaggttttctcctttgccgaacatggtctgctttaa

SEQ ID NO: 14411 - DNA, 1542 bp, Escherichia coli
atgccttatctacttgaaatgaagaacattaccaaaaccttcggcagtgtgaaggcgattgataacgtcagcttgcggttgaatgctggcgaaatcgtctcactctgtggggaaaatgggtcaggtaaatcaacgctgatgaaagtgctgtgtggtatttatccccatggttcctacgaaggcgaaattatttttgcgggagaagagattcaggcgagtcacatccgcgataccgaacgcaaaggtatcgccattattcaccaggaattggcgctggtgaaagaactgaccgtgctggaaaatatcttcctgggtaacgaaataacccataatggcattatggattatgacctgatgacgctacgctgtcagaagctgctcgcacaggtcagtttatccatttcacctgatacccgcgttggcgatttaggacttgggcaacaacaactggttgaaattgccaaggcacttaataaacaggtgcgtttgttaattctcgatgagccgacagcctcattaactgagcaggaaacgtcggttttactggatattattcgcgatctacaacagcacggtatcgcctgtatttatatttcgcacaaactcaacgaagtcaaagcgatttccgatacgatttgcgttattcgcgacggtcagcacattggcacgcgtgatgctgctggaatgagtgaagacgatattatcaccatgatggtcgggcgagagttaaccgcgctttaccctaatgaaccacataccaccggagatgaaatattacgtattgaacatctgacggcatggcatccggttaatcgtcatattaaacgagttaatgatgtctcgttttccctgaaacgtggcgaaatactgggtatcgccggactcgttggtgccggacgtaccgagactattcagtgcctgtttggtgtgtggcccggacaatgggaagggaaaatttatattgacggcaaacaggtagatattcgtaactgtcagcaagccatcgcccaggggattgcgatggtacccgaagacagaaagcgcgacggcatcgttccggtaatggcggttggtaaaaatattaccctcgccgcactcaaaaaatttaccggtggcattagccagcttgatgacgcggcagagcaaaaatgtattctggaatcaatccagcaactcaaagttaaaacgtcgtcccccgaccttgctattggacgtttgagcggcggcaatcagcaaaaagcgatcctcgctcgctgtctgttacttaacccgcgcattctcattcttgatgaacccaccaggggtatcgatattggcgcgaaatacgagatctacaaattaattaaccaactcgtccagcagggtattgccgttattgtcatctcttccgaattacctgaagtgctcggccttagcgatcgtgtactggtgatgcatgaagggaaactaaaagccaacctgataaatcataacctgactcaggagcaggtgatggaagccgcattgaggagcgaacatcatgtcgaaaagcaatccgtctga

SEQ ID NO: 14412 - DNA, 993 bp, Escherichia coli
atgaaaataaagaacattctactcaccctttgcacctcacttctgcttaccaacgttgcggcacacgccaaagaggtcaaaataggtatggcgattgatgatctccgtcttgaacgctggcaaaaagatcgagatatttttgtgaaaaaagcagaatctctcggcgcgaaagtatttgtacagtctgcaaatggcaatgaagaaacacaaatgtcgcagattgaaaacatgattaaccggggtgtcgatgttcttgtcattattccttataacggtcaggtattaagtaacgttgtaaaagaagccaaacaagaaggtattaaagtattagcttacgaccgtatgattaacgatgcggatatcgatttttatatttctttcgataatgaaaaagtcggtgaactgcaggcaaaagccctggtcgatattgttccgcaaggtaattacttcctgatgggcggctcgccggtagataacaacgccaagctgttccgcgccgggcaaatgaaagtattaaaaccttatgttgattccggaaaaattaaagtcgttggtgaccaatgggttgatggctggttaccggaaaacgcattgaaaattatggaaaacgcgctaaccgccaataataacaaaattgatgctgtagttgcctcaaacgatgccaccgcaggaggggcaattcaggcattaagcgcgcaaggtttatcagggaaagtagcaatttccggccaggatgcggatcttgcaggtattaaacgtattgctgccggtacacaaactatgacggtgtataaacctattacattgttggcaaatactgccgcagaaattgccgttgagttgggcaatggtcaggagccaaaagcggataccacactgaataatggcctgaaagatgttccctcccgcctgctgacaccgatcgatgtgaataaaaacaacatcaaagatacggtagttaaagacggattccacaaagagagcgagctgtaa

SEQ ID NO: 14413 - DNA, 954 bp, Escherichia coli
atgatgacagtctcccgggtgatgcataatgcagaatctgtgcgtcctgcaacgcgtgaccgcgtattgcaggcaatccagaccctgaattatgttcctgatctttccgcccgtaaaatgcgcgctcaaggacgtaagccgtcgactctcgccgtgctggcacaggacactgctaccactcctttctctgttgatattctgcttgccattgagcaaaccgccagcgagttcggctggaatagttttttaatcaatattttttctgaagatgacgctgcccgcgcggcacgtcagctgcttgcccaccgtccggatggcattatctatactacaatggggctgcgacatatcacgctgcctgagtctctgtatggtgaaaatattgtattggcgaactgtgtggcggatgacccagcgttacccagttatatccctgatgattacactgcacaatatgaatcaacactgcatttgctcgcggcgggctatcgtcaaccgttatgcttctggctaccggaaagtgcgttggcaacagggtatcgtcggcagggatttgagcaggcctggcgtgatgctggacgagatctggctgaggtgaaacaattttacatggcaacaggtgatgatcactacaccgatctcgaaagtttactcaatgcccacttccaatctggcaaaccagattttgatgttctgatatgtggtaacgatcgcgcagcctttgtggcttatcaggttcttctggcgaagggggtacgtatcccgcaggatgtcgccgtaatgggctttgataatctggttggcgtcgggcatctgtttttaccgccgctgaccacaattcagcttccacatgacattatcgggcgggaagctgcattgcatattattgaaggtcgtgaagggggaagagagacgcggatcccttgcccgctgttgatccgttgttccacctga

SEQ ID NO: 14414 - DNA, 900 bp, Escherichia coli
atgatgacgattgaccaacgtgagaaacaaacaagactacaggcgcgaatggatgagttacgggcagaaatggatgagttacgggcagagattgcatttgctcagaagggcgaaaagccatggccttatcgttcctgcctgatgcgtgaaggtcgcggatattgcgaaaaacacggtaaatatcgtacgcatatactggtgtggatcgatcgtaatggcgaggacagagaaaaaatttcatgctgccctgactgcttgatcgctgaggccagtgatttgaccatggaactgtcgtccctcaaggcggaagaactgactgataacgccggaattgctctgcgttttcgggactgcgagtttgataattatctggaggttaatcctgacgcagccagaaatcttgcggcctgtcgccgctatgcggagaactggccagatatgctggagaacggtaccagtcttgttatgaccggcagttgcggtaccgggaaaaatcatctggcggtatcaatggcaaaacacatcatccgtaactatctggccagtgtggagatcaccgacgtgatgcgccttacccgggctgtgaaaaactgctggcggaatgacagtgaaaaaacagcggatgacgtcattgagcattatgcgtcactggatttgctgattgtcgacgaagtcggcgttcagtttggcagtgcggctgaaatggccattttgcaggaaattatcaatgcccggtatgagggtattttgccaactatcctgatcagcaacctttcaccggaagaattgtgggcgttcatcagtccccggattgccgacagaatcaccgatggcgggcgcaactggttgtcgtttaactggcccagctaccgttctcgtatcggaggtgttgccgcatga

SEQ ID NO: 14415 - DNA, 225 bp, Escherichia coli
atgatccgccacatcgttaattccctgtatcaccgatacaaccgttgcccccgagtggggcagtggtttaccaccagcaacggcctcgttctgcgggtttgcctggtcaatgcagaaagtcagaaggttgtctgccaggtgcaggggcgtacttataccctgagttacccgctggtggcgtttcagtccggaaaaatgtttaagcgtctgggaggtgtcgtatga

SEQ ID NO: 14416 - DNA, 522 bp, Escherichia coli
atgatgcgaccgggaaacagcgccccgtccgtctcggtcggtgtagccagcacaaacgaggccgtcatggctgtcagctgcgacatctgctccaccacccagcggtcactcagctcctgctccgggtccgcctccggattgcccgcaacgaaattcaccgcatccagaaaacgggcatacacccggcggcggaccaccgtggcccccaccagactctgcaggtcttccgccatcccggtgaccagaccgaacagattggacaccgtcagcgacggtctggcactgctgccccggccgttcatctcaaagccgctgccgtcaatcgggtatgcctcatacttacgcccctgccaggtgaccggctcccctttttcattcagctcattacagaaaaaataccgctcaccaccctgtaccgtcaggtcgatttcccagagtaccacccgcggtgactgctctgacttaaccgactcgttcagactttcttcgcgaatatcctgcatcagttcaccacctgcttaa

SEQ ID NO: 14417 - DNA, 195 bp, Escherichia coli
atgaagaaattacgggtaaccgtagaaccttttcagggaacaattccgttccgtattttgcagcgtggtcgtgttcttgttgaaggttcgttcagtggtaaatgtacgcaattacactcccggacctttcaggtgaatgccacgaatgaagagctaaccgtggagtgtacgatgaatgccgctaaatgccgctaa

SEQ ID NO: 14418 - DNA, 366 bp, Escherichia coli
atggctgagcttcgtacactccagagcagaatcaaaacactgaatacccgacgggtgaatattctgaagggggaacagcgtcgtgtcagtggcagtgcacgtgtttccctcaagcgtcatatctggctgagggacgccgggcagtgctgtatctgtggtcgtgtggttgacctctgtgacagtgaactcgatcaccgaattgcacttcagttcggtggtggtaatgaggagacgaatctctggacgctctgtaccgaatgccatcgacaaaagtctgctcgtgaagcggcgggtggtatgccggacccgacgctgccggaggtgtccggaggtagtgacagagcggacgacatcatcggactgtaa

SEQ ID NO: 14419 - DNA, 504 bp, Escherichia coli
atgactgaaatggctaaaggaagcgtgacgcatcagcggttaatcgctttattatcacaagaaggtgctaacttccgcgtcgttacccatgaagcggtaggtaaatgtgaagcggtgtcagaaattcgtggcaccgctttaggccagggggctaaggcactggtatgcaaagtcaaaggcaatggcgtaaatcaacatgttctggcgatcctcgctgccgatcaacaggccgatctgagccaactcgccagccatataggcggattacgcgcttcgttggccagcccggcggaagtcgatgaactcacaggctgtgtcttcggcgcgatcccccctttcagcttccatccaaaactcaaactggttgccgaccccctactcttcgaacgatttgatgaaatcgccttcaatgcaggcatgctggataaatccgttattttgaaaaccgcggattatttgcgtattgcgcaaccagaactggtcaatttccgccgcactgcgtaa

SEQ ID NO: 14420 - DNA, 192 bp, Escherichia coli
gtgactaaacaggaaaaaaccgcccttaacatggcccgctttataagaagccagacattaacgctgctggagaagctcaacgaactggacgcagatgaacaggccgatatttgtgaatcacttcacgaccacgccgacgagctttaccgcagctgcctcgcacgcttcgggggtgacggtgaaaacctctga

SEQ ID NO: 14421 - DNA, 339 bp, Escherichia coli
atgaaacgcgagaggatgctcacgatacgggttactgatgatgaacatgcacggttactggaacgctgtgagggtaaacagctggcggtatggatgcggcggatctgcctgggtgagccggttgcccgttccgggaagctgccgacactggcaccgccgttactgcgccagctggctgccatcgggaataacctgaatcagacggcgaggaaggtgaacagcgggcagtggtcttccggtgaccgggttcaggtggtggccgcactgatggccatcgagagagagttgcgcagcttacggcaggtcgtcagggaacatggagcgcgggatgatagttaa

SEQ ID NO: 14422 - DNA, 1554 bp, Escherichia coli
atgatagttaagtttcatgccaggggaaaaggcggtggcagtggtccggttgattacctgctgggaagggagcgtaaccgggaaggggcaacggtgcttcagggtgatccggaagaagtccgggaactcatcgatgccacgccatttgcgaagaaatacacgtcaggtgttctgtcgttcgcggagaaggagctgccgccgggagggcgtgaaaaagtgatggcgagctttgagcgtgtactgatgcccggtctcgaaaaaaatcagtacagcatcctgtgggtggagcaccaggacaagggacggcttgagctgaattttgtcattccgaatatggagctacagaccggaaaacgcctccagccgtactacgaccgggcagacaggccgagaattgatgcctggcagacactggtgaatcaccattacgggctgcatgaccccaacgccccggagaaccgccggatactgactctctctgataacctgccggaaacgaaacaggcgcttgctgagagcgtcacacgcgggatagacgctctttatcatgtcggggagataaaaggccgtcaggatgtgattcaggcgctcacggaggcagggattgaagtggtcagggtgacgcgaagcagtatcagcattgcagacccgaacggcgggaggaatatcaggctgaaaggagcattttatgagcaatcttttacagacgggcgcggagttcgagaaaaagctgaaagagagagccgaatctacagagaaaatgctgaacaacgagttcaggaggctcggcgaatctgtaagcgaggctgtgacatcaaacgagacgaaaatcagagacgctatagccctgttcacaacgtcgacagaggaatcgctgaaaaaacaccgggaaggggtgaaagaggcgatgatgcagcaccggaaggacgtgttaaagctggcagggaatacgggcgtgatgttactggggatagtctttctcctgtttaccgcgagtggcgggacgctctggtatcttggcgggcggatacaggcgaacctagaagaaatcaggatacaggaagagacattgcagaaactgaacgcgaagacatggggcgtggagtttgtgcaggacgggaacaggaaatttctggtcatcccgcaggggaaatcggcaacggtgattccctatcaggggaaggactgggtacaactgacggagtgacacagagtgacggagctggaaagacatttgctgaacgcattagagcaactgcaacaggactatatgcagcggctgaacgaatgggagagcgccttcgtggaattgcagaagatgttttcgcttacgcaacgggacaacgcgatgctgaacgagcgggtcatgcagttgagtcagcaggtgcagcacttgagcgagcagacagaacgcttgagccagttatacagcgagaactggagataagagaggaacggctgatacaggagcgtgaacatgcattatccctggaacgggagcgtcagccggaaatacaggaacgcacgctggatggtccttcgctgggatggtga

SEQ ID NO: 14423 - DNA, 528 bp, Escherichia coli
atggcgaaagagtttgatgttgagaccaaaggaaaacgtacttattctatgaataacgatatgagtgatttatataatgtaatatcacgggctgttgaagcgtctggtgccgatcattcaattaatgaaaaattgacaaatgtcttaaaaagagaattagttgattatgtcagcattgcgcatctaaaaaccaaattgtctgtattatatgagtttgaaaagaattatttgcagcttatcgcagaatataaggaagaaataaaatttgcttcctctttgcaagaggatttacgtaaagaacgtgctaaattcttttctgagacattaaaagaggttcatcaaactctaaatgaatctcaagttgataatgaagtggcatcaaaatggattaaagaacttgttggtagttataccaaaagcttggatctaagcggaggccttgttgaagagcatacattagatacaattgcttgtattcgcgctgaggctaaattaaataaaccatctattgagccgggcaataactaa

SEQ ID NO: 14424 - DNA, 540 bp, Escherichia coli
atggccgggggtagacatataaatagtttgctttatgttcttgtggctatattagaacgtaaagtgaatgactttaaattgtcttcgtcggaacttcctgagatattggctgctttacgagaggcaagggaatgccttgtatcgcgcagcatcaatgaagatcctcagttatattcggcattatttttatatgaaaaaaatgaagggttgctaagtctttcatttgagagagaatactctatttttattaactccaatttagagtgcatattgaggaaagtttctgatataaaagataaaaagcagggtaaactgcaaaaaataatgaatgaatttgtgaggtttaaatattcaagcggcgattcttgtgcggatcttttgtttttgagtggtaaacttgaacagatacgtaaaatatatgaagtctttgatagggatagaaatagacttgaatttcttaactatatgatgaagaaagaacgtgttatttttgaaagagagtttgaacggcttttaggtgaaaaaaatggggatttttag

SEQ ID NO: 14425 - DNA, 804 bp, Escherichia coli
atggggatttttagtcagattggtagcgctttgcttaattgtattagtaagcctgttgatgcactctgtgaatgggctaaagaaccattgaaagatagggaatatagaagagaggaggcttcaaaggagtctgaacataagcgcaacatggatgtcttgacggccaagaaacgtgttgaacatgaactcagaatgagtgaattgaatgctgaatatgagctgagagaaaaagagaaaactcttgaagttgatctagaggttcgtcgcgttcgcgaaatagaaaaagcagtagctgagatccaggaatggagaaagtcacaggaacttgagaggatggagcgaacaacagcagctattgcacgttacaaggagcaattaacgaaattaaatatagaagtgattaactctattgggaacatgcagcttgatttaaaggagcgcgcacagaaatttgtctatgagaaagctgtacaatataagcgcctgcaagatgaagcaactgaagaggctatgaatgatcttataaggattgaggaaaagtttggtgataatgaaagagctaaagatattttaattcgtgcagttgatactaagatggggaatgttattgatacgtcaactcggtttttggaagaattaaatagagatattgttagtttaaaccaaagtattgataggctgactaatcaaggacaaaaattcattgaaagtcatttggagcgttttcatattgttgatgcgacatcttctttatatattacaggtgatgagaaagaacgattgttgctgaaaaatattaattag

SEQ ID NO: 14426 - DNA, 1059 bp, Escherichia coli
gtgcgggtattacttagacctgttctggtgcctgagcttgggctggtggtccttaagccgggccgtgaatccatacagatatttcataatcctcgagtgctggtggagccggaaccgaaaagcatgtgcggcctgccatccggagtcgtccctgccgttcgccagccgctggcggaggataaatcattactgccatttttcagcaatgagcgtgtgattcgtgctgctggcggcgctggtgcactgtctgactggctgttgcgccatattaaatcctgccagtggccacacggtgattatcaccacagtgaaaccgtcattcaccgttatggtaccggcgcaatggtgttgtgctggcactgcgacaaccagttgtgtgaccagacctcagaatcacttgagcaacttgctcaccaaaacttgtcagcatggatgattgacgtcatccgtcacgcaatcagcggtacgcaggagagggagttatcgctggccgaattatcctggtgggcggtctgcaatcaggtggctgatgcgcttccggagtctgtattgtgtcgttcactgggattaccggtggaaaaaatccgctccgtataccgtgagagtgacatcgtaccgggagaacagactgccaccagcatactgaagcagcgcacaaaaaatattgcgctgccacttcacgtccaccagcaacagcccccactccaggaaaagacgttagtaagcatcgccgttgatccggagtctccggctcagtatctccagcgccagaaaccacaacgggaagagatgcctgtatacacgcgctgggtaaaaacgcagaaatgcatgacgtgcggtaatcaggcagatgatccgcatcacatcattggtcatggcctgggaggtatgggaacaaaggctgatgatttgtttgttattccgctgtgccgtaaatgtcataacgaactgcacgccggggtaaaagattttgaagaaaaacacggcagccagctgttgttgctgattcgttttttaatgcacgcgagaaattcgggtgtcctgaagtggaaagcatga

SEQ ID NO: 14427 - DNA, 366 bp, Escherichia coli; identical to SEQ ID NO: 6173

SEQ ID NO: 14428 - DNA, 765 bp, Escherichia coli
atgggacgctggcttgctggcaggctcatgaaagagctggggctggtcagctgtcagcagccgactcaccggtataaacgtggtggtcatgaacatgttgctatccctaactaccttgaaaggcagttcgccgtgaccgagccaaatcaggtgtggtgcggtgatgtgacctatatctggacgggtaagcgctgggcgtacctcgccgttgttctcgacctgttcgcaagaaaaccagtgggctgggccatgtcgttctcgccggacagcaggcttaccatgaaagcactggaaatggcatgggaaacccgtggtaagcccggcggggtgatgttccacagcgatcagggcagtcattatacgagcaggcagttccggcagttattgtggcgataccagatcagacagagtatgagccggcgcggaaactgcagggataacagcccaatggaacgcttcttcaggagtctgaagaacgaatggatgccggtggtgggttacgtaagcttcagcgaggcagctcacgccataacggactatatcgttggatattacagcgcactaagaccgcacgaatataacggtgggttaccccaaacgaatcggaaaatcgatactggaaaaactctaacgcggtggccagtttttgttgaccacttcaagagaaaagaaccgatgaaggtggccagtacattttgtgtggtgacgtcttcaacaactaaacgcgtagctctgggagtcacattagtagtggctgaaccgtag

SEQ ID NO: 14429 - DNA, 804 bp, Escherichia coli
atggtggcaattttggcggtttcctttccattaacaaactttcgcagtaaatcccggttaatgacacagacagaatcagcgattctggcgcatgcccggcggtgtgtgcctgcggagtcgtgcggcttagtggtgagaacgccggagggggagcggtatatcccttgtgtgaatatctctgcagagccggaggcgtattttcgtattgcaccggaagactggctgcgggcagagatgcagggggagattgtggcactggtccacagtcatcccggtgggctgccctggctgagcgaggctgaccggcggctgcagataaaaagcgcactgccctggtggctggtctgccggggtgacattcacaaattccgctgcgtgccgcacctgacgggacggcgctttgagcacggggtgacggactgttacaccctgttccgggatgcataccatctggcggggactgaaatgccggattttcatcgcgaggatgactggtggcgcaacggtcagaacctttacctggacaatatggcggtcaccggcttttaccgggtgcccctgtcctctgcacaggcgggcgatattctgctgtgctgctttggtgcttcggtaccgaaccatgccgccatttactgcggcaacggtgagctgcttcaccatctgcctgaacaactgagtaaacgggagaggtattccgaaaaatggcaacgacgaacgcattctgtctggcgtcaccgccactggcacgcatctgccttcacggggatttgcaacgatttggccgccgcctcagcctgtatgtga

SEQ ID NO: 14430 - DNA, 519 bp, Escherichia coli
atggcaagtgtaacccggtttattgtcgctcacggaatgggctctccgcatcttcatggttatcatcgcctgaccctggcccacttttttctgccggaaaaaggcaccatcatctcggtggcaccacagggactctatcaggtagtcaacccggcaacgccaccgttcattcctgccattcaggaagggttaatgaccagcattcagactcatgaaatcatgttacttacacattttaacctgggtggtgttttactcagtgaactacatcgtctgggagaaagccgactggcaaacaggctgaacagtctgctccggcgttttgacgatcgcgatctctaccacaccctgatatggctgtgctggtatgatctgatgtgcgcccactccatgcagccctggactgaagagttaaagcataaatcacacgcagaacttgaaagctgggctgtggcgcgcaaacgggaaaagcgcgagcttgaactgatgattgacgagtacctgttatacgcctgttga

SEQ ID NO: 14431 - DNA, 1257 bp, Escherichia coli; identical to SEQ ID NO: 13723

SEQ ID NO: 14432 - DNA, 342 bp, Escherichia coli; identical to SEQ ID NO: 9277

SEQ ID NO: 14433 - DNA, 222 bp, Escherichia coli
atgaaaatcatcacccgtggtgaagccatgcgtattcaccgtcagcatcctgcatcccgtctttttccgttctgtaccggtaaataccgctggcacggcagcactgaagcgtataccggtcgtgaagtgcaggatattcccggtgtgctggccgtgtttgcagaacgccgtaaggacagttttggtccgtatgtccggctgatgagcgtcaccctgaactga

SEQ ID NO: 14434 - DNA, 369 bp, Escherichia coli; identical to SEQ ID NO: 6535

SEQ ID NO: 14435 - DNA, 456 bp, Escherichia coli
atgattcacctgttcaaaacctgcattattactggcgtcattctggggttaacgtggtctgccccactccgggcacaggatcaacgttacatcagtatacgcaatacagatacgatatggctcccgggaaatatttgtgcttaccagttccggctggataatggcggaaacggtgaaggatttggccccctcaccatcactctgcaactcaaagacaaatatggtcagacgctggtgaccagaaaaatggaaacggaagcttttggtgacagtaatgccacgcgaaccacagacgcatttctggaaacggagtgcgtggaaaatgtcgccacaaccgaaatcattaaagcaactgaagaaagtaacggccatcgtgtcagtctgccgttatcggttttcgatccccaggactaccatccactgctgattaccgtttccggaaaaaacgttaactga

SEQ ID NO: 14436 - DNA, 369 bp, Escherichia coli
atgtcggacacactccccggaacaacgcttcccgacgacaacaaagacctcccctggtgggggctgccctgcaccgtgacgccctgtttcggggcctgtctggtgcaggagggtaaccggttgcattaccttgccgaccgcgccggtatcagaggccggttcagcgatgcggatgcgtaccatccggaccaggcctttccgctgctgatgaaacaaccggaactcatgctcaccagcggtgaactgaatccccgccatcagcataccgtcacactgtatgcgaaaggactgacctgcgaagccgataccctgggctcctgtgattacgtttatctggctgtttatccgacgcccgaaatgaaaaattaa

SEQ ID NO: 14437 - DNA, 645 bp, Escherichia coli; identical to SEQ ID NO: 8435

SEQ ID NO: 14438 - DNA, 354 bp, Escherichia coli; identical to SEQ ID NO: 10421

SEQ ID NO: 14439 - DNA, 222 bp, Escherichia coli
atgaaaatcatcacccgtggtgaagccatgcgtattcaccaacaacatccgacatcccgtctttttccgttctgtaccggtaaataccgctggcacggcagtgctgaagcgtataccggtcgtgaagtgcaggatattcccggtgtgctggccgtgtttgctgaacgccgtaaggacagttttggtccgaatgtccggctgatgagcgtcaccctgaactga

SEQ ID NO: 14440 - DNA, 819 bp, Escherichia coli; identical to SEQ ID NO: 6059

SEQ ID NO: 14441 - DNA, 510 bp, Escherichia coli
gtgacgaggcttatcgtcgctcatggaatgggggctccgcatcttcatggttatcaccgcctgaccctggcccacttttttctgccagaaaaaggcaccatcatctcagtggcaccacagggactctatcaggtcgtcaacccgggaacaccaccgttcattcctgccattcaggaagggttaatgaccagcattcagacccatgaaatcatgctgcttacacattttaatctgggcggcgttttactcagtgagctacatcgtctgggtgaaaaccggctggcaaacaggctgaacagcctgctccggcgtttcgacgatcgtgatctctaccacacgctgatatggctgtgctggtatgatctgatgtgtgcccactccatgcagccctggactgaagagttaaagcataaatcacatgcagagcttgaaaactgggctgtggcgcgcaaacgggaaaagcgcgagctggaactgatgattgacgagtacctgttatacgcctgttga

SEQ ID NO: 14442 - DNA, 384 bp, Escherichia coli; identical to SEQ ID NO: 8439

SEQ ID NO: 14443 - DNA, 618 bp, Escherichia coli
gtgttgataacctacaaaggaaagctaccgggaagaattacttgttctctgaagatgccgccgtcaacactgcggtcagaaaaagatgatgttgaatcacgtattgaaaaactggagagctacgtcgttgagctgaataagaaatggtcgatattggtgccttctggcgatgaaaagcagtttgctgcgtttgacgattattgtcggaaagtgatgagcagaaatctcgcagagtgtttcagtattcataatgataatttcagtgagctggaatgggagtgtaaccggccatcctttgttgtatccggtgatgctgggaaaataaccatctcagaaaatgggaaagtaacacctccatcgcaccagcacagtgaggagctcattgaatttgccattgattacctgaagaacaataaaaagcaggggctgatgaagcgcgttggccgttgcatgggatatcttcaggtagccgctgagattgaagcgctggccagtggtgctgataaggatgcaattgtgcgggaggctcttcttcgtgattttaatactccaccctttaaaaaagtgccggcttactggcttcatccggggctgacttatcttaaagtgcgtatttag

SEQ ID NO: 14444 - DNA, 207 bp, Escherichia coli; identical to SEQ ID NO: 13738

SEQ ID NO: 14445 - DNA, 195 bp, Escherichia coli; identical to SEQ ID NO: 7170

SEQ ID NO: 14446 - DNA, 207 bp, Escherichia coli; identical to SEQ ID NO: 5049

SEQ ID NO: 14447 - DNA, 432 bp, Escherichia coli; identical to SEQ ID NO: 7321

SEQ ID NO: 14448 - DNA, 303 bp, Escherichia coli; identical to SEQ ID NO: 5063

SEQ ID NO: 14449 - DNA, 411 bp, Escherichia coli
atgacggagacagcggcgattgcattgatggttctcgatcgtcgcccggaccttgcgccacctcttgggcgcgccgaacgtcaacagtttcaacggctattggtctggctggttgctaatgtctatccaacgttcactttcgccgattaccctaagcgttgggcatctgacgcacctgtaattgaatatcgcaaatcgctttatatctggctgaattcgcaattgactgctgaaccgtatgtgtttggagagcaactaacgctggtggactgttatctctgcaccatgcgcacatggggaccgggacacgaatggtttcaggataatgccccgaacattaatgcgattgctgatgctgtatgtcagataccgaaattacaagaagtattaaaaaggaatgtcattatttaa

SEQ ID NO: 14450 - DNA, 687 bp, Escherichia coli
atgactacttttaccgacaaagaactgattaaagaaatcagagagcgaatcggcagcctggacgtgcgagacaatattgagcgcctggcttatgaaatcgcactggcatcgctggcagcagtatcggatgaacgagcagcctatgaattatttatggagaagcgtttcggggaatctgtagatcgccgtagggcaaaaaatggcgatagagaatacatggcatgggatatggcgcttggctggattatctggtgtcaccgcgccgccatgcttcagggtagccaacctgtaagccaaacttacaacttgccagaattaatcgaaggcatggaagtttccattgatgtaagcacttgtgatgctgatttaggtaatcgctatttcggcaccgtcaccgaggcgttagaacttgatacagccaagaatggttacatcctcctggttcaggacgcagagccaaacttcgatgtaaatggcaactctccgggaactccggatagttggataagctgtagtgagcgaatgccccctcaagatgattggattttaatttattcaaagcacggcgagtatatggcaggacaggtgcaaggggaatacgtggagttgagcgacggcactttatcgtggttagggaacgtcttgttctggatgacgttgccagaacctccgaagggggcgaaatga

SEQ ID NO: 14451 - DNA, 951 bp, Escherichia coli
gtgcgtaaatatctcggcaccgtggtgccggggaatgacaacttctttgccgcacttaatgcggcggtagcctctgacggtacgtttatttatgtgcctaaaggcgtgcgttgcccgatggaactttccacctattttcgcattaacgcggaaaaaaccgggcagtttgagcgcaccattctggtggccgacgaagacagctacgttagctacattgaaggctgttccgctccggtgcgtgacagctatcagttacacgcggcggtggtggaagtcatcatccataaaaacgccgaggtgaaatattccacggtacaaaactggttccctggcgataacaacaccggcggtattctcaacttcgtcaccaagcgtgctttgtgcgaaggcgaaaacagcaaaatgtcatggacgcaatcagaaaccgggtcagcgattacgtggaaatatcccagctgcattttgcgcggcgataactccattggtgagttttactcagtggcgctgaccagcggtcatcagcaagcggataccggcaccaagatgatccacatcggtaaaaacaccaaatcgaccattatctcgaaagggatctctgccggacatagtcagaacagttatcgcggcttagtgaaaatcatgccgacggcaaccaatgcgcgcaatttcactcagtgcgattcaatgctgattggcgctaattgtggggcgcataccttcccgtatgtcgaatgtcgcaataacagcgctcagctggagcacgaggcaacgacatcacgtattggtgaagatcaactgttttactgcctgcaacgcgggatcagcgaagaagatgccatctcgatgattgttaacggtttttgcaaagacgtgttctcggaactgccgctggaatttgccgttgaagcacaaaaactcctcgccatcagtcttgaacacagcgtcggataa

SEQ ID NO: 14452 - DNA, 204 bp, Escherichia coli
atgacggcaccggtaacgccagttcccaccatccttaccattggtgcgcataatgtatattatgttaaattacctgtgaagatcctttacttcaccattcacatccacacacagataaatcaatacgttgtgatttctgacttccctcccgtttcggtagaaaaattcaacctctgttcagtgatggcacaccatagaccatga

SEQ ID NO: 14453 - DNA, 234 bp, Escherichia coli; identical to SEQ ID NO: 11589

SEQ ID NO: 14454 - DNA, 309 bp, Escherichia coli; identical to SEQ ID NO: 11590

SEQ ID NO: 14455 - DNA, 1266 bp, Escherichia coli; identical to SEQ ID NO: 11591

SEQ ID NO: 14456 - DNA, 1095 bp, Escherichia coli; identical to SEQ ID NO: 11592

SEQ ID NO: 14457 - DNA, 342 bp, Escherichia coli; identical to SEQ ID NO: 11593

SEQ ID NO: 14458 - DNA, 132 bp, Escherichia coli
atggctgaatggaatggctattattgcacggtccttaattataacattcataccgacatgattatcttctgtccggaagaatcagaggctgcggtttcagactgtctgccggtacattcctctccccgttaa

SEQ ID NO: 14459 - DNA, 1035 bp, Escherichia coli
atggaagatgcaattcagacctatgaaatcaatgatattgatgatataggaaatattttcgaccgagttatttcaggcgaagaaatccacattgaaaatttgaagttaaacttcttagaaagtattgatttcaaattttttggtgatgaagataagtataatggtactctgcctgcaggtttggcacagggtatttgtgaatttcaaactgagatgtacaaggtttttactctaatcaagtacaaaacctctaacttacagaagctcactgctgaggatagagaagctgcagagttggtttttactatcaaacctggctgtacagaaattatcacctcagttaaagaacttattgattcctttggtaacgcatttgagaaggtaacacaaggtatgagcccaagacagaaaacaatgtgtttcctgtttgctgtcttagttttaggcggcgcatgggtcggtacgtcctacttagatcatcagacacaagtcgaaaccaaaactattgagttacaacaggaagaagcaaaacagcgagcagaatccgagcggatgacaattctacgcgatggtatgctgtctgcaataaaagcacatgaaggtattgatacgatagagcgcgccgaaggtatccaagagcacaccgctaaggcatacactggagttcttaaaggtgcatctgatgcagacaaagtgacgatccgcggggccagcaatattgaactttcgcaaggtcaggttcaagaaatcatcaagaacccaattgaaaaggctaagtcagagcagcaaacattggaagttgtcattgatagtataaaacgctcagccgataagctaacgttaagctgccatgagccaacaggtgatgattcattcccgatctatgttgataccagttttatcaatgaccctgatgaaataggcttaatttttgacgcgatgaaaaataataaaacggtcaacatccttggtagttacaagattaggtctggtgtgatagaacaaggtaacgcctctacaatctcacctccttga

SEQ ID NO: 14460 - DNA, 759 bp, Escherichia coli
atgctcacagaaaaacagttttttgaacttatcaaagcattacagtcatccaatttctcaaccacagagattttggggttgagcttcgctattattattgtagctctcatagtgaactttattgtttcttttataactgaaaaagcaaaaatttctgctaccaacgctaactatgaaatactcagaaagcagttagcattaaatacaacaactatcaaagatatagaaaaaaagattacttctgagttgtggatttctcaacaaatctggcaaaaaaagtacgatatgtatgagtacatttacacacagttacttagtataaaaaaatgggctgataatgaatttgaaattattgagattcacatgatgccaacatatgtagccaatagttatcaaggatattttaatcaagaacaagaaaagcagttttgggatgaagtacaacaggctcacgaagaccgtgataaagcactaaacgatgaagatctaaaattaaaaaataaagagctacaacagaaacttagcctagccttcacagcattaacagagatgatgttaactaaagcagttcttcttaataaagaagtaacagttattttaaatgaattgattgagaatattggtacaaatccgtccccacaggaatatgaagaaccggatgattatggatacagaatcaagggggccatggataaagccttagaaaaaataagaattaatgctttatctgatttagaaataaaaaatccagaatgttaa

SEQ ID NO: 14461 - DNA, 483 bp, Escherichia coli
atgacttgtgagcagaccattcttgacatgtgctgcggctctcgtatgttttggttcgacaaggaggacaagcgcgccgtgttcagtgatatccgcgccgagcagcatgagctttgcgacggtcgccagttggttataagtccggaccttatagctgatttccgcgcccttccctttgccgataacactttccctgtcgtcgttttcgatccgccgcacctcgagcgcgtcggcgataacgcatggatgaggaaaaagtacgggcggctcaacaaagaaacatggcgcgatgatcttcgcgacggcttcgccgaagcattcagggtattgcggccccacggtgtactcatattcaaatggaacgaaacgcagatcccggtaagcaatatcttggcgctgaccgacgagaagccggccatatggcaacgaaccggaaaagccgacaaaacccactgggttattttcgtcaaaggtgtggaatga

SEQ ID NO: 14462 - DNA, 204 bp, Escherichia coli
atgactgtaatcaaaacgcataccggaacggttattacccgcaccggtgaaaagcaggtgcaattgcatcaaaacgcgacaacgtgggtggctggcccaaaagagtattactacaaagacactggccgccgcggtggtgctgtcggtgtccgcactcgtctggtgctgagcagcatccgcccaatcgaagcaaagcaggagtaa

SEQ ID NO: 14463 - DNA, 624 bp, Escherichia coli
atgtctctcgcagcccgttttaaagcacgtcgtttggaattaggaatgactcaagtggaagtagcgaattctgcaggggttagccaacaatccatagaatccatcgaaagtggacgaaccagaaagccacgcaatcttctggatctggctaaggccttgaaatgtagcccagactggctactgaacggtaaaaatattatgcctctcgcggagataagtaccagacgcatacctatattaagttacgttcaggcaggagagcttacagaagcaagagacataacagatctgacaggggaatttgaatatattttggcagactctgacattccagaaacatgcttcgcattacgtatcgatggcgacagcatgcaaccagagtttaaagaaggagacattgttatcatcgatcctgatctatgtcctgcaccaggggagtttgttgtcgccaaaaacgacggtcacgaagctacatttaaaaaataccgtccattaggaatcggcatcgacgactttgaattaatccccctaaatcctgattaccctatttttcgtagtgcagatatgaacttacagatcataggtgtaatgatcgaacaccgtatttaccgccgtaaacgttag

SEQ ID NO: 14464 - DNA, 213 bp, Escherichia coli
atgaccttagcgacccgagtaaaagaacgacgtaaagaactcaaaatgacgcaagttacgttggctgagctcacaggagtgagccagcaggcaataaacagaattgaaagtggtgttattgctcggccacgttatcttcttgaaatgtctatagcattggattgcgaccctaattggctgttgtatggctcacaaaacgataaaaaggcttaa

SEQ ID NO: 14465 - DNA, 333 bp, Escherichia coli
atgaaacggttatgtttggcgttagttatgatggttactgctccggcgatggctgcaattcagtgcggcaactacacgatgaccggtgacggaatgactgttattaacggtgaaactgtcacatcacagaagataaaatttctgggaaaagatggtgactattcaaacatgaaaatggacatgggcctgatgccttcccgtgatggtaacaattacggctttgagtttgtgaaacgtaacggaaaagctttcctgaacgtccagctgctgcagaacagcatggacgcgccgaaaatcattggatctttcccgtgtaaaaaggcgttacgctaa

SEQ ID NO: 14466 - DNA, 774 bp, Escherichia coli
atggcggcaggcatcccattagaaaaagcgcaaaaatatattgaacaattcaatgcgcttctattggatagggaaagtttagatcccttcactgaaaagaaaattcgagaggaactttctgtctctccaacgcctgctaccaacattgcactatcttatctggatgcaataaccggaaagattgaaagcgcgttacgttatctcaggataagcctagaagtaaacgatgtaacgttggcaatgcactatcatcacattttaattaatacatttagctataatgaactcaaggatgtctatgtcccgctggcaaagaagtatcggacaaaactctttagtcacaacgcatacagttgggcgtaccgttgcggcgagcgtgaacagttaaaattttatatggaagagcacattaagcttctttctgaatcagaaggcaggagtaatgctatgaagcacaaagaagaactccttgcagaaatggataatttctatagcgccacacagtgctcgaaggaacagttccagaccttagcatccataatctggggcttgctaagtgaatacaaggctacgacaggtttcgttcagcttagtggaagcggttgctatgttgttgatattaaaaatcttgagcctaaaactattgccaaaatgaacttcgacttggctgatagagtctgcgctgaatctaaactggatgattgttccctgttagctagatttacctctccgcgtcagttgcatacgggggtgagctaccatgtcggtaactag

SEQ ID NO: 14467 - DNA, 396 bp, Escherichia coli
atgtcggtaactagcaatcagattctcgataccgctcgattatgtctgtctgaaaatattgagagtggatttcgaagcgctatctcaagggcgtattacagtatgttacatgagtctattagctcacttactgccataccgcattttacccatgagcatcacaaaaatactgtgggttatatgtcaacgccctcagagtgcaaatcagagccatacccgacaaatacactgaaatccctagctttcgtacttcgccagtggcgggatgctagaaatgaagctgactatgatctgacgaatgtgactgtttcgaaagagatgggacaggatgcaatcgaggctgctgaactctattttgagcgctgggaacagctaaagtctgctagagtttcatga

SEQ ID NO: 14468 - DNA, 681 bp, Escherichia coli
atgagcaaatacaccgaactaatcacgaactaccacgccaccaaacctaaatttcttgcgcatgttgatctgatgacccggccgcttattgatgttgcggcggccaccagagggttgattactgcatttgatattgactccgcggttggtgtgcaacttgacattcttggattgtggatcggacgtagccgtgttgtcagccagcctatctcaggtgtctatttcagctgggataccgacgggcttggatatgatcagggtgtatggcaggggccatacgatcctgattccggatacatgtacctcagcgatgaaacttatcgtgtcatccttaaagcgaagattgcgattaataactgggacggacggaatgattcgcttccggtaattcttgacgcggcaacagcaggatccgggctgcgaatgcagatagtcgataaccaggacatgacgatatcggtctgggtctttcctgatactgatatttcagatgtatcgcgtgagttaattgctgcaattaaacagggatatctcacagtaaaagccgccggggtgtgggcgggtggcattgaaacaccttcggtggaaaccccatcggaaggttcaaaattttttggttttgatatggataacgaattcatcagtggttttgatgtaggggcatggggagtattactctga

SEQ ID NO: 14469 - DNA, 390 bp, Escherichia coli
atgccatttgctcgttatttctgcattttcataaacgttggtttgggagaggcggcaaaaaggaatgtggggacagggacgaatcagatacctgatatgggtagttttatgctttctgcttcagttcctggatatcaaaaattgccatccggtttaattattcaatgggggccaattgatgttccgctgacgtctcaggacacagtaacctattttccgattgcatttccgaacagatgtctgcgggtatttgcgactcaggattacactcccggcagtgcaaatgttggctatatagcttgtgccggttataaccaggacccggtgaaatttatttccagagcaggcgtacccggtatcggtgcttcatttttcgcattagggtgttaa

SEQ ID NO: 14470 - DNA, 873 bp, Escherichia coli
atgaccagaattgttccaattatatcaacaaaaggcggagccggaaagtcaaccaaagccagcaatattgcgggtttttgtgctgatgcagggttaaaaaccctgttgatcgacggcgatcattcccagccgacagccagcagtctgtttaaacttgaatatgaagcaccaaacggcttgtttgagttgttaatgcaactgaccgatctttcccggccggataccatcatatcacgctccgttatccctaatctggatatcatcatttctaacgatccgcatgatcgtctccctgcggctatattgcatgcacctgacggcagaatgcgtctgcgtaatattctgcaacatccgttattcgcttcttacgatgttattatcattgattcaaaaggcgcggcttcggtgatgctggaaaccattttgttagctgccaccgattatgctgtcgggataatcaaacctattttgccggatacgcgtgaatttttacggggaacactgggattaatcggcgggctggtgccgctgacggcttacggaattcccctgccggcaatacgtattcttgctaattgtgttgaagatacggtgttagatcgtgcaacactgactgaattaactcagattattgaccaaaaagcgtacccctttgcggagtcgatttctctttcgttactgaaaaccgctgttcccaaactggaaatatttaaaaatggtcatgcacagggacaaccggtgcatcgtctggaataccggactcagcgtaaaacaccggcagccgcagtcattatgcatcatcttgtttcagagctgtttccggaatggaaaacccgttttgatgatgtgctgaaacgggaggtgcgtccatga

SEQ ID NO: 14471 - DNA, 432 bp, Escherichia coli
atgaatacaaactatcaactgccgtccgacattgattacattggcatttttgacaacaacaccgatacgggcgaagcccgttttgacttgtatgtcaaaaccttccggagtatgaccatgaaaatgactgaagaaagcaattcccgccagagtctgttccgcctgcaatggctgggtgactggctggctgaaatgtatggctggaaaatgctgaatcccgatatcactcccctgaatgctattcacagctatcttattcttcgcgataacctgccggcagctcaggtggcaggcatgacaacagaacagatacatctggcgctgactgaagagtggggcacattcaaagctcgtagaggggcaaaagactttttgcgcagagtcgaaaaacgcccggactctcttgacgatcctttccgggaaatacattaa

SEQ ID NO: 14472 - DNA, 1353 bp, Escherichia coli
atgcataaaaagtcttcttctgctgtattacctgaaactctgtactcaccggaggcggagcagagcgtgctgggcgggctgatgctggataatgaccgctgggatgaagtggcgccgttattacaggcggaggatttttgttccagagcgcatcaggaaatctggaagaaaatggccgccctgtgtcagataaacagcccgatagatttaatcaccctcagtgatgtactggaaaaagacggcgtgcttgagcgggtggggggctttgcttatctggcggaattatccaaaaacacccccagtgcggccaatattgtccgctatgcggagattgtcgtggatcgcagccgtgcccgtggtctgatgatgctcgggaatctgctggccacccagagtgtggcggctcaggcaaatataccggcgttatgtgagcaggctgaacagcggctgtttcagctgtcagaaaaagggctgctcgcttattccccgtcgttgctcgatattttaaataatgttgttcagcatctggaggaggcattaagtgcaaaagggataaccggtacgccaacggggttcagtgagctggatgaaaaaacctgtggtttgcaggcaggcgatttggtgttactgggcgcacggccgtcgatggggaaaacggcactggcgctgaccgttgcacagaatgccctgcgtctggcagaaaaaccggtcttttttttcagtctggaaatgccggcggaacaaatcatgcagcgcttacttagtgatttgggcaatgtctcactgacggctatccgcagtgcgtctctggaagaaaatgactgggagtgtcttggtggtgccatgtcacagattgccgaatggggggagcgtctggtgattgatgataccagtaatatgacaccttccctgttacgtgcccgggcacggcgttaccgccgtaaagtgggtacgccgggactgattattgtggattaccttcaactgatgcgcagtcctgaacaggaaaatcggacgcaggaaatcagtgaaatttcccgtagtctgaaagcactggcgaaagaactcgggtgtccggtggtggccctttcccagctaaaccggcaactggagcaacgtgcagataagcgcccgacaaacggggatttacgggattccggctcgctggaacaggatgcggatttgattttatttttgtaccgcgatgaggtgtatcacgaacactcaccggacaaaggtgtggcagaaattatcatcggtaagcaacgacagggaccgctggggacggtgaaagtgcagtttaacgggatgtatacccggttcagtgattttcctcagggatattatttttaa

SEQ ID NO: 14473 - DNA, 1650 bp, Escherichia coli
atgaaaacagatttacagcataaactcggtcaggcgcttctcagaggaaatcctgtcagttccccgttatccgataatgcccacgtcaatccggtgtctgaaatgccgatgatattaacacttgagcaacttcagccaaatccggataacccgcgtcagggcagaaacccgcgttatgaggaaatcaagagttccattcgggcacgcggactggatagtgtccctaaagtcaccaaagcaccggggagtgagttttatatcttcagtgacggcggaaatacgcgctatcagatcctctctgagttgtggcaggagacacaggatgagcgtttcttccgccttcatgtgttatttaaaccctggccggggcgtttgcagtgtttgattggccatctggcggagaatgaagtcagaggggagttaacgtttctggaaaaagcacaagggatttgtgtggcgcgttctctgtatgaggaaacgctggggaaaaaattatcactccgggcattcgctcagcgcatgacggcggacggattacctgtcagcatttcacacatcagtaagatggaagatactgtttctgttttattaccttatatgccccgtttactggaaaacgggctgggaagaccccaaattgagcaattattgtccgtgcgttcgacattaaaacgggtagcggattcgtttctttttcagtatgacgggccggatccagcctgtgattttctgggatgttttgaaaggacatgcacagaaatagataaccatgatgtttttgattatgacgtgtttctggatgaactgattggccggctactgagggagtgctctgttgccggtgtggattatgaacgttgggtatttgaattaaaggtcaataaaggcagacgcagcacaaagccggaattgcctgcgccggtggagagtgagggtgatacaacaaccgcgcattcagaaaccgtacctaccggtatgacctccggtttttcggcagaggatttgttaacggagcccctatcttctggttcaggtcaggaggcttcagtatctcctgtcgttgaaaagaaaaaatcccgtccggttgtggagatccagacggatttatacggcggggcacctgtgctgagcggggataccgacgaggcggatattgagcctgtcgatggcggaagtctgtttgtcacgaataacccggagcatgtcacaccggtggaggcgcccgtctccggtcatgcggtgacggcactgacgtgtcaggatctctggccggtggcatcacatctggatgatattgaacatcttcagacgcaaatttaccgtactttgtttgaattagggaatgagctggatttatcttctgcctttatggcggcttctggggtgcattctccgggatttattacgttgtcagcacattcggtgctggggcgtgtgatgacggttttctcagaacctgatgagtcccatgatgatattccggatgccctcagagccctgctgacggggggatatcagcccggtatgtcgccggtattgaatgatacccagtttatgacatggatgaaactgatgtacttgttgcgttgtttgtatgccaaacaaagagatgttgatccggatgtgaatgatgaagaggaatgggaataa

SEQ ID NO: 14474 - DNA, 591 bp, Escherichia coli
atggcgactcaattagcacaggcagggaatcatctgctgacagaactggtgatggaaataaaaagcggaaatctgcggcgttgtgaggcgctgggactgacggacaatgagatccggttactgaacagtttaaccattgaagatctgcattatctttctcaaagtccggtctccattattacctgccagatccaccgggagaatttacggttattactgacccgggcaaaagaagttcaccgtcaaaatcagatgattgaacgctgtctgagactgggggcatccatcgatttgctgaatcagtattttggcatgacgtcactggaggtgtcagcccgtcggcgtttgtccgggatccggggaaatgctggccgttcacagcggctgtcagatgtgcagcaaacggaattatggtatcgctggaaagaggagggcatgccggagccggatgatccggattgtcttcagatcatggtgtcctgtgccgaaaaaatgaatgtctctctgaccacggtatggaattcggttcaggaatggcaccgggacggcatactgaattcagctgacagggggaaatatcatgccggataa

SEQ ID NO: 14475 - DNA, 285 bp, Escherichia coli
atgccggataacaggaatatcagtcatcatcaatccgcccggatatttccggaatgtgtcacgcctgttccggagcatattcagcggaaggcaaacgggttattgctacgttatttttcgggagaacgactttgtaaaaaagtgaaatgcggtggaaaaaagggcggtgtttacccggtattgaaaattgatattggtgcattctggcgtctgctcagtatggaccaggggcaaagctggaagctgatgagccatgaacgttataacaagatgattagccggtaa

SEQ ID NO: 14476 - DNA, 1296 bp, Escherichia coli
atgcaatttcctccggacagtattattcagttttcattagaaaaaatgcggcagcaactgcatcaccggcaacacagccagcccggcacggcactgcgcagtggattgatttacgccggcaatgttcatgatgcaatcccccggcaattattgctggaatcccgactttccccggttgataaactgacctggatgatgatccgccttcatgctcagcaaaatgagggggccgtatttccgacctatgatgacttacaactccagttagccacaccccacagcgataaagcctcgcgggaaacggtcagcagggcactgttaatgctgaggctgacgggctggctcagtttatgccatcgggtcagggataaacgggggcgtatcagaggaaatatctatatgttacatgatgagccggtgaatgcatttgatgcagagacattagatccacgctggatggatgtactggaaaaaagttgttatcacaaaaataagagtgtgcggtgcgtggcccgcgctgcgctgactgccctgaaaaccgagccgtcaatgcgacatcagcataccagaatgcaactcattgagcagcggcttgaaagtcttcagacaccggaagcgctggcagacaggcaacgccggatactcaatgggcagacggcacaacttcatccgggtaaacataaaaaaaatcgagcccagtgtaaaacaccggattcgaaaatcgaactcagggaaaaaaatgatgaaaaaaaaccgggtacgaaaatcgaactgagtacacaaacccagtctgattcaggggtacgaaaatcgaactgttacgtacgtaatacttttacacagagtgtaaaaaatacgtacgtagatcagggagagcaatatttatcgggtactcaggtgcaggggctgcatcagtggattgatgagaatgatcggcagatgctggaaaaacagttacaggcgttgccggaagaagccgcaatatcgattgtgcagcaactgacacagggggtgaggacaggaagtgtacgtaatccggtggggtatgccttgcagctattaaaggcagcccgtgaagggcgatatcactccgtttccccagcagaaacggggatgaaaagtgcgtctttacagaaaatgtcaggtactccggatgtatcacagcacacgcaaaccaaaccggagagaacggagagaagtaaggcgtctcagggggggatggttgcccctgatattgcacgtcagtaccttcagcgttttcgccgtacgctcatagggatatccaatgagcaatga

SEQ ID NO: 14477 - DNA, 519 bp, Escherichia coli
atgagtgtgccacaaacaaaagctgagctgcttttagctattgataaaagttttagtaaattaattagttacctcaacgcaatcccgccagaaatgacttcagataactcaatggatggacacgccaaaggaacgaagataagtgttcatgaccttgtttcatatctgcttggatggaatgctcttgttgtaaagtggatcacttttgatgctaaaggtctgcctgtcgattttccggaaactggctataaatggaatcaacttagtcttcttgctcaaaaattttactcagattacagtgagttaagttatgaattgttagtagttgaacttcaggctgtaaaaaatgaagttgtgaaacttattgatgagcgtaccgatgatattttgtatggaagactatggtacacaaaatggacgatggggagaatgatctcatttaacacatcttcgccttacgccaacgctaatggaagattaagaaagtgggcaaaaaacaataagatcagtttaaagtaa

SEQ ID NO: 14478 - DNA, 705 bp, Escherichia coli
atggaacaaaataaacattctcaacagttacttcaggctggccctttaaagtcaacattaacactgaaactccataccagttatgcaatccggctatgggaagggcgggttgtacccaactctcagaatgacggtgacgaaaaaaagcgtaaatggatgatccccagtcttccgatgtttatttcccgggcgggtcatattactgatgatgcaaagaagggatacttatatgcagaaatgtggctgtatcagcttgagcaggcactggagcaagggactcggactattcagaaattactttcagaggttgaacaacaattagttcagttacctgcggttgcggttatttcggatatctcatcaacatctcctgttgacctggcgatattcagtaaatctcctgttggttataaatgtgtctggttactcgtcggggttgatcaacttgctttgcgtgtattgcagggagagcattatggttttatttcccgtcagcaacgtgacaaggtccttaaattagcgggctatcaggttcgtcatgtgacagggatggccgtaaactaccggaaatatgagctcacccgtcataaccttgatttaaacagtgaaacttatcaacaggcttcccgttatttaggtgaaattgatccggatatcatttcaggaagaaaacgtgcgtcatttttaccgtctttaaaaaaataa

SEQ ID NO: 14479 - DNA, 333 bp, Escherichia coli
atgaaaaaaagcggattgcttaccttatgcttttctttatggcttttgaccggatgctctgcacaggaaatcgcagaatggaatcagaaaatcagtgacctggggcatcaggtcagtcataccatgaatggtggtatgcagaaacgggaacaacgggagtatgacgtggttatccctgttgatattgatacagccgcagcccgtctgcgccgttattatggttttgaggatgtgaatgccaaaatccgtgctctgcgtcagtcaggtaaagaaagtgatcaatgggccgccacggctattgcagaagaagccggggctgggaatgggaagtga

SEQ ID NO: 14480 - DNA, 207 bp, Escherichia coli
gtgacgccgggaagttattataaaatgggggcagatatgggaaaacgtaacccgccggcacatatcgtcatcgaactggaaaaaaatggttcgggaacacacatgtatatcacttacagcgcttcgtacagtgataccctgactccggagtttgttcaggaaatatttaaaaccgcgaatgacgttgcagccggaaaaaggaggtag

SEQ ID NO: 14481 - DNA, 2055 bp, Escherichia coli
atgaaattatttctgtgcgaaaagccgtctcaggccaaagatattgcccgggtgatcggcgctcatcagcggcgggataatttttttcagggaaatggcgttcaggtcgcctgggcaagaggtcatctgctggagcaggctgaaccggaggcttatggcgcacagtttgcggccccctggcggcagagtgccttacccgttattcctgaacagtggaaaatggtggttaaaaaagacgcggtttcgttgtttcggaccataaaacagttgctcagtcaggcgacggaagtggtgattgccacggatgcggacagggaaggggaagtgattgcccgtgaattactggaggcctgtcattaccggaaaaaggtacaacgtttatggttgtctgcactggatgaggcgagtatcaggcaggcattaaataacctgttacccggcgagaaaacggcctctttatattcagcgggattagggcgggccagagcagactggcttatcggtatgaacatgacgcgtctgtttaccctcaaagcccgggaactggggtttggtgggatattgtcggtcggacgtgtccagacgccgacactggccctgattgtccggcgggaaagagaaattacgcactttgtttccaaacccttctggcgggtgaccgcctcgttgcagcatcaggggatcatttttcaggctcactggcgacctgcctcgcagtattgtgatgatgaacatcgttgtattcacgttcaggccgctcaggccgtagagcaactgtgcaggcaggcagggaaagcgacggtgtgtacagtgaatgaaacgaaaggaaaagccttgccgccgttgccgtttgatctcgggacacttcagcaggcggcctcaaggcgttgggggtattctgcggataaagtgcttgaaatcgcgcaaagtctgtatgaaaaacataaggccaccacgtatcccaggacggactgcgggtatctgccggtgtccatgcgtgccgacataccggttgttttagaggcattatcacaaagcgatccggccttacagaatgtgctggcacaattgcagccggcgcgaatttcccgggtctggaatgatgcaaaaattacggctcaccatgcgattataccgacccggcagacacctgatttgaacgccatgaatgaggctgaactgaatgtctataaacttatccgtgcccattatctggcgcagtttttgccggatcaggaatgggatgcaacagaggtgtttttagatataggcggacaacaatttgttgccaaagggaaagtcgaaagggtgaagggctggtctgtattatttgtgaaacatgaagacgatccgtcagtaaaagaagaggcagaaaccgggctggaagccggaacggaaacattgccgtcccttcacgaaggtgaattctgtgtggtacaggaggcaaaggttgtacaactggcgacctcaccaccgaaaccgtatacggatggtacattgattgcggccatgaagaatgcgtcctcctttattaccgatccgacattaaaaaaagtcctgaaagagaatgcggggctggggacagaggcaacccgggcagggatcatcaccacgctggaaaacaggaaattgattgtcaggcagaaaaaaacactccgggcgacagacaccggttgtcagctgattgatgccctgccggcagcctgtacagatccgggaatgacggcgttatgggaacaatcactcgagcaggttgcacagggaaatctgtctctggatgtgtttatgcaaaagcaaatcagctggttggcacatctcattaaaaaaggcggggaaatgccgctggcgctggatctgccaccgatgccatcctgcccgtcgtgtcagggaaagatggtcttacgggagagcagtaaaggccgtttctggagttgtcagcgttatccggattgtaaagggagtgtaccattaccggaaaaaatgcagggggttacccgggggatgaataaaagaaagaaggccgtgaagaagagcataacaggactctttacctga

SEQ ID NO: 14482 - DNA, 468 bp, Escherichia coli
atgaccagcaaaaataatacaacatctgaaaataaatactttaatctgcatgtgaacgggattgggtatttatcgaatatccgtcaggttaacggccctaaagggcagtttttaaccgcagtgattaatgcactcagtggaccggctgataaccctgtgtatgttcgttttgatacgaccgttgtcggggagaatacggtctcactggtcagacggtgtatcaaagcggtggatgaggacaaaaaagtcctgaccgggtttacattaagtaacctggcttccgatattttcaccctgacaaaaggtgagcatgccggagaacagcgggtcagcctgaaagccaggctgctgaatattgactggattaaaatcggtaaagaagtggtatataaagccgagaaacaccagtcaacaccaccagagactgaacagccggtatccagagagtatgtggctgattctttttag

SEQ ID NO: 14483 - DNA, 912 bp, Escherichia coli
gtgactaaaaatacacaacaaccggtacatgatgcgttattcaagcagtttttaacgcatcctgagaatgcccgtgattttttctcggtgcatttgccggccaacatcctgcctttgtgcgatttaagtacactgcgcctggagccggccagttttgtggagcgccgtttacgtcagctgcattcggatgtgctgtattccgtgcagatgacggaaggggaagggtatatctactgcctgatcgagcaccagtcaaaaccggatcggttaatgggttttcgtctgatgcattatgcgatgtcagcgatagcgcatcatctgaaaaaatcgccggcggataagaccctgccgttggtggtgccgtttctgttttatcagggcagtgtttgtccttatccgtacagcatgaactggctggacgggttcgccgatccggcgctggctcagcagctgtatacccggtcgtttccgttagtggatttgagtgtgctcagtgatgaggaaatcctgacacacaagggtattgccctgctggagctggttcagaaacatattcggacccgcgacggtttaatggcggtattgccgataatcgcgcagataattaactcgcaacacaatacggttgaccaggtgaggagtgtgatggaatatattgcctatcaggggtatattctggatgaatcccgctttttcagccaattgattgcactgtcaccggagtataaaacgatgctgacaacgattgcagaacaacttgagcaaaaaggtatcgaaaaaggtatcgaaaaaggtattggcctgggtgttgaaaaagtcgcccgctcattattacaacagggggttgatctgaacattattatgcaatgtaccggactgacccgggaaaagattgagtcattaaaacattaa

SEQ ID NO: 14484 - DNA, 219 bp, Escherichia coli
atgcgtatgaaaattctcccgatatgtcttgccctgacctcactgctgttggggggctgtgcagataaaccctcccggcctgccgaaccggtggctgatagataccgcgattctggtcaacaccggtcatgcccagccggtacttccggacctttatccatcagctggggctggtacagttactgccggtgggcggacgttatcaggggcgtacggtga

SEQ ID NO: 14485 - DNA, 333 bp, Escherichia coli
gtgtctgatgacagcgtcgctgacagccgcacagtctgtttccggggggcagattggcagattgaggcggggaaatcggctaagagtcagactcagtcattgcagtatgaggcgcaggaatggggactgagtgcggaggagtatgcccgttttgaagcgctgatgaaagggtggcgcggtattcagtctctcggcctggatcccctgacgacactgggcattgaggcccggtcagatgaggagcgctgtcggctggctgaaaagtgggtacagcaggaatttgcctgggcagaaaaagagctggcgtttcagcgggaagtggatgcagcctag

SEQ ID NO: 14486 - DNA, 273 bp, Escherichia coli
atgaagatggatgaacgatacagcagtgcatcttatggtagcgctggtcttgctgcgttctttgccagcctgtcattgcaggattggggcttcattatcggtgtcgcgttcagcattatcctcggtgtgcttacataccggctcaataaacgcgagcagatgaagcgcacgaagatattgcaggacatattggataaaactaataccaataatctttctgctacagcgatggttattggagagctggggaagagagcaccgaaggaaatatga

SEQ ID NO: 14487 - DNA, 1122 bp, Escherichia coli
atgcgcatcgccgggttagcttacccaggcaaaaaaataatagctatgttcaaaaccactaatattcatggcgcacaactcgtttgcgcagattctctgcaatttatcaaaaccatccctgataactcggtcaatttgattgcaacagacccaccatacttcggcgtaaaggctaacgcatgggataaccagtgggatagcgatgctgactttttggggtggattgacgaatttttggcagaattttggcggatattggcccctaatggcagcctgtatatgtttaccggctctcgccttgcgtcaaaaattgaattattaactcgcgaccgtttcaatgttctgaaccatatcatttgggctaaacccagtggtatgtggcgcggttgtcataaagaaagtttaagggcttattttcctgctactgaaagaatattatttgcagagcattacggcgcgtcaggttatgctaaaggtcagtcaggttatgcttcaaaatgtgcagatttaagaaaaaatattttttctccactaattgatgctttttcgctggctcgccgtcagttagatatatcagccgcagacattaattcagcgacaggaaagcagatgtgttcacactggttttcttattcgcagtggcggcttccatcattaattgattttaataaactatgcgaattatttcgcaggaaggcagattcactcggtgtcccgtgtccatatccttttaatgttgattattcagaacatgaaaagcgttatagcgatctgaaattgcattatgaggaagtaaagaagcagtatgatgatttgaaggctcagtatgaaaatttacgccgtccatttcatgttactgctgatgtaccttataccgatgtatgggagtttcctcctgtgcaatattatcctggcaagcacccatgtgaaaaacctgcagcgatgatggaacatattataaagagtagttcacgccccggagatatcgttgccgatttctttatgggatcaggctcaactattaaagctgcgctgaagttaggacgtcaggcaataggtattgagattgagggcgaacgttatcttcagacagttgatgaagtgaaaaagttatttgagtaa

SEQ ID NO: 14488 - DNA, 228 bp, Escherichia coli
atgaatattaatgaaattcgtggaaatatgactgaagcggccctgagtgtggaatgtgttatgcgtggatacccacgcatttccctgaaagagttaagcgaagcctgttttttgagtcaagctgccgttgaatttatcatcgaacagatgatctgttttggggttgcaaagcgtagcggatctggtcgatattctttgaccgatgaatataagcaggcaactttctaa

SEQ ID NO: 14489 - DNA, 222 bp, Escherichia coli
atgaattatcaaggtaacgaaaaaatgcgcgacgacgttgcggagatagctaacgaactgtatgagttgtggcagaaggttgaacgtttcgaaaaggaatatggtttcaacagtaccaacctaacagaccgactggctggtcgcttagttgggactatggggccaaaactggctgagttgaaccgctttatggctgatgttgatttccagtttcaagattga

SEQ ID NO: 14490 - DNA, 312 bp, Escherichia coli
atgtttaacgtgataacccaccctgcagcactggatgaactgcttgaactaccagatgatttgcgaggtcgcatgaccagattaattgagcgactggagaaagaaggcaacaaactgaagatgccccatagccgtgtaataggtggagggctttttgaactacgagtaggggataaaaacatcgcaagaacgctgtacgcctacgcgactggtaacgaaatttatctattgcatgcatttgtaaaaaagacacagaaaacaccggtgaaggctatcgaaatcgccagaactcgcctgaaggagatgaactga

SEQ ID NO: 14491 - DNA, 288 bp, Escherichia coli
atgaaagcgaaaggcatcccgtttaacgaagtaaaagaaaaactcctcaacactccagaagccgtcaaaggatatgaagaggccgacaaagagctggagatggtcgaaatgttatacgaaatgagggaaagagcaggtttaacgaaatcagctctggctgaacgaatggggttgcgaccgtcagccatcagccgcctggaaagcaatcctttaggggcaagtatgaaaactttggctaaatatgctcatgcctgcggcgcaaccatcgatattcgcgctgtttattaa

SEQ ID NO: 14492 - DNA, 204 bp, Escherichia coli
atgtctgaagcagccgtatcaactcttgaacaactcgattcaaatttaagagatattgacgccgttctggatctggttagcgtcaccctggcttctccagaagccagcctacatattggtgaggtttcacgactcatcaacatgtcgcgagagattgcccagcattgtcagcaaactatcgctgttgagcgttcacatcattga

SEQ ID NO: 14493 - DNA, 243 bp, Escherichia coli
atggataaaaaggcattgctttttgaaatgatacgaaaacggagcgaaaagagcttttctgatggtggtgatggttttgttttcgcttcgatgctttcttttgatgttgggttaaatagcagaattgttaaaaggatgcttgattctgctgtccgtactggacttcttgagaaagttgatcgtggcatagggagagagcataagtatcgggtcacacagcagtttacgcagttaattcattga

SEQ ID NO: 14494 - DNA, 327 bp, Escherichia coli
atggcgctgacaccggcagaacggcaaaggagacgcagggaacggttgaagaaggaaggcacatcaagacgggactggattctagaacctgacgagttacgtatgttgggggaaatttgtgtattgcgtagaccagggcgagttccatattcggagaacgaagtcattggtttgctgatcaggaaaaactataaggagctgcagaagcagctatctactacttgcccgcgatgtggtcaaaaaatgcctgtttcagaatgcatttttgatggcgaagggtcatgccaccttacaaccacgaggctgaaacttgcgctcaaagcgtga

SEQ ID NO: 14495 - DNA, 750 bp, Escherichia coli
atgaaattttctaaattttctgagttggtgaatcgtattttgttgaatcgtattttgtccaacaaccacagccatcgtcgcgatatggatgtaacaatcgttgttcattcgcctggcagcattggttcaacaccttcagttgaggttcagtcaattcacgctggttttgattgggattccgggaaagtgcttattttcccatcacagccactgaccacgctaacaccagaacagattactgatatcactgatagtgtgcgcaaaggtcagtcttggcacgcatatcaggaatataaaaatcataaagagcagttggaaaaattgtcgattgagttggaatcagccaaaaatcacatagcagaactggaagccaaacctgtaagccaaacttacaagttaacttttgagcaatggctggaacagcagcatgacaaaattgatgttgattgtggatgtgtaagtactgaaatgcttatgcactggataagggtcgcgtatgaggctggcaactatccggtaactccggatggttggataagctgtagtgagcgaatgcctgaaaagggccagaacgtgcttatttcggtgaatttcgatagctctctggttgaaccgctaatatgctccgcacgctataccggaagcacctttcggcgcggagatgcaacgattaagccgggtaatggtattgagcaagcaactcactggatgccactaccagaaccgccgcaggagtcgaagagtgaataa

SEQ ID NO: 14496 - DNA, 291 bp, Escherichia coli
gtgaatatcgacaccacgataacgatcgatacggccctaaataccggtctggcacttctcggttggttttacatcatgttcagtgcggggaagtgggcggcctctgtttttctaaagcagtggggaaagcgccgcaaacaggaaaaacgccagaaagcgttggaggcgttctatgacgcatttgaacttagccgcattgagccaggcacaacagccaagatagcgacaaaaggcgacctgatgatagtgatgttccgacaggagagagcagagaaaggtgaatcagcatga

SEQ ID NO: 14497 - DNA, 420 bp, Escherichia coli
atggcaaaggcttttacaccagaacagagggaagaactgaataaacaaattgtggaactcgtgcgcctgaatggacgaggaacggttaggcaacttgcggatgaaactggtattagccggtgtgctgttagtcgtttatcaagagagcttgctgccagtggtgatttgtatatctctggctccgggatatttctgtctgcacaagcacgcaaggactggcaaaacgcccgtaaaaaactatcaagagtaaagccgaagaaatcggtagtggttgatccagaccttatctggtcattacctgacggagaaatacgtcgttacgacaggcgcttgaacatgatttgtcacgattgtcggaagagcgaagttatgcagcgtgtgttggcgttttatcagggaaattttcaggaggtggcgtag

SEQ ID NO: 14498 - DNA, 291 bp, Escherichia coli
gtgactaatcagattatttacgacaggaaacggtctgatgtaatgattgaccttgaaacaatgggtactaacacatgtgctccaattgtttctatcggggcagtgtttttttctccagaaagtgaggaattaggtcctactttttatgtgccagtgaatctcagaagctcgatgttgaatggtggtatcgccgatggtgataccattttatggtggttgaaacagagcaaggaagccagagccgctatttgtactaatgatgcccttgatattaaggatgcacttttttaa

SEQ ID NO: 14499 - DNA, 711 bp, Escherichia coli
gtggagcttgagtatatacgcagctgcgtctctacggcattggctgatgttcattatcgccagcgtggcattctggaggtccagcttgagcagatgcgtctcggtagatcaggacggtttaacaataaaccagtccggtcaatcagtgtgggggatgataactcatacgaagtgtccgttcctgctgagccggttagattccaccaggggaaaacatttaaacaatcatcaatgttgctcactgatattgattttcagagcgccagctggcgcagggctattggtcagttgaataacgaggaatcagcctggctttattattgctacggatgcaagcctgattacaacaatgatgtgattgtttgtcagtggttatggcttgattttctggttgctcattcggggggcggctttaaaaaaatgaaggcctccacgaaaaaagccatgcggaaattgatttattacgcggcacaacaggttaaatcagaacttacgtgtgctgaggcagttgatgagagagaacaggacaggcatctgagttttctactgaatatatctattgatagctggagacaagattataaagaacgctggcttttaattaagtcgcgatgtctgagcttaaatcgaactgcattattaaatgcggcggagaagcgcagtgaaatcatcaaacgccatcgggcaggaagtgccattctgtctttgtaa

SEQ ID NO: 14500 - DNA, 597 bp, Escherichia coli
atgaaaacacgaggcgaacgactgaaagcacgccgtttagagatgaagctgacgttgcgagaagttgctgaggctgtcgatatctctatagcaggcgtccaaaacttagaacgtggcgacgtaatgccgtcactggagataggtattgccctggctaagtgcttacgcaagccagtgcattgggtgctatatgggacagaatatgaccctgatcgcattcctgttattggcacaactgaaagtgggccggatgaagagtggaagccgggacaggttccaaatactgagcgattcctgccattcatcagccagcgcaatactgtgtatgcgttaactatcagcaatcttacgcagggaaactatcagccaggcgattttctcctggtcgattctgcgctggaactggtccccggcgaggatgttctggttcgtgatactgcaggaaatatcactatccagcgcctggcccgttttgatgatgaaaattactatctggatggaacaaactcacaacgcgccatcttcaggaaaagcgatcttgaatttgttcaccaaatagtcggaacgatcaaatcattcatggttgagggtagatga

SEQ ID NO: 14501 - DNA, 3996 bp, Escherichia coli
atgacattaaacgatttctatgcggatcgctttggcagcgatccgttctcgctaattgaagcagcacgggatgaactaaccgagctggcacagatggctggtatcaactggcctgcctgttccgacaacatccaactcaaccctcgcgggggggttgagcgttactcttcatacaataaaacatctccagaagctctcgaaaagagcctgaaaggacgcgtagaaatttactccaggctggaacacagcaaagggattgattacccgttcattaacttcgtccataaaggcagcgatgctggctcatggagcggtttctccttcctgttttctgaatatcgccgtgagcaacaacggaataatgcgaccgtggtcgcacaaccggaagaagaacgggaaagaatagaacgtcaggccgaagcacgtcgtcgccgtgaagaacaaaaacgaattaatgacctgaaaaacaaccaaatggaccatgaacgtttgctgggatggctggcattccacagcgcgtgggaacatgctccggctgaagacggctcatggccatatgcgattaaaaaaggtattcgtgacgtttttagttcatgtgatgtgcgtcgcgtgaccagtcacgacagtgcgaaatggagccgggggccaaccacatatatggctatccctctggctcacctggacagtcgttatgatggtcgtattgtgggttggcagcgaatcgacaaacaaggtgggaaataccagaccagcgcagtaaccagcggcgatttcgtcggtgcctgctttgttatcggtgagctgaaaggggcgcaaaacatcgctgttacagaaggttttgctactggtgcatccatctggcttgccacgaaaaaagataaacgctttgacgctgtggttgtcgctgtatccgctaacaacatggttcatgttgtggaacaactggtaaacatgtacccggcggcaaaaatcacctgcgcactggataatgaccggaaatctgccacagaaggaaaagggaataccggcctgcggactggctatgaaatcttatcgaaattcaacgatgtccgctgcgtctatccaacttttgaagacgatccgcaaatggagtgcagtgacttcaacgacctgcacaaactacgtggacttcgtgaaacagcacgtcaactatttgcaacagcaaaccgcctgaaaaccggtactgatttgctatctctgacgctcaaccgcctgaagacaattaagcgggataaccgtcgtacttttgccaaagagctgctgagagcggtggatattggcatgctaacctgtccggttcctaacagtccgtcagatttatttaacatgttctgcatcgttctgcgtgaaatgggactggaaaatatctatcgtgctacggtaaaagaccacattgcccgtcgcctgaataaaaagtgccgtattgcccaggctccgcgctctttcagcgaacgcataactgatcccaataaacgacctcaacatatcacctataagcgttttgaaacttcggtaatgaccgatgatgtcctgaagtacgtgcaatcactacaggggatagtcatcgtccgtgctggtatgggttccggcaaatctactggattgttacgaccgttaatgcatagctcagaacgtggtatctctgttgctcaccgtgtctcccttattggtggcctgtgggaaatgatgacagaaggaaaaggtgtaaaagccgatatcctgcactatcaggatcctggctatcaggaaatggctccatacgccagtaaactgaccatctgcataaactcgattgttaaaaactgctggcaaccgttgatgcgccagcacgactattttggctttgacgaggccacacaagggctacgtgccgttctttccggtcgggctatggaaaacccggtggctgtattcaatacgctaattgacgcgctggccagaacggaacaacacccaatcatggtggatgctgatgcgaacgatctgctggttgacctggctgaactggctatgaaacgccgtgaagaactaggtttaccggcatggctgcagatccacgtaattgaattacctgttgatgttcgcaaccgcgaaacaggtgagccaatccgggttttttatacagaaaaagatcgcatcatgaccgaggtggtgaaagctgtatcggatggcgaaaaaatcatgttggccaccgacagctccacctttgcagaagatgtgacagccaccctgagaatgcattttcctggtaagaaatttctgtgtgtaaaccagaaaaacaaaccagagccagaagttgaagcatttaccaatcaaccgaaaaagatggtcaaaaaatacgacggcctgatttatagcccgtctatttcatccggcgtgtcgattgagcaaaaacattttgaccgtcatttcggcatgttctgtggtgaagttgtacccagcgacgcagtgcaaatgctacgccgcgaccgtacagcaaaagaatttattatcggctttgataaagctcgtgcaaaacgtgaaactgacccgcaaaaaatagaacgagcattcgcccaggcattgcttgctactgcaggtatgaacggtgaactgacggatgtcgttttcgatggcgaccgtatatcaatgggggtggccaataccgactttaccaggatgaaaattaaagcagccgcaattgaagcgtctgcacgtaacgactacgccagcaacatgatctgcatcatgcacagcgacggttataagatatcgccgctggccaccgattatgctgcaaatgatatcggtaaagatctgcgtaaagaagcgcgggatattgtgtgggaacagacactggatctgcatctcaatacagaaactccacaagaatcagagcgtgaagaactgctaaaaaaacgcgcgctaacgcttgaagaacaggcaaaacttgtccgctgggatattgagaacgaactgaaactaccggttgaagaaggcacgctgaaattctatttcgatggtgctcgagacaaagttcgccgctatgaaacaatgcttttagatgaggtaacagctcgtcgttacgaccgggaagaagcagccatcaattttacctacgcataccgtcaggcgggacagtggcaatattttgtagtgaccgcaatgactcgcgagcaggctgatgatgtctttaaaactaaattccctggaataatcgactacaaggtaaaagctactcctactgttgaagtcggggcgcgcggtttctatgcgcttaaatcagcaactctccggcagtactttatcgactgcggtatcaaccctgagactatgaccggcgaggcgactcaggagcgtctcaaatttgctcgagataacctcatgacagccgaacgccgtgacctgttgaataacgttctgcacattggtggttttatgacgccaaaagggaagcctaaagtgccggaagcgttgtttaaaaacatttgcgactctcttggccttaaaacaggtaaacgtcgcggcagagacggcgataagcgtccaaccttgcgttttgttgagcctgaatcagcggcatttatgctggatattcttgctcagcgtcagaaagatggcctaaccctgaaaacgcgtaaagccgagaagactgccatcgaaatggatcgcgatttggatctcaatatatatatggatgataaaacgcgatccacaaacgagcaggttcaaaacgcccctcattcagtaatttctgaggctttggccgtgttgccagtggctgtacctgagtcctgggcgatgagtgcgctttccagtgaggagttggccactatgtcatcatggtcatcagccagcatagctatgacgtttgcatccctgtacctcacagagttcatggatcacctttccagcaatgagctgcggcggttacgtgaatacattacggggaatagctcatgcagctacgaagagcagggcgctttctatgggtaa

SEQ ID NO: 14502 - DNA, 327 bp, Escherichia coli
atgtctactactgcatttttggacaaacttgattaccgtcagctgcagttctgccgggatgaatgcgaacgacgcattagggctatccaggaggaagaaaaaaaggtcgcctgggctgtaacagatcgtggccttatctttggctggttccgtacggaggattatctgaaagcagtggaattattggcgcgtaaggctgctgagcgttgggaactagccgacaaggaaaacccggagacgaagtatgaactgaatctctacatcgagggcaaccgtctaccattgtcagagtataacgctttgtttgctgatggtgagtggggttaa

SEQ ID NO: 14503 - DNA, 396 bp, Escherichia coli
atggctgttcaatcatacaaatacgaatcccctttggataagggatacattcgtatcaagttaagtcgttctcagcataaggctatttttaaggtaaggaaaattcgcatattggatgcgtatgcgtattactacaacggtgaaaatgttgttgttgaacactttcttgcacgatggtttgtagctctgatttttgtccctctcctgttaattggtacttttgtggatggttttcctagtacatggcgggagataaagaaaggcctattcccgcataagtacggcagattttcgcaagatagctggcgagttatacctggtaaacattctgtagatgagcaaccgattgttgattcctggttgaatcgtatggctgatgctaaaaaagttgattga

SEQ ID NO: 14504 - DNA, 288 bp, Escherichia coli
gtgaagagttttatttttgttttatgttttgccttttctgctgcagtttatgcccaggaagatagcatttctgttattaactcatcagcggagcttgcatgtaaaaataatcccgatgctgcatcaaaagagtcatgcaaagagctgctcctttcgacggctgcttttgcttctgaaaatgcaaaattttattcagccttttgtcgcggctatgttaaggacgaagataaagaaaaatgtgatgatgccggtaagttagttaggtatttccaatctcttaatcagtaa

SEQ ID NO: 14505 - DNA, 165 bp, Escherichia coli
atgttcaaattcaaatttgcggcaatcgttcgcacagacaaaaagtcacacatccatcatctttccaccatcgcgtcatctgaacgggaagctcgtcgccagttcgccagccggtttgtcctggtattgtctgcccgtattccggtgcgcgaggtggctgcatga

SEQ ID NO: 14506 - DNA, 234 bp, Escherichia coli
atgaatcaggtaaaaatgaacactgttggcctgctggaatcgttggatgaacgtctgtctcaggtctatgcgctcgtatcatcagcccatcggacaatctccagttgtgaggcgtcgatttatctctcagaagcagggaaactccttcaaattgcgtgtgagctaacacacgaagcacagggttattcagcatcgctctcgtcgcaattgctgcacgataaggaggctgaatga

SEQ ID NO: 14507 - DNA, 165 bp, Escherichia coli
atgagcgcgttagcagtattttcctttcaggaagagcatcaggttcgtgtagtgatgattaacggcgaaccgtggtttgttgcatctgatgtgtgtatggcggcgggtattgattctacggccatcagaaagttggatgaggacgaaaaggggcaggcgaggtag

SEQ ID NO: 14508 - DNA, 1914 bp, Escherichia coli
atgagcaaagtaaaaatcggtgaattaataaactcacttgttagcgatgttgagtcaatagataactctgaccgtcctcaaggggaaaaaacaaaaaaaataaaagctgttgcattaaaatttaaaaatgcattatttaatgacaagcgaaagtttagggggaaaggattagaaaaaagaattacagccaacacattcaatgcctatatgagcagggccagaaaacggtttgatgataaacttcatcatagctttgaaaaaaatatacaccgcctatctgaaaagtatcctttatataatgaggagctattatcatggctttctctacctgctgccgatattcgccagagaatgtcagctttacaggcaaaattaaaattaattctccctttatcagaagatttatctaatatcagaattggtgataacaaaagtcataataagttattaaaaatatcaaataaatataaagagtggcaattcgccatttctgatttaactagcgataactggaaagataagcgcgattatttatataaattactacagcaaggatctgccttacttgaggagttgaatcagctaaaagttaaccatgagattctctatcatcttcaactaagccctgccgaacgcgcatctatccagcaacgatgggcagacgttctgcacaataagaaacgtaacgtggtggtcattgattaccctaaatatatgcaagctatttacgatattataaatagccctgctacattaaataatctaaacactcgttcaggtatggctcctttggcatttgcacttgctgcattgtcaggaagacgaatgattgagattatgtatcaaggtacatttactgtttctggtaagtataccgttgattttttaggccaagcaaaaaaaagaacttctgatgatataaccagaaaaatatatacattatgcgaagcaaaaacatttgtttatttaataaatgtacttcgctcatgcccagcagcatctgattttgatgatgtcgttaaaggttatggagataacgacacacgctctgaaaacggacggattaatgccatattagcaaaggcttttaacccgtgggttaaatcatttttcaaagatgaccgccgtgtttataaagatagtcgtgctatttatgcccgtattgcgtatgaaatgtttttccgcgtagatcctcgttggaaaaacgtagatgaggatgttttctttatggaaattttaggccatgacgatgaaaacactcaattacactataagcaattcaagctggccaacttctcaaagacatggaggccaaatactggaaacgaaaataccaggctggaagcattgcagcagcttgatgacgaaatgccaggattcgccagaggagatgccggagttcgtctgcataacacagttaagcagctggtagagcaggacccctctataaaaatcacgaacagcactctaagagcattcaaatttagccctacaatgattagtcgatacctggagtttgctgctgatgctctggggcaatttgttggcgaaaatggacaatggcagctgaaaatagattctccagaaatcgttatgcctgacgaagaagagctggaagcaatacctgaacagacggatgaattatcagaggatgacgatctggatgacgacgaaattgagatagaggaagaggaagaggaagaggaagaggaagaggaagagagcgtagaagaacagcaaccgcccgcgccttcttcacctgtatctaagccggtatttaagcctgtgagaaatattggtgatggctcatacgttgttgagtttcattataatggccagaattatgcttggtccggcagtgcaaacagccctatatcagcaatgcagttagcatggctgacatatttcggataa

SEQ ID NO: 14509 - DNA, 1914 bp, Escherichia coli; identical to SEQ ID NO: 14508

SEQ ID NO: 14510 - DNA, 234 bp, Escherichia coli; identical to SEQ ID NO: 14506

SEQ ID NO: 14511 - DNA, 396 bp, Escherichia coli; identical to SEQ ID NO: 14503

SEQ ID NO: 14512 - DNA, 327 bp, Escherichia coli; identical to SEQ ID NO: 14502

SEQ ID NO: 14513 - DNA, 597 bp, Escherichia coli; identical to SEQ ID NO: 14500

SEQ ID NO: 14514 - DNA, 711 bp, Escherichia coli; identical to SEQ ID NO: 14499

SEQ ID NO: 14515 - DNA, 291 bp, Escherichia coli; identical to SEQ ID NO: 14498

SEQ ID NO: 14516 - DNA, 420 bp, Escherichia coli; identical to SEQ ID NO: 14497

SEQ ID NO: 14517 - DNA, 291 bp, Escherichia coli; identical to SEQ ID NO: 14496

SEQ ID NO: 14518 - DNA, 750 bp, Escherichia coli; identical to SEQ ID NO: 14495

SEQ ID NO: 14519 - DNA, 222 bp, Escherichia coli
gtgaataaagcagagttatttcagaaaatatcggctctcgcgactgaatgccacgctatagcatctgagcttgatgttggtgatgaacgaaccgagatgttcgaaatatacagtgtgctgcgcaatctctgtcggcgtggctacgccactcaagtagggcgaatgactaacccactactctcatcctgtgatgaggatgactcagatgaggatgacgaatga

SEQ ID NO: 14520 - DNA, 531 bp, Escherichia coli
atgatgcataaatcagtagccggtgagtttcagaaggaagtcgataatactaccgttctattggacgatattttaagcattctcgcgctgcttgaggctggcgattggtcagaacattgcactaaaacagagctaggcggtcggcttgaaagagagattacacgacttattggtgatgcgcaggaagccactgtcactggctatgagttaatcgctgaagcctggcgtttgatggatggacaagaccctaaaaccagcgattggcatagcaaggcttcgaagtatttaaattccaatattgtagaaaaagttgatgatgaccgtattgaggccgttaaggctgtgttgcgtagactggctggcaactctccggtaactccggatggtcatattcagttttctgtttcacttcctgcagcgtttggtggagataaatattttattgatggtgtatttcaacctttgagatatgagcgtgactgtgaaagggcggttgtggccgctggcggtgtagttaattgggttaagtaa

SEQ ID NO: 14521 - DNA, 327 bp, Escherichia coli; identical to SEQ ID NO: 14494

SEQ ID NO: 14522 - DNA, 243 bp, Escherichia coli; identical to SEQ ID NO: 14493

SEQ ID NO: 14523 - DNA, 204 bp, Escherichia coli; identical to SEQ ID NO: 14492

SEQ ID NO: 14524 - DNA, 288 bp, Escherichia coli; identical to SEQ ID NO: 14491

SEQ ID NO: 14525 - DNA, 312 bp, Escherichia coli; identical to SEQ ID NO: 14490

SEQ ID NO: 14526 - DNA, 222 bp, Escherichia coli; identical to SEQ ID NO: 14489

SEQ ID NO: 14527 - DNA, 228 bp, Escherichia coli; identical to SEQ ID NO: 14488

SEQ ID NO: 14528 - DNA, 1122 bp, Escherichia coli; identical to SEQ ID NO: 14487

SEQ ID NO: 14529 - DNA, 273 bp, Escherichia coli; identical to SEQ ID NO: 14486

SEQ ID NO: 14530 - DNA, 498 bp, Escherichia coli
atgcagtcatcattacgcaaagctgtcacagctgctattggtggcggggctattgccatagcgtctatgctcatcactggcccaagtggtaacgatggtctggaaggtgtcagttacataccatacaaagatattgttggcgtatggactgtatgttacggacacactggaaaagacatcatgctaggtaaaacgtataccgaagcagaatgcaaagctctcctgaataaagaccttgccactgtcgccagacaaattaacccgtacatcaaagtcgatataccggaaacaacgcgcggcgctctttactcgttcgtttacaacgtgggtgctggtaatttcagaacatcgacgcttcttcgcaaaataaaccagggcgatatcaaaggcgcatgtgatcagctacgtcgctggatatctgctggcggtaagcaatggaaaggcctgatgactcgtcgtgagattgagcgtgaagtctgtttgtggggtcaacaatga

SEQ ID NO: 14531 - DNA, 312 bp, Escherichia coli
atgaaaatttatattgccgggccaatgacgggatatgagaactttaatcgtgacgcctttaataaaggggcagatcgtttgtcacgacatggtcactctgtcttgaatccagccactttgcctaatggtctgacacaacgtgaatacatggatatttgctttgcaatgcttcgttgtgctgatgctattttgatgcttcctggctggaaagcgtctgctggagcaactgctgagtatcattacgcatacaagatggagatgccggtattcactacgctgaattacccgccagcttgttcctctgtagcataa

SEQ ID NO: 14532 - DNA, 861 bp, Escherichia coli
atgaaagagttgcaaaaaattaattcaataatggaaaggttaagtgctcttgagcgtaagctggacgattgtggaaagctgtgtgttgaaaagcaaaatgagctttaccgggaattttttacaatcgtaagtgagctgatgccaattgttaataactgcctgatgacatccagattttttaatgtcgatgctactacatccagaaaattttctgtgaaaattcaagaaagagtttctggtagtgtgacaagagagatggctgaacagttggtggcaatgagcaataaaacaaaaagaaaaaaggcattgcttgtaacagcaaatcagctttcagggcgcgttgactttcaggtcagacagggtgggcgtgtactggtaaatgatgcgttcgttggacgtagctttagtccttactcggtggaatatgatgttgatgcagatgatcaggatatcagcatttcctggaaatctgagacagcagggattgtattaacagcagagttgttgagtgatgataaaaatgatgtccagcatcatttggacgaaaagaatcatatttctgaaatttgtatgaagccatgcagcggaatgactttattgtcacgcactcttgctgctggcttttctgcaccggaaaaacgtgtgcttctggtagtgcctgaagatgcagatattcgaccactgaatggctgtgatgttattagtgcaaaaacattgcatacccgcgtcattcctgtaccggatgtggtcattattgatgatgttgagaaatgcaagtctgtttcctcaactgccacaatcaagcgaattttacgttgtagcacgtcggctgttgtattccggaagcagttacataactaa

SEQ ID NO: 14533 - DNA, 450 bp, Escherichia coli
atgcaagaagaagcaaataaaattcttgttgatttattgaagaaggccagcgatggaattgattccgccattgcattcagtcaggcacagattccggatgttgttcatcagttgctggtatggaatatggttgatagcctgattaaaacattaatagcaatttcaacaattccgctggttatttggtttatgaagaaacagtaccaaaaagttgaaattggtaagttcgataatgaaggatggtcatgggaagaagggaagcctaaatacaaaccgactatgatttgggaaagtaacggtgagattagttttcttatcttaccattagcagcagtttttgttctgtgggtaagttttattattgctgtagtaaccaatatgacatggttaaaaatctggttggcacctaagttatatctaatcgaatacgcagcatcactaattaaatag

SEQ ID NO: 14534 - DNA, 1602 bp, Escherichia coli
atgaaaacgtccaccattcccacccttctggggccggacggcatgacatcactgcgtgaatatgccggttatcacggcggtggcagcggatttggtgggcagttgcgggcgtggaatccaccgagtgaaagtgtggatgcagccctgctgcccaactttacccgtggcaatgcccgcgcggacgatctggtacgcaataacggctatgctgctaacgccatccagctgcatcaggatcatatcgtcgggtcttttttccggctcagtcatcgcccaagctggcgctatctgggcatcggggaggaagaagcccgtgccttttcccgcgaggttgaagcggcatggaaagaatttgccgaggatgactgctgctgcattgacgttgagcgaaaacgcacgtttaccatgatgattcgggaaggtgtggccatgcatgcctttaacggtgaactgttcgttcaggccacctgggataccagcccgtcgcgactgttccggacacagttccggatggtcagtccgaagcgtatcagcaacccgaacaataccggcgacagccggaactgccgtgccggtgtgcagattaatgacagcggtgcggcgctgggatattacgtcagcgaggacgggtatcctggctggatgccgcagaaatggacatggataccccgtgagttacccggcgggcgcgcctcgttcattcacgtttttgaacccgtggaggacgggcagacccgcggtgcaaatgtgttttacagcgtgatggagcagatgaagatgctcgacacgctgcagaacacgcagctgcagagcgccattgtgaaggcaatgtatgccgccaccattgagagtgagctggatacgcagtcagcgatggattttattctgggcgcgaacagtaaggagcagcgggacaagctgaccggctggattggtgaaattgccgcgtattactccgcagcaccggtccggctgggaggcgcaaaagtgccgcacctgatgccgggtgactcactgaacctgcagacggctcaggacacggataacggctactccgtgtttgagcagtcactgctgcggtatatcgctgccgggctgggtgtctcgtatgagcagctttcccggaattacgcccagatgagctactccacggcacgggccagcgcgaacgagtcgtgggcgcactttatggggcggcgaaaattcgtcgcatcccgtcaggcgagccagatgtttctgtgctggctggaagaggccatcgttcgccgcgtggtgacgttaccttcaaaagcgcgcttcagttttcaggaagcccgcagtgcctgggggaactgcgactggataggctccggtcgtatggccatcgatggtctgaaagaagtacaggaagcagtgatgctgatagacgccggactgagtacctacgagaaagagtgcgcaaaacgcggcgacgactatcaggaaatttttgcccagcaggtccgtgaaacgatggagcgccgcgcggctggtcttaaaccgcccgcctgggcggctgcagcatttgaatccgggctgcgacaatcaacagaggaggagaagagtgacagcagagctgcgtaa

SEQ ID NO: 14535 - DNA, 492 bp, Escherichia coli
atgcttgtcgctgcaccgactgcacaaattgcgttgataaactccggcagtttacgtgctgatataaatgcaggcacgattacctttggtgacattaccagtacattccccttcaagaatgaacttactgaaatggatctcagcggtaaggatctgcgtaacctactggagcacggggcatcgcttaccaatggcatcctgcaaatgtcaaaaggcgcagaaatgcgctataccctgcagaaaccagtaggtcagcgcattgtatcttttaaaattaatggtgaagagatcgttgatacgaatatttaccatgttgcgactacgactttccttgcacttgggggcgatggttttctggcattcaaagaagggaaaaatgtccaggtccgcgccggaaataacatgtccaatgtcgtaatcgattattttaagaaaggccacaagattactcctgcacaggtaaatgaaatgcgggtagaagtaagcaaataa

SEQ ID NO: 14536 - DNA, 1071 bp, Escherichia coli
atgaaagataatcacagttctgatgaacatcagcagaaagtggatgtatgggagcaaatgctgagtaattacttttacaataaagtattacggccggatacggagaaaacataccgtaagatggtacgtctttttctgcgttattgcggagtttgtgaaaatgcgttaccgctaccggatgaagtgacacatgagcatgtgctgagatggcgaagaaatgagctgaatattcagaaagtccgggaacggacatggaacacaaaaaccaggcatatgcagtctctgtataattattggatcaaaaaagggattgtttcacttaaagaaaacccgttctcagaaacacaaattgaaccgggtgaaaaacagaaaaaagtctatacacaatcacaactgagaacgatttatcgtattctggaacaatttcagcaacaggaaaatatgctgccacctgatcaggctcactttcaggcatgtgcggtttatcccactcgattctggtttgctgtgctggaaacgctgaggctgacggctattcgttttaaccagctgattaacctgcatattggcgatctggattttgaggagtgtacgatcacattgcgcagtgaaagcagtaaaaatcaccgggaatatcagattgcttttgttcagccactacgttgtttactggcgcccttggttgaggaaatgcgttgtcacggggcggataaaaacgatattttgtttgatgttcatcgtctttatcataaacgactatcccgctctgaaactccactcagtcagacgatacgttcttttttccgtcgtttatcaaaggaatgtggatttcatgtcagtccccatcgtttcagacatacactggcgacgacattaatgaaacatcctgaacgtaatatgcaattgacgaaacagatgttaggacaccgtagtctctcttcaactatggaatatattgctctggatgcatacagtacagtcaggatcttggagaatgagttaggtgagtttttaacaatgggattaggtggtgaacttacaaggctagcatcaaaaagacagaggatgtga

SEQ ID NO: 14537 - DNA, 1593 bp, Escherichia coli
atgttaccgtggtttcgtaaatcgctttcccggaaagcggaagagaaaacattgcgtgtttccccgggaaacacgcaggaaaggccattatttatccgtgacagtgacggcttttatttaccgcaggcagctgacgtattgctgaccacaccgcagcggcaaaactggttacagcaaatcagtcgggtggtagcgttaccggataaccagtaccgggcactttgcctgtctcctttgcagacgctggcagaacgacttcagtgtgtgccggcatcaaaaacagggaaatatgccggcgaagggggattgctggatttaacgctgaatacgacagcctggtgtatgcggatgtcccagaaagagatgctgccccgcgggcttccgtcggaagagcagagccgtcagttcagcgcctggaatgtgtgtgttttttataccggactgttttactggttaccgttaacggcacagtttgagggacaactgaacagcctgtcggcgtggcagccggggatgagtgcgcccaccgtaccgtatcgttttcgctttcatgagccggtgccggatatgacgcattttcgccggacgacgggggccatgatggctttccggctattaccggagaaggtaatccactggttgtcgggtacaccaaaggcgcttcaggcgttgtctgacgtggtgaccgagcaggtaaacggtgataatgatttacagcgtgtgctgaatgaggctctggctgcgttccccgccggtgcattgccggcattttcttccgttgtttctatgtcagcgcctgatgcttcgtcttcagtgctatcagggcagccggagaatgatatcgcgtcattggcgcctgctgaattggcgcaaaagccacaacctgaaactccgtctgtaacatctgtattgcctccggagtctgttacttcagaaaaaacagagaacggaattcactgcgatataccgctaatggtagttgcagaagcagaaggtgcggttgtccatggggcacttgattctgctgatgaaaaaactgtctcagatatgtctcctccgttatctgaggatatgaaatatgcacttgaattatcaggtttaatgccggaaatcttatctgatactcagacgggcaatcgtgatgagaaggatgaacagcgcgaaaactgtctgagtataaaaaatgaaggagaggctttctgggcgtggtttaagtccggattattgggcggaaaactggcaataaatacgccggatgcgaaggttcactgtgtcatggagtatttgttttgccagagtccggctgttttttatcagtacatacaggaggcgggtaaaaatccggatgatatcggccatattatttcttcttttgaatcccttaaattgcaccggattattcgtcatgatacccgacaaacagggcatttcagggctcgaatttatggtgaaaaactgaatccgctgagtgataacaaaacattaattacgttatcccataaaaaaatcaatggttacatgattaaaggacgtcagatttttggcatgaatatgccggaggaatcattgtttattcgtattgtcggaagttaa

SEQ ID NO: 14538 - DNA, 327 bp, Escherichia coli
atgagatgtgaatttgggcagggtgtgagggagtgggctcaggatttttggaatgaaattctgtttcctttttttgtcacagccggacttttgttgccactgattctggttgtgggcgttttcctggtctgggatgaacagcgccaggctgagcgggggcgttattacctgacggaatgtcagttggtggaaagaaacagaaatgcgggcttctggtcaggtcgggaaaatattctgcaatgcggaatgacccgggagcatgtgaatgcggacgcgtatgaaaaggccatccgtgcctggcagcagaaacagacagagacagaataa

SEQ ID NO: 14539 - DNA, 1002 bp, Escherichia coli
atgccaaactggtgctcgaaccgacttgacatcaccttacacaacgcggcggatatgccggctcttaaacactggatatatgcggatgatgggatacccgcctggcagacggcgatagcacaaagtctgcatttgttgctggccggctgcgcggggatactgaaaccggtcagaccgctgtcttttccgccgttaccggaactgacttcatacggtgcaaccgggcctgtttccccgggaaacacggctttcacgcactgggttgacctgctgatgactgcaccggatttgacaccgtcatgttgtcagcaaatccatcagtggtatcagatgtggttatctgaaggcggggcgtaccattcctgggactcgctgacggcgacgcagaaagcgagactgtccccgttgttatcgggaagcagttttgactggcttaaccggtttaccggagaggatgagagccgggtggcgacagcctgggaggatattcagtaccttcgcagtaccggagaagccataccgatggatatgcggactctgttaccgaccagccttgcggctgaattacacggttttaacggctgtttatggaaaacaccggaggtcatctggcggcaggcgcgctggcaggcgtttgcccccggtaacagtacatatcacctttatcagtgccgttatggtgtgaaatggccgaacggcagtggttttcactgtattgatggtgggtatgcgacggagttatccgcagagtttgatactccgtgggggccgccgtcagcagcggttttgtgtgctctgtctgcgcgtttccgctgtcaggtccgtcatgtctatgccgaagaaggctgtggtttctgcggatacagcgagtatgaccatggccggttaaccgaccatgaatctgatgagattgagttcagtgatgaagagaatgaggacggtttccaggatgtgacgggaccggactatattcttgattcattgccacattacggagggtga

SEQ ID NO: 14540 - DNA, 300 bp, Escherichia coli
atgaacaaaatgaccattatccgctttcagttactggtacatcagttactgcaagtgcattacggcattacgctgagtgataccggattgtccgatgatgctgaggtgtcccggatgattgaactcgggatatcgccggtatcggtggtcaaccgtctggtggataagtaccacctagataaactgaatgcatcctgttatctgccggcatccccgtatgtcagtgacagcgatgccttacttgcacaggctcagctgagcggtgccattaacccggatgtcatgccggataatccttaa

SEQ ID NO: 14541 - DNA, 975 bp, Escherichia coli
atgaaaaaatctgaccgtaaacgccgtccggcagcggataagccggttcgcgatatttatcaggaagtgactgaccgtattgtggccgcgctggaaaaaggcacccgtccgtggaaacgaccatggcggccggcggaagggacaggcaccggttttccggtgaacgccctgaccggtcattcctaccaggggataaatgtgctgctgttatggttgtcggcggcggagcagggctttggttacgatatctggctgacttaccgtcaggcacagcaactgggtggccatgtccgtaaaggcgaaatggcgacgaatactgtgatattcaaaccggtgaaggtgccggcaaaagaccgtcacggtgagctgctgcgggatgaacacggtgaggtggtgatgacggaggtgccgatgataaaggcgaatccgttatttaacatagcccagtgtgatgacctgccggcgcatttttacgaaaaccggcgactacccggagaggagacagcagggataatcctgccggccacgcaccgggtgctggatatcctgaatgccagcggcgtgaaggtgaccagtgcggcgcagaaccgggcgtattacagtccgtcacaggaccggattgtgatgccgctgtcgtcacagtttgaccggaatgccgattaccaggccaccttactgcatgagttggtgcacagtaccggtcatccgtccaggctggcccgtgaaggcatcacctcatcgtccctgaagtttggtgacccgctgtacagttttgaggagctggttgcggaaatgggcagcgcttttctttgtgcgcagttaagcgtcgagggagaagtgaaccatgaaagctatcttgacagctggctgcgggtactgaaatcggacaaaaaagcgttgttccgggccgccgggcaggcccgccaggcctgtgagtttttactgaatgtggccgtatcccgacaggccgcgtag

SEQ ID NO: 14542 - DNA, 648 bp, Escherichia coli
atggccagagcctgtacgatacgggaactgatagcggatttatcccgctgcaatccggaggcattcgtcttgtgtgagatgtggttccccgatgatgttacctatgttgatgaaacggcttgtccggcagagacacgggcaacattaacgcatgttgcacatcattttgatgcggagctgggtatcaactgggacacgctggcgtgtgcgttatcgtgtgtcagagatgctgagcagaagggactcgatatttacttttatgccagtgaaaagcgtggtacagacaaaagccggatacccgcctcacgttacgcagaagcggacagcgacggcgatattgaagtcgggtatttccgtaaggttaatgcgctgtttaagtgggtgcatgaccatatcggggcttttgagaactgcgaaaaggtgctggtgacagaggcccatctgcgggctttacagcaggacttgcaggcactgacaccggaaaactgtcagacacggttcccgaccactgagggctttttctttggttcaacggcttatgatgaggcgtactgggctgatgtggaaggcgtcagacgctggctgtcagagataacggagacgtttgactttgacgcagagtcactgttttttgtggcctggtggtaa

SEQ ID NO: 14543 - DNA, 513 bp, Escherichia coli
atgggatatacacattattttacacaaaaacaaagcgttgaccccctgatgtggcagaacttccgtaaacatctggacaagctctatcaccactatctggccaatcccatatccgcagagcagatttgcggcggatacccagataaacctattgtgttgtgtgatggcctggaggaaaaccggctgaatgatggctcattattcaccgacgacggtgaggcgctttgttttaacggtaatgcggctgatgacatgaatcatgagacgtttattgttcagcgcgaaatccccgtagaggactactgggatttctgcaagacagcatacaaaccctatgacgtgtttgtagtcgcggcattactgttgttgtacaacctgtgcccgggatatttttcggtctcttctgacggggatatccgggactggcagccggtgctggactatgtcagtcaggtatttccttatcttatcctgacgttaccggaagggataggtttaccggaggcaggataa

SEQ ID NO: 14544 - DNA, 357 bp, Escherichia coli
atgtctgttttactgccagaaaacaaaccgttttcatttctgagtctgatcatgcaacggctgtaccgtttttatgaccgtataccgtttgtttcgtcagggatacccggtgaattaccgtggataagtaaccgaaccggccggcgcgcttaccgtgcgacggtggtgaaagtgaatccccggcagttcaggatccgcattactgtacgtctgggcgcgcattcgaaagaataccgctttcattcgttgataacctcgctggacagcaggatattttgttccataaaagcggcctcccgtgccggatttgcactgacataccagctggcacaggtgcgttatgcctggtgtcgctga

SEQ ID NO: 14545 - DNA, 423 bp, Escherichia coli
atgatttatggcattacccgcggactgttctttgtggccgatcacgtctgtcgctattcccggagttgggaatggctgatgtggctggttgaggaagcccggacactgcgaaatgttgaggctgatttgaaactggctgaaaggtatgccggtgagcaaaaccgccctcattccatttcgctgatgaagtgtacgctttatgatgccggatttgcttacggcagattattactgtggcgtgcggatggtctgatgagaccctggccggcatgtctgcttcgccgtttatctgatatcggtcagcggattgatgcagtgatctggcagaaaggctgtgaagccggcttggatgagaccgtcagtgaatggatggcaatggagatggctgatgaataccttgtcggtatcgaactgagcgactga

SEQ ID NO: 14546 - DNA, 318 bp, Escherichia coli
atgactctttttacattgaattatggtgttgcccacgtaatgtctggtattgccagttatttatttccgcattcccgtgtttctcagcaactgaaggccgttgctaatgatgcccggatgctgaaaatcatcgcagaagaactggaggtgatacgtttggacgaaaaacggatgtatcagagcggagattacagagaactgccgtttattgagcttgatttgtatacaacggcatttcgttttggcgccctgatttactatggactcgcaaaccggtgcccccgcatttttgcttcaccggctgacagtcatcgctga

SEQ ID NO: 14547 - DNA, 363 bp, Escherichia coli
atgaaggtatctacatttccggaatcgtctttttttgacgatctgcactctctcacgcaactgcatcacctctcaggtgagctcgacatggttcttgcttttgtccgtctggatattggcgagcacccggacgaagataattttccgccaaacttctggataatcagtgccgttgcagagcaactgggcgcgttatctgtggaggctgattttacccgtccacatcttgagaaaatggtccgcgctgtctggaaagcggctgagcaaacgccttatgcgtctgactttcgccgtatctacaacgatgcgatcaaaaatgcacagtttgaagatccggttgaagcgctgatgtttggtgcttaa

SEQ ID NO: 14548 - DNA, 195 bp, Escherichia coli
atgacagaactccgttcgtccttgaaattgacggagggtgataacagaatagcgttatcatcaggattatttttacgcaacgcttcatataacctgcccgctgacggggaaatcacccgtcatcagggaatttctccgttttttcaggagaaattcaatgaaggtatctacatttccggaatcgtctttttttga

SEQ ID NO: 14549 - DNA, 612 bp, Escherichia coli
atgaaagtctgtttaattattttgtttattaattttgctttttgttttccgttaatggcgaagacgttatttttaggtgattcattaacggctgtttatgaaatgtcagcaaaatatgttttggatgaaaaaataaaaacagaatatgtttccggttcggggttaataaataaaagtaaaaaagattggatcgctttcgtgaataatttcgatttgcgggagtttgataatgtgattattagtctcggaacaaatgattttgttcaatatggttcggatgaatggctgaaatattacagtctggtatttcaattcattgctgaaattcaaagtgaaaatccgttagcgacaattgtctggatatctccaccacatttaaaaaatccggaacatgaacgttatttaatacatacccggcatataattaaacacagtgcgatgttattaaatattcattatctggatattaatcagcctcatatattaggaacgcaatggcaatctgttattcataatgaaactgtacgaactgatgatggaatacatattacccgtaaagggggagtacgggtgatcagagaagtggtaaaaatcctgaatgggcaggattga

SEQ ID NO: 14550 - DNA, 909 bp, Escherichia coli
atgtccagaagagcaaaagccctgtcccgtgaaatgcatatccttgcacgtcaggccggagggagctttaaaaccattgcagaccgggtcaaaattgcagaacgggttgcggcagagctggccgggttgaatattcagatacgatctgttgagcaactgaaatcccgccatattgaaatgtatatccatgcccgcagagaacagaatatcagtttacgcagctgtcaaaacgaaatgtcggctatccgggcgatatttcgtgttgccggacgtcataaactggctgaccctaaacatgagcgcctcagtaatgaggcgctggggctttcaggtgccagcagggctggcacccgtaccgcgatatcggacgagcgctttcacgaagcgctcgctcggattgagccttatgatcagggggtggcattaactatgcagttatcccgtagtctgggattgagaaatgaagaagccgtgcagtcagtaaaatcattacggacctggcaacaggcgcttaaaaacggtaaagatcgcgttcatgtggtttttgggacaaaaggaggcagaccccgtgaagcgttagtgccggataaagcccgtgtattaacattaattaataaagccattgaatatgcggataaacataacggttatttaattaatcgtccgtcattacattctgccaaagatcgttatattaatgtgatgcgacggataggcggatttattcacgaagaatcaaatcatggtttacggtatgcctatgctcaggatgttgaaaaatattatctcagtcagggattcagtcaaaaggaagcctatgcattaacctccatggatttagggcatggtgacggtcgtggcgattatattaaacgggtttatagtcagaaaggggatattgaggaataa

SEQ ID NO: 14551 - DNA, 357 bp, Escherichia coli
atgaccactttcaccgataaggaactgattaaagaaatcaaagagcgaatcggtagcctggacgttagagacaatattgagcgccgtgcttatgaaattgcgctggcatcgctggaggcagagcctgtagcggaatgcattattgaggatgggtgcatgtgtgttgacggggtcggtgagtatgtaggtcactcgctgccagatggaacgcaccagctttacaccgcgccgccagcgctggtagtgcctgataagttgccgcgtgaatacataagaggttggcctcttgcgtatagtgattatgctgaaggatggaacgattgccgcgaagccatgcttcaggggaaaggagagtga

SEQ ID NO: 14552 - DNA, 366 bp, Escherichia coli
atggcactgacgaaaaaacaacgtgcagaactgcgcatgaagttcggtggtcgctgcgcttattgcggctgcgaacttggcgaaaagtggcatgcagatcatgtaaaaccggtcattcgttttgatggaaatatgcttcaccaggagcgtgacgatatatccaacatggttccggcatgccacccatgcaatctgcacaagcattgcagtagcctggaagactatcggcgaattatcagtgatggtcgtcgtgaattccttgcgtccgggaaaggcaaggcgctggttcgtatgggattggttgaaatgaaatctgacccggttgtgttctggtttgaaaaatatcaagaaggggctacggcatga

SEQ ID NO: 14553 - DNA, 795 bp, Escherichia coli
atgatcactatttccaaagagcgactgcaatggctggctaacatttctggccgcgatgacattgacgatatagacggcggtgaaattcgtgagctggcgcttatcgcgctggcatcactggaagcagagccggtggcagtaaacgacgacatggcttacgcattccaccatgcgctttctgactcatcgcttggctctgatgaaatcgaagaaattaaaaccgggttgcgtgctgcctttgccaatgtcaccgtccagccggtgctgatagtgccagatgaaatcgagccagacgatagcaatacgtttgattatgttgatggctggaacgcctgccgcgccgccatgcttcatggtgccgaacctgtaagccaaacttacaagtcacaacacacgcagtttgaacaagttgctgacctctacgaaatgcaatttgatgacggtcgcacttgtgcctttcacactgatgcgcaaaaggctgcgcaatggcttcaggcatgcgacggaaacagggttcaggaatacgtgaagctggagcgattgcgtaatgcgctatcgggcaactctccggtaactccggatggttggataagctgtagtgagcgaatgccgaacgataaacagtatgtttggtgttgggggaagtcttacggctggactgagtgcgataccttcgaagggtattacgattggtcgagaaacaaatggtgggcagttactgacgatgtggaagaaccggcatcgaaagtaacccactggatgccgctaccggaaccgccgcaggaggtgaagtaa

SEQ ID NO: 14554 - DNA, 1938 bp, Escherichia coli
atggtaacagtaagctctgtagctgccacagaacagcatgataatacaataactgttactgcaactaagcgcattcaaagtagttttgatgtaattggtaatgtgaatgttcaaactgatgaacagttaaaaaaatctttagttaatcaaactgatgatttgagcgcagtttttcctgagttgttatctgcaaaccgaagttcgcgtatttataacaatatgactcttcggggccaatcttcggccgatttcttttctccaagtttgggactgtttgttgatggtgctccccagctttctcaatcgtatgctcaatctcttcaaggggttgagcaagttgagctacttaaaggcccacaaggagttatttatgggcgtggcacattgggagggattatcagtgttattaccaaaaaacccagtagtcacgctgaagcatggttaggggggcaatattttggtcaaggggaaagaatcaatacaggaggaagcactggctacatggaaaacggctgggcttttcaggggaatgttagtctcgatagaaataatggttctttgaacaatccagcatgggataaaaaaaatgttgatagcagagatataaaagctggatggttgtctgctaattatatttcccctgatacattatttgagtctaatttaaaagtaggtggagaaaattaccattctcatgaggaatattttgttcctttttcacctctttcacgttcaaaaattgatactgaatggttatatgaaacacctaatcttaaacgtaaattaaaaaatatttcctggaatacaggttatgattttaatgatgaatggaagtttaaaacgatactttcttatcaaaatatggatatagatagattgtttatggacggaacgttacaagatgattctcaggatattttgtattcagaagcaagagctaattatgaggggggggatctaagtggaattataggggtatcatttcaaaagatgggttatagacatgataatttatctgtagggaaagtcggaatgggaggaaaaaaatctgataatgatatttataattactctggatattttgatggtgcatacaggataaatgacaattgggagttaggtgcaggggctcgtttttctcacgaaaaagcaaaaactcgaatgattattttagaaaaaggaaaaggtgagtctaattataataataatgcagtttttaatgcctttattccacgagcaagtatcgcctggcttccaaatgagcagaatcgtatatggtttggagttggccgcggttttaaacctggtggttttaacaaagaaggggttgataaactagctctgacttcttataaatcggaaattgccacggaaatggaattaggttggaaatggcacagtgttaatgataaccatatggccgaaattactttatatcaaatagatagtaaagatgttcaaggatatgtaggtgttattggttatcaggcattatctaatatgggagattcaagaagtcgagggatagaatatctttggaaatcaaagcttacccctaatcatagtatttcactgggtggcatgttcaatcaatcagagtttaccagtggagaacataaaaataaaagacctgcttatactcctagttatagttcattaatttcatgggagggcttatatggcaaggagcaaaagtggtcttctcggattgcagtcagatttaatggaccattttactttaatgagcaaaataatttagaacaagggcattatactgttgttgatgcatcaatatcatggcaccctacaaagcaatatgaacttagtatctatgcgaaaaatattggtgatgctttatatcgaacgtatgcatttggtaataaagcacagctaggtaatccgagagagatcggggttcagggaagtattaacttttag

SEQ ID NO: 14555 - DNA, 672 bp, Escherichia coli
atgcgtatgaaaactctcccgatatgtcttgccctgacttcactgttgttggggggctgtgcagacaagccagcccagcctacggaagcggtggcagacatagcgattccgctcaacgtcggttatgctcagccgctgctcccagatatttatccgtcagccccggaagtggtgcgttatgaccgttaccggctggttgatatttcgccttcacaggcacagcgttacccgctggaacaaattgttcatctgcgtattcctgcttccgtctccccgacagtcggggatgcgctacattatgccctgcgtgattccggatatcgtctgtgcacgtccgatggacaggcgaaccacctttatcgtctgccgttacccgctgttcattatcagatgggatcgatccgcctgaatgtggcgttacagatccttgtcggtccggcctggcagttgtgggtggatgatgtgcaacgggaagtgtgttaccgacttcgtccggaatacacgccatctgcgccggatgcaggaatgagcggcatgagcggcgcttcatccgtctctgtggtcaccccactttctgcgggcagtacgccattaccggtgccaccggtgcttaacacttccactggtcataccgatgtgaataaggttcatcgcggagggtggctgaaatga

SEQ ID NO: 14556 - DNA, 741 bp, Escherichia coli
atgactcattctgaagaattgtccgtaaccccattacataaaaaaatttaccggggggggattgtgacgggcgtggtcgcctgtgctctggtggccggtatcccgctgtttatccacagtaatgttatcagttcacactcagaggctctgtcacaactcggacaacgattacaggcgattgagatgaagatggctgactctgtcacggatgaccggatgaatgcgcaactggacgtgctccgtcaggggctgacgacgctaaaacaggatgtggcatcacagcgcgacaccctcagaacggtgacagcacagctggcggtggccggcaaaccggatgaacagatcgccgtactgtctgacgggctggaaaaacggctggcacaactggaaacccgccaggcacagtgggcactggcgttacatcagttgcaggaacagcgtcagccggaacaaaaaacggtcaatcccccggttgtcagggcaaaacccgccacgccggaaacttcccgtctcggggcttctgtccgtccatcccggaccgtgccgtttcagttaaccgcgattgaacagcggggcggtcgtcttcttgccgcactggctcctgcggatattcgtcagctggggcaggtacagttactgccggtaggcggacgttatcagggctgggaaatgaccgacattcagactgatcgtgtgacattacgttatcaggggcgcacggtgacgttgcgcctgccataa

SEQ ID NO: 14557 - DNA, 735 bp, Escherichia coli
atgaaaaacataagatgcgtggttttactgggtgggtgtctgatgtccgcaccgctgacagctgcacagtctgtttccggggcaacccgaccggttcagattgaggcggggaaatcggctgagagtcagacacagtcattgcagtatgaggcgcaggaatggggactgagtacggaggagtatgcccgttttgaggcgctgatgaaagggcggcgcggtattcagtctcccggactggatcccctgacgacattgggtattgaggcccggtcagacgaagagcgccgccggctggctgaaaagtgggtacagcaggaatttgccagggcagaaaaagagctggcgtttcagcgggaagtagatgctgcctggaagcggctctatggtcaggtattaccggtcagtctgggaacattcggcaggatggaacagggaacagcacagcgccggcaggcactgtttgtgcaggcggaaaattgtagcgcgtgtgatgcccgtctggctactctgctggccggcaaacagccgtttgatatttatgtgctggggacaaagggggatgataaccgcctgagggcttgggccagacaaaaaaatatcccggcagagcgcgtcagaaagcgggaaattacgttaaatcatgatggcggtctctcgcttcagtacggactgaccaccacaccggtggtgatgcaacagttaccggatgggcggtggcgtccgctcacaccttaa

SEQ ID NO: 14558 - DNA, 639 bp, Escherichia coli
atgcgtaaaaattccctgctcactcttgtcctgctgctgttttccgtgccgttaccggctcgggaggtgccgccgggctaccgtgaggtggcccggcaggagaatgtaccagcagaagccctgtattccctggcactgacggagtcatcctggacattaccggcacatcacccgcaggccggtgaaatccatccctggccgtggacgctgaatgtggctggtaaaggataccgttatccgacacggcaggccgcctggcaggctttacagtcgtttttacagacgacatcccccagacgtattgatgtggggattgcacaggtgaactggggctggaacgggcatcacttccgttccgcctgggaggcctttgatccttataccaatttgcatgtggccgcccgcatcctgcgccgctgttatgaggcgtcaccgggtagttggatccgtgccgccggctgttatcaccatccggcgggcggtcagcccgcagtacgctataaaaatagtgtccggcgtcagctggcgacactgacgggcggtacacaacccgttcccgctcatttaccggcagtcagtacagatcgggctgtatcgtttgtgtggatagaaccggagaacaaaaccgatgcgaaataa

SEQ ID NO: 14559 - DNA, 555 bp, Escherichia coli
atgcgaaataatcctgaagaaaagacaacgcgagccttttatcccctgcccgtcttggggatgctgctgttttgcgcagccggcggcagtcaggcggcattaacggtggtggcggattatggcgggcaaccggcagcacctttttatgacgcgataaataatgccccgaatgaatggacagcaaagccggcgtcccgccctctgccgtccgtgatggccccgtcaatggtgttgccggttgagacaccggaaatgacgccgggggaggtggatgaccgcgtcctgcatttaccggggattggggcactgtatctggtgggggatgatccgttatcccgggcatggctcacacagcacgcagcccagctgaatgcaatgaatgcggccgggatggtggtgaatgtgaaatcggaaaccgggttacaggcgcttcaggcgctggctcagggaggactgctctccccagcttctggcaccgatttggctcaccgtcttcagttatcacattacccagttctgatcacggaaaccgggttgacccagcaggtgaagtaa

SEQ ID NO: 14560 - DNA, 198 bp, Escherichia coli
atgttaccgccgatatggccttcagatggggttgactccccggcattctggttggccgtgctgatgtggtgcgtgttctttgttgtgatgagactcctggggaaaaaaaaccgtcctgcccgccgtcatcgtcactgtcacgggaaagaatcgcgtgtaccggaaaaagaaaatccgtcagatcctccctggggttga

SEQ ID NO: 14561 - DNA, 2148 bp, Escherichia coli
atgagtgatcgttatgtgatagaggcctggctgcgaccggccgtggaattgaacagtgccctggtgtccggcggggcggcgtttgtgtgtgcggtagcaccctgggcagtggcattgtctccgtccgtgagttatgtcaccgccggtgcgtttgccggtttttccgcattgcgggcacatcagggattccgggtattacgttaccgccggaatctccggcgtctgccccgctatcaggtgacgtcggcacaggtgccggtcagccggcagcgtctgtttctgggaaaagggtttcagtggcagcaaaaacacacgcaacgcctgctggaaacccagcgtccggaagtggagcggtatgttcagccgccggcacattaccggctggcccggcagtttgaactccgttttgaatcccgttttccggcggtttgccggcttttgcaaaaagacagttggctgaatccggtccgcccgctgccgccggtgggggggaatccggtgttacacggtgtggagccggatgaggtgaatgtgaccatggatttgcgtgaacgggttggtcatatgctggtactggggaccacccgtgtcggcaaaacccgtctggcggaagtgctgatcactcaggatatccgccgggggaatatcacgattgtttttgatccgaaaggggatgcggatttattgcgccggatgtgggcggaagcgcatcgtgcggggcgcagtgaggagttttatgtttttcacttgggctggccggatatcagtgcccgttataacgccatcgggcgttttggccgagtatcggaagtcgcggggcgggttgccggccagttatccggggaagggaacagcgcggcgttccgggagtttgcctggcggtttgttaatatcattgcccgggcactggttgctctgggggagcgtccggattatgccaaaattttacgttatgtcaccaatatcggggaactctatcagacatattcgatgcaggtgattaaagcacaactacctgatttgtttgcccaaatcgagaatgcgcagaacgcgctgacggtcgaggatgtgccccgtcatctgcaaagtgatccgaaagctgtggctatctgggcaacggagctggcgttaagtagtgagaaagggaaaaaaatctatgatccgattttggacgggctgcgcagtgcgatccgttatgaccggacctattttgataaaatagtggcttctctgctgccgttactggaaaaactgactaccggaaaaactgccgccctgttgtcgccggattacaccaatatgcaggatccccgtccgatttttgactggcagcaggtgattcggaaaaaagggattgtatatgtcgggctggatgcgttatcggatgcggaagtggcggcagcggtggggaattccatgtttgcggatttggtctcggtagccgggcatatttataaattcgggactcaggatggactgccggaggatgagcacgccggaaaattaccgatcagcctgcattgcgatgaatttaatgaactgatgggggatgaatttattccgttactgaacaagagcggcggcgcggggattgaagtgacggcctacacacagacctggtctgatattgaagcccagctggggaatgcggcgaaatcggcgcaggtcaccggtaactttaatacgctggtgatgttgcgtgtccgtgaactgatgaccgcgaaattactgacggaacagttaccggaagtggatatttacaccaaaaccctggtatccgggatcaccgatatttccaatccgaggcaggggagtgattttacctccaatacccaggacagggtcagtatggtggctaaaccgctgctgttaccggcagatattattcagttaccgaaaggacaggcgtttgcgctgctggaaggcgggaagttatggaaaatcaggatgcccctgccggcggcagaggctgatgccctgatgccaccggatttacaaaaaatcgcacagtatatggagaaaaattaccgtaccggcgaaacttggtggactgcgtcatcattttcggatgcgcggcatgacagcggcggtatgaatgtggctgagatggcaccggataccgaagggggcaacgatggcaactgctga

SEQ ID NO: 14562 - DNA, 750 bp, Escherichia coli
atggcaactgctgaggtacgtcaggaaaccccgcgtcacccggcaaaagaccccggtttgccggctaaattgttgtggcactggccgtgggccatcatcggggtattactggcctcctgggtatgcagtctgttgattgagtgggtcgggattgcgtttttctgggcggacgaaggggcggagcacagccggcaggtgatgttaaccgagagcgggtatctgtcagaagggtttacccgtagtctgctgatgtccagtccggcgcagtggctggctcataccgttgaacaggcataccggtggctgtttgtggagtccgggctgatggagagctggcagaacgtgtatcctgtcagcgggaatgcagttgcccgtgaactggatgactggcggatttggtttgtgtccgagctgagagactatctgctggcgacggtttatgtgacgctgaccttttttatccgggtgactattctggtgctgtcgatgcccctgtttgttatggtgctgttggtgggcatggtggaaggctttaaccggcgtgatttgcggcgttatggtgccgggtatgaatccagttttgtgtatcaccacgccaagcgttttgttaagccggccttttttgttccgtgcatgatttatctgtcctggccgtctgccatttaccctaatctggtgttgttaccggcggctctgttgttcgggcttgcggtggcagtggctaccgcgtcatttaaaaaatatttatag

SEQ ID NO: 14563 - DNA, 609 bp, Escherichia coli
atgagtcagaccatcacccgaaaaactgggcattttgcctggtgtgcactggttgccctgcatctggcccgcagggaggggctggtgcagtccgacatgcagaaaaacctgtttttaatacgctggctggcaaccgccaaaaagcaacgccgttttgaccgtgacgttacgccggatattgactggctgcttcaacagggacgtacactggggagccgggccaaactgccacaaaaactggattatctgtaccgctcctgtacaggcgcattacacgagcagagcgatctgttccggctcacttatgcgcttgaatcggccaaggaggcaggctttgcctatcagttattgagtgataaatcgtggcacagacgacatgcggtgagcccggatacgctcagcaacaccatctgtttatccaaaaatgcactggagcaggcttttgatactgacggtcatcagaccgcacacctacctgtaaaaatcggaggtgatatcgccgcactagctgaactgctgacacaatgtggctggcaactcatcacgacagacaacccgccactttatttactgctcacactcatcaatccatcaatcagcgcaggataa

SEQ ID NO: 14564 - DNA, 327 bp, Escherichia coli
atgcgattattttctccgcttatttccctgtttgcgttggttgtcagtgcatttggggtattgcctgctcaggccgctgaaaaagatgaactggcgctgacgttaaagcagctcgatcacatccaggccagcctggagcgcgcccgtattcaggcaaatcaggacaatcacgcccgtttttattttgattattcccgcgcctccagagaggtggagattatccggcaggggattgtccgctatctggagccttcccgggcccagcccacggtgccggttaatgtggcggagccgctgcgcggggattaccgccgggagcagcgatga

SEQ ID NO: 14565 - DNA, 240 bp, Escherichia coli
atgaatccgtcacagcaggcggcatttgaggctgctgctggctcggggatgtctccggctgttctgaatctgttgtgtatcggggcattactggcggtgctgtttttatgggcagcctggggactggttgatgtttaccggggctgggcaaatgaaaatgttcgtactgcaagggtggggcagtttgctgtccgggcagtgatattactggtggtctgcatctggatgtttgccagttga

SEQ ID NO: 14566 - DNA, 369 bp, Escherichia coli
atggatatgaaatcattttggggacgtggtgtccgtcgtattggtgcgtcagtggtgacgttattcactttattcagtctgatgccggcgtatgccgcactgccttcggtggaacccccttcttccggtggcggcggcggactgatggacaccattaaaggctatcttaatgacggcattgtgattggcgggctggttgtggctgcgacggcttttatcgtggtggccattgccgcggtcaccacgttcaatgaagtgcgcgaccaaaaggctggctggggtaaattcggtacaattattgtagtcggtgtcgtcctgattgtggcggtcgtctggctggccggaaaatccgccaccattattttttaa

SEQ ID NO: 14567 - DNA, 417 bp, Escherichia coli
atgcagaccatcgattttatgccggatcgcttaaatgcagagcccaccgtctttcgcggatttaccacccatgaaatgtttgccgccgccggtgtcggttgtgtgggcgggagcgttatcagtatcccgctgttaccgctggccgggtgggtgatcctgccgaccggcgcgttgataatgccgctgttggtggtgttttttggcggcacttttctgacccgtatcaaacgcggaaaaccggaaaattatctctaccgccgattgtcctggaaactgcaaaccgggtttgcccgcacattgccgctgaccggacggctgactgaaaaatccctcatcaccgtatctcagggctggtttttacgccggacgcaggcgctgtcactgtgccggtatatcgccggaggccgccatgagtaa

SEQ ID NO: 14568 - DNA, 645 bp, Escherichia coli
atgagtaaatttcgtcatgccctgcaaaaccgggaccagcacattctgacactgcggatgatctgcggggtgctggtgctctgcctgtttgtggcctttgccggctggatgcgggcgccggctaaactgacgatccataatccgccggatttgcgctccggcagtacccgggcatggtgggaagtgccgctgccgacggtgtacgctttcagcttttatatttttcagcaactgaatgcctggccgaaagacggcgaggtggattatccgcgaaagattgcacagctcagtgcctatctgacgccgtcctgccgggcgtattttgagaaagaggccgcttaccgtactacgctcggggagctgaaagggcgttcccgggtggtgtatgagatcccgggacgcgggttcagtgaggataaagtccgggtgattgaccgggataactggatcgtgcgcctggatttggtagcggatgaatattttagcgcggagccggtcaagcgagcgacggtgcgttatccggtgaaagtggtgcgctgggagggcgatccggaaagtaatccgtttggtctggccctggactgctatgacgggctgcctcagcgtctggaagcggcggagcagaataaggaggtcagtcaatga

SEQ ID NO: 14569 - DNA, 897 bp, Escherichia coli
atgagcataaaacgtcatctgacggcctgtgctctggggatttcggtggtgttttctgtggccgctctgccgctgccggtgcaggcggtagagctggtccgctgggagcgtattccgttaccggtttctctgcatgtgggggaagagcgcattgtgtttgtggaaaaaaatgtgcgtgtcggttttccgccgtctctgaatgagaaactgcggatccagagtaccggaggggcggtgtacctgcgggcggaaagcgccttcccgcagacccgtcttcagttacaggatgtggaaagcggggaaatcctgttgctggatgtgacggccactgccggtaaagggaagctggagccggtgcgggtggtgtacagcggtgaagtcagtacgcagcgtgacagtcagagcgtcagacgcagcgggcaggctgcgggggcggcagccgatgccgtaccggaaagcgtggaccgcaaagcgaaaacccgttatccggcgccgttaccggtcttactgacccgttatgccgcccagagtctgtatgcaccgttaagaacggtggagccggtgtccggcgtacaacctttgccactgaccttaccaaaaacactgacagcactctacccgtctgaaccactgatcgcgcggccgctggccggctggcaggcggcggagtaccgggtggtggcggtgaaactgaccaatcagtccgctcagaaagtcgtgctggatccccgtcagttgcaggggcagtttgtcagcgccacgttccagcatcagtggctggacgcgaagggcacaccggaggataccaccacagtgtatctggtgatgaaaggcaaaccggataaggcgtttcctgcggagccgcctgtccggaggacgggagggaaagcccgatga

SEQ ID NO: 14570 - DNA, 1497 bp, Escherichia coli
atgaaagtgaaatccaatacgctggtcaaaattctggtgccgtccgcactggcgttggcggtgctgattggtatcaaaagctgccagcccgacacgccggtcaccggcagcggacaggacaacctgtctcagtcaatcaatgaccttgacccaggggagctgaagtcactcgggattgagggggataccccggccgatacactgaggacgctgattggcactatgaaaacggtacgtgaccgtcaggcggaattgatcgcccagaatgagaaattgctggaagagaatgcgcagctgcgtaaccggcagcagaatgtgtcggggcagatccagtctgcggtggcttccgtccgtcaggaagcggagagtcagcagcgtgccctgcaacaggagcagcagacactgatgcggcgtctggatagcctgggggaaacgctgacagcatcaggtggtcagccggctcagggcagcggacaaggcgatattccgctgggactggggctggataccgggggcagcggactgacggtgaaagacgggttgctgtgggctgagccgcaggatgcacaaccggctgaaccggggcggatggtgaacggacaaccggctaaaccggcgtttccgacctcttttctggaggataacgccattacccgtcagaaagcggaactggaccgggtggccaaaaatcagcgcacgctctccggtacagcggacggtgaggcccataccgaaccggcgtacacgataccggagaatgccaccctggtgggcagtcaggcgatgacggcgttgctggggcgggtgcccattgacggtaaagtgaccgatccgtatccgttcaaggtggtggtgggaaaagacaacctcacggcgaacggcattgagttaccggatgtggaaggggcggtgatcagcggctcggccaccggtgactggacattgtcctgtgtgcgcggggatatcacctcgatcacctttgtttttacggacggcacgatccgcacggtgccgaagccggctgaccggacggacggcggcagtcaggccaacagcggacagaatgcccgtaataacggcgggtcgctcggctggatttcagatgagagcgggatcccgtgtatcagcggtgaacgtaaaaccaatgccggcacctatctgccgaccctgtttgccctgacggcagcggcctcggccggggatgcgatgtcgcagagtcagtataccgcgcagaacaacgggtacggtatcacctcctcgctctccggggatgcgggaaaagcggcgctgggcagtgccatcggcggcgggtttaaggatgtggcggactgggtgaaatcccgctacgggcagacctttgatgcggtgtatgtgccgccggggcagaaagtcgcggtgcatatcagccgtcagatcccggtggattatgaatcgcagggacgccgggtgaattacggtttttcactgacagagggtgaggaaggaggtctggagtga

SEQ ID NO: 14571 - DNA, 486 bp, Escherichia coli
gtgacgtattttgcgaagccgggggtggcggctgtgacgccggtgacgtttccgctggtgtttgtgttcagtgccggacaggccggttgtaccggaagtcatttttgcctgacggtggccggtcatcaggtgtttgatgaggagcaacagcagctgattgccggcatgtcaccggcgacgatacagctggcgtggcagagtaccgccggtgagacgcccggggcggttctgtctgtgggccgtcaccgggtggggctgagtgacaacgacattaccgtttaccggtttgccccgcgggatgaggcgtggccgcaggacagtgactgggatcgcctgctgtacaccgtttttaaaggggaggcgccggataaagccggctggcaatgtgtgcctttttcactatctgaactgagctgtcacggtgagtttgcccggctgacctgccggggggcgatcctgaagggcgcgggaggcgtcatatcatga

SEQ ID NO: 14572 - DNA, 438 bp, Escherichia coli
atgagaatgatgaaatgtgtgatgaaaagcagagtgctgtgcgcactggtgttgttgctggccggctgtgccacctccaaagaggagctgctgccggcgggaaacagcgacatgatggccatctggtccggcagacaggctgatccgaacggtgcggcggacagccggacggtgacggagaccgcccgcagcgccctgcgacgcgccctgacgaatgatgaagccgcgcgccttcagcaggcggacaccgcgtatacccggacacaaagcagtgagatccatcagcagtttccgcgtctgccgaacccggacatggtgatgtatgtgttcccgcatctctcggccggcaatctgccggtgccgggatacagtacggtgtttccgttttaccatcaagtgcagtatgccctgccgggtgagcgtgtggagggcttgtga

SEQ ID NO: 14573 - DNA, 2868 bp, Escherichia coli
atgggattttcattattccgctcacgccggaaagcgcaggcggtttctgctgaaaaaacggatgaaaacaaggctgacaaaaccgtacaccgcagtacaccggcagagaatgctggtttaggccgtcagccgctttcccggccgggaaaaatgacccaggcggatgagcagaagatttaccatgcgaatccgtcctttattgattacctgccctgggtggaatttctggatgaggagcaatgcctgctgcttgatgacggggtgtcggtcggggcggtgtatgccgttgagtcggcgccgacggaagggcgctctgccggccgtctgctcgaaatccgggatgcggtggaggatgcgcttcaggacagtctggatgagcatgatgataacccgtgggtggtgcagtttttttgtcaggatgaggacgacgtgagcgtcacactggccacattgcgggactatatcctgccggcggcccggggcaccgcgtttaccgaagcctggctgaccgaaatggcgcgtcatttacgggggattgcccgtccggaagggctgtttaaggacacggaggtgaccggacaaccctggcgcggacagcagcgccggacccggatggtggtttaccgccggctggggaacagctataccgatccgatgccgccggtggcgatgctcaatcagatgtgtgaccggctggtcagcagtctgggcagtgccggcgtgcagtgtgtccgccaggacgggaggcaggtgcatcagtggctgctgcgtcatttcaatccggcccctgactgggtggaccgggagacgctgtaccgggaaggggcgtactggccggcggcggaggaagccccgggcaccctgccggtgctgaaggattttgcggaaacgctgtggtttaccccgccccggtcggatgtggaaaacggcgtgtggtggtttgataacctggcgcacggtgtggtgaatatcgaaaaactgcgtaaagccccggggccggggcacctgaccggggagcagaagcgcggtgacaaaaatatcaatgcgctgatggacctgtttccggaagggacgatgctgtcgatgaccatcgtcacacagccccaggatacgctggagcaggaatttacccggctggggaaaaactcggtgggggaaaacaccgactcgcagcgtacccgccgggacgtggaaaccgccagaggtttactggggcaccgccataagctttaccgggcctccctgtcattgctgctgcgtgccggctcggtggaggaactgaacaaaaagcgcgtggatctgacggccacgctgctgaatgccggtctggagccggtgaagccggaatatgatgtggcgccgctgaacgggtatctgcgtgccctgccgatgtgttttgacccgcagacggataaaaaacactggtatacccggctgacctgggtacagcacctggccggattactgccggtgaccgggcgcaccagcggcaccgggcatcccggctggagtttctttaaccggggcggcggggtgctgacctttgatccgcagaataaacaggatcgtacccagaatgcgcatctgctgttattcggtcccaccggggccggtaaatccgccaccttatgcgcacagttatcgcagctgatggcggtccgccgtccgcgtctgtttattgcggaggccggtaactcctttggtttactggcggactattacgccagtctggggctgagtgtcaataaggtcagtgtcaagcccggcagcggggtgcgtctgccgctgtttgcggatgcgcatcagctgctgatgatggatgaacagcgtctggcactgaatgtggatgaactgcccgagacggacagtgaatctgaggatgatgacgggcagcgtgacattctgggggaaatggaaatctccgcccgcatgatgatcaccggcggggatgtgcgggaagaagcggagctgaagcgggctgaccgggcgatgatccgccgggcgctgatggcgggggcccgggcgtcttatgccgccgaccggcagatgctgccggcggatttgcaggaggcgctgtatgccctctcccggggggaaggtgaagaggaagggcgggcgttaaatccgcagcgccgggcgaaagcggccgaaatggcggaatccctggggatgtttaccgaaccgggcagttttgagcatgagctgtttaatctgccgggggagctgtggccggaggcggatgtgaccctgattgatttggggcacctggcgcgggaagggtatgaggcccagatggcgctgacgatggtgagtcttatcaactccatcaacaatattgccgagcgggatcagtaccgggcccgggacattaattttgtggtggatgaggcgcatatcgtgacggtcaacccgctgttatccccctatgtaaccaaagtggtgaaaatgtggcggaaactgggggcctggctgtggctggcgacccagaacctcgatgactatccggactgtgccgagaaaatgctcaatatggcggagtggtgggtgtgtctgacgatgccgcagaaagaggtggaggcaatcgcccgctttaagacgctcagtgaggagcagaaacaggtgctgctgtccgcagccaaactctccggctgttacacggaaggggtggtgctggcgcggaaagtggaggcgctgttccgggtggtacagccgagcttatatctggcgctggggatgacggaaaaagaggagaagcagcaacggcgggtgctgatggagcaatacggatgcagtgagctggaagcggcgttcagggtggcagatgaacttgaccggaaacgggggttaccgccccgggcgccggggtga

SEQ ID NO: 14574 - DNA, 2226 bp, Escherichia coli
atgaaaacgacgggagttaaagtaacgcttttgtcgctggttgtcagttattcctgcgctttacaggccaaaaacgtgtcactgggggacacggccgtggccacggggcagcacagtacggctgtcggtgagggcagtatggcgctggggaaaaatatgacggcggaacaggcgcaggcggcgatgaaagcccagaatgccctgttgcagaacagggcgcaggcgcatgagcagtacatgcagacgcaggccctgtttgacagtaaatcgctggcgaacagcaatattctggagcgtcaggaagcgatgaaaccgttgttgcagcaacaggagaccctggcgggtcagcgtaccgcgcaacagcagcaggtgacacaggcacagcaggtcgctgaccggatggcacagatttatgaacgcaatctgggggcggtttcacagattgtggatgagaattttgtggcgttgtggcagcaggggcaggctgaccgtctggctcaggaagtgaaaaaacgggttgagcaggatacgtcggtcagtaatgacacgcagttttatgtcagttatgttaatgcctatattgaagcgaaaaccagaagtgctctggttaatgaaaccatcaacgagaaaaccggttctcagattacgaccaactatcagggtgtggccctgtccccggtactgagtgccggccacagtgataaagcgatgctgtggtcggatgcggtcacggacagcgagcagaagaaacaattatcccgtttacacctgaataccgcggccctgaagggcgttgccggttatcaggaagagctggccaaaatcgccctgatcacctctgcggacgggaaaaagaatctgtatcaggcttatcagaaaaatgcccggcagcaaattgagcaggggctcaccggggtgacagaggccgggaagcagatcctgtcagagctgtatctggataacatcgatgaaggcacctttaatcagatggtcagcggtattttcacccgctatgagaatcagctgaactacctgatccagctggataaggtcaacagtttatcgccggacagcccggattatgccaaagagttacagcaactgctggtactggaaagccgtccccgggataacaccgtcgggctgaataccaacccggaggcgctgaaacaaaaagtggatcagtaccttcaggacaatgcgctcagtcacacacaggccatgtcgtcacaggccacacagctgaaacagcagttatcggcggaaaaagccgtcaccgatcaggcactgaagcaggcagaaacgcaactctcccggctggaaaaggatctctccgcgctggatacaaagttgtctgatttgcgtccgacgcaatccgagctggaaaacatccgggatctggagaaggtgaaagccgaactggcgcagaaacaggcggaatatcaggcggcggataaagccctgaatgaggcgcagagtacgttgagtcagggtaaacaggctgttgcggtcggggataagagtctggcgctgggcgaaaaatccgtggcactgggtgtggatgcccgggcgctggcgaaaaacagtgtggcactgggggacggcagcctggctgaccgggataacagcgtgtccgtcggccgtgaaggtcaggaacgttttctgacgcatgtggcggccggcattgcaaaaacggatgcggtcaacaaagggcaactggatgaggagcgggatgcgcgtattgccggcgataagcagacgctgaaacaggccatggactacaccgatgtgagcattcagtacagtgaggcgaagacaaacaagcggattacggaagagcagcaggcccgtattgagggggaggaacagaccctggcggccgcaaaccgctataccgatgagacgttcgggcaggtgacccacacggtgctggacaatgcccggcagtataccgaccagcgtttcagtcagctggacaataaaatcagtcaggtggagaaacgggccaatgcggggattgccggggtgaccacaatatcttccattccgtatgtgaacagtaagcgtttttcgttcgggatggcgatggggcattaccgtgatgcacaggcgatagccaccggggtgcagtataagccgacggccaataccaatgtgcgcctgaatgcgtcatggaataacggcggcgataccagtatcggcgccgggtttgccgtgggctggtag

SEQ ID NO: 14575 - DNA, 441 bp, Escherichia coli
atgaaaaaacgatttttatccctttccgggctgctgatgctgtcgctgtcatgcctgccgttcaccgccggggccacggtggtgctgtatgccacacaggatgacgccctgccacagacggatatcccgtttgaggtggtgtatctggatgcgcctgagcgcttactggatgaggtcctgcttcagccgggcacggaactgaaggaggcggatgccccgcacatcaccgccctgttacaaagtccggcctggcaggccagagaggcggcattacggcaggcttatcagggggttattcaggcctgggagctgggggtgacccgtctgccggcggtggtggtggatgcgcagtgggtggtttacggcaccactgatattgaacaggctgtgacacagatacagcagtaccgggaacaacaggaaggaggaggtcaaccatga

SEQ ID NO: 14576 - DNA, 975 bp, Escherichia coli
atgacccgacaatcatatcgccggcgtctggcgggcgcactgttactggggtgttcactggtgccggtggcggaagccggactgaataccgccaccctggtcgcgtctgcggcctcgccgtcgtgtatcagctggcgtatcagcgggatttgttactggctgaaatgcggctggggcggctgccgtatccgcacgtcagtccgggtgtcgcattttattccggaggcggtggtctcggcctaccatgccccgggcgaaaacccgtggcaggaaatgtcactggtcagcggggcggccggcgggattgaaaatgccgtgaccggcgtgctgagcggcgtgtctgccggcggcggaaacagtgagcagaagtttgaggcaaaacgtaaaaccgatctgcactttttttatgcggatgccatcggtcatccggcaaccactcttatcggcggcagtatcccggggtattcctgtgacagcgcggccacgccgctgtttccttattacctgagcacgctcgacagtgtgccgtggcgactgggtgtgccggaaatggcgtatccggaagccctgatccccgggaaacgggaaatcgggtcacagcaccggggcaatatgtggggaaatctttatccgcgcagcggttttgtcacccagcaggacggggagaaagcagcagccgtggtggcgcagcgcgtggcagacattatcacccgcaccggtcaggtgcatacctatgtgcccctgaaaggaaaccgccgggatggctactggccgccggaggcagtgacggagaataccggcacgaaaaaccaccaatggcagcgtctgtcaccgggactgaaaaaccgctgtgcagtgtttccggatgagggcggatcgcaggcgcaggacggtaattacgtctgggcactgtggcagccgtacagctgctgtaagcgcatggggcagaaatttctgtacagcacaacgttttaa

SEQ ID NO: 14577 - DNA, 1446 bp, Escherichia coli
atgatgaaagcaaaacgacacactttttttccgccggcgctgacactgatggtgttatgcagcgtaccggtattttctgcccgggctgcgatggatttttccgccggtgcgaatgatatcggctacggcgcgaatgtctccggcgcggtctctgacaaactgtactacaacctggggggcggcacggtgttatcccagccgccggggcgcagtaatctgcaacgcctggggatgagtatgggctggaacagtgatctgatgtgcggcaattttgatatcaaaaccaccgtgggcaaccagctgaacggggtgactgacggctttaagaatctgatgagtgaggtgatccagaatgccaccggagcggtggccagtctgccggcgatggctatccagcgggcgaatcccggtctgtatgaaatgctgaccaacggggtgttgcaggccaatgtggcatttgataaggcgcagctgagctgccagaacatggccaaacggatgatggatttttccgagaacaatcagtggactcaggcagcaatacttgaagaggccgggaacatcatcaacagcggggatggtgatgcggtcgggacgatgaatcaggtggaaaaaaagccggacggcaaggccggcgtgcagtggattgggggtgagaaacggggcggagctggtcagaaagccattgtgccggcacaggattttgcccaggccggttttaatatcatgaacggtctgccggcaaccagcacggcttcggtgccggccggccagtgtaccggggcggcgtgccggcggtttaccaacagtgagcaggcggctcaggtcgtgacacaggtactgggcagcaaatcggtccgcacctgcaccaatccggcggattgtcagagcggcggtgaggcaaaccagccgggcagttcccagccggggaccgggctggcaccggtgctggagaccaccacccgggaaaatctggaacagttgcataaactggtgaacagccggggggcggtcagtgcggcggatttggcgaaactgaaaaccggcagcctgacggtctcccggggcgtgattgaagccctgcgccgggatccggataaaacggcattaacgcagcgtctggccggcgagctggcgatggcggatacgatggagctggcgctgacgatgcgccggatgctgatcaccggtcagggggaaccgaatgccggtaattttccgaaagcccaggagatcggcaaccagtcggttgaccagctggatcgcgaaatcggaatgctgcaaacggaaatggaagtgcgtaaatccattgccaataatgcgatgctgacggtgattgagcgtgatcagcaacggacacaggcgaatccggccacgcagacaccggataatacggatgtgcgtgtacaggggctggagcaaaacagtgacaccggaggacgttaa

SEQ ID NO: 14578 - DNA, 339 bp, Escherichia coli
atgacgaaaggaaaaaacgtgcgccggttatggccggtactgaaagtggccgggctgaccttccttggtatggtggtgttgctggctgtggctcagctggggctgagctattacggtgaggcggacagtctgcgccgggcgttttaccgtgcccgctggttctggctggtctggcggtgtgtgttgtacggggcggtggcggccggattatggaaactgtatcaccacccgaaagtcagcgagacggcccggcgcagtctgaagcgcagcgggctggcgatggccgcctttgtggcggtgagtgaatggtctgtctgggcgggaggtgacggcttatga

SEQ ID NO: 14579 - DNA, 1518 bp, Escherichia coli
atgatgacaaacagctatctcgagtattttctcaccctgctggcctgggtagtcaataacggattgtggtcggtactgaccagcaccgggctgtttgcgctgccgctggcctttaaagttatagggatctggttgaaggtgcgggaagagggggaggatgaaggtaacaaaggctcgctggcgattgtgcgcatcgagaacgcactttacggggcttttgtggtgatcctgttttgctgtgtgccgttgatggaggtgagtgtcagtacgctgcaatttgataccagccgggccaaaacctgcggcagctggacaccggtgaagccggaggagtccggttacagcggtgtggtgtcatcactggataatcagacagccaaaatcccgctgtggtggatgctggtgcataagctgtcaaaaggggtgacacaggcggcggtggccagcattccgtgccggccggatttgcggcaggtgcgttttgaggtacagcacagtaacatcaaaaatccggcgctggccgccgcacttcaggattttaccgatgactgttactcacgtgcactgtatgactggaaagcgaaagatcagggaaaaacacaggacgggcaaattttgcaggatatcacctggataggctctgccacctttatgaaaggagaatatcatcagatacagtcacgaacaccacgtgcgggctttccctgggatgccggccgggatgacgggtatgcgaatgtcaacggtaacggttacccgacctgctatcagtggtggaatgatgcaagtgcagggttactgaagctcgtcaaagagcaggcggatgaagggatgtggttacgtgcccgagctgcgatgaagctgattaataaagactcgaaagagtttgaggaggccatcgtccgccggctggtgagtccggctaacctggatgtctccggtggtcaggtataccggggctacggggggaatgcggatatgactgtgatgaatgatctggcccggatgggcggtgtagtcggtacttcagtggcttcactgggggcattccctgcctttgatacgatgcgccagtccttaccgatggtgcaggggctgatgttaatggcggtgtatattatgatcccgatggtgctgatgttttcggcgtatgaatttaagacggcgataacggtgacgtttgtgatatttgcgctgaattttctgacgttctggtgggagctggctcgctggatagacagctggatgatggaggcgctgtataattccgatacacacagccagtggaatatgaacgggcttcagaacacctctgacgacatcatcatgaatctggtgatgggaacaatgtttttggtgttgcctgctttgtggatgggcgcattggggtgggctggtgttaatttaggaggtgcattatctatggcaatgcagaatggttctaaagtagctcaaaatacaggaggcaaagctggtcaagtggctgaacaagccgtatcgaaaaaaatagcaaaataa

SEQ ID NO: 14580 - DNA, 414 bp, Escherichia coli
atgagcaatgaaacaaccgtttccagaggggagcattggggaataaaagcagcttataaaacaaaatggctaatcaaaaaattaaaagcattcgataagagttgcgtggcaagagtcaaaagcaaaaatacgccgggttggctggggcatattccactggtatccataactctcgcggtcatcgcgttactagcttatttcagtttgtacatcctatttgcttttggaatactggtaattttgttttctgcggtagaaaacattgggaatagcattccggatattataaatactgaagatactgctgattccttaacaaattcagatgataattatggttctgtatatatgaacggaaatcaaggtgatggatggtatacagatgattcaggaaccattaaattggatgattag

SEQ ID NO: 14581 - DNA, 1659 bp, Escherichia coli
atgtcaattcttattaattgtgtaagaatttcgggttttagaggtatcagtgaggttgaggttgagctagggcgagtagcgattttgctgggaacgaataatgccggaaagacctcttttcttaagtctcttcaattagctctgggtgattatcagcgttacttcagtgatgaagattttcacatagatagtactggtagaaaagtcgatgaagttattgtagatttgatgattatacctacaaacagcatgtatattagagctgatgaatttgatgataaatgggttgatgtatttggtgataatattgccttagatgctaatggtaaagactttgttgctattcggacaaaagtacagcctgatgaaataaaaggtgggtttaatactcaaaggtattatctgaatgaatggactgaatttgatatatggaaaaatgtaactcctagcgagaggaaaaaagtaagatcaaaaattgatgctatcccttatatttgtattgaagctcaacgagatatccataatgagcttaaagataagtcatcatatataggtaaagtcttatcatatattaaatatgaggatgatgacgtcgctactcttgaagaaatgatcaattccataaatgaaacagcagtaagtaaaagtgaacctctccaaagtttaaaagattcacttcagggattaaatgagtcttttcttggggcaagctatactgaaataacgccatttcctaaaaaaataagagatttatctaagcaattttcagttcactttggtgatgaagaaaatcattcattttcaatggaatatcatggtactggaacaagaagttgggcttcaatgcttacagtccaatcatttttaggattcatgcatgagcgtcatgataatgaaaataaagcgttacatcctataattggagcagaagaacccgaggcacatcttcaccctaatgctcagaggacattattcaagcaactaacatcctctcaaggacagattatattaagtacacattctccatacttaagtgccatggcagaaattgaagatataaagtcatttatcaaaaaaacggatggtgtaacggttagttgccttaaaaaaagaatagagcatgatgaaaagaacgctataaaaagagaaattatgttaactagaggagaactgcttttctcaagagctttgattttatgtgagggagttactgaagaacaattgataccttcaatgtttgagctttattttggaaaaacaatgtttagtgttggagtcaattgtgtcagtgtaaatggtaaaaattaccctccgtttattaagcttgctagtaacttaggaatacctgtatgcattattagtgataatgatggtaatactaaagatgaaataactcgtcaaattaatcgattggaaaaacaggatggactgaatctaaattcttcttgtttctctttaaattttctagcaaaaaggcgtcaactggaagagttgtctgatacggatataattgcaaaaatgcgtgattcaaaggctagctatgcaggatatttggggccgattctggttgaaaatgctaatcgaaaggaatttaaagaactattaccatcatcggttataacagcatttgatatggttaaagggtggcttgaattatga

SEQ ID NO: 14582 - DNA, 1329 bp, Escherichia coli
atggaaaacgctaaaatgaactcgctcatcgcccagtatccgttggtaaaggatctggttgctcttaaagaaaccacctggtttaatcctggcacgacctcattggctgaaggtttaccttatgttggcctgaccgaacaggatgttcaggacgcccatgcgcgcttatcccgttttgcaccctatctggcaaaagcatttcctgaaactgctgctactggggggattattgaatcagaactggttgccattccggctatgcaaaaacggctggaaaaggaatatcaacaaccgatcagcgggcaactgctactgaaaaaagatagccatttgcccatttccggctccataaaagcacgcggcgggatttatgaagtcctggcacatgcagaaaaactggctctggaagcggggttgctgacgcttgaagatgactacagcaaactgctttctccggagtttaaacagttctttagccaatacagcattgctgtgggctcaaccggaaatctggggttatcaatcggcattatgagcgcccgcattggctttaaggtgacagtgcatatgtctgctgatgcccgggcatggaaaaaagcgaaactgcgcagccatggcgttacggtcgtggaatatgagcaagattatggtgttgccgtcgaggaaggacgtaaagcagcgcagtctgacccgaactgtttctttattgatgacgagaattcccgcacgttgttccttgggtattccgtcgctggccagcgtcttaaagcgcaatttgcccagcaaggtcgtatcgtcgatgctgataaccctctgtttgtctatctgccgtgtggtgttggtggtggtcctggtggcgtcgcattcggacttaaactggcgtttggcgatcatgttcactgcttttttgccgaaccaacgcactccccttgtatgttgttaggcgtccatacaggattacacgatcagatttctgttcaggatattggtatcgacaaccttaccgcagcggatggccttgcagttggtcgcgcatcaggctttgtcgggcgggcgatggagcgtctgctggatggcttctatacccttagcgatcaaaccatgtatgacatgcttggctggctggcgcaggaagaaggtattcgtcttgaaccatcggcactggcgggtatggccgggcctcagcgcgtgtgcgcatcagtaagttaccaacagatgcacggtttcagcgcagaacaactgcgtaatgccactcatctggtgtgggcgacgggaggtggaatggtgccggaagaagaaatggaacaatatctggctaaggggcactaa

SEQ ID NO: 14583 - DNA, 732 bp, Escherichia coli
gtggcttattacagcattggtgatgttgctgaacgttgcgggattaatcctgtcactctccgggcctggcaacgccgctacggtttgttaaaaccacagcgcagtgaaggcggacaccgactctttgatgaagaagacatacaacgcatcgaagagatcaagcgttggataagtaatggcgttcctgtaggcaaagttaaagcattactggaaactaccagccaggatacgcaagatgactggagccgcctgcaagaagagatgatgtcaattcttcgtatggctaatccagccaaactacgcgcgcgaattatttcactgggtcgagagtacccagtagatcaattgattaatcatgtttaccttcctgttcgccagcgtctcgtgcttgatcacaacacctcccgcattatgagcagtatgtttgacggcgcattaattgaatacgcagcggccttacttttcgaaatgcgccgtaagcccggtaaagaggccattctgatggcgtggaatgttgaagagagagcacgattgtggctggaagcatggcgtttatcattgtcaggatggcacatttctgttcttgctgatcccattgaatcgccgcgcccggaactgttcccaacgcaaacattgattgtctggacaggcatggcaccaacgagaaggcaaaacgaacttttacaacactggggtgagcaaggttataaagtcatctttcatgccccctaa

SEQ ID NO: 14584 - DNA, 405 bp, Escherichia coli; identical to SEQ ID NO: 2991

SEQ ID NO: 14585 - DNA, 1032 bp, Escherichia coli; identical to SEQ ID NO: 4033

SEQ ID NO: 14586 - DNA, 444 bp, Escherichia coli
atgttaaaaaatctattaaatacagaggtcgttcaggtcgtggaacaggtcaaagactggcgggaagccgtggcgatttcatgccgaccgttgattgaaaacggttctatcgaaccgcgttatgttgatgcgatctatcactcgcacgacactatcggtccgtactatgtggttggccctggtattgcgatgcctcatgcgcgcccggaagagggggctaacaagctgtcattagcactgaccctgatcccttcaggtgtgaattttgatgccgatgaaaacgatccagtgaaattactgattgtgctggctgcaaccgacagtaccagccacattgaagcgatttctcaactcgccaagttattcgataacgaaaaagacatacaggctattttgacggccaaaacgacgcaggacattttgtctgttattgcgcgctattaa

SEQ ID NO: 14587 - DNA, 288 bp, Escherichia coli
atgaaaattacagtggtttgcggtaacggcttaggcaccagcctgatgatggaaatgagcattaaaagcattttgaaggatttgtccatcagcgctgatgttgatcatgtcgacctgggctccgcgaaagggacgccgagtgatatctatgtcggcaccaaagatattgccgagcagttagtcgcgcagtctgtcgcaggcaaaatcgtcgccctggaaaatatgattgataagaaagccatgagagaacgtttgtccgtggcattaaccgaattaggcgcactgtaa

SEQ ID NO: 14588 - DNA, 1257 bp, Escherichia coli
atggatttctttcgttttttgatgagcgatgtactttccgaacccgcggtgctggtcggtttaatcgccctgattggcctgattgcacagaaaaaaccggtaaccgaatgcattaaaggtaccgtcaagaccattatggggtttgtgattttaggcgcaggggcgggtttagttgtgtcgtcactgggtgacttcgcaaacattttccagcatgcctttggtattcagggtgtcgtgccgaacaatgaagccattgtttccgtagcgcagaaaagcttcgggaaagaaatggcgatgattatgttctttgcgatggttatcaacattatgattgcccgtttcacaccgtggaaatttatcttcctgaccggtcatcacacgttgtttatgtcgatgatggtagcggtaattctggcaacagcaggcatgaccggcgttacgcttatagccgttggctctttggttgttggcgtggcaatggtctttttcccggctattgcgcatccgtacatgaagaaagtgaccggttctgatgacgttgccatcggccacttctcaacattatcttatgtattggccggtttcatcggcagcaagtttggtaataaagagcactcgactgaagacatgaatgtgccgaaaagtctgctgttcttgcgcgacacgccggttgctatctcttttaccatgagcataattttcctggtgacgtgcctgtttgcgggtgcagatgcggtgaaagagcttagcggtggtaaaaactggttcatgttctctatcatgcaatccattaccttcgcagctggcgtgtacatcattctgcagggtgtgcgcatggtgattgcggagattgtcccggcattcaaaggtatttcagacaagctggttccgaatgccagacctgctctcgattgcccggtcgtcttcccttacgcacctaacgctgtactggttggtttcctgagtagctttgctgcaggtttaatcggtatgttcacgttgtatctgctgaacatgatcgtgattattcctggtgtggtgccgcacttcttcgtaggtgcagctgcaggggtattcggtaatgcaacgggtggacgtcgtggtgcgattttgggtgccttcgctcagggcttgcttattaccttcctgccagtattcttattgccggtgctgggtgatattggttttgctaacaccaccttcagtgatgctgactttggcgcactgggtattttgttagggattatcgttcgctaa

SEQ ID NO: 14589 - DNA, 1014 bp, Escherichia coli
atgagtacgcgtattaatttgtggcgggcgctttttggcgagaaacctcgtatcttgctggaaaatagtgattttactgtcacgtcttttcgatatgacagcggtgtcgaggggcttaaaattgcaaacagtcgtggacatttgattattcttccctggatggggcagatgatttgggatgcgcaatttgatggacacggcctcaccatgtgcaatatgtttcgccagcctaaaccggcgacagaggtgatagagacctatggctgttttgcttttcattcaggtttgctggctaatggctgcccatctgcggaagatactcatctgctacacggtgaaatggcctgtgccgcgatggatgaagcatggctggaattagacggagatatgttacgccttaacgggcgttacgagtatgtaatgggtttcggtcatcattatctggctcagccaacagtggtccttcacaaatcctctacactgttcgatattaagatggccgtaaccaatctggcttctgtagatatgccactacaatatatgtgccacatgaattatgcatatataccaaatgctacattcagccagaatatcccggacgaaatattaagattgcgtgaatcagtgccttcgcatgttaatcccaccgctcagtggctggcgtttaatcaacggattatgcagggagaagcctctctgtcgacgctgagtcaaccggaattttatgatccagaaattgtcttctttgcagacaaactggacgcttatacagatcagccagagtttcgcatgatctctcccgatggcaccacgtttgttactcgtttctacagtgctgaactaaattatgtgacacgctggatcctttataacggagagcaacaggtagccgcctttgcattacctgcaacctgtcggcctgaggggtatcttgccgcgcaacgtaatggcacgctgattcaggttgcaccgcagcaaacgcgcacttttacagtcaccacaggaattgaataa

SEQ ID NO: 14590 - DNA, 1218 bp, Escherichia coli
atgcctctttcccgacgtaattttattcagaatgccgttttaggaatatctgccgcagggctgtcagctgcaccggcccttgccaaaaatatctcatcttcaacggcacatatcatcagtaaaacgtctggacatgctgatacatcgaccagcaaatctcttcatatcatcagtctggacagactggagacttcagcaaaagatgtgatgacggaagctgcgtatgcatatattgctcatggtgctggagatgagtggacgtatcatgagaaccgcagggcattcagtgattatcctttgttacctcaccgactcagtggagttgctgcccacagcattgatatccggactgaccttttgggccatcatctggaacatcccctgctgatagcacctatgggcgcgcatatgttcgtccatccggaaggggaggtgattgctgcagcgggtgcagaaaaggccggggcactttatgaatcatcaggggcatccaaccgctctctggaggatattgcaaaagccagtaaaggacctaaatggttccagctgtattttaacgcggatgctggtgtgacccgaagtttactggagcgtgcaaaagcggcaggctattcagccattattatcacagcggatgcgcttggtcccgggacaagtgatgcttttctcagcatgagctcgcctttccctgcaggagcgacgttcggtaatcatgacccccgttacggtggcaaaggtgatttttttaaccaaaaagttgagctgaccccggctgatattgagtttgtaaaaaaaatcaccgggctgccagtcattgtcaagggcatcctcaggggtgaggatgcagtggttgccattgatgcaggagcagatgccatccaggtgtctaatcatggtggtcgccagattgatggtgttccttctgccatcagccagttgcaggaagttgctgcaagagtcgggcacaaagttccggtcatttttgacagcggtattcgcagggggattgatgttgtaagggctatctctcttggggcaacggctgttgcggtcggacgtcctgttctttatggcatcgcagcaggtggtgtcgggggcgttgccggtgtcattgagcacctgaagacggaactgaggacggcaatgttactgagtggtgctcgtacacttaaggatttggctcagggctttatcagaaacaaggagactgagcattga

SEQ ID NO: 14591 - DNA, 1644 bp, Escherichia coli
atgagagttaacctactgatagcgatgataatctttgcgctaatctggcctgcaaccgcgctcagagcggcagtgagcaaaacaacctgggcggatgctccggcacgcgagtttgtgtttgtcgaaaacaactcagacgacaactttttcgtcactcctggcggggcgctggatccgcgcctgaccggtgccaaccgctggaccggtttaaaatacaatggttcaggaaccatctatcagcaaagcctcggctacattgataacggttacaacaccggcctttataccaactggaagtttgatatgtggctggaaaattcaccagtttcatctcctttaactggcttgcgctgcatcaactggtacgcagggtgtaatatgaccaccagtcttatcctgccgcaaaccaccgacgccagtggattttatggcgcgacggtgaccagcggcggcgcgaaatggatgcacggcatgttgtcagacgcgttttaccagtatctgcaacaaatgcccgtcggcagcagctttacaatgaccatcaatgcctgccagacctctgtgaactatgacgccagcagcggcgcacgctgtaaggatcaggcctccggcaactggtatgttcgcaacgtcacccatacgaaagcagcaaatctgcggttgataaatacccactcgctggcggaagtatttatcaacagcgacggagtaccgactctgggcgaagggaatgccgactgccggacgcaaaccatcggcagccgttcaggattaagttgtaagatggttaactataccctgcaaacgaacggactcagcaacacctcaatccatatattcccggcgatcgccaactcgtcgttagcctcggccgtcggggcgtacgatatgcagttcagtctgaatggcagttcatggaaaccggtgagcaatactgcctattactacaccttcaacgagatgaagagcgcagactcgatctatgtgttcttctcgagcaacttctttaagcagatggtgaacctcgggatcagcgatatcaacaccaaagatctattcaactttcgctttcagaacaccacatcaccggagtctggctggtatgaattttctacctccaacacgctgattatcaaaccccgtgatttcagcatcagtattatctccgatgaatatactcagacaccgtcgcgggagggatatgttggcagcggcgagtcggcactcgatttcggctatatcgtaaccaccagcggtaaaacagctgccgacgaagtgctgatcaaggtgaccggacccgcgcaggtgattggcgggcgctcctattgtgtcttcagctccgatgacggtaaggcgaaagtaccgttcccggcgacactttcctttattacccgcaacggagctacaaaaacctacgatgccgggtgcgatgatagctggcgggatatgaccgatgcgctgtggttgaccacaccgtggactgatatctctggcgaagtggggcagatggataagaccacagtcaaattttcgattccaatggataacgccatttctctgcgtacggtagatgataacggctggtttggcgaagtcagcgcttcaggagagattcatgttcaggcgacgtggcgtaacattaactaa

SEQ ID NO: 14592 - DNA, 966 bp, Escherichia coli
atgaaacagcgctctcttctaaaaaatgctccagatattaatcgcattatgagtaataatcatcatgcccctgaacatcagcccgtatcacctatggttggtgatttaaaacgtcaactgagttcattaaccggtaacagcataactttgccagtatgcggacgtaatgttaactttaagttagagacaattcccgcagataaagttgaaatggcaacaatggtatggctaggtaatgaacgcgatcaagatttattaaatgaatcctctctagccgatttaatcccatcttttctaacgtctggacaacaaaatccagctttcgccagaaaagtgtctggaatcgttgaagtcgctgacggctcacgtagaagaaaagcagcgatattaacaggatgtgactatcgcgtcttaataggtgatctcgacgatgaacagatgcattggttatcccaaattggtaacgattataggcctattagtgcatacgaaagaggaaagagatacttacgcaagctaaatgactttgatggtaacgttaaagcattagccgaggctgaaaatatagacagaaatattatcactcgctgtattaatacagctggtctaccaaaagatatattagctatcttcaatcatccaggagaactgtcagctcgtgctggagattctttgtttaaggtctacaaaaaaaacatggctgccatgagcaatgctgctcatcatcttctggcaattaaaaaaaacggcgaggatttagaagcttcacggattatacaaatattatctgactctgttctggttggcgacgaggaaaaaacaaaagacgagaaaaaatatggggaagggatcacggctagatataaaggtaattttgtaactataaaaattgatagccgaaaaatatctaaagaaatactaagcagaattgagttgttactagaggaacaatctactgataattaa

SEQ ID NO: 14593 - DNA, 1167 bp, Escherichia coli
atgtctttgaaaaagttattgcaagattgtgttacgagaggtcaagaaatgacccaagcaattgctatcgctcaattcggtgatgatagtcctgaagctcggcgtatcacccgccgatggggtataactgaagtagcagatttaattggtgtaactcctcaagcaattagagatgctgagaagagcgggcgtttacctgcacctgactttgaaatgagaggaagaattgaacgtcgtgctggttataccatagatcaaatcaacagtatgcgagcagtttttggcaacccaaaccaacgaccacaagataaaaaccctgttgtgcttgccgttatgtcacacaaaggcggcgtttataaaacatcgtctgcggtacatcaagctcaatggttagcattacaaggtcatcgtgttcttttggttgaaggtaacgatcctcaaggcacggcctctatgtatcacggttatgttcctgatttacatatccatgccgaggatactttactgccattttacttaggagaacgcgataacgctgaatatgctataaagccaacatgttggcctgggctagacattatccctagctgcctagctttacatcgtatagaaacagatctcatgcaatatcatgctcagggtaaattgcctcatcctccacaccttatgctgcgcgcagctattgaatcagtttgggataactacgatgttatcgttatagatagtgctccgaacctcggtacaggaaccattaacgttgtttgtgccgctgacgttattgttgttgctacacctgcagaattatttgattacgcttctgttctacagtttttcacaatgcttctcgatctattggaaagcgttgacctaggtggatttgagccaaccgttcgcttacttctgactaaatatagtctcactacagggaatcaatcacgatggatggaagaacaaataagaaatacatggggatcaatggtattacgtcaggttgtacgcgttaccgatgaagtaggtaaaggccagataaaaatgagaacagtatttgaacaagcagcaaaccaacgttcaacattgaatgcatggagaaatgctgtttctatatgggaccctgtttgccgagaaatttttgatgatctaataaaacctcgctgggagaacgaataa

SEQ ID NO: 14594 - DNA, 1167 bp, Escherichia coli; identical to SEQ ID NO: 14593

SEQ ID NO: 14595 - DNA, 177 bp, Escherichia coli
atgatcacttccttgcatactcagacaagtgcctctaacaccgcaacggcgaccagcgtatccccgctggacccgtcaggctcctcaaaaacgaaattttccaaaaccagaaccgatatttatcagatcgttaccgacctcatcattaccacactggaagtaggcgttaaaccctga

SEQ ID NO: 14596 - DNA, 456 bp, Escherichia coli
atgaccgccattttttataccatcctggagaaggaaaacgacaccggagaaattgaccatatcccgatgctgaaaacctttgtcgtgtttaatgtcgaacaaattgatggcctctcactgacggcagataccgttgccccacaagcgacgtttgacgcgttgccacaggctgaaaatctgttctgtaacagcggtgctaacatcattgagaaaggacaaaacgcctttttcatgccatcaacagatgaggttttgttacctgaacgtcgttttttttccgatgccgctagcttttatgccacggatctgcatgagattgttcactggagcgatggcaaaagtcgcctgaaccgcgaaatgaaaggaagatttagcagtgaaaattatgcatttgaagagttgatcgccgagctgggaagcgtgttcctgatggcggatctggggattgtcggatag

SEQ ID NO: 14597 - DNA, 1065 bp, Escherichia coli
atgcaaaacgaccgccaatcttctgaaaccgtgattctgggtgtcgatacccatcttgatattcatgtcggcgctgttatcagtcaggcaggtaaactgcttggaactcacattattcaaacaaatcaagcgggctatctggaactacttgattgggcacgttctttcggtagcctcgaacgagcaggcatcgaaggaacaggaacatatggtgccgcattaacacgctatctcatcaagaatagcatttatgttgttgaagttaaccggccagatcgctcaaaacgccgccttgaagggaagtcagatccactagatgcagaaaatgcagcccggacagtgctttcagggagcagcaaggccataccaaaaatgcagtcaggtgcatgtgaggctctccggattattagtgttgcccgacgtagtgcagtaaaagcctgtacgcaggcgattaatcagcttcgtgcactgctggttagtgccccgcaagatgttcgcgacaaactctggaaatcgaaaccacacgaatgcgtaaccgcctgcattaacagcgaagtgtcagagcactcaccgttacgtatagccttgtgcagtacgcttcgaagccttgcgaaacgatggatggccctgactgaagagttgaatgaactagacgaatcactagataaactgacccgcaagtatgccagtaaccttcgtagccagtttggcgttgggccacagacggctgcaacactgctggcagttgcgggtgataaccccgaacgtttaaaaaatgaagcggccctggcatcgctctgtggcgtaaatccactgccagcatcatcagggaaaacagtaaggcacagattaaaccgtggtggctcacgtgaagcaaacaatgccctgtggacaatagcccttgtacgtatgcgtagcgatccgcgcacgagaatctatgtcgacagacgaactggtgaagggctatcgactaaagagatcctgagatgcctaaaacgctacatcgtccgtgagctctatccattgattttatcggacctcgcatatgccaatcgccgctcttga

SEQ ID NO: 14598 - DNA, 135 bp, Escherichia coli
atgattccgtctctgaattacgccgtattaacagatgccctgcgtgcgctgaaagaagacaatattcaccatcgtgaatctctgggactcaccctcgacgaaatgaataccctcaggacaacactggtgctttaa

SEQ ID NO: 14599 - DNA, 189 bp, Escherichia coli
atgacatcacatcagttattacgcctgaaacaggtcgaagaaaaaaccggtctgaaacgctcgcaaatctatctgtatatgaaagggggctcttttcctcgttcaataataaaggttggctctgccagcgtagcctggctcgaatctgaaattgatgaatggatcaacctcaaattagccaaccgctga

SEQ ID NO: 14600 - DNA, 4131 bp, Escherichia coli; identical to SEQ ID NO: 11798

SEQ ID NO: 14601 - DNA, 3075 bp, Escherichia coli
atgccaacaataaccactgcacaaattaaaagcacactacagtctgcaaagcaatccgctgcaaataaattgcactcagcaggacaaagcacgaaagatgcattaaaaaaagcagcagagcaaacccgcaatgcgggaaacagactcattttacttatccctaaagattataaaggacagggttcaagccttaatgaccttgtcaggacggcagatgaactgggaattgaagtccagtatgatgaaaagaatggcacggcgattactaaacaggtattcggcacagcagagaaactcattggcctcaccgaacggggagtgactatctttgcaccacaattagacaaattactgcaaaagtatcaaaaagcgggtaataaattaggcggcagtgctgaaaatataggtgataacttaggaaaggcaggcagtgtactgtcaacgtttcaaaattttctgggtactgcactttcctcaatgaaaatagacgaactgataaagaaacaaaaatctggtagcaatgtcagttcttctgaactggcaaaagcgagtattgagctaatcaaccaactcgtggacacagctgccagcattaataataatgttaactcattttctcaacaactcaataagctgggaagtgtattatccaatacaaagcacctgaacggtgttggtaataagttacagaatttacctaaccttgataatatcggtgcagggttagatactgtatcgggtattttatctgcgatttcagcaagcttcattctgagcaatgcagatgcagataccggaactaaagctgcagcaggtgttgaattaacaacgaaagtactgggtaatgttggaaaaggtatttctcaatatattatcgcacagcgcgctgcacaggggttatctacatctgctgctgctgccggtttaattgcttctgtagtgacattagcaattagtcccctctcattcctgtccattgccgataagtttaaacgtgcaaataaaatagaggagtattcacaacgattcaaaaaacttggatacgatggtgacagtttacttgctgctttccacaaagaaacaggagctattgatgcatcattaacaacgataagcactgtactggcttcagtatcttcaggtattagtgctgctgcaacgacatctcttgttggtgcaccggtaagcgcactggtaggtgctgttacggggataatttcaggtatccttgaggcttcaaagcaggcaatgtttgaacatgttgccagtaaaatggctgatgttattgctgaatgggagaaaaaacacggtaaaaattactttgaaaatggatatgatgcccgccatgctgcatttttagaagataactttaaaatattatctcagtataataaagagtattctgttgaaagatcagtcctcattactcaacaacattgggatatgctgataggtgagttagctagtgtcaccagaaatggagacaagacactcagtggtaaaagttatattgactattatgaagagggaaagcggctggaaagaaggccaaaagagttccagcaacaaatctttgatccattaaaaggaaatattgacctttctgacagcaaatcttctacgttattgaaatttgttacgccattgttaactcccggtgaggaaattcgtgaaaggaggcagtccggaaaatatgaatatattaccgagttattagtcaagggtgttgataaatggacggtgaagggggttcaggacaaggggtctgtatatgattactctaacctgattcagcatgcatcagtcggtaataaccagtatcgggaaattcgtattgagtcacacctgggagacggggatgataaggtctttttatctgccggctcagccaatatctacgcaggtaaaggacatgatgttgtttattatgataaaacagacaccggttatctgaccattgatggcacaaaagcaaccgaagcgggtaattacacggtaacacgtgtacttggtggtgatgttaaggttttacaggaagttgtgaaggagcaggaggtttcagtcggaaaaagaactgaaaaaacgcaatatcggagttatgaattcactcatatcaatggtaaaaatttaacagagacagataacttatattccgtggaagaacttattgggaccacgcgtgccgacaagttttttggcagtaaatttactgatatcttccatggcgcggatggtgatgaccatatagaaggaaatgatgggaatgaccgcttatatggtgataaaggtaatgatacgctgaggggcggaaacggggatgaccagctctatggcggtgatggcaatgataagttaattggggggacaggtaataattaccttaacggcggtgacggagatgatgagcttcaggttcaggggaattctcttgctaaaaatgtattatccggtggaaaaggtaatgacaagttgtacggcagtgagggagcagacctgcttgatggcggagaagggaatgatcttctgaaaggtggatatggtaatgatatttatcgttatctttcaggatatggccatcatattattgacgatgaaggggggaaagacgataaactcagtttagctgatatagatttccgggacgttgcctttaagcgagaagggaatgacctcattatgtataaagctgaaggtaatgttctttctattggccacaaaaatggtattacatttaaaaactggtttgaaaaagagtcagatgatctctctaatcatcagatagagcagatttttgataaagacggcagggtaatcacaccagattctcttaaaaaagcatttgaatatcagcagagtaataacaaggtaagttatgtgtatggacatgatgcatcaacttatgggagccaggacaatcttaatccattaattaatgaaatcagcaaaatcatttcagctgcaggtaacttcgatgttaaggaggaaagatctgccgcttctttattgcagttgtccggtaatgccagtgatttttcatatggacggaactcaataactttgacagcatcagcataa

SEQ ID NO: 14602 - DNA, 435 bp, Escherichia coli
gtgttcgacggtgagctgagttttgccctgaaactggcgcgagagatggggcgacccgactggcgcgccatgcttgccgggatgtcatccacggagtacgccgactggcaccgcttttacagtacccattattttcatgatgttctgctggatatgcacttttccgggctgacgtacaccgtactcagcctgtttttcagcgatccggatatgcatccgctggatttcagtctgctgaaccggcgcgaggctgacgaagagcctgaagatgatgtgctgatgcagaaagcggcagggcttgccggaggcgtccgctttggtccggacgggaatgaagttatccgcgcttccccggatgtggctgaaatgacggaggatgacgtaatgctgatgacagtatcagaagggatcgcaggaggagtccggtatggctga

SEQ ID NO: 14603 - DNA, 423 bp, Escherichia coli
atgttcctgaaaaccgaatcatttgaacataacggcgtgaccgtcacgctttctgaactgtcagccctgcagcgtattgagcatctcgccctgatgaaacgacaggcagaacaggcggactccgacagcaaccaacaggttgctttggcagaccttatcagaaccggtgcttttgtggtggcgatgtccctgtggcataaccatccgaagaagacgcagatgccgtccatgaatgaagccgttaaacagattgagcaggaagtgcttaccacctggcccgcggaggcaatttctcatgctgaaaacgtggtgtaccggctgtccggtatgtatgagtttgtggtgaatgatgctcctgaacagacagaggacgccgggcctgcagagcctgtttctgcgggaaagtgttcgacggtgagctga

SEQ ID NO: 14604 - DNA, 1041 bp, Escherichia coli
atggctacatcgacagtaattcctgaagacatcaaaacgctaaaatccgacgttagcaaattaaaaaacgatcaaggaagctacgcaacaaaatcatatgtagacagcaaagatgaaaccgttggtgactggtctgcttcatggtatcagcaggtattgccaactagcggagctatatttgggagaaaactccgctcaactcaccggacggcaggtgttgaggatgcgtattgcgaactatacctcaaaaaatggatagacagtccaggtaacgcaatggcgcgccttaacctgaacgataacgggacaaacatttgctgggactttaccaacctttatggcggtacgatgatttttcccggtgacagcggatacctcaaaatgggtaactgccttatgtcatacagcaagcgtggaagtaacgcgcttattaaatttgattacaccgacacattacagatcaaatatgccaatcatgggtcaaccatgacattaaacacacagggaaccgcttatgctggtgttactgctcaattgtggggcaactccagccgtcctgttgtttatgaagtcggtgttgatggtggcgcttatatgttctatgcgcagaaaaataccgataacacctatatgttaagcgttaatggtgcatgtcatgccaccgcatttaaccagcattccgaccgggatctgaaagacaacattcaggtgatcgataatgcaaccgaccgcatccgtaaaatgaacggctatacatacacgcttaaagaaaacggtatgccctatgctggtgtcattgcacaggaagctctggaagcaatcccagaagttgtaggttccgcagtgaaatatcaggacggtgcaagcggatcggaaggtgaagaaggtgaacgttattacacagtagattattctggtattactggcttgcttgttcaggtagccagagagtcagacgacagaataacagcactggaagaagaaaacgcagaattaaaacaaagattatctgcaattgaggcggcgcttgcgtctaaataa

SEQ ID NO: 14605 - DNA, 681 bp, Escherichia coli; identical to SEQ ID NO: 11860

SEQ ID NO: 14606 - DNA, 672 bp, Escherichia coli
gtggataaggttttagattcagcgatcctttcttcggcaaataaaagaaagggtatccttgccattggcgcgcatcctgacgatatagaattaggctgtggcgcatcgctagctcgccttgcgcaaaaaggaatttatattgctaccgtggtgatgactaccggtaattctggcgtagatggaataatcgatcgccacgaagaatcacgcaacgctctaaagatattaggatgccaccaaactattcatcttaattttgctgacacccgcgctcatttacagctcaatgatatgatttctgccctggaaaacatcataaaaaatcaaattccctctgatgttgaaattatacgtgtatataccatgcatgatgctgaccgccatcaggatcatcttgcagtctatcaagcctcaatggttgcctgtcgcgctattccgcaaattctcggctatgaaacgccaagtacctggctttcatttatgcctcaggtttttgaatccgtgaaagaagaatatttttctcttaaactgactgcgttaaaaaaacataaaagtcagagccagcgagattatatgcgcccggagcgtctgcgtgcagttgctcaatttcgcgggcaacaggtcaatagcgatctgggtgaaggttttgttattcataaaatgattctttga

SEQ ID NO: 14607 - DNA, 219 bp, Escherichia coli
atggacacagtggctatggaatatgctgaatttgatcccagttttttacagcatactcaagggaagacgacgttagatattcatcgtttcaatcaaggaaattcaactccagcaggaaagtactatgctgatgtttatcttaataataaatggaaagggcactgccttagtgtttcttacgccatttgtcacattaacatttttggtgtttacacctga

SEQ ID NO: 14608 - DNA, 357 bp, Escherichia coli
atgcgtaaagcctgttttactgagcatcagatcatcgccgtaattaagtcggttgaaaccgggcggactgttaaagttgatgactttaaccgtgagacattgtcgattaaaatcattctgaatctgccagatctgcgaatgatccgtgtactcgacaggatcgcggcaaactgcggctacccgatcatgctgaacatgaataatggtccagaatttatctcactgatactggctgaatgggcagaaaaacatgcagtaaaacgggattttatccagccaggcaagccgacgcaggacactttcattgaatactttaaccggacataccgtacatacgcgatttttatatattcatga

SEQ ID NO: 14609 - DNA, 1641 bp, Escherichia coli
atgtgggatgcggtgctggatattggtcgtcctgataccgctcaggagatgctgattaaggcagaggctgcgtttaagaaagcagacgacatctggaatctgcgcaaggatgattattttgttaacgatgaagcgcgggcgcgttactgggatgatcgtgaaaaggcccgtcttgcgcttgaagccgcccgaaagaaggctgaacagcagagtcaacaggacaaaaatgcgcagcagcagagcgataccgaagcatcacggctgaaatataccgaagaggcgcagaaggcttacgaacggctgcagacaccgctggagaaatataccgcccgtcaggaagaactgaacaaggcactgaaagacgggaaaatcctgcaggcagattacaacacgctgatggcggcggcgaaaaaggattatgaagcgacgctgaaaaagccgaaacagtccggcgtgaaggtgtctgcgggcgatcgtcaggaagacagtgctcatgctgccctgctgacgcttcaggctgaactccggacgctggagaagcatgccggagcgaatgagaaaatcagccagcagcgccgggatttgtggaaggcggagagtcagttcgcggtactggaggaggcggcgcaacgtcgccagctgtctgcacaggagaaatccctgctggcgcataaagatgagacgctggagtacaaacgccagctggctgcacttggcgacaaggttacgtatcaggagcgcctgaacgcgctggcgcagcaggcggataaattcgcacagcagcaacgggcaaaacgggccgccattgatgcgaaaagccgggggctgactgaccggcaggcagaacgggaagccacggaacagcgcctgaaggaacagtatggcgataatccgctggcgctgaataacgtcatgtcagagcagaaaaagacctgggcggctgaagaccagcttcgcgggaactggatggcaggcctgaagtccggctggagtgagtgggaagagagcgccacggacagtatgtcgcaggtaaaaagtgcagccacgcagacctttgatggtattgcacagaatatggcggcgatgctgaccggcagtgagcagaactggcgcagcttcacccgttccgtgctgtccatgatgacagaaattctgcttaagcaggcaatggtggggattgtcgggagtatcggcagcgccattggcggggctgttggtggcggcgcatccgcgtcaggcggtacagccattcaggccgctgcggcgaaattccattttgcaaccggaggatttacgggaaccggcggcaaatatgagccagcggggattgttcaccgtggtgaatttgtcttcacgaaggaggcaaccagccggattggcgtgggaaatctctaccggctgatgcgcggctatgccaccggcggttatgtcggtggcaccggaagtccggcgcaaatgcggcgttcagagggtatcaggtttgagcagaacaacaacgtggtgattcagaacgacggtacgaatggtctgccaggtccacagatgatgaaggcggtgtatgacatggcccgcaagggtgcccgtgatgaaatccaggcacagatgcgcgatggtggtctgttctccggaggtggacgatga

SEQ ID NO: 14610 - DNA, 882 bp, Escherichia coli
  misc_feature (818)..(842): n is a, c, g, or t
atggaaggtaaattaattttttgttccgatgcaatactgcggtttcagtccgattacgatgaaacctcggcggttccattgctatccatccagaacacgatagccaataccgatcccttctttcttcttcgcttcttccaccatactgttctgattgaagaaggaacatcgctggcaagtatctttctggcaatagaactgtggaaggcactgttagcagcttatctggacagagatgttggtgcttatatagatgaggtaagaaaaccgtccgggccaacgacatgggatattgaatggattgggattgaccgtcgtagctcggtttatcgcgcttacaagcgtcaggatatggaagaaggggaagatttttcgacctattttaatcgtgagcggttcccgactgatgagtttgacatagaaagtagctgcgatgcttcaggtttcattaaaggtgataaagaacgctggagtatcagcggtgatgttcacgaaattaaaaatcttcctgtaatcctctatagcaaacaggcgttgatgacgtcggcaaaggacggcctgttgaagaagaatgtatcaggggtgaagagttccaagcatggctgctttgtttatggcgatacctcgttttctttcagtgaggtaatggaagctatcttcatcagtgggctgttcttctatgcgccaatagacgccgccagtagtcttgatgaactgaaagtgagtttggctgggctggaagaagaactggccgaagtaccaaaagtggattcgaatggcaatgaaacagataaagaacctactatagtcgtagccgnnnnnnnnnnnnnnnnnnnnnnnnncaacaatctaccacttaatgattacgaagctataagttga

SEQ ID NO: 14611 - DNA, 1041 bp, Escherichia coli
gtgaacaccgttggcaaatcggcattcgtggaggccgtcggtcgggcgagcgatgatgcggaaggttacctggattttttcaaaggcaagataaccgaatcccatctcggcaaggagctgctggaaaaagtcgagctgacggaggataacgccagcagactggaggagttttcgaaagagtggaaggacgccaacgataaatggaatgccatgtggggcgtcaaaattgagcagaccaaagacggcaaacattatgtcgcggggcttggcctcagcatggaggatacggaggaaggcaaactgagccagttcctggttgccgctaaccgtatcgcgtttattgacccggcaaacgggaatgaaacgccgatgtttgtggcgcagggcaaccagatattcatgaacgaagtgttcctgaagtatctgacggctcccaccattaccagcggcggtaatcctccggcattttccctgacaccggacgggcggctgacggcgagaaatgctgatatcagcggtaacgtgaatgcgaactccgggacgctcaataatgtcacggtaaatgaaaactgtacgattaagggcatgctggaggcgaaccaggtcagaggtgacttcgttaaaactgtatccaaatcattcccgaaaaaggctggtacgtggggtaacacggaaacaccaaacgggacggttacagtcaccatttacgatgatcataactttgaccgccaaatcattattccgcccattatttttaacggtgtggcgtatgacgatccggggagcggtaataacccgggaggtacgcgatacacgggttatggttttgaagttcgcaaaaatggcgtattaatcgcatccagagaaactaaaggagccattcccggtagttacagtgcggttattgatatgccgagtggtggtggtaacgtcactctggagtttaagattttccagaaaggcaatcagggcgcaggaaacatcacagactgtacggtgattgtgaccaaaaaagctgcttccggtatcagtatccgttga

SEQ ID NO: 14612 - DNA, 573 bp, Escherichia coli
gtgaaaacgggggctgaagccatccgcgcactggccacacagctcccggcgtttcgtcagaaactgagcgacggctggtatcaggtacggattgccgggcgggatgtcagcacgtccggattaacggcgcagttacatgagactctgcctgatggcgctgtgattcatattgttcccagagtcgccggggccaagtcaggtggtgtattccagattgtcctgggagctgccgccattgccggatcattctttactgccggagccacccttgcagcatggggggcagccattggggccggtggtatgaccggcatcctgttttctctcggtgccagtatggtgctcggtggtgtggcgcagatgctggcaccgaaagccagaactccccgtacacagacaacggataacggcaaacagaacacctatttttcctcactggataacatggttgctcagggcaatgttctgcctgttctgtacggtgaaatgcgtgtggggtcgcgggtggtttctcaggagatcagcacggcagacgaaggggacggtggtcaggttgtggtgattggtcgctga

SEQ ID NO: 14613 - DNA, 630 bp, Escherichia coli
atgaaagaattttcagaaatagcaaaaagtgctcatatatcaaatgatgccatcgttgagtatccgatacattgtggcccaaactctcaaatacatggaggatgtaatgtcggccaattcacatttataaatatatcaagtgtcttatatccgaatgttaaaataggtcgtttctgctctattgcaagaaattgtgaaattggtgttgcccgtcatccagtcaattttttgtctacacatagtttccagtatcactttgcacagtttcccaaacatcctttttataaaaatggtataaacaggacatcctggagagcacatccagatactattattggtagtgatgtttggattggtgctcaatcgattgttaaagccggtgttaatatcggtcatggtgcaataattgcagcaaattcggtggttactaaaaatattgcaccgtattcaatagtcggaggaagtcctgcaaaggtaataaggatgcgttttaatgcagagcaaatttctaaactcttagaactacgttggtgggagttatcattagaagagatttcggatctggagtttggaaatattgattcttgtattgaatcattgttaaaaataaggcgtattgagcatttgtaa

SEQ ID NO: 14614 - DNA, 225 bp, Escherichia coli; identical to SEQ ID NO: 11866

SEQ ID NO: 14615 - DNA, 198 bp, Escherichia coli
atgaatgaaacagtggttcatcaagctccatcgtggcaggagattgatacatggcttttttactatcttggtgatgatgaatataaagcgcattattccattctactggcccataacttccagcgagagttaaataaccagctggccagcctaatatcatatgatgcatcacgaggctatgctgatcaggatcgttag

SEQ ID NO: 14616 - DNA, 213 bp, Escherichia coli
atgtatctttacgagtttcccaatgaggttcgcttaaaatatcatacatttcagcagactgagtataataatcttcatagttatccattctgtaattaccttattcaatttcctactaattacacatattgctcaaaattgtttgatgaaatatttagtttaaggcgtttttttattaatttaatggaaattagtactgcgataaaagtataa

SEQ ID NO: 14617 - DNA, 378 bp, Escherichia coli
atgaacacattacccgatacacacatacgggaggcatcgcattgccagtctcccgtcaccatctggcagacactgctcacccgactgctggaccagcattacggcctcacactgaatgacacaccgttcgctgatgaacgtgtgattgagcagcatattgaggcaggcatttcactgtgtgatgcggtgaactttctcgttgaaaaatacgcactggtgcgtaccgaccagccgggattcagcgcctgtactcgttctcagttaataaacagtattgatatcctccgggcccgccgggcaaccggcctgatggcccgcgacaattacagaacggtaaataacattaccctgggtaaacatccgggggcgaaacaatga

SEQ ID NO: 14618 - DNA, 654 bp, Escherichia coli; identical to SEQ ID NO: 5343

SEQ ID NO: 14619 - DNA, 285 bp, Escherichia coli
gtgaaagctttttttgaacccggagctaatactgactttaatacgaacaaactaaaaaatgcgagctctgacggagcacaaaatgttcaaattcagttattaaataacgatggtactactgctattcaattagggaaagactttgtcgaacaggatgtccattcagaagctattaatagtgacgatgaagcgacactacgctatatggcccaatattatgctacaggaaaagcaattgtaggggatgtcacttctagtgttaattacactattgcctatgagtaa

SEQ ID NO: 14620 - DNA, 330 bp, Escherichia coli
atgaagaccttccgctggaaagtgaaacccggtatggatgtggcttcggccccttccgtcaggaaagtgcgctttggtgatggctattcccagcgagcgcctgccgggctgaatgccgacctgaaaacgtacagcgtgacgctttctgttccccgttgggaggccacggcgctggagtcgtttctggctgagcacgggggctggaaggcctttctgtggacgccgccttatggttacaggcagataaaggtgacctgcgcaaaatggtcgtcgcgggtcagtatgctgcgtgttgagttcagcgcagagtttgaacaggtggtgatctga

SEQ ID NO: 14621 - DNA, 435 bp, Escherichia coli
atgggaaaaacagatgctcacgatgatgaaataataactgcagctaaattagctaatgcacatgagtttattatacaaaaaccacaaaattatgatactcctattggttacggtggtatgttactctcaggtggagaacgtcaacgtctttctcttgctagaactttattaaaaaatgcaccaattttactgatcgacgaagcaacatcgaatatcgattgttcatcagaagtattaattcaacaagctttatcattgttatcaaaagataagacaatcattatgattgctcatcgattaaatagcattaaaaatgccgataacattatcgtaatggaaaatggaaaaatagcagaacaaggaaaacatgctgagttacttgcaaaaaatggcttatatgcacatttatggttacaacagaaagcgttatgctaa

SEQ ID NO: 14622 - DNA, 222 bp, Escherichia coli; identical to SEQ ID NO: 7290

SEQ ID NO: 14623 - DNA, 306 bp, Escherichia coli
atggaccgtctgtgcgaagactactgcggtggtatctggaatctgtacaccctgaacaacggtggcgcatttatggcacccgaaccggatgacgatgatgacgaaacatgggtactgttcaatgccatgaacggtaaccgcgctgaaatgagcccggaagccgccggcattgctgcctgtctgatgacgtacagtcatcacgcctgccgtacggagtgttatgccatgacggttcattattaccgtctgcgggattacgccctgcaacatccggaatacgacgccattatgcgcatcattgactga

SEQ ID NO: 14624 - DNA, 396 bp, Escherichia coli
atgaaacatactgaactccgtgcagccgtactggatgcactggagaagcatgacaccggggcgacgctttttgatggtcgccccgctgtttttgatgaggcggattttccggcagttgccgtttatctcaccggcgctgaatacacgggcgaagagctggacagcgatacctggcaggcggagctgcatatcgaagttttcctgcctgctcaggtgccggattcagagctggatgcgtggatggagtcccggatttatccggtgatgagcgatatcccggcactgtcagatttgatcaccagtatggtggccagtggctatgactaccggcgcgacgatgatgcgggcctgtggagttcagccgatctgacgtatgtcattacctatgaaatgtga

SEQ ID NO: 14625 - DNA, 315 bp, Escherichia coli
atgcagtcgctggtcctgccgccaccggcacgccaggcgctggcacaggcggcgctgacttaccgttatggtgatgaacatcagcccgtcaccactaccgacattctgacgccacgacgccgggaggattacggtaaggacctgtggagtgcttatcagaccatccaggagaatatgctgaaaggcgggatttccggtcgcagtgccagaggaaaacgtatccatacccgggccattcacagcatcgataccgacattaagctcaaccgggcgttgtgggtgatggcagaaacgctgctggagagcctgcgctga

SEQ ID NO: 14626 - DNA, 222 bp, Escherichia coli
atgaaaatcatcacccgtggtgaagccatgcgtattcaccgtcagcatccggcatcccgtctttttccgttctgcaccggtaagtaccgctggcacggcagtgctgagacgtataccggtcgtgaagtacaggatattcccggtgtgctggctgtgtttgctgaacgccgtaaggacagttttggcccgtatgtccggctgatgagcgtcaccctgaactga

SEQ ID NO: 14627 - DNA, 507 bp, Escherichia coli
gtggaaaatctttcttttgaatctcctaatttattgaagttttgttcagagcttaagtctaatttaataaatttgggggcagcagtaaatgactcttctaaagaagatgatattgctcttggaattagagatatagaacaacttcaatctatgtgggggcgttttaaacgtaaaggacttggagataatctgtcctcatttagaaatgcgttggctttagggcaacttaataacgatgctttgggtaaaggaatcatgttaagtacagttcacacaatgaaaggccttgaaaaagatattgtttttcttgttggaatgtgtgaaggcgttttcccggactaccgggctaaaagtaatattgatttggaagaagaaagaaataatgtatttgtggctattacacgctctcggcggtggatttacattagttatccagaaaaaaggatgatgccttggggggattataaataccatgcagcatcaagattttatcttgatatgcaataa

SEQ ID NO: 14628 - DNA, 237 bp, Escherichia coli
gtgattgagcagcatattgaggcaggcatttcactgtgtgatgcggtgaactttctcgttgaaaaatacgcactggtgcgtaccgaccagccgggattcagcgcctgtactcgttctcagttaataaacagtattgatatcctccgggcccgccgggcaaccggcctgatggcccgcgacaattacagaacggtaaataacattaccctgggtaaacatccgggggcgaaacaatga

SEQ ID NO: 14629 - DNA, 477 bp, Escherichia coli
atgcaacagatttcctttctgcccggagaaatgacgcccggcgagcgcagtcacattctgcgggccctgaaaaccctggaccgccatcttcatgaacccggcgtggccttcacctccacccgtgcagcacgggaatggctgattcttaacatggcgggactggagcgtgaagaattccgggtgctgtatctgaacaaccagaatcagctgattgccggtgaaaccctcttcaccggcaccatcaaccgcacggaagtccatccccgggaagtgattaaacgcgccctgtaccacaatgccgctgccgtggtgctggcgcacaatcacccgtccggtgaagtcacacccagtaaggcagaccggcttatcaccgaacgtctggtacaggcactgggcctggtggatatccgggtgccggaccatctgatagtcggtggcaaccaggttttctcctttgccgaacatggtctgctttaa

SEQ ID NO: 14630 - DNA, 195 bp, Escherichia coli
atgaatgaagccgttaaacagattgagcaggaagtgcttaccacctggcccgcggaggcaatttctcatgctgaaaacgtggtgtaccggctgtccggtatgtatgagtttgtggtgaatgatgctcctgaacagacagaggacgccgggcctgcagagcctgtttctgcgggaaagtgttcgacggtgagctga

SEQ ID NO: 14631 - DNA, 540 bp, Escherichia coli
atgagtggtgaaaaaaaggcgaaaggctggcggttctatggtcttgtatgtttgggcgcaatagtactgctttccgctggcgtctgggcgttgcaatatgctggcagtgggccagaaaaaacgttgtcgccgctggtggtgcacaacaatctgcaaatcgatctcaatgagccggacctctttctcgacagcgactctctgagccagcttcccaaagacctccttaccattccgtttctccacgatgttctgagtgaagatttcgttttctattatcagaatcatgccgatcgtctgggcattgaaggcagcattcgccgcattgtctatgaacacgatctcacgctgaaagataagctcttttcgtcactcttagatcagcccgcgcaggcggcgctatggcacgataaacaaggccatctttcacattacatggtgctgatccagcgcagtggtttaagcaaactgctggagccattgttgtttgccgctaccagcgacagccagttaagcaaaacggaatcagtagtattaagctaa

SEQ ID NO: 14632 - DNA, 207 bp, Escherichia coli
atgctgattgcccgatgcgacgctgttgcgtcttctcaggcctacgattgtggtgcgttgtggggcggacaaggcattcgcgccgcatccgccgacggtcaatcgaattatcagaggccattaacgccgctgatattccgccattcccgctttgcagtccacgctgacctggtaatgaatatcggcacttttaccacgtacggttag

SEQ ID NO: 14633 - DNA, 1170 bp, Escherichia coli
atgttaagagcaacaaaagtacgcatctacccgacaccagaacaggctgaatttatcaacgcccagttcggtgcagtgcgttttgcgtacaacaaagctctgcatatcaagaaacattcttaccagcggcaccgcgtaaatttaaacccgcgtaaagacctcaaaccactgcttgcagtggcgaagaaatcccgccggtatggatggcttaaagaatatgattctattgcgttgcagcaggcggtaattaacctcgacgtggctttttctaactttttcaatccgaaactgaaagcaggtaaacctacctttaaaagtaaacacggcagacaatcgagctatcattgtgttggcataaaagtccttgatggtgcgataaaaataccgaaaatcttgccgattgaagcgcgtttacatcgtgaaattacgggaatgctgaaaagtatcacgttgagccgcagcgcaaccgggaaatactacgcgtcgttactttgtgacgacgggatggaagcgccggcaaagcctgcactgatatcaaatgtgacagggctggatatggggctggcgcattttgtcatcaaatcggacggcaataaaattgccagtccccgccacctaatcaatgcaagtcgcaaccttcgccggaagcagaaagcactgtcccgtaagaaaaaagggaacgcaaacaggcgcaaagccagaatacaacttgcagccgttcacgaacgggtagccagtgcccgtgccgatttccagcacaagttatctcgcgcaattgttgacgaaaaccaagcggtaattgtcgagacattgaaaacggcaaatatgatgaaaaatcaccatctggctcgtgcgataggcgatgctggatggtctggattcatcacaaaactggaatacaaagcaacagagaaaggtgtgcatctggtgaaactggatcaatggttcgccagttcgaaaacctgccactgctgcggtcacaaaatgtcggagatgccattacataagcgcatctggcagtgtccagagtgtggagttgaacatgaccgcgatatcaacgcggcgctcaacatcaaacgcaagggcatactggaattacaagcggcgggactcgtcgtttctgcccatggaggccagcataaatccgtcacacagacggttgcggcttaa

SEQ ID NO: 14634 - DNA, 1149 bp, Escherichia coli
atggcttatcactttcatgtgcggaaaaacaaaggtctgagtctttccggcattattgccgcgattaccggcgttcgcccgcaaggcccgtggggaaaactggtcgatttgatgttcctgatcgccactgtcggtgcgctgaccatttcccttgttgttaccgcagcaacctttacccgtgggctttccgcgctgaccggtttacccgataacttcaccgtgcaggcatttgtgatactgctttccggcggcattttttgcctaagctcgtggattggtatcaacaacggtttgcaacgtctgagcaaaatggttggctggggcgcgttcctgctgccattactggtgctcattgtcggcccaaccgaatttattaccaacagcatcatcaatgccatcggcctgaccacgcaaaacttcctgcaaatgagcttattcaccgatccgcttggcgatggttcatttacccgcaactggaccgttttctactggctgtggtggatctcatacacgcctggcgtagcaatgtttgtcacccgcgtttcccgcggtcgtaagattaaagaagttatctggggactgatcctcggcagcaccgtcggttgctggttcttcttcggcgtaatggaaagctatgccattcaccagtttatcaatagcgtaatcaacgtcccacaggtgctggaaacactgggcggcgagacagctgtgcagcaagttctgatgtcgttgccagccggtaaattgttcctcgccgcatacctgggcgtgatgattattttccttgcctcgcatatggatgcggtggcctacaccatggcggcaaccagtacgcgtaatctccaggaaggtgacgatcctgaccgtgggctgcgtcttttctggtgcgtggtaattaccctgatcccgctttcaattcttttcactggcgcgtcgctggaaacgatgaaaaccaccgtcgtactcacagcccttccgttcctcgtcattttactggtgaaagtcggcggatttattcgctggctgaaacaggattacgccgacattccggctcatcaagttgaacattatctcccgcagacaccggttgaagtcctggaaaaaacgccagtgctccctgcgggaaccgtattcaaaggcgacaactga

SEQ ID NO: 14635 - DNA, 606 bp, Escherichia coli
atgacgctctaccagataaaaccgctctttcagtcgctgttaaggccgacgatgttttggcttcataagctgcaagtgtctgcaaatcagatcacacttgccgctttggcactttctcttctcaccggtttgttgttggcgttggtgccatatcctggcatgtttctgctattgcccatcgtgctttttgtccgtatggcactcaatgcgctggatggcatgatggcgcgtgagtgcaatcagcaaacacgtcttggggcgattttgaatgaaacaggcgatgttatttccgatattgcgctttatttaccgtttttatttttaccggaaagtaacgcatcactcgtaatactcatgttattttgcaccatattgaccgagttttgcggtttactcgcgcagacgattaacggtattcgtagttatgtcggtccatttggcaaaagcgatcgcgcgttaatatttggtctgtgggggctggccattgccatttatccacaatggatgcaatggaataattttttatggagcattgcttcaattctgcttctctggactgcgattaatcgttgtcggagtgtgctttttatgagtgctgaaagataa

SEQ ID NO: 14636 - DNA, 2307 bp, Escherichia coli
atgtttaagcccaggatttgcagctggataggtttacttcccctgtttatgctgagtcttccagtacaggcggaacttcgatgtgttgcaaatgcagttgatattgaaccatttttttctgcggctaccgctgaagataaacaacaagttgaacaagctatcaacagtagcgtgaatcttgtccccttcggtttatctgcatcggactggaaagtgcatcgtggcgatttagtggtagaaggtaatatagagagtaatcaaaaattgattgttcttggcaatttgacagtcaaaggtaatatttccactttctctctttctaatccatgggttattctcggtaacgtgacggcaacgaatatagttacggattcaccactgttaattaccggttcgataaatgcaagtggactggtatttatcgactcatattacgataatccgtctacgattaaggggagtattaatgcgcgtgggatatttatcaatgacataattgcacctgttgttgcgtcttcgacaaatagtgaattcatggtccgtgcgagtgacaaaaatgacactgaaaatgtcaaaaaagcgctgatgataataaatcctgatgcatattattggggcctaataaatgatgaagatgctctgaaagaaatttttaagcgaagcaatattcgcatggcagggaatgtctgtaatctgatgaaaaaagaagcgctgtttcgccctaagccttctcctgagttagtgcaggaattacaaatgctggatgaaggcaacgttgctgcatttgaaggacgagacattgcgacatttgatcttgccataatgcgaactctcccaaggcttaaaggaatttcagctaacctacgcaaacaacttattaatagcaatgatgaacaaacgattgaaagtatggcgagatatatgcctgacaatgagattctggagttgaccgatcagcaattgggttaccagcctgttgttctggggttgctcgaccgtgaaccgctctctgtcgaaataatgacgcgaatgagtcatctacctgatggtgtcggtccgttgaatcttgcgctacgtgaaaatctccctctggatatcgtcatgactctggcgaaaagagattgggatatgatcattcaggagctttataaagatgcgtggttattgcccgaatccattattgatggctatatccgcagtgatgattcctctattcgtcaggtcggtgctggaggacaactcagctacaatcaggcaatgcagttggcgaacgattcatcaaacgatgttgtcacaagcttagcgtcaaagctggcagagatgaaacaccatggtcaattgttgcggatgacgccacaagagagtgacaaaatagcagtatatttacaccaaaaattcgagaatgacgatgatctaatacgtgtgttatttttagcattgccagataacttacagtttaattttgttaaaaagatggagaaaaaatttcctgcctatttttgctgtggggatatgcaggtaattcactctgacgctgctttacaacggttattgacacgtttcaacgatcctgcggggtggagtaatctggcgaaaaatcagtatctgagtacggcgatgaaacaaaaaatttggcatcgcgctttatcgcatcgaaaaaataatccgaaagcagattctgcagcatatgaaaccagcgctgatatgattttgtctgagctgattagccacggtgaagttgatgaccagatgctattaaatgccacctctctgatacgttcggaaggctgggactttttagagagtgcattagttagttgggataatttacccgctgttgtcctcaaggaattacagcaaaatatgccacgcaatgatatttgggcgaagttttttctgaagcaggaaaacagctctcgtgcgcaggttaacgaagcgttacgtgtttattatgcactagaccccgatgcgttagcacaactggatgtactggcaaaacaaccggatcgtatatggtggagtacgctggcgaaaagcaatcttacatttttcaagttcggcgcacttaacaatcgccatacaccgtctgcggcactggcggcagaaattgatcccgagtggtggattatggcgatgaataatccccgttttccagttgatgtattgaaggcgaggctgaaacgtgatcctttgctggcgttagagcttgttaaccctgaactggatttagttcggcagctggcgcttaacggtaagacgcgcgcaatacgggaacaagcgatgagaaaacttgatgagttgcattga

SEQ ID NO: 14637 - DNA, 1038 bp, Escherichia coli
atgaacaatcgtcgaattctttttttagattacatgcgtgtaattgcgttctcccttgtggtgttaggtcataagttcaacgaagatttatcttcgttggagaacgatccaagtaaccacgttacacttaggcttttttacggattactagcagatgccagtttcggtggtgcaatgggggttgtgatcttctttcttgtttcagggtacatcatcacccacgtactacaaaaagaagcaacttttgaattttatttaaaaagaatatttagaatatacccactctatatttttgctgttttagctgaaatgttgaaccaatactataatggtggcaacattccacctctgagcataataatacctagattattacttataggcgatttctttaacacacctctttcattggctggtgttgaatggacgttaagaatagaaatgctgttctatgtgtttatgggtttggttaaaaaagtcggactcataaataaaggaaacattttaacagttctactactttttatatcattatttatatccaccattaatcctttccctgtagcgaaggattttcataatgcttacttcaccttgtatacgccatttttgtttataggtgtagtagtgtaccttacagagcataagttagttaatcggattgttgctttaatatccatcgtaactatgttctatcttcatttatctctcattgaaaaaataaacccattctgggggcactacaactacgcattcacaggaactgttatttttctttgttcgtggttatttaaagatagattcattgaatccaaagcatgcaatttgctatctgaaatgacttatgctgtgtacttatttcataactggatttgggactctttgacattagtagttaataaaattggaattaaatacatcaatagtaacattcaaatattattattgttatttatagtttgttattttgcgcacaagcttgtagagcgaagaggtgttttaatcggcaagacacttttacgaaaagctttaatatga

SEQ ID NO: 14638 - DNA, 843 bp, Escherichia coli
atgtcagacatcacaatctcccgtccggaagtggtcaccgggcatacggacgttatctgctcaaccagtacccgccacattctggctgtacgaaagagtacactgctgcaaatcgacacacttatccggcaactggctgaaatatcagcaatgacagaaagtattggcggtaaagccgccccggactgggccatgaaacaggattttcgctgcggctgctggctgatggagaaaccggaaaccgcaatgaaagccatcacacgcaatctcgatcgcgaaatctggcgtgacctgatgcaacgttcagggatgctttccttaatggatgcacaggcccgtgatacatggtaccggtcactggagtacgataattttccggaaatcagtgaagcgaacattctgagcacatttgaacaactacaccagaataaggatgaggtgtttgagcgaggggtgatcaacgtcttcaggggactgagctggaattacaaaaccaattgcccctgcaaatttggcagtaaaattatcgtcaacaacctggtgaggtgggaccggtgggggtttcatcttatcaccgggcaacagactgaccgactcgtcgacctggaaagaatgctacatctgttcagcggcaaaccgatccccgacaaccgggaaaacatcactattcgtctggatggtcacatccagtccgttcagggtaaagagcgctatgaagacgagatgttcatcattaaatactttaagaagggatctgcacacatcactttcaaaaggctggaactgattgacagaattaacgatataatagccaggtactttccttctgtgctctcagcctga

SEQ ID NO: 14639 - DNA, 489 bp, Escherichia coli
atgaaactggccctgacactggaagccgacagcgttaacgtgcaggcgctgaacatggggcgaattgtcgttgacgtcgatggtgttaatctcactgaactgattaacaaggtcgctgaaaacggttattcactccgtgtggtggacgactccgaccaacagtcaacctgcacaccaccaccgttaacaacccttaccggcatacgctgcagcaccgcacatatcacggaaacagacaacgcctggttgtactcgctgtcacaccagaccagtgacttcggcgaatcagaatggattcattttacaggtagcggatatctgttacgtaccgatgcgtggtcatacccggttctgcggcttaaacgcctggggctgtcaaaaatgttccgccgtctggttgtcacacttatccggcgttatggcgtcagtctcattcatctggatgccagcgctgaatgcctgccgggtttacctactttcaactggtaa

SEQ ID NO: 14640 - DNA, 1002 bp, Escherichia coli
atgagtagttggcttgcgatgctgcaagatgccgcagagatgtttgtgtttctcgccgtcgagctttctttgctgtttatagtgattagtgccggtgtcagcctgataagacaaaaggtgccagaccataaaatccagcagatgatgggggccagaaaagggagaggctatctcctggcggctctgttgggagccgttaccccgttctgtagttgctcgacaatccccatgttacgtggattgttgtcagcgaaagccgggttcggtccgaccctcacttttttatttgtttcaccgttacttaatcccattatcgtcggactaatgtgggtaacctttggctggaaagttaccttgttgtacgcgattatcgccgccggcatctccgtacttgccagtattatcctcgattctctggggtttgaacgtcatatcattgccagtaaaagctcatcagcaaattgttgtgctccagccaaaacttcgccagggacgacatatacgcccataaaagtgagttgctgtagtccagcggctaaagtcattgagaaacccgcagttaactgttgcagtaccaaagcagtggcaagtattaatcccataaaattagccatcaaagatgcattgcagcagtttaaagacgtactgccatatcttgtgttaggggtattactaggctcttttatttatggctttatcccctcacagtggattgccgctcatgcaggggcagataatcccttcgccatcccattgagcgccgttgtcggaattccgctgtatatccgggcagaggcggttatccctctggcatctgttctgatgacaaaaggaatgggtctgggagcattaatggcattaatcatcggcagtgccggagcaagcctgacggaagtgatattacttaaatcaatgttcagaataccgatgatagttgcattcctgacggttatattaggtatggctatcttgatgggctatttgactcaaatgctattttaa

SEQ ID NO: 14641 - DNA, 1752 bp, Escherichia coli
atgaaattcttacagaatatcccgccttatctgttttttaccggtaagggaggtgtaggtaaaacgtcaatttcctgcgcaactgctatccatctggcggaacagggaaaacgggttctgcttgtcagcaccgaccccgcgtcgaatgtcggtcaggtatttaatcaaactattggtaacgctattactcctgtgacagcggttcccgatttgtcagcgctggaaattgaccctcagcaagccgctgaacagtatcgggccagaatcgttgaccctatcaaaggacttctccctgaggaggttgtaaatagtatacgcgaacaactttcgggagcatgtacgacagagatcgcggcgttcgatgagttcaccggtttactgaccgatgcctctctgctggcccgctttgatcacatcatttttgataccgcgccaacgggccataccatacgacttctgcagctccccggtgcctggagcagttttattgaaagtaatcccgatggtgcctcctgtcttggcccgatggctgggctggaaaaacagcgtgagcagtacgctgatgcggtagaagcattatccgatcctgagcgtacccgcctggtgctggttgcacgcctgcaaaaatcaacattgcaggaagtcgctcgcactcatgaagaactggcagcgattggtcttaaaaatcagtatctggtgatcaacggcgtattgcctgagtccgggcagcaaaatgacccactagcaatggcaatagttcagcgtgagcaggaagccctggtaaatttacccgccggtttatcgaccattccagcagataccctctttcttcaaccggtgaacatggttggcgtgcctgcattaaaaggtctttttaatacccgtttcgagcctgccccactctctggccaggtgcgccagcaattctctgaaaacatgtcattctctgagttagtgaatgatattgcccgcagtgaacacggtctgatcatgctgatgggaaaaggcggcgtggggaaaaccacaatggccgcagctatcgccgtcaggctggcagatatgggattcgatgtgcatcttacaacctccgatcctgctgcccacattaacactaccctaaacggcacacttaacaacctacaggtcagcaggatcaatccgcaggaagagaccgagcgctatcgccagcatgtccttgagacaaagggaaaagatctcgatgaagcggggaaacgactgctggaagaggatttacgctctccctgcaccgaagagattgctgtatttcaggcgttctcgcgcgtgatccgtgaggcgggtaaacgttttgtggtgatggataccgcaccaaccggtcacacgctgttactgctggatgccaccggggcttatcaccgtgaaattgcgaaaaaaatgggcgaaaaaggtcactttactacgccaatgatgcaacttcaggatccgcaacgcaccaaagtgctgctggttacgctgcctgaaaccacacccgtactggaagcggctaatttgcaggccgatcttaaacgcgcagggattcatccctggggctggataatcaataactgcctttctattgcggaaactcgttcgtcgctactgtgtcagcgagcaacgcaggaacgaccacaaattgaggcggtgatggcccgacatgctaagcgtgtagcgctggtccctctattcgcacaagaacctacgggtatcgaaaaactcagaaagctggcaagttaa

SEQ ID NO: 14642 - DNA, 363 bp, Escherichia coli
atgaagacgttaacggtgtttgatccggcgatgtgttgcagtaccggcgtctgtggttctgatgttgatcaggtgctggtcgatttttccgcagatgtgcaatggctgaaaagccgcggtgttcaggtcgaacgttacaatctcgcgcagcaaccgatgagtttcgtgcaaaacgaaaaagcgaaagcgtttcttgaggcttccggggcggaaggattgcccttgatcttactgggaggcgaaaccgtgatggcgggccgttatccgaaacgcgccgagctagcccgctggtttgggatcccgctggagaaggtggggctggcaccaacacactgctgtggcggaaaaaccgactgttgttga

SEQ ID NO: 14643 - DNA, 354 bp, Escherichia coli
atgtcatttctgttacccatccaactgttcaaaattcttgccgatgaaacccgtctgggcatcgttttactgctcagcgaactgggagagttatgcgtctgcgatctctgcactgctctcgaccagtcgcagcccaagatctcccgccacctggcattgctgcgtgaatgcgggctattgctggatcgcaagcaaggtaagtgggttcattaccgcttatcgccgcatattccagcatgggcagcgaaaattattgagcaaacaagattaagccaactggacgacgtgcaggctatcgcccgtaagctggccgcagccaactgctctgcagacggtaaagcaagctgcagttaa

SEQ ID NO: 14644 - DNA, 2319 bp, Escherichia coli
atgacgaacgccaacgttttgccgcccagtaaacgcccggcgctgttatgggggatcgtctgcctggtcatggcggcggcgttgctgatcctgttgccgcaatcacgactgaacagtagcgtgctggctatgttacccaaacaggcgatgggcgatattcctccagcgctgaatgacggctttatgcagcgtctggaccgccaactggtgtggctggtcagccccggtaaagaggctaatcccagggtggctcaggagtggctgacgctgctgcaaaaatccgctgcgctcggcgacgttaaagggccaatggatgccgccagccagcaggcgtggggagcgtttttctggcagcaccgcaacggcctggttgaccccgacacccgcgcgcgcctgcaaaacggcggcgaagcgcaggcgcagtggatcctctcccagctttattctgcgttctccggggtaagcggtaaggagctgcaaaacgatccgctgatgttaatgcgtggctcgcagctggcgatggcgaaaaacggccagcgtttgcggctgatggacggctggctggtgacgcaggatccccagggcaactactggtatctgctgcacggcgaactggcgggatcgtcgtttgatatgcagcaaacccaccagctcatcacgaccctgaatacgctggaaaaggatctgaaaacgcgttacccgcaggcgcagttgctctcgcgcggcacggtgttttacagcgattacgccagccaacaggcgaagcaggatatctccaacctgggcgtggcaacgctgctgggggtgatattactgattgtggcggtgttccgctctttacgcccattgctgctttgcgtgatttccatcggcatcggcgcgctggcgggaacggtcgccaccttgttgattttcggcgaattacacctgatgacgctggtgatgagcatgagcgttatcggcatttccgctgactacacgctctattacctcaccgagcggatggtgcacggcaatgacgtttcgccgtggcaaagcctggcgaaagtgcgcaatgccctgctgctggcgctgctcaccaccgtggcggcgtatctgattatgatgctcgcccccttccccggcattcgccagatggcgatttttgccgccgtcgggttgagcgcctcctgtctgaccgtcctgttctggcatccgtggctgtgccgtggcctgccggtgcgtccggttccggcgatggcgctgatgctgcgctggctggctgcgtggcggcgtaataaaaaactgtcgctgggtctgcccgtcgcgctggcgctgttttcgctggcggggatgtcaatgctgcgcgtcgacgacgatatctcgcagttacaggcgctaccgcagcatattctggcccaggagaaagccattaccgccctgaccggacaaagcgtcgatcaaaaatggtttgtagtttacggcgactctccacagcaaacattgcggcggctggagaaatttaccgcctcgctggagaatgcgaaaaaagaggggcttatcagcaactaccgcaccattccgctgaactccctggcgcggcaggaggaagatttacatctgctgaaaacggctgccccgacagtaacaaaagcactgcaaaatgccgggctggcggcagtgaatccggatctcaacgccatgccagtgaaggtcgatgaatggctggcaagccccgccagtgaaggctggcgtctgctgtggctgacgctgaaaaacggcgaaagcggcgtactggtgccggttgaaggggttaaaagtagcgcgttgttgcaggaaatcgccagcgattaccctggcggcattgcctgggttgatcgcaaaagcacctttgatgagttgttcgcactttaccgctacgtcttaaccggtttgttgctggtggcgctggcggtgattgcctgcggcgcagtggcccgcctcggctggcgcaaagggcttatcagcctggtgccttcggtactttcgctgggctgcggtctggcagtgctggcgatgagcgggcaggcggtgaatctcttttcgctactggcgctggtgctggtgcttggcatcggcatcaattacacgctgtttttcagtaatccgcgcggtacaccgttaacttccctactggcgatcacgctggcaatgctcaccaccttgctggcgctgggaatgctggtattcagcgccacccaggccatcagcagttttggcattgtgctggtgagcggtattttcaccgccttcctgctttcgccgctggctatgcccgataaaaagagaacaaaaaaatga

SEQ ID NO: 14645 - DNA, 354 bp, Escherichia coli
atgaagccccatgaaatcgagcgccatcaggcacaagcgaatcaccttgagattgttttgcatctcagggcagatctgttctggtttcgcggccattttgccgtgcagccgttactcccaggagttgcacaaatcgactgggcgatgagctacgcgctcactctgctcgcgcctggctggcgttttcactctattcagaacatcaaattccagtccccgttgctgccggacaaccgcgtcacgctcacgcttaactggcaggaagaacgccagattctgagctttagctatcagcgtcacgacggtgacgcccgccacaccgccagtagcgggaagatccgcctatgtcggtaa

SEQ ID NO: 14646 - DNA, 1362 bp, Escherichia coli
atgaagcagaccttaccgcttgcacgctggctgactgcgccacgccctgatgacacgcccattgcgtggctggacgaaagctcgtggacactgggcgatttgcgtcacgatgtcgcgcaacttatctgccgcttgcagcaacagccgggtgaacgctgggcgctgtgctttgagaacagttatttgtttatcgttgccctgcttgccacgctacacgccggaaaaacgccggtgcttccggggcataaccgtgtcatccagcttaatgaacaacgtgaactgttcgatggtgtacttagcgacagcgatcttaactggcaaggttcattgctgttggtagcaagttccccacaagtcgcgacacaatcattcacctttgccgctatagcgccagacgcttatatcgagctatttacctccggttctacggggcagccaaagcgggtaattaaacctgttcatttgctggaccgtgaagcagaactgctggctgaacgattaggcgcacgtcttgccggatgtcgtgtcgtcggttccgtattgccgcagcatctgtacggcctgacttttcgcgttttcctgccaatggcgctgggattaccgctgcacgccgccatgctctggtatgtcgaacagtttgccgcattgagtcaccagcatcgctatatcttcatcagcagcccggcatttttgaaacggctggatacccagctttctccgccgcccgttcaggtgcttctctctgctggcggtgagctgccgtggcaggacgtaaaacacaccgcgagctggctgcgcgtctggcctgatgaaatctacggcagcacggaaaccggcgtcattgcctggcgttaccgcgaacaagagcaacgccgctggctgccctttccaggtatgcacttccaggccgaaggtgaagcatttcgtctcttttcaccgctgatagcggaagataacggcctgttactcgatgatctcttgcagtttagccaggacggtcagttccatctgatggggcgtcgtgggcgcatcgttaagattgaagaaaaacgtatttctctgcaggaagtagaacaacgtctgctggcgctggacggcattcgcgaggcggcggcagttcccgttacgcgcggcgggcgtcagagcatcggcgttttgctggtgctggatgacgaagctcgcctgcaatggcagaacggcggcgggcatagccaggaaatgacctggcggcgattactgcgcccgacgctggagccagttgctattccgcgttactggcgcgttattgatgaaatgccagtaaacagtatgaacaagcgtgtctatgcgcaattacaggagttatttcatgaagccccatga

SEQ ID NO: 14647 - DNA, 582 bp, Escherichia coli
atgtcgggcattcgctcgctaccgatgattaagctgctgactggattattgctgctcgcctggccgtttgtgatttggtttggcctggcgcataacggcctgcactggttgttgccgctaatagcgttgctgctattgttgcgcctgcgccagacccgtcgccgggcggggccgctacaagccgtcacacaaatcgtcgctgtcgtgggcatcgcattgtgtgtcgccagctttctgttgaaaacgcaccagctactgctgttttacccggtagtggttaacgcgatcatgctggcggtttttggcggttcgctgtggtcgacaatgccgatagttgagcggctggcacgtttgcaggagccagacctcccggaaaagggcgtgcgctatacccgccgtgtcacgcaaatctggtgcggctttttcatcattaacggcggaattgccctctttaccgcgctttatggcgatatgtcgttatggaccgcctggaacggcatgattgcttattttttgatgggaacgttaatggcaggtgaatggctggtgcgccgtcaggtgataaaaagagatcgctcatga

SEQ ID NO: 14648 - DNA, 840 bp, Escherichia coli
atggcgctggagccgcagatgagtaagctgatgtcacgtctggagtggacctggcgactggtcatgaccgggttatgttttgccctgtttggtctcggcggcctgctgctttctgtcgtgtggtttaacatattgttagttttggtgtgggatacttcccgccgccgtcgtttggcgcgtcgcagcattgccgccagttttcgcctgtttttaactgtcgcgaaagggcttggcgtgctggattatcgtattgatggcgctgaaattttacgtcaggaacgcggttgcctcgtcgtagccaatcatcccacgctgatcgattacgtgctgctggcgtcagtcatgccagaaactgactgcctggtgaaaagcgcgctgttaaaaaatccttttcttggcggcgtcgtgcgggcggcagattatttaatcaacagcgaagctgaaaccctgttaccccgctgccaacagcgactggcacagggtgacactatcctgattttccccgaaggcacgcgaacgaagcccggtgaaaaaatgacgctgcagcgcggggcggcgaatattgccgtgcgctgtgccagcgatttacgcatcgtgacgatcggctgtagcgagcatctgctggataaacaaagtaaatggtatgacgttccacctgaccggccgttttttacggttgaagtccatggtcgggttgaaatcaataaattttacgatgcaacttcacaagaaccggcgctggcagcaaggcagttaaaccggcatcttttgcttctattacaacaaggttgtttacctctctcaggaataaataatgcaagcgctttatctggaaattaa

SEQ ID NO: 14649 - DNA, 723 bp, Escherichia coli
atgaaatttacattaaatattaccgactggcaggcactggcgcctggacttagcgaagcgcagcaatggcaagcatggtcgcgccagccgtgggcgattgaccctgccgcgccgttggcaaaattaagtgaactgccaatgatgaccgcccgccgccttagttcaggcagcaaactggctgttgaatgcggtctggcaatgctacgccgccatcagccagacgccgttttgtataccagtcgtcatggcgaactggagcgcaattaccgcattgttcatgcactggcaaccgaacaggcgctttctccgaccgacttcgcgctctccgtacacaactcttccgtgggtaacctgaccattgcggccaaacagccgatagtttcgtcatcgctttctgctggtcgcgacactttccagcaaggtttgtgtgaagtgcttagcctgttacaagcgggataccagcgcgtgttgatggtcgattttgacggttttctgcccgagttttatcacccacaactgccatcagaaatgccgacctggccgtacgccgtcgcgctggtgattgaatctggcgatgactggcaatgtgaaacgcagtcagccattgcgggcaatgaaacatcactgccgcaaagcatgttgtttttacagcattatttacaaaatgcagacgcattttcactgcctggcgagcgcgtgcaatggcgctggagccgcagatga

SEQ ID NO: 14650 - DNA, 378 bp, Escherichia coli
atgaaatggtttgcggctattgctgttgtgggtgctttagcgggttgcgcgcgtactgcgccaattgatcaggttcactcaaccgtcagcgctggtcatacccaggaacaagtgaaaaaagcgattctgaaagctggcgttgaacgcaaatggattatgtccgaagccggacaaggcgtaattaaagcacgtcaacagtcacgcgatcattcagccgaaattcgcattaactacacggcatccagctacgatatcaattatgaaaatagccagaacctacaagcgtcaggcggacaaattcataaaaactacaatcgctgggtccgcaatctcgacaaagatattcaactgaatttgtcagcgggcgcagatttataa

SEQ ID NO: 14651 - DNA, 1704 bp, Escherichia coli
atgaaaataaaattacgtattactattatattaatttcagccttatgcatttttaatggattattgactcctggtgcatatgccgcaacagcgaatggatacgtagcaaataaagaaaatctacgtagtttttttgaaacggtttcatcatatgcgggtaagcctacaatagtaagtaagcttgccatgaagaaacagatcagcggaaattttgatttaaccgaaccctatgccttgattgaacgcctgtcggcgcagatgggacttatttggtacgatgatggcaaagctatttatatctatgactcatcagagatgcgtaatgctctgattaatctgagaaaggtatcgactaatgagtttaataatttcttaaaaaaatcgggtctgtataactctcgttatgaaattaaagggggcggcaatggtactttctatgtatcggggccaccggtttatgttgacctggtcgttaatgctgcaaaattaatggagcaaaacagtgatggcatcgagatcggacgcaataaagtagggattattcacctggtcaacacattcgttaatgatcggacttatgaattacgtggcgaaaagatagttattcctggcatggcaaaagtactatcgacgttgttaaataataacattaagcaaagcactggggttaacgtactttctgaaatttcaagtcgtcaacaactaaaaaacgtatcacgtatgcctccttttcctggtgctgaagaagatgatgatctacaagtagagaaaataatatcgacagctggagcgccagagactgacgatatacaaattattgcatatcctgataccaacagtttacttgttaaaggaacagtatctcaggttgattttatcgagaagttagtagctacactcgatattccaaagcgacacattgaattatctttatggataatagatattgataagactgatctagaacagttaggagctgactggtcgggcacgataaaaattggatccagcctaagtgcatcatttaataattcaggttcaattagtaccctggatgggacacagtttattgcaacaatacaggcacttgcgcaaaaaagaagagccgccgttgttgctcgtcctgtcgttttaacacaggagaatattcctgctatatttgataataaccgtactttctatactaaattagtcggcgagcgtactgcggagttggatgaagtaacctatggtacgatgattagcgtgctaccacgatttgcttcgcgaaatcaaattgaattactcttgaatattgaagatggcaatgaaatcaattctgacaagaccaatgttgatgatctgcctcaggttggtagaacgcttataagtactattgcgcgcgtgcctcaagggaaaagtcttttgattggtggatatacacgagatacgaatacctatgaaagtcgcaagatcccaatattaggcagtattccatttattggtaaattatttggatatgaaggaacaaatgcgaataacatcgttcgtgtctttcttattgagccaagagagatcgatgagcgcatgatgaataatgcgaatgaggctgcggttgacgccagagcaataacacagcaaatggcaaaaaataaagaaatcaacgatgaattactgcagaaatggataaaaacttacctgaatcgtgaagtcgtcggaggatag

SEQ ID NO: 14652 - DNA, 1395 bp, Escherichia coli
atgcctgacgctaaaaaacaggggcggtcaaacaaggcaatgacgtttttcgtctgcttccttgccgctctggcgggattactctttggcctggatatcggtgtaattgctggcgcactgccgtttattgcagatgaattccagattacttcgcacacgcaagaatgggtcgtaagctccatgatgttcggtgcggcagtcggtgcggtgggcagcggctggctctcctttaaactcgggcgcaaaaagagcctgatgatcggcgcaattttgtttgttgccggttcgctgttctctgcggctgcgccaaacgttgaagtactgattctttcccgcgttctgctggggctggcggtgggtgtggcctcttataccgcaccactgtacctctctgaaattgcgccggaaaaaattcgcggcagtatgatctctatgtatcagttgatgatcactatcgggatcctcggtgcttatctttctgataccgccttcagctacaccggtgcatggcgctggatgctgggtgtgattatcatcccggcaattttgctgctgattggtgtcttcttcctgccagacagcccacgttggtttgccgccaaacgccgttttgttgatgccgaacgcgtgctgctacgcctgcgtgacaccagcgcggaagcgaaacgcgaactggatgaaatccgtgaaagtttgcaggttaaacagagtggctgggcgctgtttaaagagaatagcaacttccgccgcgcggtgttccttggcgtactgttacaggtaatgcagcaattcaccgggatgaacgtcatcatgtattacgcgccgaaaatcttcgaactggcgggttataccaacaccaccgagcaaatgtgggggacagtgattgtcggcctgaccaacgtacttgccacctttatcgcaatcggccttgttgaccgctggggacgtaaaccaacgctaacgctgggcttcctggtgatggctgctggtatgggcgtactcggtacaatgatgcatatcggtatccactctccgtcggcgcagtatttcgccatcgccatgctgctgatgtttattgtcggttttgccatgagtgccggtccgctgatttgggtactgtgctccgaaattcagccgctgaaaggccgcgattttggcatcacctgctccaccgccaccaactggattgccaacatgatcgttggcgcaacgttcctgaccatgctcaacacgctgggtaacgccaacaccttctgggtgtacgcggctctgaacgtactgtttatcctgctgacattgtggctggtaccggaaaccaaacacgtttcgctggaacatattgaacgtaatctgatgaaaggtcgtaaactgcgcgaaatcggcgctcacgattaa

SEQ ID NO: 14653 - DNA, 1887 bp, Escherichia coli
atgtcttttagcgaattttatcagcgttcgattaacgaaccggagcagttctgggccgagcaggcccggcgtattgactggcagacgccctttacgcaaacgctcgatcacagcaatccgccgtttgcccgttggttttgtgaaggccgaaccaacttgtgtcacaacgctatcgaccgctggctggagaaacagccagaggcgctggcgctgattgccgtctcttcggaaacagaagaagagtgcacctttaccttccgccagttacatgacgaagtgaatgcggtggcctcaatgctgcgctcgctgggtgtgcagcgcggcgatcgggtgctggtgtatatgccgatgattgccgaagcgcatattactctgctggcttgcgcgcgcattggcgctattcactcggtggtgtttgggggatttgcctcgcacagcgtggcggcgcgaattgatgatgctaaaccggtgctgattgtctcggctgatgccggagcgcgcggtggcaaaatcattccctataaaaaattgctcgacgatgcgataagtcaggcgcagcaccagccacgccatgttttgctggtggatcgcgggctggcgaaaatggcacgcgtcagcgggcgggatgtcgatttcgcgtcgttgcgccatcaacacatcggcgcgcgggtaccggtggcgtggctggaatccaacgaaacctcctgcattctctacacctccggcacgaccggcaaacctaaaggcgtgcagcgtgacgttggcggatatgcggtggcgctggcgacctcgatggacaccatttttggcggcaaagcgggcggtgtgttcttttgtgcttcggatatcggctgggtggtggggcattcgtatatcgtctacgcgccgctgctggcggggatggcgactatcgtttacgaaggattaccgacctggccggactgcggcgtgtggtggaaaatcgtcgagaaatatcaggttagccggatgttctcagcgccgaccgccattcgcgtgctgaaaaaattccctaccgctgaaattcgcaaacacgatctctcgtcgctggaagtgctctatctggcgggggagccgctggacgagccgaccgccagttgggtgagcaatacgctggatgtgccggtcatcgacaactactggcagaccgaatccggctggccgattatggcgattgctcgcggtctggacgacaggccgacgcgtctgggaagccccggcgtgccgatgtatggctataacgtgcagttgcttaatgaagtcaccggcgaaccgtgtggcgtcaacgagaaagggatgctggtggtggaagggccattgccgccggggtgtattcagaccatttggggcgacgacgaccgctttgtgaagacgtactggtcgctgttttcccgtccggtgtacgccacttttgactggggtatccgcgatgctgacggttatcactttattctcgggcgcactgacgatgtgattaacgttgccgggcatcggctggggacgcgcgagattgaagagagtatctccagtcatccgggcgttgccgaagtggcggtggttggggtgaaagatgcgctgaaagggcaggtggcggtggcgtttgtcattccgaaagagagcgacagtctggaagaccgagacgtggcgcactcgcaagagaaggcgattatggcgctggtggacagccagattggcaactttggtcgcccggcgcacgtctggtttgtctcgcaattgccgaaaacgcgatccggaaaaatgctgcgccgcacgatccaggcgatttgcgaaggacgcgatcctggggatctgacgaccattgatgatcctgcgtcgttggatcagatccgccaggcgatggaagagtaa

SEQ ID NO: 14654 - DNA, 447 bp, Escherichia coli
atgcgacgctatgcgtcttatccgacctacagttcagttcaccccgcaggcctgataagccgcgtcagcgtcgcatcaggcatcggttgtcggatgcgacgccatgcgtcttatccgacctacagttcagttcaccccgtaggcctgataagtcgcgtcagcggcgcatcaggcatcggttgtcggatgcgacgccatacgtcttatccgacctacagttcagcacgccccgtaggcctgataagccgcgtcagcggcgcatcaggcatcggttgtcggatgcgacgctatgcgtcttatccgacctacagttcagttcaccccgtaggcctgataagccgcgtcagcggcgcatcaggcatcggttgtcgaatacaaccaacgggcgttttttatttcgcctggctacgggcaaacaggtcgtcgagcttctcttcgtactggtaa

SEQ ID NO: 14655 - DNA, 891 bp, Escherichia coli
atgtctctacactctccaggtaaagcgtttcgcgctgcactgtctaaagaaaatccattgcagattgttggcaccatcaacgctaaccatgcgctgctggcgcagcgtgccggatatcaggcgatttatctttccggcggtggcgtggcggcagggtcgctggggctgcccgatctcggtatttctacccttgatgacgtgctgaccgacattcgccgtatcaccgacgtctgctcgctgccgctgctggtagatgcggatatcggttttggttcttctgcttttaacgttgcgcgcaccgtgaaatcgatgattaaagccggtgcggcgggattgcatattgaagatcaggttggtgcgaaacgctgcggccatcgcccgaataaagcgatcgtctcgaaagaggagatggtggatcggatccgcgcggcggtggatgcgaaaaccgatcctgattttgtgatcatggcgcgcaccgatgcgctggcggttgaagggctggatgcggcgatcgagcgtgcgcgggcctatgttgaagcgggtgccgagatgttgttcccggaggcgattaccgaactcgctatgtaccgccagtttgccgatgcggtgcaggtgccaatcctcgccaacattaccgaatttggcgcaacaccgctgtttactaccgatgaattacgcagtgcccatgttgcaatggcgctgtacccgctttcagcgtttcgcgccatgaaccgcgccgccgaacatgtctacaacgtcctgcgtcaggaaggcacgcagaaaagcgtcatcgacaccatgcagacccgcaacgaactgtacgaaagcatcaactattaccagtacgaagagaagctcgacgacctgtttgcccgtagccaggcgaaataa

SEQ ID NO: 14656 - DNA, 1050 bp, Escherichia coli
atgaagatcaaagctgttggtgcatattccgctaaacaaccacttgaatcgatggatatcacccggcgtgaaccgggaccgcatgatgtcaaaattgaaatcgcttactgtggcgtctgccattccgatctccaccaggtccgttccgagtgggcggggacggtttacccctgcgtgccgggtcatgaaattgtggggcgtgtggtagccgttggtgatcaggtagaaaaacatgcgccgggcgatctggtcggtgtcggctgcattgtcgacagttgtaaacattgcgaagagtgtgaagacgggctggaaaactactgtgatcacatgaccggcacctataactcgccgacgccggacgaaccgggccatactctgggcggctactcacaacagatcgtcgttcatgagcgatatgttctgcgtattcgtcacccgcaagagcagctggcggcggtggctcctttgttgtgtgcagggatcaccacgtattcgccgctacgtcactggcaggccgggccgggtaaaaaagtgggcgtggtcggcatcggcggtctgggacatatggggattaagctggcccacgcgatgggggcgcatgtggtggcatttaccacttctgagtcaaaacgcgaagcggcaaaagccctgggggccgatgaagttgttaactcacgcaatgccgatgagatggcggctcatctcaagagtttcgatttcattttgaatacagtagctgcgccacataatctcgacgattttaccaccttgctgaagcgtgatggcaccatgacgctggttggtgcgcctgcgacaccgcataaatcgccggaagttttcaacctgatcatgaaacgccgtgcgatagccggttctatgattggcggcattccagaaactcaggagatgctcgatttttgcgccgaacatggcatcgtggctgatatagagatgattcgggccgatcaaattaatgaagcctatgagcgaatgctgcgtggtgatgtgaaatatcgttttgttatcgataatcgcacactaacagactga

SEQ ID NO: 14657 - DNA, 1104 bp, Escherichia coli
atgatgaaaactatcaccaaacaaccgatcctgtttactgatgtaccggttgcagatttaagaaactcaatgaagcacgatttaaatcaaaatcttatcgaaaggctatggaacaaaattcgtgatttttttctggacagtgataaacaaaaggcatttaaatcgattcataaatacatcaatacattgtcagttctaaattataattcagcgttaactccagatcccaattttaatatagatgcatcgtcagatttagactcatatttaaacctgaaatttgataacctctcgcccaaacaaaagcagaccacgctttgttgtttctggaataaaattgcatcctcattgccagagccatacaacagcaccatcaaacataacattattttttataaagtcggagaaaatctgatgatacgtggaactatctctattgttaacgaggtagtaaagacttattcactcccaatagaaaaggatgacaatggatattacgatttcagcggtctatatctagcacacagcaatatttccggtaaagatcccaataaagatcccgctatagatttcggtatagatctgggaaactgtaactgctcaaatgtcaacttcgaacatacttattttgatagcgtcaagtttacaaatacgaattgtacaaatgcgaattttaacagttgtagatttatcaaatgcgatctaacaaatatgaattgcactggcgcaattcttgataatgcggtgatatatggtaaagaaaaagaacctgagatgcaatatccagaagcagatcaaataatacaaaggataacttatcagaaatcacatgggaatgaaacgaaagggatgattctaactaactgctcctgtgttaaaaccactttcaattgggcagatttatcagaaagtgattgccaaaatgtggactttagcgaggctaatctttcaaacactattcttcctgacatcgtcaggatgaaaggcacgaaactttaccgtaccgacctttttaatccgatattaaaagcagaagcagaatcaacagaagaaaaagatattagccctgtctcttatacacatctccgagcccacgagacgtag

SEQ ID NO: 14658 - DNA, 2163 bp, Escherichia coli
atgaaaaaaaatgcccagtccgtggaagcctggctggaggcgatgatcgccgtggcgcgttattaccgccttgatttttctcaggagaatgtgcgcgcgaccgtcaactgggagcgcgacagtaagcgggaggagttactcaccgacatggcgcggcagttggggatggggcttcggctggtggagttctccaccgactcgctcaacccgtggcggctgccgttgatcgccgtttttgataatcaacaaattggcgtgatcacccgccgtgacaatcacgacaatatcagcattcagtttagcggtgacgaagggctggaaactacgcttaacgtcgcggatgttgaggataaaatcgttgaactggcgctactgcgcccgctcagcgccatccctgacgcgcgggtagatgactatattcgcccgtatcaggcgaactggttctggagcctttcgctaaaagactggcggcgctacggcgatattatgctggcctcgctggtggcgaacgtgctggcgctggcggcgatgattttctcgatgcaggtttacgaccgggtggttccggcgcaatcgtacccgacgctatgggtgctgttcgccggggtgatgatggcgatcctgtttgagttctgtatgcgcatggtgcgcacacatctttcggatgtgatcggcaagcgggcggatctgcgcatttcggatcgcgtttttggtcacgcattacggctgaaaaataacgtgcgatcgaaatccaccggatcgtttatctcgcagatccgcgagctggaatcggtgcgggagctgattacttccaccaccatcggcgcggtggcggatctgccgttcttcctgctgtttgtctttattttatggatgatcggcggctggctggtgctggtggttttgctggcgctgccgttattggtgatccccggcctgctggtgcaacgcccgctggcgcggctggcgaacgaagggatgcgcgagtcggcggtgcgtaacgctacgctggtggaagccgtgcagtcgattgaagatattaagctgctgcgcgccgaacagcgttttcagaatcagtggaaccacaccaacgacgtggcctcgtccatcagcatgaagcaacgttttctcaccgggctactgctcacctggacccaggaagtgcagtccatcgtttacgtcgtggtgctgttggtgggctgctttatggtaatgaacggtgacatgaccaccggcgcgctggtcgggacgacgatcctggcttcgcgcaccatcgcgccgctgtcgcagatatccggcgtgctctcgcgctggcagcaggcgaaagtggcgcgcaacggacttgatgaactgatgaagcgcccggtggatcagccggaacacggcaaactggtgcataaagcggtgctacacggcaattatcagttcagcaacgctatcttttattacgatgaagaagagaaaattgccgatgtggcgattggcaaactcaacattcaggccggagagaaaatcgccattcttgggcgcaacggcgcgggtaaatcaacgctactgcaaatgctcgccggaatgcgtatcgcccagcaggggcaggtgctgctggataacatcagcatcggtcagcttgatccggcggatctgcgccgcgacatggggctgctgagccagaccgggagactctttttcggttcgctgcgggaaaacctgacgatggggatgccggaagccagcgatgaagatatcgaacgcgcgttaaccctcagcggggcgctgccgtttgtgcagaagcagaaaaacggcctcaactacatgattcaggaagggggatttggcctctctggtggtcagcggcaaacgctgctgctggcgcggctgctcatctctcaacccaatatcgtgctgctcgatgaacccagcgcctcgctggacgaaatggcggaagcgcatttaatcgaacaactgaaacagtggattggccatcgcacgctgattatcgccactcaccgcacggcgatgctgcaactggtggaccgcattatcgtgatggatcaggggcggattgtgatggatggcgcgaaagaggccattttgcgtgaacagagcgaacccacggcgcgacgggtggtgttgcaggagaagaataaggggtctgccgcatga

SEQ ID NO: 14659 - DNA, 579 bp, Escherichia coli
atgaactcgcataatattactaacgaatcattggcactggcattaatgctggtggtggtggcaatcttaattagccataaagaaaaactggcgctggagaaagatattctctggagcgtcgggcgcgcgataattcagctgattattgtcggctatgtgctgaagtatattttcagcgtggatgatgccagcctgacattattgatggtgttatttatctgctttaatgcggcgtggaacgcgcaaaaacgcagtaaatatattgctaaagcttttatctcatcgtttattgccattacggtcggggcgggaattaccctggcggtgctgattctctcagggtcgattgaatttatcccgatgcaggtgatccctatcgccgggatgatagccggtaacgccatggtagcggtggggttgtgttacaacaatttagggcaacgggtgattagcgaacagcaacagattcaggagaaactgagtcttggcgcgacgccgaaacaggcttcagcgatattgattcgcgacagtattcgcgctgctttaattccgggtgatgctgccaacttactgatttag

SEQ ID NO: 14660 - DNA, 732 bp, Escherichia coli
atgaaagtatcagttccaggcatgccggctacacttttaaatatgagcaataacgatatttataagatggtgagcggggacaagatagacgtgaagatgaatatctttcaacgcttgtgggagacgttacgtcatctgttctggtcagataaacagcctgaggcttatacacttctgttcaatttcgtgaataacaaggttggcaacatcaacgcctcagaatactttactggggctatcgacgagaatgagagagaaaagtttatcaatagcctggaattattcaataaactcaaaacatgcgcaaaaaatccggatgagatggtcgcaaaggctaatatgtgctgggacactcagatctacggtgatattgagttaagtgtcacttttttaattgaaaaaaatgagatatgtactcagacgttgaagctgtgcaagggcctcggtagcttgggcgttgatcttagaaaggcttaccttcccggcgttgacatgaggaattgttaccttggtcccaacataatgaaaggtaacgataaatccctttacttggaacctgggtggaatgctaacctggacggtgctaacctggaaggtgctatcctggacggtactgacgcaattattattaataaaatcaccaccaaaaaaattgctactgaagaaattaccactaaacaaagtactgctgaaaaattattgccaacgcaattattgaatgatccagaataa

SEQ ID NO: 14661 - DNA, 1563 bp, Escherichia coli
atgaactcgttttcacttctgacaaccccgtggttgcccgttcgttataaagacggaacgacaggcaaactggcgcctgtcgatctggcggatgaaaatgttgtcgatattgctgcgccacgggcagatctccagggagcggcatggcagtttttgctggggctactacaaaccagctttgcgccaaaagatcatcgtcgttgggatgatatctgggaagacggactggaatctgaaaagctacgggaagcattgctgtccttagaacacgctttccagtttgggccagattccccttcatttatgcaggatttcgaggcgctcacaggagataaagttcaggtcgcttcgctactgcctgagattcccggcgctcaaacaacgaagtttaataaagaccactttatcaagcgtggtgtaacggaatacctgtgcccacattgttctgcgttagctctgttctccctacagttaaatgcgccgtcaggtggtaaaggctaccgcaccggtttacgcggcggtgggccgatgaccactctgattgaattacaggaatatcagggcaatcaacaaacgcccttgtggcgcaaactgtggctcaatgtgatgccgcaggacgaagccgacttaccgctacccaaaaaatttgacgatctggttttcccctggcttggcccgacgcgtaccagcgaactggccggtgcggtggtaaccgatgatcaggttaataaactccaggcgtactggggaatgccgcggcgtattcgtattgattttaataccacgacagtcggcaactgcgatatttgcggcgagcagaacgacgcgctcctgagcctgatgacgaccaaaaattacggcgcgaattatgccatgtggcagcatcccttaacgccttaccgtgtaccccttaaagagggcggcgagttttactcggtcaaaccacaaccaggcggtttaatctggcgcgactggttaggccttatcgaaacgggtaaatcagaaaacaatacggaacttcccgcgctggtggtgaaactctttaatgccagcagtctcaagcaggcaaaagtgggcctgtggggatttggttatgattttgacaacatgaaagcgcgctgttggtacgaacaccattttccgctgctgctcgataaaaaagaaggccagataccgaagctgcggctggctgcgcaaacggcttcacggattctgagtctgttacggagtgcattgaaagaagcgtggttctccgatccaaaaggtgcacggggtgatttcagttttgtggatatcgacttctggaacaaaactcagcatcgcttcctgaggttagtgcgccacattgaagaaggtcaggatgcggatgaattactcagcaaatggcaaaaggaaatttggttattcgcgcgtcaggattttgacgagcgtgtcttcaccaatccatatgagcccgttgatttgaaacgcgtcatgaccgcgcgcaagaaatattttacaacatcggcggagaagcaaaatgctaaagccgccagggagaaaaagcaggaggctgctgaatga

SEQ ID NO: 14662 - DNA, 2700 bp, Escherichia coli
atgcgtaaatatcctttaagtttactgaaggataaaaatattgtgactttttttgatttctggggaaaaacccgacgcggcgagaaagacgggggcgacgactatcaccttctttgctggcattcgctggatgtagccgcgatgggctatttaatggttaaaagcaattgcttcggactggctgactattttcgtcaattagagatttctgacaaggaacaggcggctcaatttttcgcctggttgttgtgctggcacgatactggtaaatttgcccgctcatttcagcaactttacctgcacccgaaactcagggttccggaaggtgctagaaaaaattacgaaaaaatctctcattcaacgctgggctactggttgtggcatcattatttaagtgaatgtcaggagttacttccttcctcttcactctctccccgcaaacttacacgtgtaatagcgatgtggatgcccataactaccgggcatcatggtcgcccgcctgaccgtattgatgaactggataattttctgcctgaagacaaagctgccgcgcgagattttcttcttgaaatcaaaccactgtttccgctcatagagatccccgcattctgggatgatgatgagggcattgaacttataaaacacctttcctggtatatctctgcaaccgtcgtactcgcagactggacgggatcgtcagcgcggttttttccacgcgttgcacaggcaatggatattaaagattactggcagaaggctttagttcaggctcaaaacgccttaaccgtctttcctccaaaagcacaaaccgcgcctttcaccggaattaatacgctgtttccttttattgagaatccgacaccgttacagcaaaaggtgctggatctggatatcagccagccagggccacagttatttattctggaagatgtgactggcgcaggtaaaacggaagcggcgcttatcctggcgcacaggttgatggctgcgggtaaagcgcagggtttgttttttggcctgccaacaatggcaacggccaatgccatgtacgatcgactggtcaaaacctggcttgctttctattcgccagagtcccgccccagcctggtgctggcacacagtgcccgaacattaatggaccgctttaatgaatcactctggtccggtgatttagtcgggtcagaagaaccggatgaacaaacgttcagtcagggatgtgcggcctggtttgccgacagtaacaagaaggcgctactggctgaaattggcgtcggcacgctggatcaggcgatgatggctgtgatgccgttcaaacataataatctgcggcttctgggactgagtaacaaaatcctgctggctgatgagatccatgcctgtgacgcttacatgtcatgcattcttgaagggctgatcgagcggcaggcgcgtggcggaaacagcgtcattttgctttctgccacgttatctcaacagcagtgcgacaaactcgttgctgcctttgcgcgtggtacagagggccagcaagaagctccgttcctggaaaaggatgattacccctggctgacgcacgttacgaaatccgatgtgcattcacaccgggtagcgacgcgcaaagacgttgagcgtagcgtgagcgtgggttggcttcatagcgaacaagaatgtattgcgcgtatcgaatcggcagtaagtcaggggaaatgcatcgcctggatccggaattctgtcgatgacgctattaaggtttatcgtcagttgcttgcccgcggcgtcattcctgcttccagcctttctctgtttcatagccgctttgcttttagcgatcgccagcgaattgaaacggaaacgctggcacgcttcggtaaagaagatagctcacagcgtgccggaaaagtcctcatttgtactcaggtcttagagtcgagcgttgattgcgatatggacgaaatgatttccgacctggcccctgttgatttgctgatccagcgagcggggcgattacagcggcatatccgcgatattaatggtcagttaaagcgtgacggaaaagacgagcgttcccctcctgaattgctgattctggcccccgtctgggacgacgctccaggtgacgaatggttcggcagtgccatgcgtaacagtgcatatgtctatcccgatcatggacgaatctggctgacgcagcgtgtactgcgtgagcaaggcgctattcaaatgccacacgcagcccgccttcttattgaatcagtctacggtgaggacgtggtaatgccggaaggatttgcccgcagcgagcaggagcaagtgggcaaatattactgcgatcgcgcaatggctaaaaagtttgtgctgaacttcaggcctggctatgccgccaatatcaacgattaccttccggaaaagctgtcgacacgtctggcggaggagtctgtttccctgtggctggctacctgtattgccagtgtggtgaagccttatgccaacggtgctcacgcatgggaaatgagcgttgtcagagtgcgtcgaagctggtggaaaaaacatcgggatgagttttctttactggaaggggaagcgttcaggcagtggtgcattgaacagcggaaagatccggagatggcaaacgtgattttagttaccgatgacgaaagttgcgggtattcggctatggaaggattgactggcaaggttggttga

SEQ ID NO: 14663 - DNA, 753 bp, Escherichia coli
atgagatggatttcaaaaaataaatgtttttcgaatagaaacattaattctttgctgaagacccaatatatcataagggccggtgctctatttttactatccgccatatctatcaatgctattgctgcgggtggcttcggtcttggttctacgcgtctggtttatccatctgacagtcagcaaattacgctaagtgtacagaatggtggggctaacaccagctatttaatccagtcatggattgatgacaatcaaagcagtaaaaaaagtcaggattttgtggttacgcctcctttatttatgttaccaacgcgaaaagaagcctcattgaggataatgtttattggtaaatcacagttaccgactgatcgcgaaacattattctggatgaatgtgaaagcgattccgccaacggatgagaagaatacccagaaaaacacgttacaactggcgttacaaaacagaattaaattattttaccgtccgactaatttacccgttcaagctggtaaagcacgggatatgctgcgatttaaatacgaaggtaaacagctgagagtcattaacccttctccctattatctgacggtgactggaatcagggtgcaaggggcaaaattacctaatgcgtttgttccaccgaaaagtgacgtaacagtgtcttcaccagtgacgttagccggtgaaattacttatcaaactatcaatgattacggtgccacaacggccaggcaaaagggaacgatgcaataa

SEQ ID NO: 14664 - DNA, 705 bp, Escherichia coli
atgaaattcaatctatctaatttatccgcagttttactcgcatcaggtatgctgatgtcaactgcggtaaccgctgcgccaggcgatgcatcacaatttggtggtgcggatacagactggagcaccgttgattatccaaaactcaccgatatggatagcaacaccgatgcgatgggcggaaacatccgctttactggtcgtgtggttaaagcgacgtgtaaggttgctacagaatcgaaacagattgaagtggtactgccagtcgtaccttctaacgctttcacgggcattgataccgaagcaacgggtgccagtaaccagactgacttcaacattaaactgactgattgtagcaatacggacagtcaaaatattgaatttcgttttactggcgtagcagacggtgccaaccagacgcttgccaatgaagtggaaggagctgctgatgctgatggtactggcgaagcgggagctacgggtgtagggattcgtatttattctaaaaacacgacaactgatggcctgattaagctgaacacacaaactccccaggggagtagttcttcagcagcctacgtgattcctggcgatgcagccactcatgattttactgcggcatttaccgcgggctatgctcagaacggtagtaccgttgcaccaggtctggtgaaatcaacggcaagtttcgtcgtgctgtacgaataa

SEQ ID NO: 14665 - DNA, 867 bp, Escherichia coli
atggccgaaaaaaaacagtggcatgaaacgctacacgaccagtttgggcagtactttgcggtagataacgttctgtatcatgaaaagaccgatcaccaggatctgatcatttttgagaacgccgcatttggccgcgtaatggcgctggatggcgtagtacaaaccaccgagcgcgacgagtttatctatcatgagatgatgacccatgttccgctactggcccacggtcacgcgaaacatgtgctgattatcggcggcggcgacggtgccatgctgcgtgaagtaacccgacataaaaacgttgagtcaatcacgatggtggaaatcgatgcgggtgtcgtgtcgttctgccgtcagtatctacccaaccataacgccggtagctacgacgatccgcgctttaaactggtgatcgacgatggcgtcaatttcgttaatcaaaccagccagacctttgatgtcattatctccgactgcaccgatcctatcggtcccggcgaaagtctgttcacctcagcattttatgaaggctgcaaacgttgcctgaatcctggcggtatcttcgtcgcacaaaacggcgtctgctttttacagcaggaagaggctatcgacagtcatcgcaaactcagccattacttcagcgacgttggcttttatcaggcggcgatcccgacctattacggcggcatcatgacctttgcatgggcgacagataacgacgccttacgccatctctcaaccgaaattattcaggcgcgttttctcgcttctggcctgaaatgccgttattacaatccggcagtccatacggcagcttttgccttaccccagtatctgcaagacgcactggcttcacagccgtcctaa

SEQ ID NO: 14666 - DNA, 795 bp, Escherichia coli
ttgaaaaaactgaaactgcatggctttaataatctgaccaaaagtctgagtttttgtatttacgatatctgctacgccaaaactgccgaagaacgcgacggttatattgcttatatcgatgaactctataatgccaaccgtctgaccgaaatcctgtcagaaacctgttccattatcggggccaatattcttaacatcgcccgccaggattacgaaccacagggtgccagcgtcactattctggtgagtgaagaaccggtcgatccgaaacttatcgacaaaacagaacaccccggaccactgccagaaacggtcgttgcccatctcgataaaagtcatatttgcgtacatacctacccggaaagtcatcctgaaggtggtttatgtaccttccgcgccgatattgaagtctctacctgcggcgtgatttctccgctgaaggcgctgaattacctgatccaccagcttgagtccgatatcgtaaccattgattatcgcgtgcgcggttttactcgcgacattaacggtatgaagcactttatcgaccatgagattaattcgattcagaactttatgtctgacgatatgaaggcgctgtatgacatggtggatgtaaacgtctatcaggaaaatatcttccataccaagatgttgcttaaagagttcgaccttaagcactacatgttccacaccaaaccggaagatttaaccgacagcgagcgccaggaaattaccgctgcgctgtggaaagaaatgcgcgagatttattacgggcgcaatatgccagctgtttaa

SEQ ID NO: 14667 - DNA, 435 bp, Escherichia coli
atgaaaaaaacgctcgcaacgttatttttattaacgtgtctgggatcatcatccgcctatgcggataacgctctgattttacaaactgattttagcctgaaagatggtgccgtctcggcgatgaaaggggtcgcattcggcgttgaccataatcttaaaatctttgatttaacacacgaaattccaccgtataacatctgggaaggcgcttatcgtctgtatcagactgccagttactggccgcaaggttcggtgtttgttagcgtggtcgatccgggcgtaggcactgaccgtaaatcggtagtgctgaaaaccaaaaacggtcaatacttcgtttcaccagataacggtacgctcactttggtggcacaaactctgggtattgatagcgtccgggaaatcgacgaaaaagctaaccgcctgaaaggttcttaa

SEQ ID NO: 14668 - DNA, 354 bp, Escherichia coli
atgcaatattttggtgattctgaaaagataaagtatgcatgctccgtgataaatcatattgattttagccgcgatcaatctaaagattttagctgcgatcaatctaaaattaaaatagctgagaccttatttttcaatctcgataaagaacactataaaaatagccgtaaattacaggaattgatttgggataagttggttgcatatgtcaatgattttaacttaagcaatcaagaaaaatcacgcttaatactaaggttatttgatgatgttaagttgctatttaatgaagtgcctgtcagcattttagtaaatgatattttttttgaaggattttttcatgaagcaacctga

SEQ ID NO: 14669 - DNA, 354 bp, Escherichia coli
atgaataaaatcatagaatatataaataaaattgaatttgacatgtcaatcaaatttcctccagtgtataaacgtttcttaatagaagaaattaaagatagtgaggcctatgaaataactaataagaagcatgaaatattatatctgtataactattctgatcttattgaaagaaatgaaacatatgatattcaacgagtggagcctgactattttttgataggtcaggatggggatttaggctattttatctatgttgggagtgctaaggaaagtgataccatatttagtattgatttaggtgccttaggagccatggagttttcagtagaagctgatgatgtatatttttga

SEQ ID NO: 14670 - DNA, 219 bp, Escherichia coli
atgtcgcgcaagggcaactgccttgataatgcggtaatggagaacttctttggtcacctgaaagaagaaatgtactatcgccgggactacagaaatgtagaagagctggaaaatgccgttaacgaatacataacttactggaatcaaaaaagaataaaactcagtcttgggggactcagtccggtagaataccggactgagcatcaaaaagccggttaa

SEQ ID NO: 14671 - DNA, 477 bp, Escherichia coli
gtgcgcggcgctgaacgcggtgccattccacagcagggcatcgtctttaaggtcgccaacggaatccgtcaggttggtgatgttggtggtgttggttgccacattatcgttagtggttttgagctgagagccgttaaccgcgtcggtgctgccagccgtcaggtcaccgtctttgacgttggtgattttgctggtggcatcggtgccgtgcgcggcgctgaacgcggtgccattccacagcagggcatcgtctttaaggtcgccaacggaatccgtcagggtattgatactgttagtgttggtggtgatattggcagtattggtcgctacgttatcgttggtggttttcagctgagaaccgttaaccgcatccttactggtatcagaaatagcgccgtctttaacgttggtgatggtactggtagtatctgtaccatgtgccgcactatatgcctttttaagggagtcccattgtaa

SEQ ID NO: 14672 - DNA, 1377 bp, Escherichia coli
atgagcgacacctcacctgccataccggagagtatcgatccggcgaatcagcataaagcgctgactgccggacaacaggcggttattaagaagctgtttcgccgcctgatcgtctttctgttcgtgctgtttatcttctcgttccttgatcgcatcaacatcggctttgccggactcacgatgggacgcgacctcggtctgagcgccaccatgtttggcctcgccaccaccctgttctacgccgcttatgtcatcttcggcattcccagcaacattatgctgagtattgtcggtgcgcggcgctggatcgccaccatcatggtgctttggggcatcgcctctactgccaccatgtttgccactggccccaccagcttgtacgtactgcgtatactggttggcattaccgaagccggctttctgcctggcattctgctgtatttaaccttctggtttccggcctatttccgcgcccgtgccaacgccttgtttatggtggcaatgccggtaacgacagcgttgggatcgatcgtttccggctacattttgtcgctggatggcgtaatggcattaaaaggctggcagtggctgtttttgctggaaggcttcccgtcggtattactcggcatcatggtgtggttctggcttgatgactcaccggacaaagctaagtggctgacgaaagaagacaaaaaatgcctgcaagagatgatggataacgatcgtctgacgctggttcagccagagggagccatcagccaccacgccatgcaacaacgcagcatgtggcgggagatcttcactccggtggtgatgatgtataccctggcgtatttctgcctgaccaacacacttagtgcgatcagcatctggacaccgcagatcctgcaaagctttaatcagggcagcagtaatatcaccatcggcctgctggccgccgtaccgcagatttgtaccattctcgggatgatttactggagccgtcactcagatcaccgccaggaacgaaggcatcacaccgcccttccttatttgttcgctgccgctggttggttactggcttcggcaactgatcacaacatgatccagatgctggggatcattatggcttcgaccggatcattcagcgcaatggcgattttctggacaacaccggatcagtccatcagcctgcgggcacgagcgatcggtattgcggtgatcaacgccactggcaacattggttcagcattaagtccgtttatgatcggctggttgaaagatctgaccggcagctttaacagtggattgtggtttgttgccgcgctgctggtgattggtgcggggattatctgggcgattccaatgcagtcctcccgtccgcgagcgaccccgtaa

SEQ ID NO: 14673 - DNA, 891 bp, Escherichia coli
atgcgtgaccgtcagattgccaatattgatatcagcaaagagtacgatgaaagcctgggtacggacgatgtgcattatcagtcgttcgcccgcatggcggcattttttggccgccatatgctgccacatcgccacgaacagtactttcagatgcatttcctcaatagcggacagattgagctacagcttgacgatcatcgctactcggtggaagcgcccctgtttgtcctgacgccgccgtcagtacctcatgcgtttattacggagtctgacgccgacggtcatgtgttgacggtacgggaagatctgatctggcccctgctggaagttctgtatccgggcactcgggaaaccttcggcctgccggggatttgcctgtcactggcagataaacccgacgaactggcggcgctggaacactattggcaactgatagagcgggaatcggtggaacaactgcctggacgggaacacaccctgacgctcctggcacaggcagtgttcaccctactgctgcgtaacgcaaaactcgacgaccatgccgccagcgggatgcgcggagaattaaaactgttccagcgttttcatatgctgattgaaagccattttcatcagcactggacagtaccggattacgctaacgaactgcatatcaccgaatcacgactcacggacatctgccgtcgctttgccaaccgtccgccaaaacggttgattttcgacaggcagctgcgagaagccaagcggctgctgctgttttctgataacgccgtgaacaatattgcctggcaactcggttttaaggatccggcttattttgcgcgctttttttatcgcttagtcggttgctcgcccagtgcttatcgtgccaaaaaagtacctgtgacgtga

SEQ ID NO: 14674 - DNA, 1395 bp, Escherichia coli
atgagtgcggggaaattgccggaggggtgggttatcgccccagtatctacggtcacaactctaatccgaggagtaacgtataaaaaagagcaggcaataaattatctaaaagatgattatttgcctcttatccgtgcgaacaatattcagaatggcaagtttgatactacggacttggtttttgttcctaaaaatcttgttaaagaaaatcaaaaaatatctcctgaagatattgttattgcaatgtcatcagggagcaaatccgtagttggtaaatccgcacatcagcatctaccatttgaatgtagtttcggcgcattttgcggtgtattacgtcctgaaaaacttatattttctggttttattgctcatttcacaaaatcttctctttatcgaaacaaaatttcatcactttctgctggtgcaaatattaataatattaagccggcaagctttgatttgataaatataccaatcccaccacttgccgaacaaaaaatcatcgctgaaaaactcgatacgctgctggcgcaggtagacagcaccaaagcacgttttgagcaaatcccacaaatcctgaaacgttttcgtcaagcggtattggggggcgcagttaatggaaaattgacagaaaaatggcgtaattttgagccgcaacattctgtatttaagaagttaaattttgaatctatcttaactgaattacgtaatggtctttcatcaaagccaaatgaaagtggtgttggtcatccaatactacgcattagttctgtacgtgctggccatgtagatcaaaacgatattcggtttctagaatgttcagaaagtgaactaaaccgccacaaattacaagatggagatcttttatttactcgctataacggaagtttagaatttgttggtgtttgtgggttattgaaaaaattacaacatcaaaatttgctatatcctgataaacttattcgagctcgattaaccaaagatgctttaccagaatatatcgaaatatttttttcatccccctcagcacgaaatgcaatgatgaactgcgtgaaaacaacttctggtcaaaaaggtatttcaggaaaagatatcaaatcccaagttgttttattacctccagtaaaagaacaagccgaaatcgttcgccgcgtcgagcaactcttcgcctacgccgacaccatagaaaaacaggtcaacaacgccttagcccgcgtcaacaacctgacgcaatccatcctggcaaaagcgttccgtggtgaacttaccgcccagtggcgggccgaaaacccggatttgatcagcggagaaaacagcgccgccgcgttgctggaaaaaatcaaagctgaacgcgcagctagcgggggtaaaaaagcctcacgtaaaaaatcctga

SEQ ID NO: 14675 - DNA, 3291 bp, Escherichia coli
ttgggtcaatcagaatacatttcatgggtaaaatgtacttcctggctaagtaactttgtgaatcttagagggttgagacaaccggatggccgtcctctttatgaatatcatgcaaccaatgatgaatatacccaattaacgcagctactccgtgcagtcggtcaatcacaatctaatatatgtaatagggactttgctgcctgttttgttcttttttgctctgagtggtaccgcagggattatgaacggcaatgcggatggacgtgggaccctatatataaaaaaatagggatttcattcaccgccacagagcttggtactatcgtaccgaaagggatggaagattactggctgcgcccaattcgattttatgaatctgaacgacgcaattttctcggaacattattcagtgaaggtggtttacctttccggctactcaaagaatcagacagtcgctttctggctgttttctccaggatccttggacaatatgagcaagcaaagcagtcaggtttttctgccctttcgctggcaagagctgtcatagaaaaatcagcgctgccaactgtttttagcgaagatacctctgtagaacttatcagtcatatggctgataacctcaattccttagtacttactcacaacctaataaatcacaaagaaccagtacaacagcttgagaaggttcaccctacctggcgaagcgagtttccaataccgttagatgatgaaacaggaacgcattttttgaatggactgctatgcgcagcctctgtagaggctaagcctcgactacaaaaaaataagagtacgcgttgccaattctattggtcagaaaagcatccagatgagcttagggtgatagtatctcttccggacgaagtttcctttcctgtaacaagcgagccgtcaactacgcgctttgaacttgccatttgtgaagatggtgaggaagtctctggccttgggccagcctatgcttctctggaaaacagacaggcaacagttcgattacgtaaaagcgaagtgagatttggcaggcaaaatccatcggcaggtttgtcgttagtggctcgtgctggagggatgattgttgggagcattaaacttgatgacagtgaaattgccattggtgaggtgccgttaaccttcatcgttgatgcagatcaatggctgttacagggacaggcttcttgcagtgtgcgaagcagcgatgttctgattgtgctccctcgggataatagcaatgttgctggttttgatggccaatcgagggcagtaaacgtattaggactaaaagcactacctgtgaagggatgtcaggacgttacagttacagcaaatgaaacttatcggattcgcaccggaagagaacaaatcagcatcggaaggtttgctctaaatggaaagcgtgcaagctgggtttgtcatccagatgaaacatttattggtgtaccaaaagtcatttctacactaccggatattcaaagcattgatgtaacgcgttacctgagcggaatttcaattgagcaatgtcatatacaagagatgctgggggctcaatatctttctatccgtaatagtaagaatgaaacgctcttgcgtcgcaaaatcggtattttgcctgctgatttcagtattgagataaaaggtggaatacacgcaaatgaaggcactatcgtaatcaccacacagcatccttgtgtagcaaaacttaaagataaaacattggaggctacacgtaagcgtactgaggggcgaacagagatacaactcaaagcggaaggggtacctccggcatttattacattacaagttctgcctaatttggcggctgaccccatcgatattgagttaccttttcccgctaaaggctgtctcgctcttgatgtaaacggacgtcctctggataaaaacattacgctgcatgatctgctgggttccagagcgtttctgttctccagaaatggcgagccgacaagatatacattgcagttgcatttgcgctccgttagtggattacaggcatggcacgaatggtgttatacggcgttgagcgatcgtcctgttgaattgaatctctatagtctgcgcgaacatattgagaacctgatttcacttgaggcaggtattgaccaggttgttgagatgcgtattacgggggcgggtgtggtcatggcctggcaaattcgtcgctataaatacagtctgcgctatgattatgaaaaagaactattactcagccagtcagtgaaccatcgtgctggacagattccttcccccgttatcatgctgttaagtgaacccgagaggaaatccatccccttagcatcaagaatgagcgagggagtgcctgtcggtgaatatgagttgagctcaatcgttaacaaaaatggaccgtggttggttgtccctaaaccgggtgaagagatggcttttcgtccctgcttcattcgtggcgaatcttcgttaccggtagaagaaagcaacatccgctcattgcagaaagcgacccagctttttaatccacaggcagaagttaataccatcacactggttctcggacagatggctaacgatcctgcccattccggctggcaatttatgcgtagcctgtacgatcaatttggttatttaccactggcaacctttgaagtatggcgtgcactggtgcagcatccgcaggcattggcaatgtcgctcttcaaatttgaaatgtcagcagagtacctgagtcgtattgagaatgagttccctattctatgggagtttttccccatctttgagatcaaagcggcatctgagcgtttcaaattgttcctgagccaaaaaggtgcaccggaggaaacccagaaattactggttactaatatgtttcaacggctggggctcgtgttcccgacatatgccgatgaaattgagaaatggttaagtaacggacatctccccccgtctattcctgagtcttttgtccacgtgtggtatcaggagcttttacgtgagcatagtgaagctcaatggccagagtacggcagcaagcggctgcatagctggatggcatcacaaaaaaatccagtgattggtattaatcctgacgcaaatcaccgctattccgtggccttgttacccgtcttcgctgcagctgtggcaagcggaaatgcttcttttgaatctgtatttgaccgtaaacccggtgccgtatttttcctgaggcaagtcagggatttcgattcccgctggtttaaggccatcttccagtgcagcctgttgcgttatgttgctaaaaaataa

SEQ ID NO: 14676 - DNA, 165 bp, Escherichia coli
atggaatttcacgaaaacagagctaaagcgccgtttatcggcttggtgcaactctggcaggcggtgaggcgttggcggcggcaaatgcagacccgacgcgtgttacagcagatgagtgatgagcggttgaaggatatcgggttacgcagggaggatgtggagtga

SEQ ID NO: 14677 - DNA, 162 bp, Escherichia coli
atgtttcgttggggcatcatatttctggttatcgcgttaatcgccgccgcacttgggtttggtggtctggccggtaccgctgcaggcacagctaaaattgtctttgtcgtcgggattattctgttcctggtgagtttgttcatgggccgaaaacgaccctag

SEQ ID NO: 14678 - DNA, 1575 bp, Escherichia coli
atggcacaagtcattaatacaaacagcctgtcgctgttgacccagaataacctgaacaaatctcagtcttctctgagctccgccattgaacgtctctcttctggcctgcgtattaacagtgctaaagatgacgcagcaggtcaggcgattgctaaccgttttacagcaaatattaaaggtctgactcaggcttcccgtaacgcgaatgatggtatttctgttgcgcagaccactgaaggtgcgctttctgaaatcaacaataacttacagcgtattcgtgaattgtcagcacaggccactaatggtacaaactctgactccgacctgaattcaattcaggatgaaattacacaacgccttagtgaaattgatcgtgtttctaaccagacacaatttaatggtgtaaaagttctggcttctgatcagactatgaaaattcaagtaggtgcgaacgatggtgaaaccattgagattgcccttgataaaattgatgctaaaaccttggggcttgataactttagcgtagcaccaggaaaagttccaatgtcctctgcggttgcacttaagagcgaagccgctcctgacttaactaaggtaaatgcaactgatggtagtgtgggaggtgctaaagcattcggtagcaattataaaaatgctgatgttgaaacttattttggtaccggtaatgtacaagatacaaaggatacaactgatgcgaccggtactgcaggaacaaaagtttatcaagtacaggtggaagggcagacttattttgttggtcaagataataataccaacacgaacggttttacattattgaaacaaaactctacaggttatgaaaaagttcaggtgggtggtaaggatgttcagttagcaaactttggtggtcgtgtaactgcatttgttgaagataatggttctgccacatcagttgatttagctgcgggtaaaatgggtaaagcattagcttataatgatgcaccaatgtctgtttattttgggggaaaaaacctagatgtccaccaagtacaagatacccaagggaatcctgtacctaattcatttgctgctaaaacatcagacggcacctacattgcagtaaatgtagatgccgctacaggtaacacgtctgttattactgatcctaatggtaaggcagttgaatgggcagtaaaaaatgatggttctgcacaggcaattatgcgtgaagatgataaggtttatacagccaatatcacgaataagacggcaaccaaaggtgctgaactcagtgcctcagatttgaaagccttagcaaccacaaatccattatccaaattagacgaagctttggcaaaagttgataagttgcgcagttctttgggtgcagtacaaaaccgtttcgactctgccatcaccaaccttggcaacaccgtaaacaacctgtcttctgcccgtagccgtatagaagatgctgactacgcaaccgaagtgtctaacatgtctcgtgcgcagatcctgcaacaagcgggtacctctgttctggcacaggctaaccagaccacgcagaacgtactgtctctgctgcgttaa

SEQ ID NO: 14679 - DNA, 1188 bp, Escherichia coli
atgaacttatccctacgacgctctaccagcgcccttcttgcctcgtcgttgttattaaccatcggacgcggcgctacgctgccgtttatgaccatttacttgagtcgccagtacagcctgagtgtcgatctaatcggttatgcgatgacaattgcgctcactattggcgtcgtttttagcctcggttttggtatcctggcggataagttcgacaagaaacgctatatgttactggcaattaccgccttcgcctgcggttttattgccattcctttagtgaataacgtgacgctggtggtgctcttttttgccctcattaactgcgcctattccgtttttgctactgtgttgaaagcctggtttgccgacaatctttcgtccaccagcaaaacgaaaatcttctcaatcaactacaccatgctcaacattggctggaccatcggtccgccgctcggcacgctgttggtgatgcagagcatcaatctgcccttttggctggcagctatctgttccgcgtttcccatgcttttcattcaaatttgggtaaagcgcagcgagaaaatcatcgccacggaaacagccagtgcctggtcgccgaaagttttattacaagataaagcactgttgtggtttacctgctctggctttctggcttcttttgttagcggcgcatttgcttcatgcatttcacaatatgtgatggtgattgctgatggggattttgccgaaaaggtggtcgcggttgttcttccagtgaatgctgccatggtagttacgttgcaatattccgtgggccggcgacttaacccggctaacatccgcacgctgatgacagcaggcaccctctgtttcgtcatcggtctggtcggttttattttttccggcaacagcctgctattgtggggtatgtcagctgcggtatttactgtcggtgaaatcatttatgcgccgggcgagtatatgttgattgaccatattgcgccgccaggaatgaaagccagctatttttccgctcagtctttaggctggcttggtgcggcgattaacccattagtgagtggcatagtgctaaccaacctgccgccttcctcgctgtttatcatcttagcgttggtgatcattgctgcgtgggtgctgatgttaaaaggaattcgtgcaagaccgtgggggcagcccgcgctttgttga

SEQ ID NO: 14680 - DNA, 408 bp, Escherichia coli
atgaaaaataaagaaaccctaaaacagatttatcacctgcaatatgattcattcgctttcaaaagtggtttaataaactggtataactctttattggataaaacaccggatgaactggatgaaaatgatattgccaaaatgcttcgtcagaatatcttaccagcgcttgctgtacaaaaagcaattgagatgatagagattaatcttatggtaggttatttatataatggagaattattgctggtattgagtaatctcatcgggagtgactatttttctcctttgcatttgctgcaattaaaaaatatcatcagtaaattttatggcaacatgttaaacgcttctaccatgagtgatgaagaaaagaaactatttatcgccaccatgaaatttattatgagttattga

SEQ ID NO: 14681 - DNA, 1248 bp, Escherichia coli
atgcctaagcaactgaaacccttaacaaatgtggagatcgctggcgcgaagccccgtagcacggattatgagctacgggacggtgaaggcctgtacttgctggttaagacttcagggaggaaggcctggcatttcgagtattatcatcccgtcaccaaaaagcgcaccaaaaccagccttggcccttacccggtcgttacactggccatggctcgcgaaactcgcacgaaatacagacgactgctctggcagggcatcgatccccgtcaacacttagcaggaatagccgaagaaaaacgcctccagaatgaatgcacgctggaaaaagttgcggaacagtggctcaaagagaagaaacggaccagcgaccttagcgaagatcacgccaaagatgtctggcgctcgctggagatgcacgtcttcccttctctgggcagtacgcccgtcaccgagatccgcccgaagatgctcaaggaacacctcaccccgctggaagaacagggcatcctcgaaacgctgcgccgggttatctcacggctcaatgaaatcttccgcttcgccatctccgaagagcttatcgagtttaacccagcagacaacctggtcgcccgcttcaagaaaccgaaaaagcagaacatgcccgcccttccccccagcgaactgggcagactaatgttggcactacaaaacgcctctatccgcaaggaaacacgctgccttatcgaatgggagctactgacctgggttcgccccggcgaagccgttagcgcccgctggtgcgacatcgatatgaaaaaagcggaatggcgtatccctgacacctttatgaagatgaaccgttcacacacggtgccgctcagcaaacaggcgctgcgtgttcttcagatcatggagcccgtcagccgccatcgtccgtgggtcttccccagcatccgcaaaccgctggagcacatgcaccagcagaccgcgaacgccgcgcttatccgcatggggttcggcggtgagctggtcgcccacggcatgcgcagcatcgccagaacggcgggcgcaggtcattttccccgtgaagttctggaatctgcactggcacaccagaaagaagacgagatcgaagcggcctacaatcgcagcgactatctggaacaaaggcgaccgctcatgcagtggtggggaaactacgttgatgccgccagacggcaggcattgctcggtgaagaagaaccgctgcggatcgtggaaggagaataa

SEQ ID NO: 14682 - DNA, 645 bp, Escherichia coli
gtgaccagtcccattcgtcagaatctgtttgaacgggaatgcgatatgccgctgctggaagcgcggcatctcgcccttctgcttctcggccttgatgcttcccaacctgcaaacgccctgccggaagaacatcaggaaaattaccgtatcctgcacgacgccatcagtcgcaccatcaaagcaacgggcatggtcagcgccccggcgaacaaacgcatgttctatgccgatgaaatgttcgcgctggcctggcggcttattgatgacgaactcacgccgccagaaattaaggcccggagcctgaaggcagtgatgaaactgtcacgcaacagccgtggccgcaagtggctgaagacgctcggcgacgatgcgctgccggatctcactgcttccacacaaccttccctgcgtgggatgcataagcgcgacaaagcacgggagaatactgccaggctctgctggttactggttcagcttctggttgatgagactgacggacggtatggcacgtctgataaaccggcttcggatcggatacttcggaagctgaaggagctggcgcaggagcgggaattaccgtcagacgggcttgggcgagggacgttttatgaggttttgaagatgggaagggagaaggaagtttag

SEQ ID NO: 14683 - DNA, 1173 bp, Escherichia coli
atggatctcttctcaacaaaaatagctagaaataaactaaatcacaattttaaaacaatctacacagatcctaaacttgctcctgttagggcggtgatccaatcatggggacgcggattactggaacgcagtggtgaacaaactaaatttattaacgaatttcagactacctttaattcttctatgtgggaattatatctaaatgagatgtttattcgtttggggtattcggttgactatacaaaagacagtcctgatttttgtgttagcacgccattaggttataaatttaacgtagaggctatggtctctgacaagccccataaaccgccagtcagtgaaattttcagtgaagctaagtttaagcatcaatctacgctaaaacttcttgggaaaattaaagataagcgcgatctctttaccggaattaatggtaagaagttcccatactcaacaatggaacatgtaatcggtaagccttttgtgttagcattggccccatttgattcagatctatctttaacccagaataatacaatcattaaccgggtattgtttggcattgaagaacctacgatgagagatttagtaaatggtaggcaaagaagggttttatcgattaaaaaaaatgaagacactgaaatacctttaggtatttttacaaatgactcatacaaagaaatcagtgctatcgtgttttcaacgacaggtacttttggtaaggctatcgttcagagtcgggtcgatcgatatgtccgatatacgagattccgagctcttgatgtgaatgtttttattgccaatgaaggtatgaagaacgaaggttctcatacgagaaaacttggtcctgaccattatgttactacgaagcgacaattctacaacaatgaggttgttggcgcggatattgtaatgtgccgaacaagggactacaaggaaactcattttgatggtttgcatgtgtattataatccctatgcaagcgtgcctttagacaaaaacgttttctttcccccagaaataacgcataatttttatgacatagaaaatgacatacctgaccagcgccatcctgatggtgcattagtgtcacgacaggtatttgaaatatctaaagtctgtcgaagacatataattaataactggttcccagaacagtctaaggttctctaa

SEQ ID NO: 14684 - DNA, 540 bp, Escherichia coli
atgtctgactattcatacctaagcattcttaaaacgtgcgctaaaaagctggctcgcattcagaaaattaagctttccaaagcactcgaaatcgttgcccgtgacgcgaaattcaccagctaccatgagctgtccgaagtcgcaaaacgtgccccgctagaacaacggctggttttcgctgcaataggcgaagatactcaagaggatgtgatttatcgcgatgagattttttatgccatagaccgcgaggtggaagatatgctctccggcgacatagcggaaacaaacgcctatggttttagcatagagaatctggaggcaacaagcataaattacgacccaaagcgaggcattctggtcgtccaagtcatatttgattatcagggtgaacaagattctgaacgccctttctctggttcgtcctttgaaattgttgcgaaaatggagctacttcttcgcgacaatgtatggagcctcgtagaaaatagtctggaattgacctctgttaattcaaatgtcgataatgactggtacgattaa

SEQ ID NO: 14685 - DNA, 393 bp, Escherichia coli
atgctcaaacaacttgtcgagaaatgctatgtgcaaaaaccactggacatgttctcgatgacagcaggcaaactaactgggcttgatcaatctgggcctaaactggcttccatcatatgcagagggatagagcaggccaaagatgtacaactcggagagttactttttgcctgcggtatctatggtgtggaagaagaagaagcctggttactagctaaaagattcagtaatcttgaggccttgtatggtgccagcatagattctctgatgagttataaccttcttaatgaggcagtagctgtcaatacgtataacttcttccgtcatccgctcaatgtgtcggctcttaacgagttacaaacagaaggtggattgaaggtgcgccatggatag

SEQ ID NO: 14686 - DNA, 216 bp, Escherichia coli
atgaaaaccagtgcagacagtaacgatgcttttcccgaaagcggcaacgtgcgtatgcggcaggtagtccagtttctggcgatgagtgaatcgtcggtttaccgcctgattaaaaacaccgactttccccgccccgtccacctctcttcccgactggtggtcttcgatgctgctgaaatccgtcagtggcaacagcgccgcgccgccatccgttaa

SEQ ID NO: 14687 - DNA, 2070 bp, Escherichia coli
atgaaacgcgccccttttctctgtaagcagtctccggaccgcacgctcgaagtggtgatccttgccggaagcctggcatgggagacctcacacgtgtggcgaaaagatcccgaccgggaagatgatgttcccccgatggtactcggcccggatgaactggccgatctgagcaatctgaccattatcaggcccgacacgctctacgtccgggtacttcgcaccggcgatatcagtgaagaagagctgctgaaaattgccgtaaaactggcgcacgcgggcgtgcagatggcccggctgatgacccctgacggtgagttactggagaactggaccggacagcttgaacgcctgcgacaggaaagaccttctgacatcctgccggatcacttccgcctcgatgaagaagcactgtggtttgataagctcaccgaacggcgcgacggtgaaagcgatgtccagccccagcgcatctgttcccctctgcgcgtcactgccatcacctgcgacagccatgacggcagctatggccgcctgctggaatggcacaccaccaccgggcaattgcggcgctgggccatgccgatggcgatgctcagcggcaacggcgaggagctgaggcgcattctgctggagaacggcctgacctatatctccacccgccctgccctgcgcagtctgctgtgcgaatatatctcgcggtcactccccggacgccgggtcacctgcgcggagaaaaccggctggcacaacggcgtgtacgtgctgccggatgaggttatcggtcccgatggcgacaacgtcattctccagggcagccactacctgactggcggctttgcacaatccggtacgctggcagagtggcaggagcaggtcgccgcgctctgtgcaggcaattcacggctggtctttgccgtctgctgtgcgctggccgccccgctgctgcgcctgacaggaacgggcggcggaggctttcatctgcgcggtgagtccactgacggtaagaccacggtgatgaaagtggccgcttccgtctgtggcgggacggattactggcactcctggcgggccaccgggaatgcgctggaaggaattgccagccgccacaacgatgccctgctgccacttgatgaactgcgcgaagtggacccgcgtgaggccgggatgattgcctatatgctggcgaacggacagggcaaggggcgcgcccgcaccgatggcgaagtgcgtaaccgcaggcactggacgctgctgctgttctccaccggggagctgtcgctggcggaacacaccgaatgcgccggggagcgcctctacgccgggatggacgtgcgcatggtacaaatccccagcgacaccgggcagcatggttcgtttgagcagttgcacgggtttgccagcggccagcagttcgccgatactctctgcgaccgggtggcccgcttccacggcaccgcctttcgtgcctggctggccttcctcaccagcgacctggacgccagcaccacgctggcgagagagttacttcgccgctaccagaccgccctgatgccggacaacgccggaaaccaggtgcagcgcatcgtggcccgttttgccctgctggcggtggccggggagatagcgacactgaacggtatcacgggctggcaggaaggctcggcgtatggggcggtgcagatctgccttcacgcctggctgaacgagcgcggccatattgccaaccaggaagatgaaggcgtgctggcgcagatcaagcggttcattaccgcgcaccagtacagccgctttgcctcgtgggatggcccggaccgcccgctgaatatggcaggctttcgccgggtggaaaaagatccgctgacgggcgaggaacacacgctgttcttcatcctgcctgagggctggcgggaaatatgccggggattcagtcctgccagagcggccagattatgccaggaagcggaatgcctgctgcccggcagcgacgggaaataccagtcgcaggttcgcctgccggagatcggcaaagccagagtctaccgcctcacctcccgcatcctcagtatctga

SEQ ID NO: 14688 - DNA, 912 bp, Escherichia coli
atggttaaaattcacattttagatgccggacatggtgattgcttgttagtagactgcgatggtgtcaaattgttaattgacgctggcccaagtacatttaggtatagaaaaaaaatttcagccaagttagctgaacttctgaatggcgagtctgttgatatcgcttttgtaactcacaatgatgatgaccatatcggtggtttcaaatacctaattgaaaataaaataaacatcaagagatttgtattcaatagtttatctaacattaaacatgtaataaagaattcaagcaataaaatatcgaccaaacaagatataaatcttgatagaatagtgaaagatggaagttttgtcttttcgacactaacttcagatgactctcctattttaatcagaaatataaaaataacacctattactccttcaaaatatagtattaaagaagcactgcagttgctaagcaatggaaatgatatgtttgtaaaggatccatcggcaactaataaaaccagtttatcatttatgattgagtatgggaatttttgtggattattccttggtgatgcacacgaagaagacatctactcatatatggctaatcattgtgccaatagaaaaatatcatttaacgttgttaagttagcacatcatggtagtgaaaaaaacacgagttcacggttattgaagttaattggtacaacagaatatatcatatgtgcgaataaaaccaagcataatcatccaaataatttaactcttgcaagaattttaatacatgaacaagaacctaaaattcatatgagtagcagcaatcaggagataataaatttactcaatcaaataaatttattaggcttcggcattactgcaacccattctgaaaatggagttaatactttaatctatgagtag

SEQ ID NO: 14689 - DNA, 822 bp, Escherichia coli
atgttgggtacttcgtttcaacagttttcgatagaggcgcttcttgctagtgcttcactacgcagtggactgacagcattgaataagtgtaaatatcatgataaaggcagcttttataatgctttttttcaactgtcaattggtctggaacgtttttttaaaattatttatgttgttcagtatatgattgaaaatgatttgaataaaccaacatatatccatttgaggaaattaggtcatgatataagcattttacatcaaaatgcagtaaatattgcaatcaaatacgagaaaagagacaaaggcaaatgggtcttgaatgatgagcaatctgcaatattgacaatgctatcggaatttgggaaagaaactcggtattataacttaaatactattattggagataaaaaactaatgaatgaccctcttgagcaatggaattatattttggagtattgctactggaagtatacttcaacaactaaaagagagagattgagtcaagaagtaatctcatgggctgagagaaatcgattgtatggttttactaatgaatttggcctcgatggtcatattatgacgtatgtagatcagtatctattgaactggaaagtaaacaaaatttcgccttgcattgcatgggaaataattagcatgttgcaaccgtattactttttgctaatgagattacgagatactgtgcagttgatggaacaagataaaggaattaaagaccctttagtaccatactttcatgaaattttcccatatttccttttagatcgtgcaacagcgaaaagacgtaggaattggcttgattag

SEQ ID NO: 14690 - DNA, 525 bp, Escherichia coli
atggcgactgagtgggtggatgtggctgataatgccgttaaaattgggcttggctctgcgctaacaatattgggcggttatttgacgctcaaattatcacagcagcacgagttaaggaaagaagcattaattcagcgacgtaaagattttgaggtgaaagctgagcgttacgtgaattttttatcctgttcaagaatgatgttacagaaatatatgatgtcctcattaagacatgactgtgaagattatattgaatatacaaggctgcatgaaacggtatcccttacatgcgcaagtaatactatgagaaagctggcctttgatgcttacaacgccgtatctgatgcctgcacaatgggaacagcaaatcgcgatgaaaaaaaaccagtcagggaaaaagctaaagtggctttagataagtttcagggatttgccagtgaagaactacgtcatgagaaagctgcaattgaggtaatgaacaaaaagcgggcattttggtcctttgggcgacaaactgcgcgatga

SEQ ID NO: 14691 - DNA, 639 bp, Escherichia coli
atgacttcaaatgtaccaacaagctttgtccgcgcttatctgagagcttcaacagcagaacaggatgcttcgcgtgccctggaaactatcgaggcttttgccagggaaagaggcctgatcatttgcagctactatattgagaatgaatccggcacccgtcttgagcgcccggaactttttcgtcttctgagagattgccaacaaaatgacattttgcttatcgaggatgtggacagactttcccgcctgtcaggggaagactggaatacgttgaagaaaatgatccggcagaaagacatccgggttatggcggtgaatgtgccgacgacatggattaattctggtatgagtgagtttgatagccggttgtttgcagccattaacgatatgctgctggatatgctggccgctgttgccagaagggactatgaacaacggcgggaacgccagaaacaagggatagagaaagcaaggaaagacggcaaatataaagggcgtaaacctaatcaagccagacatgatgcaattatcaggttgatagaaagcggtagctcctggacacaggtacagaaagtgctagggtgcagccgtggcacaatcagtagcgcaataaaacgtaaatcccggcaatcactctag

SEQ ID NO: 14692 - DNA, 282 bp, Escherichia coli
atggctttgaaactaaaccgtccgaacatcgatgaatctcagcaaccagcaacaaacgcagaaaccgcgcgttttatctccggcgctaccagagcgcctgtagtgggtaaaccaaagttgatgaacttcagactttctgcccattttgaggacatactggaagctgaagctatcagaacagggcagagcaaaacaaccgttctcaaagcggcgctggcgatgtacaacagccaggatgaaaacataaagaatcactggttgcttgagtctgcaaaattctaa

SEQ ID NO: 14693 - DNA, 978 bp, Escherichia coli
atgagatatttaaccgaattgatctgtaacctctacaggttgacagatcaccataaactgaccacagcaacgtttaaaaatcttgctgatattaagttatttaaacctacagcagatgcagacaccatattgcagcttgaaaatatatttagcgaatactcactgagatatattgacagggatctggctgaaattctgagcaacttaataactacagataagaaacactctctggacttcgattttaacaaaatacaatctctgactgactcgaaaagtttcggttgtggatggagcaaggtaataaatggtagttggttcaaagatctttattcgtggggagaggggatgtatcctgccgaaaatctgaaagctgaaaatatttcagactgggaggataatatatggcacattgagcatgaaggtttcaagcctcgcgatcctattaatgttaaatattactcttggattgaccgatatgtggctttaaacagtggtggttcacatcatgcagcaatggttgtatatcaatctgtcagagacaaattagagtataaaagagaagcggttattgaacaactgagcataaattcaaacaccgttgaaatacttggccagaactactattcattcatattccagataaaacaccctagtaataagacagaaaattatacatcagaatatgaatttacagatgctttaaaagactttggacaaaacagacataccacacttaaacctgttaattacgtttctaacataaaattagcatttattccaaaagatgctttaaaaacaaacagcgagacattccgcaactggttttattctgcaattagctacggaaaaataatatcactccctgattatctgaaaaatccagcacattatcatacacatcattactcacatgaactggactcgataacacttggcaacccaagcagaaaatataaactgataggagattcttag

SEQ ID NO: 14694 - DNA, 357 bp, Escherichia coli
atgaaatatcaggtgagagagtttattaacgaaaaatatgctaaggctgttaatattttaaatgataatcttaaagaaaactaccatgttttttatggagtaagattaagtgagattcttttccctgccagtgagtatggctctgatgcattctttaaagagtttgaatcaattaacagtgtaatacttccattagtaatatttgattttatagaccgaaagccgattatggttatcggcttcgataagatacctgatgccagtttgtttgaaggaacaaatattgtggttcttgaatgtactaccctcgccgatcttctgacaaatgataacatttgttttttatataaaagctaa

SEQ ID NO: 14695 - DNA, 843 bp, Escherichia coli
gtgaaaactgtaacagggttaacgaaagtcaggcatagaaatgaggttggcgttactctggcatctctttctctttctgcgaaacgggttttatttctcgcactttgtcagattgatacaaaggaaatgttgaatgatgatattttggaggttgatgctgattttttttctaagacaactactttggataaatatgctgcatatgcggccttaaaagaaggtgcaaaagttctggcttcaacgacattagttttaaatagagatgatttaaaaaccctatctaatgaattgggaatatcaacatctaaaaacaagatacctgacagattggatttaaatttaaccgaattttgtgcctattatgatcatttggctactgttcgtattaaatttactaatactgcaaaaagatacttttcaaaacttattggctctgaaaacagatatacaacacaggtgttaaaatctgttgttatcttgaacagtgtaaactccacaaacttatatcaggttatcagaaaatactatagtttaaaccctgcgagtaaatccttcgaaatttcagttgaccaactgaaagaggaaatggggctttataatattgaaaatggtgagaaggtatacagatatccaaagtactctttttttattcgtgatgttataaacaaaagtataagagaaatcatagaaaagacagagataagggatataaaattttcagtggcaggaaaaaaaggacgtatggtgcatatgctaagatttgatttttctctcaatgaagatatttctctttctgatgatgaagctaaattcttggaagagtttgataaaaaagtcctctag

SEQ ID NO: 14696 - DNA, 576 bp, Escherichia coli
atgcaatatgcattgtttgatggatttgaacgaaagtttttgctggatgctcttgaatttggtgttctgaaggactggaaagaaaatccggtaaaagaacttcctgatattgatgaatctgttcaccccttccatgtctgctatggtggatatttattaaatcctggtgtttcagattctgatattagcagaaaaataaaagaccagacaggattctggctggcagctattgatgacacccgcatggattgtcattcaatagcttattatgatattcacacactccctatgatttcgtgtggtcatcagaagatagttccttttgccgcgttaataaaagctgatgaatgcatcatttcaaaaattgcttcgtattctggttttgctgtaacagcctttttgagaattaaagactgggatattgcaactaatatacttaaccgtgagggaatttttgcctttaatggctgtgagcgcagattcaaacaacctgtaagtgaagataactggcaacaggaagtatcagaagaacgcgctatccgttgtgccaaaagattaattcaatgtaaaggataa

SEQ ID NO: 14697 - DNA, 2154 bp, Escherichia coli
atgaaactttttattgcagaaaaacccgcagtagcaaatgatattgttaaggctcttgggggcaatttcacccgtcatgatggctggtttgaaagtgataacgccattgtgactaactgttttggtcatattatcgaatcacaaccgccggaaaactataatcctgaatacaaagcctggaaggttgaaacgcttcctttacgtctttatcccgtgaagtatcagcctgttgaaagtgcagcaaaacaggttaaaacgattctcgaacttatcagacgtggagacgtgactgaaattgttcacgctggcgatcctgatgatgagggacagctacttgttgatgaagtcctggaatatgcaggaaacacaaaacccgtaaagcgcgttctgattaacgacaacacgcttccggcagtgaaaaaggcactggcaaatcttaaagataatcgtgatttcaaagggctttaccttaaggcgctggcgcgttcagttgctgatgccgtctatggcttctccatgacgcgtgcttacaccattcctgcaaaagccagaggatatcagggcgttctgtctgtcgggcgcgtccagacgcccgttcttggcctgattgtgaatcgtacccgtgctaaccagaaccataaatccagtttttactacaccatgaccggagtctttcagcgtggtgctgatgttatcagggcgaactggaagccaggggaatttgctccgctgacagaccgtaaattacttgataaagcgtgggcagacggaacggcagcatcccttgcaggaaaaccggctacagttgaagcggcagcaactgatgataaaaaaacggctgcgccgttgccgtttaacctggtcagactccagcaatacatgaacaaaaagttcaaaatgacggcacaaaaaacgctggatattacgcaacaattacgtgaaaaatataaagcgattacttataaccgctctgattgctcatatctttctgatgaacaattcagcgaagcgccgcaggttatcgatgccctgaaatcagtctttcctcagtcgctggatattgattcttcacgtaaaagcaaggcgtttaacagtgcaaaggtgactgcgcatactgcgataatcccgaccgccagtgtgcctgatgttaacgcactcagtaccgacgagcgcaatgtttacctggcgatcgcacaacactatcttgttcagttcatgcctgaaaaagcataccaggaagtatcggttgccattcagtgtggtgatgagtcgttctatgcccgtgccagaaaaacaactgacagcggatttgaggcgtttcttggcgcggaaaccacagacgaaggtgaatcagaagataatgatgattccgcttttgaactgctctgtaaaattcgcacaggagaaacactgacgacaaaagaagttattgttaatgagaagaaaacaacaccgccgccgttattcaccgaagcctccttgcttgctgcgcttgttcgtgtcgcggattttgtcactgatccaacaattaaaaaattgttgaaggataaggataaagacaaaaaagatgaacatggtggcattggtacgccagctacccgcgcagccattctggaaacgctgaagaaaagaaactatatcacgctggaaaaagggaaacttattcctactgataccggatatgcgcttattgatgccctgcctggtatagcggttaatcctgatatgacagcattatggtctgaaaagcagacagccattgaaaatggcgacctgacggttgaagagtttattaatgagctgtacggtgaactgacaggcatgatttctgatgttgacctgggcgagatgaagattgaacccgctgcgccagcagggcagtttcaacgcctggactctccctgcccttcctgtggtaaacatattgttatcaggccgaaaggttatttctgtaccggatgtgaatttaaaatctggagtgagttttctggtaagaaaatcacccaggcacaggccgaaaaactggttaaatcagggaaaaccgatttgattaagggatttaaaaagaaaagtggtggaacgtatgatacagttcttgtccttgaggataagaaaacagggaagctgggttttccggcaagggctaagaagtga

SEQ ID NO: 14698 - DNA, 186 bp, Escherichia coli
atggtggccttccagctcgatatcgtggagattctttttcacggtccgcacatgatcgcgtgctgcgcgctgggcgacgtgcggcagccgctgcaacaccgcgttgtagatcctcgcatgctggcgatcgatctgctttttttgctgtggtcaatggtagagattatttacgctggcaaacactga

SEQ ID NO: 14699 - DNA, 417 bp, Escherichia coli
gtgagcgaaattaactctcaggcactgcgtgaagcggcagagcaggcaatgcatgacgactggggatttgacgcagaccttttccatgaattggtaacaccatcgattgtgctggaactgctggatgaacgggaaagaaaccagcaatacatcaaacgccgcgaccaggagaacgaggatattgcgctaacggtagggaagttgcgcgttgagcttgaggcagaaaaacagcgggcaaaggatctgtttatggaaaatgctcggcttaagtcaggtatagccggtctgatacacctcggtattcgatatgcagatgttgaggtcatgagaattgctggagatgcccagctttctaccccatgcactgacagcatcataaacagcattgcaacaggcattcgcatcaaaggagagtga

SEQ ID NO: 14700 - DNA, 282 bp, Escherichia coli
atgagtatcaatgagttagagtctgagcaaaaagattgggcgttatcaatgttgtgcagatccggtgtcttgtctccatgcagacatcacgaaggtatttatgtagatgaaggtatagatataaagtcggcatacaaatattccatgaaggtttataagtctaatgaagacaaatccccattctgcaatgtgcgagaaatgactgataccgtgcaaaattattatcacgagtacggtggaaacgatacttgccctctctgtacaaaacatatagatgattaa

SEQ ID NO: 14701 - DNA, 168 bp, Escherichia coli
atgcacttccgagtcacaggagaatggaatggagagccattcaacagagttatcgaagcggagaacatcaacgactgctacgaccactggatgatatgggcgcagatagcacatgcagacataaccaatattcgaattgaagaactgaaagaacaccaagccgcctga

SEQ ID NO: 14702 - DNA, 1191 bp, Escherichia coli
gtgtataagagacaggtatacaacgtacactttgataataatcaagagttagttgctgatggtgagcctgacgtagtatttttaaaaaaaacggtgtgggaagaccttctcgttaaactaaagctggagaacaaagaaaatgcggtttctgaaattaacctgtcatctaataaaaataatgttgatcagtttattgaatgcgctaagagaaatgaacagaccctattcggcaatataagaaaaagtgattttcatgttgcttcacttcagccaggtagaacgcgtagtgttatttcagaaacgccgccaaatgactgtatggaatcacataatttatatgaaaaccacacagataaggtttcaactgtaactaaaaattctcagcaagttaaaggtcactatggagataagttgaaagaaatgcagttgttcctcaaccagatgagcaatgcacttcaacaggattcatctttgttagagtcaaaggaacacaccatagatattcaagaaaaaacgaataagtttgtgcagcattttcagcgggtattatttgataaaaatggaaggtcatcagagtttctacttaatttttatgagtgttgctataagtttttaccaagagcgcagcctcaagataaaatcgatagctataattcagcactgcaagctttttccatcttttgttcatctacgttgacacataataatgtagggtttaatttcaaattatttccagaagtcaagttgtctggaggagagcttgaaacggtattcaaatacaaaaatggcaattttgtctgggagatagccagaattaaaattgctctcccaaaagaagagggtagtttatataatttacgtggattggattttaagggatgcttcttttctggacagaacttcagtaactatgatattcaatatgtgaactggggaacgtcattgtttgatgttgatactccgtgtatttttaatgtgcctgatgacaataagagttatgataaattattaaaatccgtcagcgaaaatggtttaaatggagtcttgactgatcgtaataataaaataaaactaatcacgggcgtggcaccattcgatggtatttcatctatggatgatgactttgatgatagttcctctgaggaaaattcccctgaggatagtcccattgagaatcgtccccttgtataa

SEQ ID NO: 14703 - DNA, 4575 bp, Escherichia coli
atgaacaggaccagtccctattattttcgccgctcagtactttccttattgatatctgccttaatatatgcccagcccgggatggcggccttcactactaatgttattggtgtggtaaacgatgagactgtagatggcaaccaacgagtagatgaacgaggtacaacaaataacacacatattatcaaccatggccggcaggaggtctatggtgggatatctaatagtagtattattgaaactggtggcgagcaactagtatcaatccatgccgatattaacgggcaagctaataatacaaccattaatggaggcagacagtcaattgagtacggaggaatttctactggcacgataatcgaaagtggcaatcaatatgtttataaaggtggtaccagcaatgacacgacaattaagggcggtacttcacgcatagagggggggactgcaaatggaacaatcattgatggtggaggccagtcagtatcaactcaggggcatgttgacggtacgacgataaataagtctggttatcaggacatcacgcaaggaagtctggcgacgaacacaaccataaatggtgggcgacagtatgttgaacagagcacagtagaaacaaccgccattaaaaatggcggtgagcaaagagtatatgagagccgtgcgctggacacgacgattgaaggcggaactcagtctctgaatagtaagtcaacggcaaaaaatacgcagatctattctggtggtacgcaaattgttgataacacgagctcctcggatgttattgaagtttattccggcggcgtgcttgatgttagaggtggtacggcaactaatattactcagcacgatggagccgctttaaaagtaacgacttacgatttgacggtgagcggtacgaatagtgaaggggcattctccatccacaataacgtggcagagaatgtgttgctggaaaacggtggtcatttagacataaacgcatatggttcggcaaataagacgattattaaagataaaggaacaatgtcagttttaacgaatgctaaagctgatgcgacccgaatagataatggcggcgttatggatgttgccggaaacgcgacaaataccataattaatggtggcacacagaatattaataatcatggtattgccacgggcaccaatatcaacagtggaacgcaaaatatcaagagcggcgggaaagctgacacgacaaatatatcctctgggagccggcaggttgttgagaaagatggtacggcaactggcagcaatattagcgccggaggctcgctgattgtctataccggcggtattgcacatggggttaaccaggagacgggcagtgctttagttgccaacacgggcgcagggactgatatcgaaggatacaacaagctctctcacttcactattaccggaggagaggctaattatgttgtgctggaaaataccggcgaactgacggtaatggctaaaacctcggcgaaaaatactaccattgatgctggcggtaagctgattgtccagaaggaggctaaaacagatagcaccagacttaataatggtggcgttctggaggttcaggacggtggtgaggctaagcatgttgagcaacaatccggcggcgcattaattgcttccacgacctccggaacacttatcgaaggaaccaacagttatggtgatgctttctacatcaggaattcagaagctaaaaatgtagtgctggaaaacgctggctcattaacagtcgtcactggttcccgggcagttgacacgattattaatgccaacggcaaaatggatgtttatggaaaagatgttggtactgtacttaatagtgctggtacccaaacaatatatgccagtgccacttctgaaaaagcaaatatcaaaggtggcaagcaaacggtatatggtttagccactgaggcaaatatcgaaagtggtgaacaaattgttgatggtgggtcaacagacaaaacgcacatcaatggcggtacgcaaaccgttcagaattatggtaaggcgatcaataccgatatcgtctcaggcctacaacaaattatggtaaacgggacagcggaaggttccattattaatggcggttcacaggtagttaatgagggcggtctggctgaaaactcggtgcttaatgaaggcggcactctcgatgtgcgggagaaaggcagcgcaacggggatacagcaaagtagccagggcgcgttggttgcaaccaccagagcgacgcgggtcacagggacacgcgctgatggcgtcgcgttcagcattgagcaggatgcggcgaacaatatcctgctggcaaatggcggcgtgttaaccgtggagtcagacaccacttccgccaaaacacaggtcaatgcgggcgggcgggagatcgtcaaaacaaaagccactgcgacaggcacgacgctcaccggcggcgaacaaatcgtcgagggggtggcgaatgagacaacgattaacgacggcggaatacaaacagtttcggctaacggtgaggcagtaaaaacaacgattaatgaaggcggtacgctgacagtcaacgataatggcaaagcgacagatatcatccagaacagcggtgccgctctccagacgagcacggctaacggtattgaaatcagcggtactcaccagtacggcaccttttccattgccggaaatttagcgaccaatgtgctgctggaaaatggcggtaatttattggtattagcaggtaccgaagctcgcgattccacggttggcaacggtggggcaatgcaaaacctgggtcaggacttcgccacaaaggttaattccggtgggcaatataccctcggtcggtcaaaagatgagtttcaggctctggcccgggcagaagatctactgatcgctggcgggacggcaatcgtctacgcaggtacgctggcggatgcatcggtcagtggcgcgacaggaagcctgtcgttaatgacgccacgggataatgttacgccagttaaacttgaaggggtggtccggattaccgatagcgcgacattaactatcggaaatggcgtcgatacgacgcttgccgacctgacggctgccagtcggggcagtgtctggcttaacagcaataattcctgtgcaggcaccagcaactgcgaatatagagtaaacagtttactcctcaacgacggtgatgtttatttatcagcacaaacagcagcgcctgccacaactaacggtatctacaatacgctgaccaccagtgaactttccggcagcggtaatttctacctgcataccaacgttgcagactcccggggcgatcaactggtcgtcaacaacaacgccactggcaattttaaaatctttgttcaggataccggcgtcagccctcagtctgacgacgcgatgacgctggtgaaaacagggggaggggatgcttcgtttacgctgggtaataccggcggtttcgttgatcttgggacctatgagtatgtcctgaaaagcgacggcaacagcaactggaacctgaccaatgatgtcaaacccaacccggaccccaacccaaatccgaaaccggatccaaaaccagacccaaaaccggatccgaaaccagacccgactcccgctccaacgccgacacccgtcccggagaatcgcatcacgccttctacagcagccgtactcaatatggcagcaacattaccgttggtctttgatgctgagctaaacagtattcgcgagcggttgaacataatgaaagcgagtccacacaacaataatgtctgggggacgacgtataacacccgtaataatgtcaccaccgatgcgggtgccgggtttgagcagacgctgaccggaatgacggtggggatcgatagccgtaatgatattcctgaggggattgcgacgctgggcgcttttatgggttattcccattcacatattggttttgatcgtggaggacatggcagtgtgggcagttattctctggggggctatgccagctgggaacatgaaagtggtttctatctggacggtatcgtgaagctgaaccgctttgaaagtaacgtagccggtaaaatgagcagcggtggagccgccaacggcagttatcgcagcaacgggctgggcggtcacattgaaaccgggatgcgatttacggatggtaactggaacctgacgccgtatgcatcgttaacggggttcaccgctgataaccccgaatatcatttatccaatggcatggaatcgaaatcagtcgatacccgcagtatatatcgtgaactgggcgcaacgctgagttacaacatgcgtctggggaacggtatggaaattgagccgtggctgaaggcggctgtgcgcaaagaatttgtcgatgataaccgggtgaaggtgaataatgacggtaatttcgtcaatgatttgtcgggcagacgtggaatataccaggcaggtattaaagcctcattcagcagtacgttaagcggacatctcggggtggggtatagccatggtgccggtgtggaatccccgtggaacgcggtggctggtgtgaactggtcgttctga

SEQ ID NO: 14704 - DNA, 576 bp, Escherichia coli
atgactatagccgcagcttgggtaagaactttaagaaattgcaaagaattgattgtagtatcagatagtagattaaatggtggtatgaaaatggattgtgggcagaagataataactctgcctcgttcagatgctttcatatgtttcgcaggtgatactagttgggcatatcctttgatgcatcaagtggcatcagcaattgatatatatgatcgttgctcctcacgagcccaagatattaaagaactcaaaacccatattcttaaaatttttgaacgactgagagagcaaattcacgatgccataggtgacatggatatacccgatgcaaaattcatattcgggggatattcatggataagaaaaaaattcatgatttggcacatcacctaccaaaagagtaccaactcttttcgtgcggatcctgcacgtgaaatatatggatcacctgttgtatttactggtgatgaagaacatgtaattgtagctaatgctatgcttcgtgaaaaattaaaatcaagagggaagctggataatttagaaaaaggcatgaaaaatactgttaaatttgaatga

SEQ ID NO: 14705 - DNA, 1098 bp, Escherichia coli
atggcagtagaaaatcgagaaagacttaacgaaatccttcgtgaactaaaagacggtatgtcctcaaacccagtatcagtgcgagaattcataagctggtttggcgcagagcgtcgaggctacatggttgcgtacaaaattcgcaaagcattagaaagcttaggagttaaaaccgaacctgattttgatagtgtgccgctggatgcaaaaattactatctatgcacctccggggaatgacgcaacgccccatgaagcaggtgaatgtttacatgaagaaaccgaatcaagtaacgccgaattggctacacctgaaacagtatttcagccgcatgatgaactaatttccggtgcagtttccgagccagccttccgtgttagtcgactcgaagcatcggatgttaaactagtgaccgtgaaacctgacgctacattaacagaagccatcacattgatgttgcggcatgactactctcaactacccgttatgaccagcgagcgagatgttaaaggtgttattagttgggaaagcattgctccaatactagcgttgacccaatcagaatctgcggttgtgcgtgattatatgaagccacacagggaaataaacgccagtgactctattttttctgcactacctagaattattgagtatgcttacgtattagtgcgatcttctgatcaaagaattagtgggattataactactaccgatcttagttctcagttcagacagttgtcagaaccttttcttttactatctgaaatcgaaaatcatattcgtaagctgatagatggaaaatttacgaaagatgagcttgttagcatcgttaatccatttgacagcgaacgggttatagagtcggtcgcagatttaacctttggggaatatatacgactttttgaaaatccagaattgtggaaaaaaaccgaacttcaaatagataagaaaatatttactaaagagctcgacaaggtcagaataattcgtaacgacgtgatgcactttgacccagatggtatatcagaggaaaatcacgagcttcttcataactttgtaaggtttattcatactatacaaagcctatcaagaaaataa

SEQ ID NO: 14706 - DNA, 1023 bp, Escherichia coli
atgtctagtcttaatttattcgatgatgtcgtacctttagaaaaacagcatccaatatatataatgatgaaaaaggaacgctatgaaccggagagagaagtaattaaccaatgggcaaaaggatttctagacagggataataagtttacaaaagaatttcaaacaagttttgaaccttgcctatgggagttatatctttttgcttatcttaaagaattgggtttaaggaacgacttttcatacgatgcacctgacttcatcgtcaatgaacctgggttttgcattgaggcaaccatagcccttccggcacaaggagcccctggagcgcatggtttcagtacggaagatatgccaagagattttaataagtttaattctgaggcatctattcgacttagcaatagttttatatcaaaggtaaaaaaattaagatcgagatattctcaacttcctcaatgtaaagaaaaaccttttgttatcgccatagcttccttcgaccgaccttttgcgcactttgccgcagccagacccatacttgcaacattatatggtttatatcatgatgaagaagcaaccattgaatcaggatcaaagagcataatttcttataacgttgaggctgcggtaaaaaaagaaaatgttaatatagccatggggttattttgcacgcctgattattcggatgtaagtgctgtgatttatagtagtttagctacttggggaaaagtaagagctttggcggacaatccttcagctctaacaatttatacaacctttaccccaagagaaaattcattatatcctaaagttcatcaagccaaaaaaaatgattatatagagcatctggcagatggattgtatattttacataacccatttgccaagtatccgttgcctaaagagacgctaagccaccctagagtagcacaaggttatgttgaatctgatggatacgtcaattttgtagcgccagaggattttcttttattgcgttttttacaatcattcaatcttaaagattag

SEQ ID NO: 14707 - DNA, 537 bp, Escherichia coli
atggtcaccacacatgttttcatcgcggtcagtcttgatggttatatcgcccgacaggatggcgatatcgactggctgttaaagcgcgatgacccgacagaagatcatggctatgccgcattcatcgcggacaaagattggatcattatgggacgaggcacctatgagaaggtgctgacttttgacgaatggccttatgatcggcccgtgctggtgctttcccggcagctaaccgatactcccgtgcccaaggcgctgaagggtaaagtacagttttcatgccgcacgccaagggaggctcttgctgaccttatggagaagaacgtgcaccgggtttatatcgatggcgggcagttaatacagtcgttcctgcgcgaaggtctggttgccgatatcgttatcacaactgttcctgttctgctcggttcgggaaaaccgctattcggagtattaccccatgatatcgatttgacgctattatccagccgcagcttcccttcgggtctggtgcagtcgcactatcggctgacggcataa

SEQ ID NO: 14708 - DNA, 1680 bp, Escherichia coli
atgagtatcttcgaggcgcattttcgcaggctgcacgcccgctacggcgcaggtcagacgcacgaattacagatgcaggagatcgccgccatcttcggctgttcagtgcgtaattgccggattgctttgaaaaagatgcatcaggaaaaatggctcgactggcagccccagcgcgggcgtggcaagcgctcacggctccacctgttaacctcgccggaaaagctgttcagccagaacgtcaataagctactggagaagcaggattacggcaacgtgctgcggtttatcggcaacgacaagtatctgctggatcgcctgagcctgtggcgctttggggtacaggataaaagcagtgaaacgcgggtgcgcatcccctactatcgcaatctggatccgcttaacccgctcgtccccctgcggcggaccgaacgacatctcctgcgacagtgcctcagcgggctgacgcgctatgacgccgttcagggcaggatcatccccgatatcgcccactactggacccacaacgacgactttacccgctgggagttctggctgaaatccaccgcccgctttgccgatggcagcgaactgaatgccagcgccgttcagcgctgcctgctcgccgccagccagagcccgcagttcgcgccgcttttcagcccaatcaaaaccatcaccgctgacgccccctggcatctggtgattgaaacgtaccatccggtcagacggctcgactgcctgctcgccactcagccgacgatgctgttcgattaccagcacggacacatccgctgtaccggcgctttccacctgcaggaacacagtgacaactttatggttttgcggcgcaatcaacactggcaccaggcgaggcccggactggatgagatcaccattttcacctgggctccggagcatatcagcatgagctttattcccctgctgcggggcgaagaggcgcaggatgaccgcccgctcaacgagcgtagtctggagcagggctgctgttttgtgctgctcgacggtgaaggtgcctttgcggatgaggccggaagacggtttatcaattacctgctgcaacctgtcgaactcctcagccagacgcagcttcctgacgaatacgcacgcatcctctccgttgctcagggcatgctgccgcagtggaatcaccgcccggtggatttcggcgggatcaccgcgccgtttaacctgcgtcagccggttatcatcagcacctttcagcagccggaactggtggagcttgccggagcgattcgcatcctgcttgaacgctggcatattcgcgccgagatacggatcgacgcatttgacagcttcaacagccagccgcgccctcctgcggatatctggctcagcaactttatgctcgataccctttcggttccggcttttctggaatggctggcttccaccacgctgtttacgcgactgcctgaaacccagcgacaaaacctgaacgccctgctgccgaccattctgaacagcgataatgaacaggcgttcgcaaccattgccgcctttttccatgagatgacccaccagcgatatgtcattcctttgctacatcactggatggaatttgcgaccgagaagtcatttacctggcgcgatttaaatacgctgggatggccggattttagccaactttggctcgaataa

SEQ ID NO: 14709 - DNA, 1527 bp, Escherichia coli
atgaaaagattcaaccttctgcaaatgttacaaagcatcgggcgatcgttaatgatccccattgccatgctgcctgccgccggtattttgctggccttcggcgtcagctttcaggatcccaatattgtcgccagcctgccgtttctcggcgctgactggctggttcacgtgctgaagctgatggctgaagcgggcagtgcgattttcgctaacctgccgctgctgtttgcggtcggcgtggcggtaggactgagtgacgatcaggggattgccgggttgtcggcgatcgccggttttctgattatgaacgtcaccatcggccagtttctggggatcacgcccgagtcggtggcgcaggtacgtgactacacgatggtgctgggcatcccttcgctccagaccggcgtgtttggcggcatcattatcgggattatcgccgcctggctgtataaacgctattaccgcatccagcttccttcatggctggagttcttctccggcaagcgatttgtgccgatagtgacctccttcgccgcgctgtttgtcgggctggtgatgacggtggtctggccgccggttcagcatctgattaatggcctgtcgaatactatgacggtgcaggggccgggcgtgtccgccttcctgttcggttttgtcgagcggctgctgattccgtttggtcttaaccatgtctggtggccgacgttctggctgcagtttggcgagtacgtgaacaaagccgggcaggtggtgcatggcgaccagcttatcttctttgcccagttgaaagatcaggtgccgattaccgccggaacctttatggccgggctgacgccgatcaagatgttctgcattccggcgattgcggtggcgatctaccgctgcgccagcccggaaaacaaagcgcgggtgaagggcattatgctctctggcgcgatcacctccatcgtctgcggcatcaccgagccgattgagttctccttcctgtttgttgcgcccgtgctatatggcattcacgccgtcctggcggggctggtgttcctgctgatggagtggttcagcgtgcacatcgggctctctttctccggcgggcttatcgactatttgttctttggcgtcctgccgcgcgcgcctcactggtacatggtgttcccggtcgggctggtgatgggagcggtgtactacgccctgtttacctttgccatccgccgctggaatttgctgacgccggggtgtgaagtcgaagaaagcactgtggcgcaggaaaacgaacagaacgacctggtgagcggcatcattctggcctatggcgggctggggaatatgacccgcatcgaagcctgcatgtcgcgtctgcgcattgacgtgacggataagtcgctggtggacaaagcgctgctgaaacagcttggtgcggcgggtgtcgtcgaggtcgggaacaacattcaaagcgtctttggcatgaaatccgatcggctgaaagaggcgatccgcgcagctaacgcgtatacacaggaggcaaaatga

SEQ ID NO: 14710 - DNA, 843 bp, Escherichia coli
atgaaacagctacaccacagcggcttaccgctgtatctcgatgacgacggcgtgatggtgctgaaacccccgctgaactatctcggctttggccgcaaaagcgccgggcagatggcggtggtcttaccggagttcaccgaagcgcagcgtgatgaaccggcttacgatgtttatcgcgggctcagttttgcggaggatcaggaacggcttgctgccgaccagtatcagtacgacatcaccatcatcatgtcgggaacgattggtagggagcgcaagaaaaccagcggtcattatcacggctataacgacacgcggcgcaacacccatccggaattatatgaagtgattaaggggactgcggcatatatcctgcaaaagtcgccggattttgcagtcgcgccaaaagatctgctggtggacgatcttatcgtggcggtggtgaaggagggggaaagcattatcgtgccgccgaattacggccactgctccatcaatattggcgacgggccgctggtgttcagcaatctggcctataaaccctgcgcggttcactacgacacggtgcagttttatcacggtatggcctgctacatcgtggaagagaacgggcagctctgcgtgcgcaagaatcattactacccgcatattccgcgcatcaaattcgccaccgtcaaagggaacccgcatcttggcatcaccttcgatacgccgctttatcaacgctatcgcgccgcaccggaacgttttcactttctggggcatgtcgataactatgtccgggaaatcatggggatgctccagtatgaggatgatttattcccgctctgtcaggaggacgcatga

SEQ ID NO: 14711 - DNA, 567 bp, Escherichia coli
atgatggaaacgcaatctgttgcaggtgtcgcctgtactgacctgcatcaggcgatgtcgcggattgatggcgctgcgctggcacgtctggagcaggccatcgctgaagcgaacacggtgtttgtttttggcgcagggcgttcgctattaatgctgaaagcttttgcgatgcgcctgatgcatatcggcctgaaggtgcatgtggtcggcgatgtggtcacgcctgcgctgaaaaatggcgacctgctgttactggccagcgcatcgggtgaaacggcttcgctggtgaatgtggcaacgaaagcgaagcaactgggtggcactgtggccttgctgaccattttccccgagtccacgctggggaatctggcggaggtagtggtcaggatcccggcctataccgacaaactgccggatggactcgataacgtgaaaggcattctgcccggcggcagcctgtttgaagaggcggtcatggtgctgggcgatgccatgattgtgaatctggcgcagtcgacgggatatcgcttaaccaaaggttttgcgctacacgccaacctcgaatag

SEQ ID NO: 14712 - DNA, 636 bp, Escherichia coli
atgaaattacagcttgccctggacgagttaaccctgcctgaagcgctggtatttatcgataaggtggttgacgacgttgatattattgaagtgggtacaccttttcttattcgggaaggcgtgaacgcgattaaagtcattaaagagaaatacccgcataaggaagtactggtggatgcgaaaattatggatggcggccattttgaatcgcagctgcttttcgacgccggagcagactatgtcacggtgttaggtgtgaccgacctgctgacgatccagtcatgcatctgtgcggcgaaggaggctggaaagcaggtggtggtggatatgatctgcgtcgacgatctccctgcgcgggtccgcctcctggaagaggcgggcgcggatatgctggcggtacacacaggcaccgaccagcaggcggcagggcgcaagccgattgatgatttgataacaatgctgaaggcgcgccggaaagcacggattgccgtagcaggcggcatcagtagccagacggtgaaagactatgcgctgttaggcccggatgtggtgattgtgggatcagcgatcacgcatgcagcggatcctgctgatgaagcgaggaagatttcgcaggtgttgttgcagtatcactga

SEQ ID NO: 14713 - DNA, 1152 bp, Escherichia coli
atgtccctccctacaaattttaatgatattcttcgtctttttgaaaaagattacgatacagccaaagaagataatgccttaagtgcacgcggacaatttctgcaactttacccccttaatcgcctaaaaaaaatgacgcttgatgactatgtcatcggcaaaggcacggcctcattttgtgcttgtgttgaagtaaaaaccagaacatgggcaaatatgcaaggtgcgacggcgctcaaatttggtatttattatggaaaatcaaaatcagatccagccgtccgctatcgttttactcagaaatttggcgatgatgatagtactaataaagaagttttcgctaatgttaaagacgctttactagacctaatacagtcagggaaagaattagattttagagcgattgacgagaaccccctatcccaaatgtttaaggctaaaatattgagcctttactttccagaacactttataaacatttgcagcaaagatcatcttaaagaaattgctatgaaaatgggtataaaagagcaacagtttattagtaaatatcaacatttgttattcaagaaaaaactagagcataaaatcacccgaaactggagcaatccaaaatatatgtccttcctttatgcccagttcatacgtaaggatcttagcagcgctcctgctgtgatagttaaaaaaccacaaaaaagaaaccatcccgaagtcaatttcgaagaaataacggacaatcgtgatttaataggcaaaaaaagcgaagaatatgcattaaactgggaaaaaaaccgcctaatcggtctcggctattcaaaactagctgaggaaatagatgatcgccgtaatcgtccaacttatggttacgactttctttcttttaatgccccaggtgatgagcgatacatcgaagtaaaatcaattggccgagatggaaaagagggagcattccgttttttcctctcaggaaatgaactcaccgtttctaatttaagtaaccaccgtaaaaactattatttttatcttgtacagtatgggaaagatggagagccatgcaatctatatgtaaaacatgctcaagatctttacactaatagtgaaatgaccccttgtgcttacgttgttaggttcgatctggaagaacctgcttaa

SEQ ID NO: 14714 - DNA, 1014 bp, Escherichia coli
atgaacaaaatcagagccgccgtggtcggcgcaggtatctacggcaaacaccatatgaatgcgtacctccataacccggacaccgtgctggtcgccatctgcgacaccgatacagaacgctgcgacgacctcgccatgacctgtggcgtgatgggttatacccggctggatgtcctgttacaggaggaagccatcgacgtggtctcggtggcgacacctgacccgtaccacactgaatccatcctcaccgccctgcgccacggcaaacatgtgctggcggagaaaccgctcgccacctcagtacgcgagtgcgagcttatcgtggagatggcgcaacagcgcggcctgctggtcggcgtcgatttccacaaacgctgggacccggcggtgatgcgcatcaaagccgaactggagaaaccggagaccgggcggatcctgcgcggccatatcagtatggacgacgtgattaccgtgccgacggactggctggactgggcgggcgcaagctcccctgtgtggtttctcggctcacactgctttgacctggtgcgccacctttccggtcaggaagtggtgtcggtgtatgccgccgggcagaaacggctgatgaccgaatgcggcctcgacaccttcgacagcgtgcagagccttctgacgatggccgacggcagttcgtgggtggtggaaaactcgtgggtgctgccggagggcttcccgaaggacaacgacgggcgcattgatattctctgtgaggcaacgtatatccgcagcacctcgcagcatcgcgggctggaaatcaccacgccaggcatgacgctcacgcccaacagctacttcatcaactaccgcaacggtgtcgccagcggtttcggtatcgatccgataaacgactttgttcgcgcggtcaggaaccgttcgccgtacccggtgacggcagaggacgggctggcggtcagccggatttgcgaggcggtgcaccgcagtctggagagcgggaaacctgaagatgtttaa

SEQ ID NO: 14715 - DNA, 981 bp, Escherichia coli
atgaacacggtgctcattccccccggtcccggcggctatggtaaggggctttggctacccacagggagcggcaaaaaggtactgtcgctgaccgggcgcgagattcatccggtggcgatagaaatcggcgcacttaccgaatcggaagtggtgaatggctttgccgatatcccgccggataacgacatcctgtgcgtggtgattaactgtgccgggtccctgcgctgcggcctgtatccgcagaagggtatcccgaccatcaacgtgctgcctacctggcgggccggaccgctggcgcactttattagcgaagagaactacgtctccggtgtgacgatagagcaactggttctggtggataccgccgaagcgccggactgtcagcctgagtcagttccagctccggagccagtcattaccaccgctcctccacctccgcgcggtgcggagaaactggtgcgcatggtcgagcagaccggcaccgccgtcggccacgttatcgccctgctgttcgccgccagccgtgaggcggtggacgtgtcgctgcgcaacgttatcccgtttatggcctttgtctcgctgctgattgccctggtgcaggagaccgcgctcggcagcctgattgcccacgccctgacgccgctggcgaactcactgtggggactggtgctgctgtcgctcatccgcggcattccgtttctctccccggtgctagggccgggtgcggctatctcgcaggtgattggcgtgatgattggcacacagattggcgcaggggcgatatctccggccttcgccctgcccgccctgtttgcgatcaatgtgcaggtcggctgcgacttcgtgcctgttggcctttcgatgcaggaggcaaagccggagaccatcgcaaaaggtgtacccgcctttctgctgtcgagacaactgaccggaccgcttgcggtaatagtcggctggctgttttccctgggcttattctga

SEQ ID NO: 14716 - DNA, 309 bp, Escherichia coli
atgcttatcaccttcgacagcaacgggccgaaggactgtctcgattactcgctatcgctggagccgtcgttccgggaagagagcctgatgatactccccggcgaccgcctgctgctggcgggccacgattttctggtgactgccgtcggcaaaggggcacagcaggcgctgtttgaactcggccacctgacgctggtgttcaatggtgacctgaatccctgccatgtcggcgcggttcatctctccggcccggtgccgaacctgcgcgacctccacggcaatctggtgattgaggaggggcggccatga

SEQ ID NO: 14717 - DNA, 522 bp, Escherichia coli
atgtggacagtcagcctcgctgaggcgtttattcatgtattccaggtcgcaggcaaaatcttcctcgacatgatgaccgggcttatcccgatgctcatctgcctgctgctggccatcaacttcctgatgaagctggttggtaccgtgcggatggagaaagttgccgccctgctcggccgctcgcgcattctcacctacggcgtgctgccggtgctcggctggttctttatgagcagccccggcgcgctcactttaggcaaactcctgcccgaaaagagcaagcccggctatgaggatgcgctcggcacccccgcccatcccctcaccagcctgtttccccacgtagtgccatcagagctgtttgtctggctcggcgtggctgccggggttaaggcgctcggcctgcccgtcacctcgctggcgctgcgctatatcgccgccgccatgctgattggtttaatccgcgggattatcaccgagtacctgttcctgcggctcagcaagcgggggaatgcgccatga

SEQ ID NO: 14718 - DNA, 210 bp, Escherichia coli
atgacaggcgtaagcgtctggggctccggtaatggcgataaacagctatggctcatactgctttctttgttatccccgcttgtggcgtgtttttgtgaactgagcggttttcaggacgagcggatgcgtggcaattctgccctgagtatgcgatgctcagcagttgggtttgcagagggtgattgtctgcaatgtgtacagatagattag

SEQ ID NO: 14719 - DNA, 477 bp, Escherichia coli
atgattaagagtgaatttagtgccagattagagaaacttctcgctatgacaggcgattccatgcgtgatctggcacaaaaatgtgatatcccgtactctacgatccgtggatatgttgccggagattcgcttccgaatggaattgagcaacttcagaagatcgctcatgctactggagttagtccggcttggttactaggtgaggaaacaggtcaatctcaagatagcgaacgagtaaaaagggaattaggtctactaatgactttggctgaacatttgtctgatgaacagcgaggtatatttataaaaaagatgctaaatgctttgctctaccaagttgaaggtgttgaacgaacttcagatgaagaaagaaagatgttatcggcatcctctatcgagttggccttaaaaatcaataaattaccaatcaacaagcaactggctatttaccatgattataatttagatgatgattaa

SEQ ID NO: 14720 - DNA, 1302 bp, Escherichia coli
atgaaacggacaatgctctatctttctctgctggctgttagttgtagcgtcagcgccgcaaaatacactgttctgacagaaagttcgccagagaaagcagggttcaacgtcgaacggcttaaccagatggatcgctggattagccagcaagtggacgccggttatcccggcgtaaacctgctgattataaaagataatcagattgtgtatcgcaaagcctggggagcggcgaaaaagtacgatggcagcgtattgatggaacagcctgtcaaagccaccaccgggacgctgtatgacctggcttccaataccaagatgtacgccactaacttcgccctgcaaaagctgatgagcgaaggcaaactgcatcctgacgatcggattgcgaaatatattccagggtttgccgacagcccgaacgatgcgatcaaaggcaaaaacacgctgcggatttctgacctgctgcatcacagcggcggtttcccggcagatccgcaatacccgaataaagcggtcgcgggcgcgttatattcccaggataaaggccagacgctggagatgatcaagcgcacgccgctggagtatcagcccggcagcaagcatatctacagcgatgtcgattatatgctgcttggatttatcgtcgagtcggttaccggtcagccacttgaccgctatgttgaagagtcgatttatcgcccgctcggcctgacgcatacggtgtttaatccgctactgaaaggctttaaaccgcaacaaattgccgccacggaactgaacggcaatacccgcgatggcgtgattcacttcccgaatatccgcacctccactctctggggtcaggtgcacgatgaaaaagcattctattcgatgggcggcgtttccgggcacgcaggtttgttttccaataccggcgatattgcggtgttaatgcaaacgatgctgaacggcggcggctatggcgatgtgcagctgttcagtgcggaaacggtgaagatgttcaccaccagctctaaggaagatgccacttttggcctcggctggcgcgtgaatggtaatgccactatgacgccgacgtttggcacgctggcaagcccgcaaacctacggtcacactggctggaccgggacggtgaccgttatcgatccggtgaatcatatggcgattgtgatgttaagcaacaagccacattcgccagttgccgatccgcaaaagaatcccaatatgtttgaaagcggtcagttgccgattgcaacttatggttgggtggttgatcaggtgtatgcggcgttaaagcagtaa

SEQ ID NO: 14721 - DNA, 417 bp, Escherichia coli
atgcgccagcagggatttctcctgtgcagacagctggcgacgttgcgccgcctcctccagtaccgcgaactgactctccgccttccacaaatcccggcgctgctggctgattttctcatttgctccggcatgcttctccagcgtccggagttcagcctgaagcgtcagcagggcagcatgagcactgtcttcctgacgatcgcccgcagacaccttcacgccggactgtttcggctttttcagcgtcgcttcatagtcctttttcgccgccgccatcagcgtgttgtaatccgcctgcaggattttcccgtctttcagggccttattcagctcttcctgccggtcagtatatttctccagtggcgtcagcagacgctcatacgccttctgcgcctctccggtatacttcagctgtga

SEQ ID NO: 14722 - DNA, 2955 bp, Escherichia coli
gtggtccaggttgtcgaacagcaactcaacggtctcgataatctgcggtacctgaagtcggaaagtaactctgatggctcatttgctataactgccaccttcgatcagggaacggatccggatatcgctcaggtgcaggtgcaaaataaactctctcttgccactccgctcatccctgatgaagtccagcaacaggggatacgggtagccaagttccagattaacttcatgctgctagtcggacttgtttcgagtgatggtcggcttaacagcttcgatttgggggacattatggtctccaaactacaggacccactttcacgcattaatggtgtgggtgactttatgatgatggggtcacagtacgctatgcgtatctggatggatccatcgaagctgaacagctataacctgaccccgctggatgtcagttcagcaattcaggcacagaacgttcaggtttcatcgggtcaactgggtggattacccactgaggatggtgttcaactgaatgctactgtcatcggtaaaacacgcttcaccagcgcggaacagtttgaaaatattctccttaaagtccagccagacggctcccgggtgttgcttaaagatgttgctaaagtcgggctgggttcggaagatttttctatccaggccaaatatggcaaaaacctgcccagtaccgcaattgcgctgcgactcgcaaccggtggaaatgcgctggagactattacggccgtacgggaaaggctggaggagttgaaatcagagcttccccggggtgttgagattgtctatccttacgacaccgcaccggtcatcagtgaatctattgagggggttgtgcataccctgattgaagcaattgcgctggtattcctggtgatgtttttgttcctgcaaaattggcgggcaacacttattcccacgcttgctgttcccgttgttctgcttggcactttcggggtgatgtcagcgtttggtttcaccatcaatatactgactatgttcgggctggtgcttgccattggtctgctggttgatgatgcgattgtggtggttgaaaacgttgaacgtgttatgacagaagagaaattatcccctctcgaagcgacacggaaatccatggatcagatttcaggtgctcttatcgggataggcctggttctgtcagcagtatttgtgccgatggcgttcttcggtggctcaacaggagtaatttatcgtcagttttccatcacaattgtttctgcgatggcactatcggtgttcgttgcattgatattcactcccgtgctctgtgttactttgctgaaacctaccgaacataggcaacgtggtggtaaaggattttttggctggttcaatcggggatttgagcacagtacgaagctgtatcatgacggtgtggagcgaacattgagggtaccgaaaagggccatggtttttttcctgcttattattgcattgctggcggtattatttccccaaattcctacctctttcctgcctgatgaagatcagggaaacctgtttgttcaggtccagatgcctccaaacagcagtgctcagcagacacaacgtgtgttgtcaaaagtatccgaatatttcctgaataaggaaaaggatatggtttcctccgtgatgctggttaatggtttcaactttgccggtcgtggacagggatcagcaatggtatttgtacagttgaaaccatggggagagcgtaaaggcagtgtattcgagctgtccggtcgcgcgatgggatatctaagcactatcaaggaagcgaatgctattgcttttgcgcccccggccgtattagaactggggaatgctacagggtttgaccttttcctcgaagatcgtggcggagcaggtcatgaaaaacttatccaggccagaaatcagcttcttgctgaagcagcgaaaaacccggcgttaaacatggttcgccctaacggcatgaacgatgaacctcagtaccagattctgattgatgacgagaaagttcagacgctaaaactgagcatgagcgatgtcaataatacaatgtcagcggcctggggttcgatgtatgtaaatgattttaatgatcgtggaagggtgaaaaaagtctatattcagggggtgcccggctcacgtatttcaccacaggactttgataaatggtatgtccgcaacagtgatggtgacatggtctcatttgcttcttttgcaacaggtaaatgggtttatggttcaccaaaacttgaacgatataatggtatttctgctgtcgaaattctgggggaaccagcaccaggatacagttccggggatgcaatgaaagcaattgaggatattgcggcaaggcttcccgaaggttttcatatttcctggacaggtttgtcttttgaggaacgactttcaggttctcaggctcctgcactatatgcactttccctgttgattgtctttctgtgtctggctgcactatatgaaagctggagcattcctttctcggtcatgctggttgttccgcttggtgttctgggggctgtctgtgctactttgttgcgaggtcttggcaacgatgtctttttccaggttggtttgttaacaacaattgggctgtctgcgaaaaatgccatacttatcgtggagtttgctcgtgaattgcatgagaaagaaggactaagcattaaagaggcggctgttgaagcggcgagagtgaggttaagaccaataatcatgacttcgctggcatttgtaatgggagttatcccacttgctgtctcgactggagcaagttccggaagtaaacatgccattggttctggtgtggttggagggatgataactgctacgatactggcaatcttttatattccgctcttctatatgttaattgccgggttcttcaggtgcagaagtaagaaatcatcggataagactgaagctgcgcaatcataa

SEQ ID NO: 14723 - DNA, 360 bp, Escherichia coli
atgaacgtttctataaaaaataactctgatatcaatgaccttgccagatggattgatgatcatcttgagatggagctctcagttgatattgtggcaaaaaaagctggatattcaaaatggtatttgcaaaggctgtataaatatgtcattggtatccctcttggcaggtatatcagagatagcagattaacaaacgcagcagaagaactacgttctactactgaatcggtcacgactattgcttttaaataccagtttgattctcagcagacatttacaagggcatttactcgccgctttggtatatctcctgttgcatatcgaaaactcgctaaggaagaagtgagatggaatggttag

SEQ ID NO: 14724 - DNA, 1419 bp, Escherichia coli
atgcatacagaacagtgggcgaggacgatcatcccttttgtcgcgtttatcatagtgctttgtttacccgaagacgtttttttcatgcccggaattaccgtcgtagagcagcgactcattgccatttttttacttgcagcgctgtgttgggttttcgaacctatccctatttataccacttctattctggtgatcgtgctgcaactttttttagtatcagataaagggttaacggtatttacccactctttgcctgcagaaaaaatggggacactgctttcttatcaaacgctgatggcgacctttgcttctcctattattatgctttttttaggtgggttctttttggctatcgccgccacaaaataccgactcgatattaatctggcacgggtcatgcttaggcccttcggccagcgaccgggtgccgttttgtttggtttgatggtgatcaccgcagtcttttccatgtttatgagcaacaccgcaaccacggcgatgatgttgtcgattctggtgccagtattgaagcagcttcctgccaacgaccggggcagaattgcgtttgccctttcaattccggttgctgccaatattggcggtatcgggacccctataggtacgccaccgaatgctattgctctgaagtacattaacgaaatctcgcccatttcatttgggcagtggatgctgtttggcgtgccgtttgtgatggtgctgctggtgttcagttggtgtctgctgtgccggctctttccactatcgacgaaaactctctctttagatattaaaggtggctttctcaaaaattggcaggcgatcgttgtgtatatcacctctggttttactatccttctgtggctgataggcggtcagtttggcctcaattcttatgttgttgccatgctgccggtggcgctatttagctgtacccgtatcgtcaataaagaagatttacagaccatttcatgggacgtgctttggctggtggccggggggatagctctcggcattgggctggaagataccgggctggcttcacgtgtcattgagtccataccttttgcgcaggcatcagccattggcgtattgctcggtgcgatgttgctcacgctggtgatggcaaactttatgtcgcacacggcaaccgcaaacctgttgcttcccctgatgtccgtacttgcaatcaacttgccggaactggaaagtatcggcagcgccaccaccatcttacttgccgtcacgtttgccgcatcgttagggatgtcgttgccgatcagcacgccaccgaatgcgctggccagcgctaccgggcaaatagggacttctgatatggctaaggttggcgtgactatcggtctggtggggctggctctgaccctggttatgctgtggttgctacatattctcggaggctaa

SEQ ID NO: 14725 - DNA, 1377 bp, Escherichia coli
atgcagacgttgagtgaaattcagagcaggctgacgcgatgctatttcagtcagcccgaacggcaaatggaactgcaaccgggtgaggtgttacgcgaagagtttgcttttaacgatcgactctactttgttttagagggcgagcttgaaggcatgatccgcaacaccagtagcgatgatgatgaatcagacgagcaactgacgatgtttattgcaaagccgggtgcctatattggcatgcacagttttttttctcatgaaaagcgctcctcaagccggatcgttgcgaaaaccaggtcgcgcctggcctggatcgacggtaaaaccgaaccggttgaaccacaggtttatggctccatcagcgagcaatttatgcttgtgatcatcgacgaacttttttcacgacagttaagtctgtggaaactgacgattgaacgagagagagtgtttaagcagttgtttgagtcggagcgtctctctaccctgggactgcttgccagtggcattgctcatgagcttaacaacgctattagcgtggtcgacagcagcgcccagcggctgaatgcatttgtcagcgatttgctgtcaaaacatgaaccggatctgtgtgcctggtttgagtggggtagtcatcaggggcagaaattcagcagcgttgacgtcagaatacggagtaaggaactgatggctgagcatcatttgtctgaaaatgaagccagaacgctggctcgcgctgtggggaatgaaccgatcaccgacattcccgcacacgtatcccaggcgctggcgctatgggaagcggggcgtgatttttatgatatgcggctggcggcccgccatgcgagcaatatcgtccgttctgtaaagcaacttggatataacgacagtagtaattatcggatgatagatattaatcagacggtcgaagaagcattaacgttattacaaagccagttacggggaattaaggttaacctgcagcttagcgatcggcccgcgctatggggcagcaattcagagctggtacagatctgggttaatattatcaaaaacgcctgcgaagcgttaatcagcgctgcaactcccgagccgcaaataaccataaccagtcagatcagaaagcgagcttttcatatttctattgccaacaacgggccgcagattgaagatgagcttaaacataaaattttccagcccaactttacgaccaaaaaagacgaacactgtatcggcctggggttggggctctatattacccagcgtctggtctgcggttatggagggaaaattaaacttgagagtaatgaagcgcatacagtgtttcggattgccttgccgcttaccaccaaaccaacgttttctcagacaggagaatga

SEQ ID NO: 14726 - DNA, 483 bp, Escherichia coli
atgaaaaaattaggtgttatctgcgtggacgatcagcgtgaggttctgaatagtgtggtgcgggatttacaacctctattgcaatggattgcactcgaggagtgtgaatcggcggatgaagcgctggaggttatcgaagaatatgatgcgcagggtaacccgccggcattaattatttccgatcatctgatgccgggcaaaaatggcgtgcaattgctgacagaattaaaagaggacggcaggtttccccatctgaaaaaggtactgttgacggggcaggctacgcatcacgatacgattgaggccatcaatcatgctaaaatcgatttttattttgaaaagccatggcagggggaaaaattacgccagacgtgccgtcgactgttgactgactatctttttgaaaccggcgtctggtgtaaagattttcattcctttgccgatggggaaagtatgttgatgcacatgcgcagcgatgagtga

SEQ ID NO: 14727 - DNA, 1881 bp, Escherichia coli
atgaactataacgaaacagcagacaaaatcctccacgcggtgggcggtgcggagaacatccgtatgctcacccattgcgcgacccggttgcgcatggagttcaacgaccgcgcaaaggttaacgatgcgcagattggcgccctccccggcgtaatcagcgtggtggagaagggcggtcagttccagatagttattggcaatgaggtgcagcaggtttatcgcttgctcaataaggcgctgccggagaagaaaggcccgacaggcggcgataaaaacgcgaaacagaacggcatcgtcgcgcacattatcagcgtgatttcgaccaccttcaccccagtgatcccggctattaccggtgcagggatgattaaggcactactggcgattcttaaactaactgggttaattagcgaaaccagctcgacgtatcagttactcaatattattgccgacgcagccttcttcttcttgcctgttctactagcctacggggcgtcactgaaatttgaatgcaacccgattctggcgatgacccttgcgggcgtattgctgcatccgggcatcggccagatgctggcggcaggtaaaacggtggattttgtaggtatcaacgtcctgctttccgattacgccgggtcggtgttgccgattattttgacagtctggctgatgtcatgggttgaacgctttgccgaaaaggtttcgccgtcgatcattaagttctttgttaagccgatggtgatcctgttgatcaccgcgccactggcgctggtggttgtcggcccggcgggtattttgcttaacgatctggtggcggctggtgccggcgctattgaccgccacgccagttggttaattccgatgctgatgggcgctctgcaacccttcctgattattactggcacagcctgggcgatgacgccaatcgctaccggtcagttgagtaaaaacggttttgagatgattaacggaccgggaatgctggcgtcaaacgtggcgatgggcgcggcgacgctgtgcgtggcgctgaaaacccaaaatagcaacctgcgccagttggcctcatcatcgggctttaccgcgctgctggggatcaccgaaccggcactgtacggggtattactcaagttccgccaggtactgattgccgcgatgatcggtggcggctgcgccgggatttatgctggtgttagcggtctggtgcgctacgcgtttgtctccccaggacttacggcgctgccggtgtttatcggtgaaaacccgatgaatatcgtccatgcgctggtgacctgtgcaatttctatcatagtaacctttgccctgacctggtttatcgcctttaaagatacgcctgaagagcaagaagaggtcagcgaggctccgcagtctgtcgttagcccgaaaatggagggggagattgaagtactcagcccgctgcgcggtcaggtgatggcgctgaacgaagtaaatgatgatgtcttttccggtggtctgctgggagaaggcgtggcgatccgcccacaggaaggggttctgcgtgcgccgtttaacggtactgtaatgatgtttctaccttcctgccacgccgttggtttacaaagtgaaagcggacttgagctgctgatccatattggtatcgataccgttaatcttaacggccagcattttagctcatcgctgaaagtaggcgataaggtggaggtcggacaggagctaatccgctttgatatccccgccatcgaacaggccgggtatgacctgattaccccggtgattgtggtcaatggcgacgagcagcactccctgcgccttaccaccgccgcgcaggtcgattacggcgaacaactgatggtgcaatccgctaaggaggtgcaggtatga

SEQ ID NO: 14728 - DNA, 1425 bp, Escherichia coli
atgatttatcaaaagaaagcgcagttcccggacggttttctgtggggtgcgtccacttcagcctatcaggttgagggcgcgtggaatgaagacggtaaaggaccgtcggtggtcgatatgctcagccatccgccgggaacggcggacttccgtatagccagcgaccactatcatcgcatggaggaggacgtagcgctgatggcggagatggggctgaaggcctaccgcttttcagtggcttggtcgcgggtgatacctgacggtgatggcccggtgaatccggacgggttagccttctatcaccgcctgatcgacgccctgacgcgccacgggatcacccccatcgtgacgctctaccacttcgacctgccatgggcactggagctgaaaggcggctggctgaaccgcaaaactggggaggcgttcgtgcgttatgcccgactgctgttcagcgagtttgctgccaaagtccctctctggctgaccattaacgaacagaacaccatgattctgcatcccggcgcgattggcgtgcccgccaatcgtgaactgccggataagaaggcgctataccagcagaatcatcatatgatgctgacccaggcgcagatcttcaccctgtgccaccacgaattccctgggctgcgcatcggcccggcaataaacaccacttcgatgtacgccgaaagctgcaaaccggaagacgccattgccgcgcataactgggaaacgctgcgctgctggagttttttagatgtcgcggtgcatggtcgctacaacgccctggcgtgggcctatttgcaggatcgcggcctcgcgccggaaatgcagccagaagatgcgctgattttgcagcaagggcggccggattttatcgccattaactactactcaaccgcgacgattgctgccagccggggcgatggtgccgatgttgccccccgcgcgggcgaccagcaaattatgctgggcgaggagggggtttatcgcccggcggaaaatccatgggtcggcaaaaccccctacggctgggtggtcgacccggtagggctacgtctgacgctgcgtaaagtgtgcgagcgctatggtttgccgattctgattagcgaaaacgggatgggcgcgccggataagctggagcctgacggtacggtaaatgacgactatcgtatcgcctttctcgacgcgcatatcgcacagatgcggctggcgattgccgacggcgtcgagctgatgggctactgtccgtgggcggcgattgacgtggtcagcactcaccagggatacgccaagcgctacggttttatttatgtcgatcgcggcgaggatgacctgaagagcctgcaaaggatccgcaaacgcagcttctggtggtataaggatgtcatcgcgcaaaacggcaaccacgacgagtcacagagatga

SEQ ID NO: 14729 - DNA, 840 bp, Escherichia coli
atgattgttcaaaaggtgctcaataatagcctcgtgctctctatggacaacgataacagggaggttatcgtcatggggaaaggcattggtttcaacagcaggcccggagatacgatcgccccggagaagatagagaaactattcgtaacccagacgctcgccgcgcgcagcagctatcttgaggcgctctctgccattccggatgaggtcattgaaatggccgcaatgattatttcccgcgccaatatgcagctcgccagcaaggtccgcgagcagattttctttaccctcgccgaccacctgactttcgccatcgaacgcaaccgcaaagggatcgctattcagaaccgcctgctgccggaagtcaggcgcttttatccgcagcagttccgtgtcgccagcgaggtgctgacgattattcgtcagcagtacgggattgaactgccggaggaagaagccgggaatatcgcctttcatctggttaacggccagagcgagggtgacgacgtagcgcagatcatgcagtcggtgaaaatgctgaaggatatttttaatctcgtgcagtaccactttaagcaacagatagacaccgaatcgataaactactcgcgctttctggtccatatgcagtttttcctccagcgtttacaggagggtgaactggacggcgcgcgggacagctttctgctggtgcaggtaattaaggagtatccggatgcttaccgctgcgcgttgctgatccgcgattacgtcaaaacccagctcgatatcaccctcggtggcaacgaactgctgtggcttaccgttcatctggtgcggatcgcggggctggatacgtga

SEQ ID NO: 14730 - DNA, 207 bp, Escherichia coli
atgagcctgcaccatttgctcgactccgacatccaccacgatcactatctctacgattcgctgttgctgcgtattgataccgtacagcagtataaccgccagttggccggacactgctacgatttaatcagccatctgatcgagggcaacacgcctgaaccgctacagcgctacctgcccgcaacgctgcagtttcagcatcggtga

SEQ ID NO: 14731 - DNA, 1350 bp, Escherichia coli
atgccactaattatcgttgtggcagggattgctttactcctgcttttaaccataaaaattaagctcaatacgtttgtttcactaattattgtctcgattgctgtcgccatcgccagtggtatggatttgaataaagttgtcacctcggtcgaatccggacttggcggcacgctgggccatatcggtttaatatttggcttcggcgtcatgctgggtcgtttgctggccgacgcggggggtgcgcagcgaatagcgctgaccatgctgaattatttcggcaaaaataaacttgactgggcggtagtttgctcagcctttattgtcggcattgcactttttttcgaagtcggcttaattcttctggtccctattttattcgctattgcccgtgaagcgaaaatatcgccgatgtttatgtgcgtgcccatgctttccggtttactggttgcacacggttttttaccgccgcaccccggcccgaccgttatcgcccgtgaatatggcgccgatgtaggactggtactgatatacggtatcattgtcggcatcccgacctttattctttgcggcccggtattgaataaattctgtcagcgcattattccggacgcatttaaaaaagagggcaatattgcctcccttggcgcgacccgtcggttcagcgaaagcgaaatgcctggctttgggatcagttttctcaccgcgatgctgccggttatcctgatggcggtcgtcaccatcatccagatgacccatgccaaaagcgccgcggattcaggcttgttctacaacatactgctcttcctgggtaactcgacgattgcgatgctgatttcactgctgttcgcgatttataccatgggtctgggccgcggaaagacgatccctgaactgatggattcctgcgggaaagccattgcgggtattgccggactgctgctgattatcggcggtggcggcgcattcaagcaggtgctcatcgattctggcgtgggtcagtacatatccaccctggtctcaggcatggatattaatcccatcctgatggcctggggcgttgccgcgttcctgcgtatttgtctcggttccgccaccgtggcggcgatctctaccgccggtctggtcatcccactgctggcagtacatcctaatactaatctggcattgattacgctggcgaccggggcaggatcctgtatctgctcccacgttaacgacgccagtttctggatgattaaagacttcttcggcctgaccaccaaagagacactgttgtcctggacgctgatgtcgacgctgttatccatctgtgggctgatatttattctgctcgccagcatgattatataa

SEQ ID NO: 14732 - DNA, 1968 bp, Escherichia coli
atgtctgttcgccatatttttgctgacgaaagtcgcgatatctacaccgtcagaacccacgccgatggccctgacggagaactgccgcttacggcggaaatgctcatcaaccgcccgagcggggatctgttcgggatgaccatgaatgccggaatgggctggtccccagacgaactggatcgggacggtattctactgctcagcacgctgggagggttacgcggggcagacggtaagcccatcgcgctggcgctgcaccagggtcactacgagctggatatccagatgaaagcggccgcggaggtcatcaaagcgaaccgtgccctgccctatgccgtgtatgtttccgatccgtgcgacggacgaactcagggtacgacgggtatgtttgactcgctaccgtaccgtaatgacgccgccatggtgatgcgtcgtctaatccgctctctgcccgatgcgaaagccgtcattggcgtggcgagttgcgacaagggacttccggccaccatgatggcacttgccgcgcagcatgacaaagcgacggtgctggtgcccggtggcgcgacgctacccgcaagggatggggaggataacggcaaggtgcagaccatcggcgcccgcttcgccaatggcgagttatcgctacaggatgcccgccgtgcgggttgtaaagcctgcgcctcctccggcggcggctgtcaatttctgggcaccgccgggacatcgcaggtcgtagccgaaggattaggactggccatcccgcactcagcactggccccttccggcgaaccggtgtggcaggagatagccagagcctccgcgaaggcggcgttgaacttatgtaaacaaggcatcaccacccgggaaatactcaccgataaagcgattgagaatgcgatgacggtccatgcggcgttcggtggctcaacaaacctgctgctgcatattccggcgattgcccatcaggccggctgccatattccaaccgttgacgactggatccgcatcaacaagcgggtgccccgactggtgagcgtactccccaatggtccggtttatcacccgacggtgaatgccttcatggcgggaggtgtgccggaagtgatgctgcatcttcgcagtctgggattgctgcatgaagacgtgatgaccgtcaccggcagcacgctgaaagagaacctggactggtgggaacactccgaacggcggcaacggttcaaacagcttctgcgcgaacaggagcagatcgacgccgacgaggtgatcatgtcgccacagcgggcacgggagcgcggcctgacctcaacgatcactttcccggtgggcaatattgccccggaagggtcggttatcaaatccaccgccatcgacccctcggtgattgacgatcggggcatctattaccataaaggcgtggcgaaggtttatctgtccgagaaaagcgcgatttacgatatcaagcacgacaagattaaagcgggcgatattctggtcatcatcggcgttggcccttccggcaccgggatggaggaaacctaccaggtcaccagcgccctgaaacatctgtcctacggcaagcatgtttcactgatcaccgatgcgcgtttctcgggcgtttccacgggggcgtgcatcggccacgcagggccagaagcactggctggagggccaatcggtaaattacgcaccggggatattattgaaattaaaattgattgtcgcgagcttcagggcgaagtcaatttcctcggaactcgtaacgatgaaacattaccctcacgggaggaggccaccgcaatattaaacgcccgacccagtcatcaggatttacttcctgatcctgagctgcccgatgacacccgactctgggcgatgctccaggcggtaagcggcgggacatggacgggttgtatttatgatgtaaataaaatcggcgcggccttgcgcgattatatgaataagaactga

SEQ ID NO: 14733 - DNA, 906 bp, Escherichia coli
atgacaaaattcagcggtattattccaccggtatccagcacgtttcatcgtgacggaaccattgataaaacggcaatgcgtcaggttgctgacttcctgattaataagggtgtcgacgggctgttttaccttggtacgggtggggaatttagccagatgaataccgcccagcgaatggcgttcaccgaagaagccgtcgccgttgtcggcggacgggtcccggtattgattggcgtcggttcgccttccactgacgaagcggtcaaactggcgcgacatgcacaagcctgcggcgctgacggcgtcgtcgctatcaacccctactactggaaagttgcggcgcggaatcttgacgactactaccagcagatcgcccgcagcgtcacactgccggtgatcctgtacaactttccggatctaaccggtcaggacttaaccccggagaccgtgaaacgtctggcactgcaaaatgaaaatatcgtcggcatcaaagacaccatcgacagcgtcggccatctgcgcacgatgatcaacaccgttaagtctgtacgtccgtcattttcggtattctgcggcttcgacgaccatttactgaataccctgctgctgggcggcgatggcgcgatatccgccagcgctaattttgctccggaactctctgtcggtatctaccgcgcctggcgcgagggcgatctggcaactgccgccaccctgaataaaaagctcctgcaactgcccgcgatttacggccttgaaacgccgtttgtctcactgatcaaatacagcatgcagtgcgtggggttgccggtggagacatattgcctgccgccgattcttgacgtctcagaagaagccaaagaaaaagtccacgcactgctggccgcgcagggcattttatcggactga

SEQ ID NO: 14734 - DNA, 792 bp, Escherichia coli
atgatggttcgcaaagggtgtaattcattagttcgtgctgaaaaaatattaactcacatcgcatgggtaggcgtggcgagttatatggaattattaaaagaatttcagtatcccaaaagcagcctgcttaatttattgaatgtgatggtggagtgcggcttcttaattaaaaacaaaaacggccattattcgctgggaataaaaaactacgaactgggttgccaggcgctgcaccgccaaaatatctttgaggtgacaaagcggccaatgcaggagctgtcgctgaaaagcggcttggtctgccatctgggggcaatggagagctattcagctctctatctcgacaaggttgagagcccgaactcggtgccaacaagcaaaagctggattggtaaaaaacttgaattgcatatcactgcgctgggtaaggcgttattagcctggaaaacgcgggaagagctggattattttttagatgcgctcacgttgacgccacacacgcgcaatacgtttaccgataaaaagttatttctggatgagttgcaaaaaacgcgacttcggggatgggccatagacaatgaagaatcaacctatggtgcggtatgtttaagtatgccggtattcaatatgtataaccgggttaactatgcgatctcgctttcgggcgatccggtggtttattcaggaaataagatcgacggttatctggaactgctgcgcaaatgcgccgggcaaatatcatatgggctgggatacagaaacgaaaatgaatatttacgaaaaggaaactga

SEQ ID NO: 14735 - DNA, 1131 bp, Escherichia coli
atggcatataccaccttttcacagacgaaaaatgatcagctgaaagaaccgatgttctttggtcagccggttaacgtggctcgctacgatcagcaaaaatatgacatcttcgaaaagctgatcgaaaagcagctctctttcttctggcgtccggaagaagttgacgtttctcgtgaccgtatcgattaccaggcactgcctgaacacgaaaaacacatctttatcagcaacctgaaatatcagacgctgctggactccattcagggtcgcagcccgaacgtggcactgctgccgctgatctcgatccctgaactggaaacctgggtcgaaacctgggcgttctcagaaaccattcactctcgttcttatacccatatcattcgtaatatcgttaacgatccgtccgttgtgtttgatgatatcgtcaccaacgagcagatccagaaacgtgcggaagggatctccagctattacgatgagctgatcgaaatgaccagctactggcatctgctgggcgaaggtacccacaccgttaacggtaaaaccgtaaccgttagcctgcgcgagctgaagaaaaaactgtatctctgcctgatgagcgttaacgcgctggaagcgatccgcttctacgtcagctttgcttgttcctttgcctttgcagaacgcgaactgatggaaggtaacgccaaaattattcgtctgattgcccgcgacgaagccctgcacctgaccggtactcagcatatgctgaatctgctgcgcagcggtgcggatgatccggagatggcggaaattgccgaagaatgtaagcaggaatgctatgacctgtttgtccaggcggcacagcaagagaaagactgggcggattatctgttccgtgacggttcgatgattggtctgaataaagacattctctgccagtacgttgaatacatcaccaatatccgcatgcaggcagtcggtttggatctgccgttccagacacgctccaacccgatcccgtggatcaatacctggctggtgtctgataacgtgcaggttgctccgcaggaagtggaagtcagttcttatctggtcgggcagattgactcggaagtggacaccgacgatttgagtaacttccagctctga

SEQ ID NO: 14736 - DNA, 255 bp, Escherichia coli
atggctcgcgttaccctgcgcatcactggcacacaactgctgtgccaggatgaacacccttcccttctggcggcgctggaatcccacaatgtggcggttgagtaccagtgccgcgaaggttactgcggttcctgtcgcacgcgccttgttgcaggccaggtggactggattgccgaaccgttagcctttattcagccgggggaaattttgccctgttgttgccgggcaaaaggcgatattgaaatcgagttgtga

SEQ ID NO: 14737 - DNA, 489 bp, Escherichia coli
gtgggcataagagaactaaacctcaccaaagaacagcatgagtggctgaatggctggcttgaactgtggggcgcatgggtttattcaggtcgtctggaaaagcgcatgagcagcgtaatagcgacgttcatggagagcgtagagccgggaagagttatgacaaggccaatgtgtaatgatgatgatggaatgttgatttctcaggtcgtcgattccgtcatgtacattgacaagaaagcctttggaatcctcctcagctactacgctcatggctcttccaagcacgccattgcatcttactatcatcgcgtcgcaagacctcgcaagatgttatgccgtggcggcgggcgcattcaaaaaccatcgctcgcaacctgtcgacgggaagttgacgaaatccttaatgcctcgttgtttatgatttacccggttctggatagtgcgtttaaaaatcggaaacgtgtagagaaaattaaacatgtagcatag

SEQ ID NO: 14738 - DNA, 318 bp, Escherichia coli
atggtttacgagtattgccggaagcgaggcctgtatccggatgcggagtcttatccgtggaaatcaaacgcgcactactggctggttaccaacctgtatcagaacatgcgggccaatgcgcttactgatgcggaattacgccgtaaggccgcagatgagcttgtccatatgactgcgagaattaaccgtggtgaggcgatccctgaaccagtaaaacaacttcctgtcatgggcggtagacctctaaatcgtgcacaggctctggcgaagatcgcagaaatcaaagctaagttcggactgaaaggagcaagtgtatga

SEQ ID NO: 14739 - DNA, 369 bp, Escherichia coli
atgagcagaaaaacccaacgttactctaaagagttcaaagccgaagctgtcagaacggttcttgaaaatcaactttcgatcagtgaaggcgcttcccgattatctcttcctgaaggcactttaggacaatgggttaccgccgccagaaaagggctcggtactcctggttcccgcacggtggctgaactggaatctgaaattctgcaactgcgtaaggcgttaaatgaagctcgccttgagcgagatatattaaaaaaagcaactgtagcttcaattggtcaacgcaacagttatgtgaaaacatggggttgcggaggttttttgaatgagacgaacatttacagcagaggaaaaagcctctgtttttga

SEQ ID NO: 14740 - DNA, 171 bp, Escherichia coli
atgttttcttatattatgcttgggaccaatgatttgcctggcgccatcagattctacaacccattgatggaatggttgacaagttcactgactggcaacaaatgttgccagcattaccttttgaaatttcctcccgcatcacattttttctctccggtttttccattataa

SEQ ID NO: 14741 - DNA, 327 bp, Escherichia coli
atggatatcagtactctcatttcttcctccggtcggctgcagctgtctgcagctgaaagtaaaataccctgggaagagctggcgtttagccagcgcatgctggaaaaccatctgtcgcaggatgatgactgggccagccgcagacagatcgtaattgaacagcaggttgggtggattgcccgtcagctactggttggtgcacgcactctggatatcggctgcggcccgggtttatacacccacttgctggcggagcgtggatattgctgtcacgaacggtgcaatagtgatccacacccaacgcctgaaatcagatccagggggtaa

SEQ ID NO: 14742 - DNA, 1350 bp, Escherichia coli
atgagcatattttataaaaaaagctggtacaagtggattgtattggtggtttgtattcttgcctattcatcaggaaacctggtgcgctggaattatacgggaatatcgcaatatcttattggtgaatggcacattggaaaagaagaattggggatccttggttccgcattcttttatgcctacgcgattgggcaaagtccctggggaacacttaccgatatattaggcggacgcagagttatttctatcggtattttaattaccgctattatgttctctctctttgcttttgcgggtggctaccatgccgctatcatcattcgagtattaatgggatttgttggggcggcaacatttgtgccttgtatggcggtactttctcgctggtttagtaaaaaggagcgaggtatggtgctgaatatcttctctggcacaggtggtgggttaggtgagctgtggtcctttttattaatgccattgatttcattatttatggtaggcggcgctaccgtgcttggcctgagctcctggcgtgcatctacgctaattatggcgtttgtcacactggcgatcatgatcctctgttttgtcggtatgcgctccgacccgtcggaattaggtcttccgtccgttgttgaacaggagacgcgtaagcaggcgaaagaacatagctatgccaggacactgcttaatgcgttgcgcgatccgtggttctgggtcattacattcgcctggcaaggttttaccgtttctctgcgtctgctaccggcctggttgcctatctatgcggcagcttactacaaacagacacagggattatccagcgttgaggcgatggtcgcaggaggtatgatagcatcagtgtatgttgccggacgtattttgggaacgcctgtctttggcaaattatctgactttttgcttgtcagttataacgtaccaagaacattgattattgcttgcttccatatctttattaccgtctcaatgtttgctcttagccatcaaatgccttccacatttttatttgcagttctggtttttgtgattggtgccgcgataaatatgttccctctggttaatgcagtcgtcgcagaaatctggccggttaaaacggggggcgcgttaatggggatggtgaatacggttgggcagttaataggtgcctcagcgttggcctacagtggttttatggcagaaaaattttccatagctggagcaggatacagttttgagtatcgtggcatttggtatttggcaatgatattcagttcaatatctatcctggcgtctctgttggcgatgcatcgcgaaaaacaaagtattcgggaaaatgccttgagtcattaa

SEQ ID NO: 14743 - DNA, 798 bp, Escherichia coli
atgatttttgatacgcatgcgcatgtttttgttcgaggattaccattagcggaacattgccgatatgttcctgattacgacgccacaccggagagttatctgactcacttggatcggtttggcattgatgttggtattctggtgcaacccagttttctggggacggataaccactatatgcttgaggctcttcgccgttaccctacccggtttcgcggtgtagccgttgtggatccaaacattacgcgctgtaaactggatgaaatggcaaaattaggggtcactggtatccgcttaaatttaatcggcgtggaaattcccgatcttacgcaacctgcatggcaacacctgttagaacatattaaagccctgggatggcatgttgagctacacagagctgcgcgcgacttgccagcgttaattacggtattacttaaatccggtgtaaagatcgtcgttgaccatttcgcgttgccttctcaggaagagaaacaaaacgatcccggatttcagtttctccttgagcatgcagaaacgcagcaaatttggttgaaactttctggcgcctatcgcaatggcagtactgaaactctcaacgataacgtggcaccgttaattcctctcctgctgcagcattttggacctgcacatttattgtggggtagcgactggccacatactcgatacgaaaatgtcgtcaattatcaaaaaacgttcgagttactgacgcagcaaatacctgataaagaaatgagaaataaaattttatcggttagtgcagaatcacttatcgattag

SEQ ID NO: 14744 - DNA, 726 bp, Escherichia coli
atgcatcgcaatttgccaatttacctgcagatcagagaagcattacgcaatggaatagcacaaaatgtatataaacaaggcgaacgcttaccttctgaaaacgaacttgcagcccaatttaataccacccgagcgacagtggtccatgcgatgcagggtctgcttacggatggattgattgaacgcattcggggacgtggaaccttcgttaaaaaaccttccattatcaccgtaatggatacgcaaactcttgggttttttgaaaaagatctggttggtgtcgacaaacacctcgaatatcaactcgtcgaattcacacctgtctcaacgtcagaactcttacggacaaaactgatgttatcaggcaaagagagcatccatcggctgttaaggttgcgcttgataaatcagcagccaattgcattcgaaattcgttatatgccttcaattcttgccctgcaaatagataagcaggaactggaagtccatgcgttgcaaaacatttttgagcaggcacttcgcatagagatacagacaattgccaaccaggttcatgtggcgctgcccagccgggatgcggcccagaagctgaaaataaagcgttcccgcccaattctggtacgacaacatacttatttgactgctgagaataaaccggttctttggggggaaactctctaccgggaagagtatgaaatacattactcatcacaccgtcaggcgtga

SEQ ID NO: 14745 - DNA, 225 bp, Escherichia coli
gtgtcactcacgttacgggccgcatctcctattgacttccttaagaatccgttcagggagaacttcagcccatttgttacctcctaccgccccctgtacttccagccggagcgagagttagccgggtcggactttcaccgacggaaagatcgtgccttgcaaggcacacacaataacctgtgtgaaaacgctctccgggtggtggcgctgagccggaaaaactag

SEQ ID NO: 14746 - DNA, 162 bp, Escherichia coli
atgcgtgctgtcaccactaccccggtgggtatgaccggtgcatttctcactttcttcccggtcatcgtcggccttccccgttattatggcgtgtcggcacccacgacggcatttcgaggccttctcagtgtcactcacgttacgggccgcatctcctattga

SEQ ID NO: 14747 - DNA, 1032 bp, Escherichia coli
atgcgtaaagcaacgatgcggaatgtgagcgaagcgacgggattttccatgtttaccgtttcgcgcgcgctaaacggcggcgatggtgttgctgacgacagccgggagcttattttaaaagtggcgcgagagctcggctacgtacctaaccgcgcggcccaggcgctacgccgttcgagcagagactcagtggcggtgattaccgcccatgcgtcgaactcttactatctcaacctgatgtccggcattcagcagatgctgcaaccttcgcagtggaccgtggtgcttggcgatattgcggtcaacggcatctacgaccgcgcgcaggaagatcggatgattaaccgtctgatcgagtcacggatggccgggatcatttcgacggtgacgctgcagtcggaaagcctgtccttgctggcgaaatgggacattccggtcgtcttcgttgattccccgccccgcggcgagcacatctttcccagcgtcacgaccgacaattaccgtgccagcctgctggtgggaaaacatctcgcgcagcatggctataaaaactggctgctccttatctacccggaccgctggaccacgcgttttgaacgcgagcgcgggatacgcgaggccgctgatcagtgcggtgccacacttgaagttgtcgaaacggaaaacgacgcgcagtcggctgctgacaaactgagccagtacctcgaccgccagaaagcgctaccggatgctcttattgccggtaacaaccctattctgctgggttcgctcaaacagctccagcagcgccagatagccattccagaggatatggccctgattgcctacgacgaattcgactgggcgccgctattaaatccgccgctgacggtactcaatgaaaatagcgaagagattggcagacagtcggctgaaatgcttatccagttaattaacccggaaaggaaaggagaaatcaacacccaacgtaaagttcctgccgagctggttattcgccagtcctgcggctgtaaaaaaacgcataacaattaa

SEQ ID NO: 14748 - DNA, 954 bp, Escherichia coli
atgaccaaacttcgcaaaacatggctggctgtcgcggttactgcggtaatcaccaccatgacaggatttatccccgccgccagcgccgcgctgcaggagggcaaaaaaatatcccacatcggcttaatggtgcaggacatgtccaaccccttcttctcggcaatggaaaggaacgcaaagcaggccgcggcaaaaatcggcgcaacccttaacgtacaggacgcgcaggtcgatctggcaaaccagaacacgcagattgacgcttttattcagcagaaagtggatctaatcattatttccgccgtcgatgagtccggcatcgagccggccattcagcgggcaaaagccgccggaattatcgttatcgcggtcgatacgcccgccaggggcgctgacgcggcgatcatgaccaacgccattcaggccggcgaaacctcctgcgaatatctgttcagccagatgggaggcaaaggcaaagtgctgctggtggacggcacgccgattcagaccattatcgaccgcattaaaggctgtaaaaacgtcgcgcaaaaatatccggatatcaaaatcgtcggtcagcaggcatcccgcaacgaccgcgcttctggcctgatggtcaccaccgatatgctcaccgccaatccggatgtctccggtattttcggtatgaacgatccttcggcgctcggcgcggtgctggccgttgagcaggccggcaaaaccggtgcgattaaagtcaccggcgtagacggcagcccggaagcggttgaagaactcaagcgcagcggctcgccatttatcggcaccgcaacgcaaaacccgggcgaaatggtgcgccaggccatctcgcttgctcaggatatggttgacggcaagcatatcgcgtccccgaccatattgatccccagcgtgctggtcacgcgcgacaacgtagatagctatccgggttggtaa

SEQ ID NO: 14749 - DNA, 1533 bp, Escherichia coli
atggccgacataacttccccccccttgctcaggctggaagggatttcaaaacgctacggcgcgaccctcgcgctgaacaacgtacgctttgatttattcgccggagaggtccatgccctgatgggggaaaacggcgcgggtaaatccacgctgatgaagatcctctcaggaaacgagcagcgcgatagcggcgtgatctatagcgacgggcaggagattgatattcgcacgccaagagatgcgcgcaaatatggcatcgccatcatccatcaggagctgaatacagttcccgatatgacggtggcggaaaatctgtttctcggccaggaaccgacctctttcgccggtattctcgatcgcaaacggatgctccgggaggcccgggagaagctggaccggattaacgcggacatcgacccgcaggcgccgctcggctcgttgagcatcggacatcagcaaatggtcgagatcgcccgcgccgtcagtgaaaacgcaaaagtactggtgcttgatgagccgaccgccgccctgtcgcgggcggaggccctccagctttaccggctgatcgaacagatgcgtcaggatggggtcgggatggtctacatctcgcaccgcatggaagaggtatggcagttggcaaaccgggtcacggtgttcagggacggcacgtggatcggcacggaaaccctgagcagcgtctcgaccaccgatattgtacgcatgatggtcggccggcaaatcgtcgatctctatcagcacgaaccgcgtacgcccggcaaagtactgctggaggtcgcggatctggcgggtagtgcaaccggcccggtctcctttgaggtcaaatcgggcgaggtcgtcagcatgtccgggctggttggctctggtcgaaccgaagtggcccgcctgttattcggcgccgaccctcgcacccagggaagcgtgcgtattgacggcaaggtaagccatccatcagatcccaccgccgccatcgccgacggaatcgggatggtgaccgaagaccgcaaaacccagggcctgtttctgggtcattcggttgagcacaacattgatatcagctcgctggagaactttgtcaccggctgcgtggttaaacgcaaaaccattcgcgccgccgtccttgagcagatgcgcaggctacggctgcgggaaaatgcggtcgaactgccagtcagcgccctgtccggcggaaaccagcagaaagcggccctagctcgctggctgctgcgcgattcaaggctgcttatcctcgatgaaccgacccgcggcgtggatatcggtgccaaaagggaaatttacgaactgatcgacaaacttgcccgcgccgggaaagccattctggtgatctcctccgatttaccggaggccattggcatcagcgaccgcgtgctggttatgcgcggcggccgaatcgttcaccagttaccctcatattcagcaacggaagaagaagtgatgctgcacgcaactggaacctttaccagtcaatccggagaatgccatggacaacaataa

SEQ ID NO: 14750 - DNA, 1020 bp, Escherichia coli
atggacaacaataaacctgtgacggaactgtcggtcaaagcgccgtttgattttgcgaaatggtgggatcgggtggggatcttaatcgttctgctggtgctgctgatcctgatgtcgacctttgcgccaaactttaaccgcgtcgataatctgctgaatatcgcccgctcgatttccgtcaacgctattctggcggcgggcatgaccttcgtcattttaaccagcggaattgatttgtccgtcgggtctatcgtcgccgtctccggcgtggtctcggtggttgcggcgatggccggaatccctgcgccgctggcgattctggctggcgtgggcgttggcgcgctgtgcggcctgctgaacggcgtgctcaccgcctatctcgctcttgcacctttcatcgtcactctcggcacaatgaccttcctgcgcggtatggcctacaccattaccgaaggacaacctattgtgtcgagtagcctgagcttccgtgagctggggaatggctatctcgccggcatccctgttccggtcattattatgctggttgtttatctactggcgtggttcattcttgagcgcacgcggttcggtcgtcatatctatgctgtcggcggcaacgcccaggccgcgcgcctggccggcgtacgggtaaaacgcgtactggcggcggtctatatgattgccggcgtctgcgcgggtctggcgggcattatcttcgccgcccgggtcatttccgcccagcctacggcgggtacgggatatgaactggacgccattgcggcggtagtgctgggcggcaccagcctcgccggaggacgcgggcgaattatcggcaccctgattggatcgataattctcggcgtgctcagcaccggcctgattctgctgagcgtgccctttttcacccagctattgattaaaggcatcgtcatcattcttgccgtggcgattgacggactgaagcagcatccggaactgtttaccttctggcggaaaaaagagatcgcccgtacccgctag

SEQ ID NO: 14751 - DNA, 1371 bp, Escherichia coli
atgacatatcacattacgctgacggacccgatgaacggtacccgggatcgcgaaccgattacgtttactctcccggagaaactgcaggagcccctgtggtgggcaatcaccagcgaggaccagcggatcctttgccagcgcctcactcatgagtcgacgcaaaacagtaccgcctttatcgctacggtaagcttcagcggcacgctccggatgcggcttgaccggccgctaacggcggctgaagtcggtgaagtcgccggtatccaccgcctgcctggccgggagaaagactgttttgtccgcctcaataccggctgcttcgatctggaaatgtgtcggggaaccgcccagggcgtgggttcatccaagtgggggctgcgccattttcgctgtctgcaggacaacgtcgagctgctcccttccgggaataacgccatcggcggtttttacggtccgttctttaccccggaaaatgggctgataaacccaccggaacataccctcgttgatattgaaattcttgaggaaggcccggtctatcatcactatcgcatgcacggcacgatccccgatgggttgttagcggagctgcgcggtaagcacttcaccatcgactggaagttcagctggaataccccgtggtttcagcggcgctactgggttgatgacttttcgacggtcattaacgggcgttcggtgaccaacaaaatcaccgtcggcgacgagtttgaaagcggtccgggaaaactgctgtttgaccgattcgcggcctacggcggtacccgctatcgtgcaggcgacccctacgcggaagagctggtcgccatggtggtccataccgtcaccacttctgaaaaccagagcccgaaatttgccgaattccgcgaacagctcgccgatatggcctccgcccattgggatctttactggcgaatgttctgtcgctgggaaaacgtgctggatgaagctgaaatccgcgaaaggcttggcgtagtgcgcgcccgggcgcacgttcgcgccgacctgaatgaacgggaatggcgcctgactgattctcccgtcaacgtttccgccgtgccggatgaaaccgtgtttccgggcccagccagtaaaaccgtcgagtacgattcagcgagcggccgggcgatgatctggtggacctcccgcccctccggcgcatttcagatagtccagcgccgtcagtccggttgggtgaactggggcagcaacggggaaaacgagtgtccggagctcccggtcggggtcgatatcaagaccgcctgcgggatattcgctgacaactggatgcagatagccgacggcctggaaacgccgccgcaggtcgcggtgagtcaggaggaaaagtcatga

SEQ ID NO: 14752 - DNA, 921 bp, Escherichia coli
atgatcctttgctgcggagaagccctgatcgatatgctgccctgccggagccgtgaaaatgctcccgcctttactccctgcgtcggcggcgcggcgttcaataccgccattgcccttggccgccaggggatggcggtcgcgctgttttccggtttatcggacgattttatgggtgacatgctgcgccacacgcttgacgcctccggcgtggattattcgctctcaacccgcgcgccgctacccaccacgctggcctttgtcaggctggaaggcggacaggcgcgctataccttttacgatgagaatagcgccggcagaatgctggctgaaagcgacctgccgacgctcggtgatgacgtatctgccgttctgttcggctgcatcagcctgatagccgaaccgtgcggcagcgtttatgaagcgctgatggtaagagaggcgtcgcgccgggtgatgttcctcgaccccaacattcgtgaaatcttcatccaggaccggcagaaacacctggcgcgcatgatgcggatgattacccttgcggatatcgttaagctttccgatgaggacctcgcgtggtttgccgaacccagcgaagagcacgaggtaatacgccgctggcttgctctgggaccaaagcttatcgtggtcacccgcggggctgacggcgccgatgcctggaccgctaatttccatctacatgttcccggtattcgcgtagcggttgccgataccgtcggcgcgggagatacggtaaatgctggtattctcgccagcctttcgcaggccggactccttgagaaacataaattaatgacactgtcacacgaacaggtgcgccacgcagtcgatctcggtatgcgcgccgccgcagtgacggtctccaggccaggggctaacccgccgtggggccatgagctctga

SEQ ID NO: 14753 - DNA, 180 bp, Escherichia coli
atgtcggtgtggtacatcttccccaacgaagagagtatcatgcggcttctgcgagctgtagcgacggaacagaacgaggagtggatgctgcagaaccgttatctgccacaacacacgatggtggagataggccatgtcgttgaaacagaagtaatcgaagtactgccactctacgcataa

SEQ ID NO: 14754 - DNA, 1257 bp, Escherichia coli
atgagtggactcaaacaagaactggggctggcccagggcattggcctgctatcgacgtcattattaggcaccggcgtgtttgccgttcctgcgttagctgcactggtagcaggcaataacagcctgtgggcgtggcccgttttgattatcttagtgttcccgattgcgattgtgtttgcgattctgggtcgccactatcccagcgcaggcggtgtcgcgcacttcgtcggtatggcgtttggttcgcggcttgagcgagtcaccggctggttgtttttatcggtcattcccgtgggtttgcctgccgcgttacaaattgctgccgggttcggccaggcaatgtttggctggcatagctggcaactgttgttggcagaactcggtacgctggcgctggtgtggtatatcggtactcgcggtgccagttccagtgctaatctacaaacagttattgccggacttatcgtcgcgctgattgtcgctatctggtgggcgggcgatatcaaacctgcgagtatccccttccctgcacctggtaatatcgaacttaccgggttatttgctgcgttatcagtgatgttctggtgctttgtcggtctggaagcatttgcccatcttgcctcggaatttaaaaatccagagcgtgattttcctcgtgctttgatgattggtctgctgctggcaggattagtctactggggctgtacggtagtcgtcttacacttcgacgcctatggtgaacaaatggcggcagcagcatcgcttccaaaaattgtagtgcaactgttcggtgtaggagcgttatggattgcctgcgtgattggctatctggcctgctttgccagtctcaacatttatatacagagcttcgcccgcctggtctggtcgcaggcgcaacataatcctgaccactacctggcacgcctctcttctcgtcatatcccgaataatgccctcaatgcggtactcggctgctgcgtggtgagcacgttggtgattcatgctttagagatcaatctggacgctcttattatttatgccaatggcatctttattatgatttatctgttatgcatgctggcaggttgtaaattattgcaaggacgttatcgactactggcggtggttggcgggctgttatgcgttctgttactggcaatggtcggctggaaaagtctctatgcgctgatcatgctggcggggttatggctgtttctgccaaaacgaaaaacgccggaaaatggcataaccacataa

SEQ ID NO: 14755 - DNA, 858 bp, Escherichia coli
atgatggcattattactggagccactgcagttcacctttatgagtcacgcactgctgatttcactggtagtttccataccctgtgcgctgctgtcggtctttctggtcctgaaaggttgggcactgatgggtgacgcgatgagtcatgcggtttttcctggcatcgtgcttgcctggattctggggttacctttggctacaggggcattcgtcgccggagtattctgcgcggtggcgacgggatacctgaaagacaacagccgaatcaagcaagatacagtgatggggattgttttttctggcatgtttgccgcaggtctgatcttgtatattgcagtcaaaccagacgtacatcttgaccatattcttttcggcgacatgctcgggataaccatcggcgatataatccagacgatgattattgccgggctggttacacttgttattagcgtaaaatggcgggattttttgctgttcagctttgattatcaacaggcgcaggtaagcggtttgcatacgagatggctgcattatgggctgctgtgcatggtctctctgaccattgtggcgacgctgaaagcggtaggtatcattctctccatttctctgctcattgcgcctggcgccattgcggtactcctgacacaacgctttcatattgcgctcctactggcgactggcatatcggtaatagtgtcaatgactggtgtctggttgtccttttttatcgacagcgcaccagctccgacgattgtcgtcttattcgcggttttgttcatcatgacgtttgccgttaccagcatcaacgcacgcaaaaagggaaactcccatacacaggatctgttatcacccaattag

SEQ ID NO: 14756 - DNA, 282 bp, Escherichia coli
atgaaagatttaacactcaaatttgcagacagggccgacttttcggcctttatggagagcattggctattatgatgacgagttgatgcaggatgatattcttattgacgtgataggtaacgtgtacaaagaaaccggagaactgactgaagatggcgaaccggtatgtgttaaggaagacggatattttgtaaacgtgcgcatcattaatgatgcaaaaaaatcgtcaatattcgatgaatacgcggttgttgttgaacatcaacttcgtggctggatgtga

SEQ ID NO: 14757 - DNA, 2370 bp, Escherichia coli
atggcagtacagatttcaggtgtgctgaaagatggtgcgggaaaaccaatacagaactgcactattcaactgaaggcaaagcgtaacagcaccacggtactggtgaacacggtggcctctgaaaatccggatgaagccgggcgttacagcatggatgttgagcatggtcagtacagcgttatcctgcttgttgaaggttttccgccttcacatgccggaaccattaccgtctatgaaggttccagaccaggtacgctgaatgattttctcggtgccatgacggaagatgatgtcatgccggaagcattgcgtcgttttgaggaaatggtggaagaagcggcacgcaacgccgaagccgcctctcagagcgcagcggcggcaaagaaatccgaaactgcagcggcatcatcgaagaacgcggcgaaaacctcagaaacgaatgcagctaatagtgcacaggcggcagcgacctcaaagactgcatcggcaaactccgcgacagcagccaaaaaatcagaaaccaacgcgaaaaacagcgagacagccgcaaagacgagcgaaaccaacgcaaagtccagccagacggcagcgaaaaccagcgaaacgaatgccaaagccagtgaaactgcggcaaaaaacagccaggttgcagcagcccaaagcgagagcgcggcagccggttctgcgacttcagcagctggatcagcaactgctgcggctaacagccagaaagctgcgaagacgagtgaaactaacgcaaagtccagccagacggcagcgaagaccagcgaaacgaatgccaaagccagcgaaactgcggcgaaaaacagccaggatgcagcagcccaaagcgagagtgccgcagctggttctgcaagtgcggcggcttcttctgccactgcatcagccaacagtcaaaaagcagcaaaaaccagtgaaaccaacacaaaggcgagcgagactgcggcgactaactcggcgaaagcatccgctgcaagccagatggctgcaaaagcaagtgaagacgcagccagggagtacgcaagccaggcagctgagccgtataaacaagttttgcagccgttgcctgatgtgtggataccgtttaatgactcgatggatatgattacaggatttggcccgggatataaaaaaataacagtgcgcgatgatgtggtcactataccatccgacaaaattgtcccgttttcccgcgcgagttccgcgacctatatcaataagtccggcgctcttaccattgcagaaattaatgagccacgttttgaaaaagaagggctgttaattgaagggcagagaacaaattacttcacaaactcaaacgctccggaattgtggaataaaaatccaggcctgaagataagcgagacaaaaaccgattccaggggttttaaatatgcaacgtttaccccagaaaaatatttagatagttctggctcatatggaattatatcaggggcagcagcaaataagatagcggtagtcaaaaatgatgcagttacaatatcctttagagcaaaaggggataatgtaagatttgcggctagatttgataaaggggattcgccagttgctgtagctgccatttttattgatagcgccacactagatacattcacgtctggagcagatgcgtctaatattgctgtgaaaaatgttgttcgtgacggtgagtgggttgctgtagaggctgtttataaagtaacagacgactctacatatattaacggcgccattctgatgtcaaacaaactgggtgctaattttgataagactagttttatggatgtaaccacccctcaaatagagctaggttcttgcttatcatcatttattgtcacaccaggtgttcctgcgacaagggcgagtgatatggttattttttcaaccagaaataacataagttctgtccctttaagctgtcttgttgaaatacataaaaattgggactctacgccaaatcaggccccacgaattttaaccactattggcgtggcgactaatgatgaacaactggtattggctttcaggacgcctacaagtccggatgtagaacctttaccttatgttcagtttggagtgagatctgcatatcttagtccatctgtgaaggccgggcgcaaaatgattgctggttttgtctgtaatagctcgactgaatttcgttgctgttgtaatggttacctgtcacctgttcagacttcgtcatggaagaataccggagctgcacatgaaatacgtattgggggaacttctgctggaggagaacgtcacttgtttggtcacgttcgtaacctgagaatatggcataaagaattaactgatgcgcaaatgggggagagtattaaatga

SEQ ID NO: 14758 - DNA, 1902 bp, Escherichia coli
gtggaggttcagtccgtcaccgacggcgtgaaggtgaaagtgagccgtgttcctgacggcgttgctgaatacagcgtgtgggggctgaagctgccgacgctgcgccagcgcctgttccgctgcgtgagtatccgtgagaacgacgacggcacgtatgccatcaccgccgtgcagcatgtaccggaaaaagaagccatcgtggataacggggcgcactttgacggcgaccagagcggcacggtgaatggtgtcacgccgccagcggtgcagcacctgactgccgaagtcaccgcagacagcggggaatatcaggtgctggcgcgctgggacacgccgaaggtggtgaagggtgtgagctttatgcttcgcctgaccgtaacagcggatgacggcagtgagcggctggtcagcacggcccggacgatggaaaccacttaccgcttcacacaactggcgctggggaactacaggctgacagtccgggcagtaaatgcgtgggggcagcagggcgatccggcgtcggtatcgttccggattgccgcaccggcagcgccgtcgcggattgagctgacgccgggctattttcagataaccgccacgccgcatcttgcggtttatgatccgacggtacagtttgagttctggttctcggaaaagcggattgcggatatcaggcaggttgaaaccacagcacgctatcttggcacggcgctgtactggatagccgccagtatcaatatcaaaccgggccatgattattacttttatatccgcagtgtgaacaccgttggcaaatcggcattcgtggaggctgtcggtcagccgagtgatgatgcatcaggctatctggattttttcaaaggagaaatcgggaaaacacatctggcccaggagctgtggacgcagattgataacggtcagcttgcgcctgacctggctgaaatcaggacgtccattacggatgtcagcaatgaaatcacacagaccgtcaataagaaactggaagaccagagtgcagcgatccagcagatacagaaagttcaggttgatacaaataataacctgaacagcatgtgggctgtgaagctgcagcagatgcaggacggacgcctttatattgcgggtatcggtgccggtattgagaacacccctgacggcatgcagagtcaggtgctgctggcggcagacaggattgcgatgattaatcctgcgaatggcaacacaaaaccgatgtttgttggtcagggcgatcagatattcatgaacgacgtgttcctgaaacgcctgacggcccccaccattaccagcggtggaaatccaccggcattttccctgacaccggacggaaagctgaccgctaaaaatgcggatatcagtggcagtgtgaatgcgaacgccgggacgctcaacaatgtcacggtaaatgaaaactgtacgattaagggcatgctggaggcgactcaggtcagaggtgacttcgttaaagctgtatccaaatcattcccgaaacaggctggtacgtggggtaatacggaaacaccaaacgggacggttacagtcaccatcagcgatgatcataactttgaccgtcaaatcattattccgcccattatctttaacggaatagcgtatagcgatccgggaagtggtaataacccgggaggtacaagatacacgggttatggttttgaagttcgcaaaaacggtgtattaatcgcatccagagaaactaaaggggccattcccggtagctacagtgcggttattgatatgccgagtggcaggggaagcgtcactctggagtttaagattttccagaaaggcaatcagggcgcaggtaacatcacagactgtacggtgattgtgaccaaaaaagctgcttccggtatcagtatccgttga

SEQ ID NO: 14759 - DNA, 327 bp, Escherichia coli
atggttgcagtgactgcactgactcccgccgtctggctggtgacactgatttccaccgtgccgtccggctcggtgatcaccgtcggggcaaccgttgcgccgttgtccgccatcacgctgaccgtctgtccattcagcgcattcccgaacgcatcggtgaccttcacccgcagcgtgttcgccattgcgccgtcagccactgagttatcccgggtaacctccagactcgcgatcttcgccgtcctgacatcggcaacaaacgtcacgttctggctcaggctgctgttgttgatgctggcagtgactgtactggttccggcggtctga

SEQ ID NO: 14760 - DNA, 1215 bp, Escherichia coli
atgaaatttgaacgccatcatgaaatattgaaacgactcagtaaattcggttctgtaaaagtatccgatctgtccaatagcctcaatgtaacgaaagaaactattcgatcagatcttaatgaacttgccagacttggctatctgactcgatatcatggcggtgcttttatcgtcctagactcgcttgatactattgcgaaaaatgaaatcgcttatgcgcttgaaaattatgatacagcccagggaataaaaaaaggccactcaactatgaaaagtcaagtatgcgttattggttcgtttaatgttgatatcatcagttatttgccgaggcttcccactatcggagaatcgcttctggcaagtaattttatattttcaccggggggaaaaggctgtaaccaggcgctggcagcaagctttgccgatactgatgtttatttcataacaaaagtaggtacagatcactttagtgattatgcgatcaactttatgaattcgtctaagatttataaaagtataatttatcaaacgaaagaaacgcaaaccggaactgccacgatccttgttaatgaaggtactggcgataatgttattgcgatctatcccggtgccaacatgacaatgtcgtccgatgaaataactattcagaaagaagcgattattaattctgatgtcatacttctgcagctcgaaacaaattataccgctctgcaacaagcgatcacattggcgcaaaaaaacagtatcccggtcattattaacccggcaccctataatgatatcgtcaacgaacttattcaggatgttgattatatcacccccaatgaaacagaagctggtttactgtccggcatagacgtacacgatcttgaatcagctaaacgagctgcagaagctatccacaataaaggggtaaaaaacacggttatcacgctcggtagcaagggctcgctcgcatttgatggcaaaaaattcattcattcgccagcgtttccagcggtcgttaaaaatacggcaggagccggggatgcgtttaacggctctctggcatcaggacttgcgaaaggaaaatcactggaatcagcactgtgttatgccagcgcctttgcatccctagcggtggagacaagcaatgcttccgacatgcctgaacatgaatctgtgatacatcgaattcagagtatacattatcagcaaactatttttacgcattaa

SEQ ID NO: 14761 - DNA, 174 bp, Escherichia coli
atgagcggtaatccttatcccgcagagtttaaagttaaagctgtcaatcaggttgttaactgtgatcattctgtttccagcgttgcaacacgtctcggtatcactacccacagtctttacgtatggacaaagaacagccagatgctcatgacgagagccgcttacaaaaaatga

SEQ ID NO: 14762 - DNA, 1095 bp, Escherichia coli
atgaacaacagagaaaaagaaatactcaggatcctgcgtcataatccgctactacagcagaatgaaatcgctgatattttacaaatcagtcggtcgcgtgttgctgcacatattatggatctgatgcgcaagggagcgatcaaaggcaaaggctatatcctgactgagcaggcctattgcgttgtgctgggggctgttaacatggatatccgcggcatggcagatatccattatccacagacagtctccagcccgggtagtatccactgctctgccggaggtgtcggtcgcaacatcgcccataatctcgcccttctgggccgcaatgtgcatctgatatctgctgtgggcaatgatttttatggcgaaacgctactggaacagacgcgtcaggcaggagtcaatatttccagttgtattcgtctgcacggccacaatacctcaacttacctctccgtcgccaacccgcaggaagagactgtgatggcgataaatgatactcacatcctgcaacacctgacaccacagcttctgaacggttcgcgcaatttgatccatcactccggcgtggtgctggccgactgtaacctgacacctgaggcccttgaatgggtctttacggtcgctgatggtattcccgtatttattgataccgtttcggaatttaaggcgaccagagtaaaaagctggctcccacatatccataccctgaagcccacgcaaaaagagctggggatattatggggttcccctgtcaacaatgagaccgatcgactcaacgcagtgaacgcactgcatcagcagggtgtgcaacagatttttgtctggacggaagatgaatccgttttctgtagtcaaagagagggagaacaatttctgctcacacctcccgttcataccgttgtggacagctttggtgcagatgatggttttatggcgggcctgctttacagttttctggaaaggagtagcttccgggaaagtgctcactttgcgatggcatgtgcagccctgtcgcgtgccagtgccagcatcaataacccaacactttccgttaataacgcgcaatatctgttaaaaaaatcccgggggtaa

SEQ ID NO: 14763 - DNA, 321 bp, Escherichia coli
atgagcgtgtcaaatcaacgttgtgcaggcattgatgtttcgaaaagcactctggatattgcaatcaccagtattgcccagccattcactgtgccaaatgaagatggcggttttaatcagatattcaaagagttaaggcgaaatgaaactcaactgatcctgatggaagccaccgggggacttgagtctggtgtggctggctatcttcagtctgaaggtttcgatgtggttgttctacaggcgcaagattttgtccacgcattggactatctggctaaatcaaccaaattgatgccagagtcctgttacaaatggcaatag

SEQ ID NO: 14764 - DNA, 186 bp, Escherichia coli
atgagcacatcaggttttacgaagaaacaatccatcatattacggatcgcggctattccgttgctgaaatttccgaccaattgtacgttgctgcacacagtctctacatgtatttacgggttatttaacctgataacagtgaacagcatgcccgtgctcttcttgaagtcagaagtgaaaccctga

SEQ ID NO: 14765 - DNA, 537 bp, Escherichia coli
atgaggaaaaacaggatacaggacatatatggttataaaatgtcacgcgggccccggaggcgcccatcactgatagcacctaatcgcgtgcaatgtgatatttaccgttgcgaagctctgtcaggcacggggactgcgccaacgaaatatgactattttgaagttcgtcaaaaaaaaaccatattccagccaagtatggcgaactgttttgccgggattttttcattaaaccacggacaattgaagtccctaccatctcaacaaagtgataaaacttcactttgctgtttctgtaacatacagaaaaaactgccgacattcagccggcagaggaaggagtttgtacttttttgttttctcaggattttcatgtatgactgctacagacgagacaggcatgcgcctgcagcactcctcgataataaatccactcgcttctgtgtgcaaatcatgagcaaaaaaatgcccccaacaccgggggccagaaacatttttctgttgagtaactccactgagcgcatgaccggttataagtaa

SEQ ID NO: 14766 - DNA, 129 bp, Escherichia coli
atgtcggtcatttcccatgaggaagatattacacaggagagaaaagaatacgtcagaaatctgttgataaaggacgtgatgctcattgccgtaattgaatatctttatctttttatccattttctctga

SEQ ID NO: 14767 - DNA, 195 bp, Escherichia coli
atgggatggataggagtatgtatacgcatcctgctgactatgtattttcctctttttacgctaacacagtgtagcaacgatggtatgtggtcagcttcacactttctgaactcccgtggagcgttactcgacagcctgtactcacgtaactatctgctgcttatattggcagacacatacattatctcttcataa

SEQ ID NO: 14768 - DNA, 195 bp, Escherichia coli
atgggtaaaataggtgatgacgttccgcatctaatcgatcaagccgtagattttatggcatcaagccaggcgttccgggagtatctgagaaaactccccccccgtaacgcaattccgtccgatattcctgaagaaaatgtaccgttatatctacaacgtctggaatattatcgccagctttatcggccaaagtag

SEQ ID NO: 14769 - DNA, 1788 bp, Escherichia coli
atggacgatattaatatcagcctcgacgaacttaacactattgatttatcccccttaatccagagtaagctgccagttacctgctttgatatcacaaagtatctttctagcctaggtgatggaagagcggagataagactgctaacccatatttgcggttttcactttcgtcccgaaaatccacaggtaccatttggtccgtgctttcaaagcagccaaggtagatctgcaattccggatgacattaacgggttgtcgctggaggtactttctcaattttgcccgacgatagagctacccgaacttcaagctcgtattgctgatacactttgggttcgtaaaattggtggaatccgttttcctttgctggcagtccgtgcttattatgcgtccagtatagctattatgacatcgcaagggacgtgggttagtgctttagaacgcctagagcgtgcgcttaggctgtgttgtttttttcgaaagaatactgatttcagggatgaatttgatcagctttcggcacatctactagcagagtatgaacgtaccagagaacaaggcgattcaccttatccgctgcgactcctgcaactcgatatcgactgtaaagtgagtgagccatcttttattgcccaggaactcctgtttctgacaaaaaactatctggctcaaaaattattttcatttgccgtcgatgcctgtaaaaccgcaatcacgattgcgaataggtgctgtgacagagatacacagtttgaattctggcggcttcttgccgatacacatctggaagagtcaaaattccaagatggcggtatgatttcggcagcctgcatgcagaatgctattgaagcactggctaatattccaggaacccgaatagaacgtcttgcgctgtatgaagaaatgcgtgattaccaaatcgaatcccgtcaccagatgtctatccttcagtctccccctcaagatattagtgagattgtccatcaagccaagagtcgggtagtcggaagagatatgtttgatatggttttcagacttgcgatgctggtctgtcggccaaccagcattgagagacttaaggctcaagcaatagaacaaaaggccaacagcatagcttggatgtttggatcaacacatattgatcatgagggaatgacacttgctcgcatacccgcaggattggggattgatgatgcaaatggggcagttatttggcccataatgatgacgagaatgcgtatcgaccatgagttggcagtagctgggcaaattattcctgctacagatgagatcacaatgaaatatccaatctcggaggcgttttttcgcgatatgttcatcaatcatcccttcatcccgtttgggcatgaagagtttttcatcaagggtatggtttgcggtttcaatggagattttatgacggcatgccacgtgttgattccccagatcgaaaatagtctgagatatgtggctaaaattaaaggtgaggaaccatcgcagcttcacggggacggttcgcaagagcgaaatggactcaagggattactagataatccactgattattgaagctttcggcgtagacataattggcaatcttcaggccttactggtagataaaatctatggtgatttacgaaatcaactagctcacggatatgtgcctgccggttactacaatcaacctccctgcatttttgcatggtggcttgtattgcacattctaatgaaccctacggcgagatactggcaagccacttatggccaagagagtgaggctcagacttaa

SEQ ID NO: 14770 - DNA, 156 bp, Escherichia coli; identical to SEQ ID NO: 7155

SEQ ID NO: 14771 - DNA, 576 bp, Escherichia coli
atggatttcgacacaatcatggaaaaggcttacgaagaatacttcgaaggccttgccgaaggcgaagaagctctcagcttcagtgagtttaaacaggcactcagaataagaatgcgctctcacaatgacgcggagcacaaatatgagaagcaaaatcagaccgcagaaaattttgttctggaacccggagaaacgcttttcaaaattcccgttacgtgccccatttgcggttttacatcagaagaacttgacgactcctgtaacaatcaggaaacaaccaagtatgtcgaagatgataccgagtgcgcacgaagaacgattatatccacgagtccaaactccaggaccaataaatctcactttgagagggtgattaatccactcccccaaaccaataaaaaagatgccggaggacaaaaaaaccaatggaacaacgggatatctgtcaaaaaaagacgttccattaaagacaaacaacgcagcgccaacaactgtaagcgctttataccagtaatcaattttcatgttcttaagcggatttattggtggttgcgacattgcttaatgaatccttaa

SEQ ID NO: 14772 - DNA, 1707 bp, Escherichia coli
atgaacagcgacaacgcccgcaaggtgcccgccgacgcgccgaccgagttcatcaagccgcgctggcagaagctggtcatgaccgacaccggcatcgaccggcgctactacgaactgtgcgcgctgtcggagatgaagaacgcgttgcgttccggcgacatctgggtgcaggggtcgcgccagttcaaggacttcgaggactacctggtgccgcccgcgaaattcgccagcctcaagcaggccagcgaattgccgctggccgtggccaccgactgcaaccggtacctgaacgaccggctgacgctgctggaaacacagcttgccaccgtcaaccgtatggcgacggccaacgagctgccggacgccatcatcaccgagtcaggcttgaagatcacgccgctcgacgcggcggtacccgacaccgcccaagcgctgatcgaccagacggcaatgatcctgccgcacgtcaagatcaccgaactgctgctggaggtggacgaatggacgggcttcactcggcatttcgcgcatctgaaatcgggcgacccggccaaagacaagaacctgttgctgaccacgatcctcgccgacgcgatcaacctgggcctgaccaagatggcggagtcttgccccggcacgacctacgccaagctggcttggctgcaagcctggcacatccgcgacgaaacctacggggcggcgctggccgatctggtcaacgcacagttccgccatcccttcgccgagcactggggcgacggcaccacctcatcgtcggacggccagaacttccgcaccggcagcaaggccgagagcaccggccacatcaacccgaaatacgggagcagcccagggcggacgttctacacccacatttctgaccagtacgcgccatttcacaccaaggtcgtgaacgtcggcgtgcgcgattcgacctacgtgctcgacggcctgctgtaccacgagtccgacttgcggatcgaggagcattacaccgacacggcgggcttcaccgatcacgtcttcgccctgatgcacctcctgggcttccgcttcgcgccgcgcatccgcgacctgggcgacaccaagctctacatcccgaagggcgacgccgcctatgacgcgctgaaacccatgatcggcggcacgctcaacatcaagcacgtccgcgcccattgggacgaaatcctgcggctggccacctcgatcaagcagggcacggtgacggcctccctgatgctccgaaagctcggcagctacccacgccagaacggcctggccgtggcgctccgcgagctgggccgcatcgagcgcacgctgttcatcctggactggctgcaaagcgtggaactgcgccgccgcgtgcatgccggcctgaacaagggcgaggcgcgcaatgcgctggccagggcagtgtttttcaaccgcctgggtgaaatccgcgaccgcagtttcgagcagcagcgctaccgggctagcggcctcaatctggtaacggctgccgtcgtgttgtggaacacggtctatctggaacgggctgcgcacgcgctgcgtggcaacggccatgccgttgatgacgcgctgttgcagtacctgtcgccgctcggttgggagcacatcaacctcaccggcgattacctctggcgcagcagcgccaagatcggcgcgggcaagttcaggccgctacgaccgctgcaaccggcttag

SEQ ID NO: 14773 - DNA, 1005 bp, Escherichia coli
atggaaaacattgcgcttattggtatcgatctgggtaagaactctttccatattcattgtcaggatcatcgtgggaaggccgtttaccgtaaaaaattcacccgaccaaagctaatcgaatttctggcgacatgcccggcaacaaccatcgcgatggaagcctgtggcggttctcactttatggcacgcaagctggaagagttagggcattttccaaagctgatatcaccgcaatttgtccgcccattcgttaaaagcaacaaaaatgacttcgttgatgctgaagctatctgtgaagcagcatcacgtccatctatgcgtttcgtgcagcccagaaccgaatctcagcaggcaatgcgagctctgcatcgtgtccgtgaatccctggttcaggataaggtgaaaacaactaatcagatgcatgcttttctgctggaatttggtatcagcgttccgcgaggtgctgccgttattagtcgactgagtacccttcttgaggacagtagtttgcctctttatctcagccagttactgctgaaattacaacagcattatcactatcttgttgagcagattaaaaatctggaatctcagttgaaacgaaagttggacgaagatgaggttggacagcgcttgctgagtattccctgcgttggaacgctgactgccagtactatttcaactgagattggcgacgggaagcagtacgccagcagccgtgactttgcggcggcaacagggctggtaccccgacagtacagcacgggaggtcggacgacattgttagggattagcaagcggggcaacaaaaagatccgaactttgttggttcagtgtgccagggtattcatacaaaaactggaacaccagtctggcaagttggccgactgggtcagggagttgttgtgtcggaaaagcaactttgtcgtcacctgtgctctggcaaacaagctggccagaatagcctgggcactgacggcgcgacagcaaacttacgaagcataa

SEQ ID NO: 14774 - DNA, 582 bp, Escherichia coli; identical to SEQ ID NO: 9095

SEQ ID NO: 14775 - DNA, 2103 bp, Escherichia coli
atgctgaatcaggaaaccgcaaaggcagcacgaaccgattcaggttatatccttcgcgcaccgagacgaatgcgggttgctgatgccgttgctcagtatatgcgggtgcctatgggggcagggaactcagtcccgtgggatccgctggtggcaccgtatgttattgagcctatgaactgcctggcctcgcgtgaatacgacgcagtgatatttgttggcccggcacgaaccggcaagactatcggcctgattgacggctgggtgatttacaacgtgatttgcgatcctgctgatatgctgatcattcagatgacggaggaaaaagcccgcgaacactccaaaaaacgactcgccagaacgtttcgcgtcagcccggaagtggtcagtcgcctgagtccgaacaaaaatgacaacaacgtttatgacagaacattccttgctggcaactacctgaaaatcggctggccgtcagtcaatatcatgtcttcatcagattataaatgcgtggcgctgacggattatgaccgttttccggaagatattgatggtgagggggatgccttctctcttgcctcaaaacgtaccaccacatttatgtccagtggtatgacgctggtggagagttcccccggcagggatgtgaaggatgtgaaatggcgacggacttcaccgcatgaggctccaccaaccacggggatcctgtcgctctataaccgtggcgatcgccgtcgctggtactggccctgtccacactgtggtgagtattttcagccctgcggcgatgtggttgctggtttccgtgatattgccgatcctgtgctggcaagtgaggcggcttatattcagtgtccttcctgttcaggacggattttgcctgaacaaaaacgcgagctgaacggacgtggggtctggttacgggatggtgaatccatcaatgcagatggcagtcgttatggtgatccccggcgttcacgtattgcgtcattctggatggagggtccggcagctgcttatcagacactctcgcaactcgtttacaaactgcttactgcagaacaggaatacgagacaaccggaagtgaagagacactcaagacggttatcaataccgactggggattaccttatcttccccgcgccagcatggagcaacgaaaaagtgaattgcttgagcagcgggcagagccagttccttcccgcagtgtgccggatggcgttaatttccttgtggcgacagtggatgtgcaggcgggacgtcatcgccgttttgtggttcaggtaacgggctatggcagccgtggcgaacgctggattattgatcgttacaacatcacgcagtcattgcgcggtgacagcgacggggagagccagcgaattgatccggccagctatccggaagactgggatgtcctgctgacggatgtttttcataaaagctggccgctggcctccgatccttctcaacaaatgcgactgatggcaatggcggtggactccggcggtgaagacggggtcactgataatgcctataaattctggcgtcgttgccgtcgtgatggccttggtaaacgtatttacctgtttaagggtgacagcatccggcgcgcaaaactgatcagccgtacattccctgataacaccggacgaacgggccgccgggcgcaggccgcaggtgatgtgccgctctggcttcttcagacggatgccctgaaagaccgggtgaataacgcgttatggcgtgactcgccaggtcccggctatgtgcatttccctgactggctggggagctggttttacgacgaactgacgtatgaagagcggagcagtgacgggaaatggagtaagccgggtcgcggtgccaacgaagcttttgacctgatggtgtatgccgaggctctggtcattctgcatggatacgaaaagatccgctggccggatgcaccggagtgggcgagccgggaaacctggctggagtgtgtcccggacagtaccgaaccgtcacccacaccggaaccggtatccacgcctgttaaaaaacaaaaacggaagaaaacagtaactgacgatgttaacccctggctgacttccggaggatggttatga

SEQ ID NO: 14776 - DNA, 168 bp, Escherichia coli
atgcgaaccataaatgcctcatcttcagcaatgcagccggcatccgaacaggacgatattgtaaattcacctaattacgaggacattgcagtagttgaattgcagctctgtattagcctgacagtgacagaatgcgatattgactctgtcacaggtgaaatagtttga

SEQ ID NO: 14777 - DNA, 207 bp, Escherichia coli
atgaataaagaacaatctgctgatgaactctcgttggatctgattcgtgtaaaaaatatgcttaatagcaccatttctatgagttacccggatgttgtaattgcatgtatagaacatcaggtgtctctggaagcattcagggcaattgaggcagcgttggtgaagcacgataagaattcgaaggattattccctggtggttgactga

SEQ ID NO: 14778 - DNA, 411 bp, Escherichia coli
atggctcaggctgccatttttaaagaaatattcgatcaagtgcgtaaagatttaaactgtgaattattttattctgagctaaaacgtcacaatatctcactttatatttactatttagccacagataatattcacattgtgttagaaaacgacaacatagtgttagtaaaaggactcaaaaaggttgtaaatgttaaattctccagaaacaaacatcttatagagacctcctataataagttgaaatcaaaagaaatcacatttcaacaatacagggaaaatcttgctaaagcaggagttttccgatgggttacaaatatccaggaacaccaaagatattactatgcctttgataactcattactatttactgaaagcatccagaaaactacacagatcttaccacgctaa

SEQ ID NO: 14779 - DNA, 2373 bp, Escherichia coli
atgaagcgagttcttattcctggcgtcattttatgtggcgctgatgtggcgcaggccgtcgatgacaaaaacatgtacatgcatgtttttgaagagatgacggtctatgctcctgtccctgtacccgtaaacggcaacacgcattacaccagtgaaagcatcgagcgtttaccgaccgggaatggcaatatcagcgatctgctgagaacaaaccctgcggtgcgcatggattcaacgcaaagtacctcgttgaaccagggagatattcgcccggaaaaaatctctattcacggtgcgtcgccctaccagaatgcctatttgattgatggtattagtgcaactaataacctgaacccagcgaatgagtccgatgccagtagtgcaaccaatattagcgggatgtcacaggggtattatcttgatgtcagcttactggacaatgtgacgctttatgacagttttgtgccggttgaatttggtcgcttcaatggcggggtaattgatgcaaagatcaaacgcttcaacgctgatgatagcagcgtgaaactgggttaccgcactacgcgttcggactggttaacatcgcatatcgatgagaataacaagagcgcatttaatcaaggttcttcaggaagtacttatttctctccagattttaaaaagaacttttataccttgtcgtttaatcaggaactggctgataactttggcgttactgccggtttatcgcgccgccagtctgatatcacccgcgcggattatgtttcgaatgacggcattgtcgccggtcgggcacagtataaaaatgttatcgataccgcattgagcaaatttacctggtttgccagcgaccgctttacccacgatttaaccttaaaatataccggctccagccgtgattataataccagcaccttcccggagtctgatcgcgaaatgggtaataaatcctatggtctggcatgggatatggatacccagctcgcatgggccaaactgcgtaccaccgttggttgggatcatattagtgattatacccgtcacgatcatgacatctggtacaccgaactttcatgtacatatggtgatatttcagggcgttgcacccgtggcggattaggacacatttcccaggctgtagataattacaccttcaaaacacgcctggactggcaaaaattcgccgtgggtaatgtttcgcatcaaccctacttcggcgcggaatacatctattccgatgcttggactgaacgccataaccagtctgaatcctatgtgattaatgctgcaggaaagaaaactaaccataccatttaccataaaggtaaaggcagtctgggaattgacaactacacgctgtatatggcggatcgcattagctggcggaatgtgtcgttaatgcccggtgtgcggtatgactatgacaactatctgtcaaaccacaatatctccccgcgatttatgacggaatgggatatttttgctgatcaaacctcaatgattaccgcaggttataaccgttactatggcgggaatattcttgatatgggattacgtgatatccgcaatagctggacggaatcggtatcaggcaataaaaccctgacgcgttatcaggatttgaaaacgccttataacgatgaactggcaatggggttgcagcagaaaatcggtaagaacgttattgcgcgtgcaaactatgtttatcgtgaagcgcatgatcaaatcagtaaaagcagtcgtaccgacagcgcgactaaaaccaccattactgaatataacaacgacggcaaaaccaaaacgcattcgttcaacctcagttttgaactggccgaacccctgcatatcagccaggtagatattaacccgcaaattgtctttagctatatcaagagcaagggcaacttgtcgttaaacaatggttatgaggagagcaataccggtgataaccgggtggtttataacggtaatctggtctcttacgatagcgttccagtggcggattttaataatccactaaagatctccttaaacatggatttcacgcatcaaccgagcgggttggtgtgggcgaatacgctgacctggcaagaagcgcgtaaagctcgcattatcctgggtaagacgaatgcgcaatacatcagcgaatattcagattacaagcagtatgttgacgaaaaactggatagcagcctgacctgggacacccgcttgtcctggacgccacaatttctgaaacaacaaaacctgacgatcagtgccgatattctcaatgtactggatagcaaaaccgcggttgatacaacgaataccggtgtggcgacctacgccagtggccgtactttctggcttgatgtcagcatgaaattttaa

SEQ ID NO: 14780 - DNA, 1014 bp, Escherichia coli
gtggcagatgaaattattggacctacgggtgatgtgatgacgcttaatggacactatccctataccgagaaggttcactccacaaaatatcatttcactattatctttaacccgccgccactctttagcttctacagacttatcgataaaggctttgggattttgatatttattctgttaatcgcctgcgccgctgccttcctgcttgataggtatttcaataaaagcgcaacgcctgaagagatcctgcgacgggctataaataatggggagatcgtcccattttaccaacctgtggtaaatggtcgggaagggacattgcggggagttgaggtgttagcccgctggaaacaacctcacggtggatatatatcacccgcggcatttattccacttgctgaaaaatccggattaatcgttccgcttacgcaaagcctgatgaatcaggttgccagacagatgaacgctatcgcgagtaaactgccggaaggttttcatattgggattaattttagcgcctcgcatattatttcgccgacatttgtcgacgagtgcttaaattaccgtgacagttttacccgtcgcgatttaaacctcgttctggaagttaccgagcgtgagccattaaatgttgatgaaagtctggttcagcggttgaacattctgcatgaaaatggttttgtcatcgcgctggatgatttcggtactggctactcagggctttcttatctgcatgacctgcatattgattatatcaaaattgatcacagtttcgttggccgcgtaaacgcagacccagaatcaactcggattctggattgtgtattggatctggcgcgtaaactttcgatcagtatcgtcgctgaaggtgtcgaaacgaaagaacaacttgactatctgaatcaaaataatatcacatttcagcagggttattatttctataaaccggtaacatacatcgacctggtcaaaattatcctttctaaaccgaaggtgaaggttgtggttgagtga

SEQ ID NO: 14781 - DNA, 147 bp, Escherichia coli
atggaacaaaacccattatccgcagaaccccacagatcattttcaaataactttaaacttcaaatggttaaactggcttcacagccaggagcctctgttgcccgtattgcccgggaacacggtcagtatctggtgaactcatattga

SEQ ID NO: 14782 - DNA, 690 bp, Escherichia coli
atgaaaactgcactggattccctgaaaggtaaattaatcgtctcctgtcaggcgctggaaaatgagcctctacacagtccgtttattatgtcacgtatggcgctggcggcagcacaaggcggtgcggcaggtatccgtgcgaacagcatggtggacattcgtgctatcaaagagattgtctgcctgccggtgatcgggattatcaaacgcgattaccctggcagtgaggtgtttatcacggccactcgccgggaagtggatgaactgatgaccgttgagccggaaattattgccctggatgccactgcgcgcccgcgccccggtgatcagacgctggaagaactggtcacgcagatccgcgctcgctacccgtccgtactactgatggcggatatagcaaccgtagacgaggcggtaacagccgagcgtctgggttttgactgtgtgggcaccacgctctacggctataccgcagaaaccgccgggcatgtgctggtggaaaatgactgtggattcttacgtgaggtcctggcagcggtcagcattccggtcgtggcggaagggaacgtcgatactccggagcgcgccgcacgttgcctggcattaggcgctcataccgtggtggttggcggggcaatcactcgcccacagcagatcacggcacgctttgtcgcagcgatcgcctcgtaa

SEQ ID NO: 14783 - DNA, 1071 bp, Escherichia coli
atgagtacagaaatgaaaacggggctggtgctgtccggtggcggggcggtgggcgcttatcaggtgggagtggttaaggcactggcagagtgtggtacacagatcagcatggtctcaggggccagtatcggggctctcaatggtgccattatcgctgcctctcccgatctgtcggaagccgccgcacgcctggaggctctctggaagcatctgggagagagtcaggttctgtcggtaaaccgatcggtttacttttcattgctgaaaaaactgctcccggccatgaacttctgccagctccccggacatgcgggcacactgcttacgacgctttttcgccatatatcgacaatcaacgggttcgaaaatccgatggctcagccgttgttgtcagatggacccctgacagcgctgatggatcattatcttgatactgatgctctgtctgacgggctaccgttgtatgtgtcgctgtaccccacggaagggggaatgcaggatattatcgactgcattcgtgctgaactgggtgccggaactacaaaaaactccgtttttcagcatatccagagcctgccccacgggcagcagaaagaagccttactggcgtcagcagcactgcccctgctgttccgtccccgtgaggtacagggaaaaatgtacggtgatggtggtatgggcggatggcaaaatatgcaggggaatacccctgtgacgccactggtggatgccggatgcaatatggtgattgtgtcgcatctgagtgacggttctttatgggatcgccgggcttttccggacaccacaatccttgaaatccgtccccggaaaaagctgaaacaaacaggggaagaaggcaaaagtggcggtctgctcagttttacatcggcacatatcgacacctggcgtcagcagggctatgaagacacgatgctggcgatggagcatatccggaaaccactggcggcacgtcaggcactgacccggtcagaggcggtattgcagaaaagcctggatataactgaaggtgcagattcggcactgagaaacgcgatggcccgacttaaataa

SEQ ID NO: 14784 - DNA, 672 bp, Escherichia coli
atgaaattacctgtaaagttattaatgagccttatatctctggtcagcgttattgcacgtgccggggaatataaaaattacagcagggatgaaataaaatactggcgatatacatcatacaaggggtggaaactttcggaaggtttcactgatgagaaattttccagcgccatttacaacggaagaatatttacaatgaaacgtttacataccctgatattatttctggcggttctgtttactggctttaacgcggaagcagcgagcgtgaaacaagcgctcagctgcgacccaaacgcctgggctgaacaacctggagcatgccctgatatcaacacgctctatactgacgatgctacttataaagccgctatcgataaagcgttgaaacctgtcggactaggcgggttattcggtaaagatggcgtgatgaatggtcctggtagcgatgttattcccgtgcaaatcaacggcaaagtctggcttgagtctacagcctgcaaaagcgatgcctgtggttgggaatacatcacaacgctttataacccgcagacccatgtcgtggtaggttactattacaacgtcgacccaggttacctggtttggttcggcgatatcggcgttaatgaattcgcctatctggttaagaaatacgtaagcatgtctaactaa

SEQ ID NO: 14785 - DNA, 762 bp, Escherichia coli
atgcataatgcatttgaaccaaaattgcttgagcaaaatgttaaaatgatagtgcctagtttatacttgaaaaagtattaccaatcttatttagcaaatgcagatattgagattgtaccaaatggaattgatttagaaacctatcaatctacttttcagccgatcactagaagcgaacttaatatctcccctgaagagaaaattattttttatgctgggcgtatcgtccctgacaaaggcatattactgttgatgcaatcattcgaaaaattggccgttgctcacaaaaatttaaaattagttgtgattggtgattatacagaaatgagtaaaagtgacaaaggtgcatatcaacacaatgtcagggaaattgcaaaacgtttgaaggatcgttgcattatgttaggaagcataccgcctgaaaagatgcattgttattacccactggcagatttagttgtcattccttcccagttccaggaaccattttgcatggtggcaattgaagctatgggggctggtaagcctgttttagtgagtacgcgtggggggatgacggaatttgtcaaagaaaatactacgggattccatttaaaagaacctatgactgcagactccataagcagcgatattttaaaaacgttagcgaatcctgaattaacagcagttgcaaagcaaggtcaggattttgtgtttgatcactacagttgggatggcgtaactcaaagattcgaagaggtcattcataattggtttgaataa

SEQ ID NO: 14786 - DNA, 1503 bp, Escherichia coli
atgactcaaactcctctattacttgcaatcatatttttattggttgttcttgttctttatatagctgcaatcaaacgcatcaaaaaaatacaattagaattaagtgatagcaatcaaaaaaatgaagaatacaaatctcgctttgcagattattttaatgtagaagaagaatgtaagaagcttattgagaaaacagagcaagaatgctccataataaaagaagaatccctaaaagtaaaagaaaatgccaataatgaactaacaaacaccattgaaaaaatggatggtatcaataaacaaatccaagagctaagaagaacttataaagagaagaaagaaatatatgataaactagtaaggcaaatttctatttattcagaagatgttgagctagccgaactaggattttacgaacctcattttaattttgaagattcagagcaatttaaaaacaaaataaaatccatcagggatgaacagaaattaatgctgcgggataaaacccactctggcgcagtatattgtacaacccaatggactgttgaaggctctcgagcagagggtaaaaaaatgacagacagaaatatcaggctaactactagagcatttaataatgaatgtgatgctgcaattagcaattgcacgtggaaaaacatcactaaaatggaagaacgcatcacaaaggcatttgaggccataaataaactaaacgagcaaaatcacatatatataaacactaaatacctcaataaaaaacttgaggaattgtggcttacccatgaatatcgtgagcaaaaacagaaagaaaaagaagaacaggcagaaataagggcacaaatgagagaggaggagcgtgcacaacgagaaatagaaaaggccatgcaagacgcagaggcagaagagcgccgttataaaaaagcaattgaagctgcaagaaaggaaatggaaaaagttactggtgacatgaagcagcgcctcgaaaatcgcattgccgaactagaacagagtttgtcgcaggctgaatcaaagcatcaaagagcattatccatggcacaacaaaccaaacaaggtcatgtttatattatttcgaacataggttcttttggggagaatgtttataaaataggcatgacacgacgtcttgatccgcaagaccgtgtaaatgagctcggtgatgcatctgttccttttatttttgatgtacatgccatgatttattcggaggacgctccatcattagaaaaaaaactacatgatgtcttcgataaaaagagagtcaatcttgtaaatcgtagaaaagagtttttctatgttactctggatgagatcaaagaagctgttaaaaaacactctgattcagaaattgaatttattgagacagcagtcgcaaaagactttaatgagtcattggctattcgtaatcatgaaaataaaaaaagtgacaacagcaactcatcaattatacctgagcgaaaaaccccagagtttgcagatgcaatttaa

SEQ ID NO: 14787 - DNA, 507 bp, Escherichia coli
atgtggaactttgacagtgccgacttaagtgcaatagcagcaggcatttctgcgtttggcacattagccgcagcggggtcggcgcttgcaagttggtgcacgtcaaaaaaagcgctgcagctacaaaatagagtttacctttatgagtctttaaaggcttgcgctgagagagccaattcatcagctaaagataagcgcggatctgaatggagcgttaatgatgcagcggatatcatcaggtgcctagtacgggcgatggagctcatcaagcaggatagccagcagaaagaaggtaatcaggcattaatgttgaaacagtactttgttaatctgctaataatggaactgtacgaggaagttcataacggtgatgcggctgattctgtttttaaaagtacggaacctacacaagtacttgataacttatggagcaaatggcaggaggctatagctttttttgatatttggaattacccagttgcgactgaggaagacttggcagactaa

SEQ ID NO: 14788 - DNA, 906 bp, Escherichia coli
ttgtctgccatttgcggccaggtcgcaacaccgtttcatgccgatgtgtttatcgctcattttggccctgctggggtaaccgcggcaaaactacgcgaactgggtgtcattcgcggcaaaattgccactatcttccacggtattgatatctccagtcgggaagtgctcaaccactacactcccgaatatcaacaactgtttcgccgtggcgacctgatgttaccaataagcaatctgtgggccggaaggctgcaaaaaatgggctgcccgagggaaaaaatcgccgtatcgcgcatgggcgtggacatgacgcgttttagcccgcgtccggtgaaagcgcccgcaacgccgctggaaatcatctccgtcgcacgcttaaccgagaaaaaaggcctgcatgtggcgattgaagcctgccgccagttgaaagagcagggcgtggcatttcgctatcgcatcctcggcattggcccgtgggaacgacgcctgcgcaccctcatcgaacaatatcaactggaagatgtgatagagatgccgggctttaaaccgagccatgaagtgaaagcgatgctcgatgacgcggatgtcttcctgttgccatcggttacaggtgcggatggcgatatggaaggtattccggtggcgctaatggaagcgatggcggttggcattccggttgtttctactctgcacagcggaataccggaactggtggaggccgataaatccggttggctggtgcctgagaacgatgcctgtgcactggcgcaacgactggcggcgtttagccaactggacaccgacgaacttactacggttgtcaaacgtgcgcgcgaaaaagtcgaacacgattttaaccagcaggtgatcaatcgagaactcgccagcttgctgcaggctttatag

SEQ ID NO: 14789 - DNA, 1395 bp, Escherichia coli
atgccatttaaaaaactctcccgacgcaccttcctgacggcaagctcggcgcttgccttcctccatacccctttcgctcgcgcgcttcccgcccgacaaatcgttaacattaacgactacaacccacacgactggatcgcctcatttaaacaagccttcagcgaagggcaaacggtcgtcgtgcctgccggattcgtttgtgaaaatatcaacaccggcatcttcattcctcctggcaaaacgttgcacatccttggaagcctgcgcggcaacggcagagggcgttttgtcttacaagacggcagccaggtgacaggggagaagggcggccgtatgcataacatcaccctggatgtgcgcggttctgactgcatcatcaaagggctggcgatgagcggttttggcccggtaacgcagatttatatcggcggcaaaaataaacgggtcatgcgcaacctgaccatcgataatctcaccgttaaccacgctaattacgctattttgcgccagggatttcataaccagataatcggtgccaacatcaccaattgtaagttcagtgacttacaaggcgacgccattgaatggaacgtggcaattaacgacagtgatattttgatatctgaccatgtcatcgagcgcatcaactgtactaacggcaaaatcaactggggcattggcataggtcttgcgggaagtacctacgataacaactacccggaagaccaggcagtgaaaaactttgtcgttgcgaatatcacgggatcagattgtcggcaactgatccatgttgaaaatggtaaacattttgttatccgtaatatcaaagctcgtaatatcacgccggatttcagtaagaaagcaggtattgataacgccacagttgctatttatggttgtgacaactttgtgattgataatattgaaatgattaatagtgccgggatgttaatcggctatggggtaattaaaggcaaatatctctcgataccgcagaatttccgagtgaatgatattcaactggataatactcatcttgcttataaattgcgcggcatccaaatctccgccgggaatgctgtctcctttgtggcgctgactaacattgagatgaagcgtgcgtcgctggagttacacaacaaaccgcaacatctttttatgcgaaatatcaatgtgatgcaggaatcctcagttggacccgcattgagcatgaactttgacatgcgcaaagacgttcgcggcgtgtttatggcgaaaaaagaaacactgctgtctcttgcaaatgttcatgcggtgaatgaaaaaggacaaatctccgtcgatatcgacaggattaatcaccatattgttaatgtggagaagattaactttagattgccagaacggagggagtag

SEQ ID NO: 14790 - DNA, 501 bp, Escherichia coli
atgaataacacagacacattagaaaaaataatcagacaccaaaaaaacaaagaccccgcatatccctttcgggaacatttgttgatgcagctctgtattcgcacaaataaaagaatgcaggataatatatctgaatttctgggggcgtatggaataaatcactcagcatatatggttctcaccacattattcgcagcggagaaccattgtctgtcaccttcagagataagccagaaacttcagtttaccagaactaatattacccgcattacagattttttagaaaaagccggatatgtaaaaaggacggatagcagggaggatcgccgtgctaaaaaaatcagtctgacatctgaaggtatgttttttattcagaggctcactcttgcacaaagcatgtatctgaaagaaatctgggattatctgacccatgatgaacaggaactgtttgaagtcattaataaaaaattactggcacatttttctgatgccagctcataa

SEQ ID NO: 14791 - DNA, 747 bp, Escherichia coli
atgaaagtcagtattattacagtgacttataatagtgaaaagactttaagggatactttagagtcaatagagttgcaaacctataaagatatagagtatataattattgatggtggttctacagataatacgttaaaactaattaacgaagtatcaacaagagtaaccaaatgtctatcagaaagcgataacggtatctatgatgctttaaataaaggtataaatttatctacgggagatattattggattcgttcattctgatgaccttttagcaagacctgatattattgaaactattgtaagccgtttccatgagacaaaagcggatgttgtatacggtgatttggtttttttcgaaaaaaaccaaattgatataatcaaacgatactggcgtagtggtccttttaaacgttctaagctatcattaggctgggcaccaccgcatccatctttctatatgaggagggaattatataaagacgatggatattttgatttatcctataggattgctgcagactatgatcagatggtcaggattttgaaacgtgatgatattaaagttatttatgttcctcaagtatttgtaaagatgagattgggtggggaaagtaccagaattgataacgcgatatcaagtacaaaggaaattgtagaagttatgaaaaaccataatgtaaattggaaaattgctatcattatcagaaaaatctcaaaactaatgcaattgtttgcgcataaataa

SEQ ID NO: 14792 - DNA, 1386 bp, Escherichia coli
atgctacttcctgttgtaatggccggtggttctggaactagattgtggccactttctcgaacactatatcctaagcaattcctatcgttaactagtcgtttgactatgctacaagagaccttaagaaggcttgaaggagttgaacatcgtcctgctctggttatttgtaatgaagttcatcgttttatcgttgcagaacagatgcgtaatgtaaatttagcgaatagtggcattttactagagccgataggtcgtaatacagcccccgcagttgcgcttgctgctcttaaagcaatttcatcaggtgaggatccaatactgcttgtactagcagccgatcatgaaatacaagaccaaaagcgctttatatcgtcaatattggctgcaaaagaatttgcagaggaaggtaagctggtaacttttggtattgtgccaaccaaacccgaaactggatatggctacataaaaaccggagaaaatttaaatgaatatggttttaaagtttctgcttttgttgaaaagcctgagctagatgtggccaaaaaatatcttgaagatggagattatctttggaatagtggaatattcatgtttagggcttctgtgtttattgatgagttgaataaatttagaccagacatactaaaaatatgccaacaagcattgaagtcctctacacaagatcttgattttatccgtatagataatgactcatttagttgttgccctgaagaatccattgattacgctgttatggagaaaacaacagaggctgtggtagttccattaaatgcccactggagcgatgttggttcttggtctgcattatgggaaattagcagaaaagataaaagtggaaatgcaattagaggagatgtattaattcatgattcttctgacagttatctttactcacaacatagattaattggtgtagtaggagttaaagatttagtagttgttgaaactaaagatgctattctcgttgcgcataaagataaagttcaacaggtaaaaaatattgtagaaaaacttaaagttaataaccgtacggaatatctgcagcatcgtgaaatatttaggccatggggcagtcatgactctatagcggaaggatctcgatttgaggttaaacatgtcgttattcatcctggacataaaactgctaaacagattcattaccatcgtactgagcattggattgttgtttctggaacagcaaaagtccattatgaagatgaaatatttcttgtttctgaaaatgaatcaacttatataccaataggtgtacctcattttattgagaatccaggaaagatccctttggagattattgaggtacgttcaggtgtctacttggatgaagatgatgttgttagaatctaa

SEQ ID NO: 14793 - DNA, 456 bp, Escherichia coli
ttgaacaagagattagaaacagagttatttaaatcaatagttgaacatactccactaatctcgatagaccttattataagaaacgaagatggtaaggcgctgcttggtcagcgccttaatcgtccagcacaaaattattggtttgtgccggggggacggattcttaaagatgagtctttcgagaacgcattcaaaagagttacttttgaagaattgggtgttcaaattagcattaatgaagcaaaatttcttgggatttatgaacatttctacagcgacaatttttctgggacttgtttttcaactcattatgtcgtacacggatatgagattagtttgatgccacatcaaattaactatccaacactacaacatagtacttacaattggttcgatatagccgaattgttagctaattcctcagttcatcagtacacaaaaaattattttaagtga

SEQ ID NO: 14794 - DNA, 966 bp, Escherichia coli
atgaccaagaagcgaatttttgtggctggacatcgtgggatggttggttctgctatttgtcgtcaattattagcacgtaatgatgttgagttaattgtcaaaactcacaaagaactcgatttgacagttcaaaaggatgttgaatgtttttttgagcaagagagaatagatcaggtttaccttgcagcagcaaaagtaggaggaattcatgctaataacacttttccagctgaatttatttatcagaaccttcttattgaaagcaatattattcactcatcttacaaagcgggcataaagaaactattattcttagggtcaagttgtatctatccaaaatttgcagaacagccaatgaaagaatctgcacttttgacgggaactcttgagcctactaatgagccttatgctatttccaaaatagcaggtataaagctatgtgaatcttataatcgccaatatggatgtgattatcgcagtgtaatgcctactaacttatatggtatgaatgataattttcatcccaataactcacatgtaattccagcgcttatgcgacgttttcatgaagcaaaggaacttggtttaaatgaagtggttgtctggggaacgggaactccaaaacgcgagtttttatatgttgatgatatggcagctgcatcagtatatgtgatggagcttgatgatgaaatttataaaaaaaatactcaaccaatgttatctcatattaacgtaggtactggtgttgattgtgccatacgtgaaatggcagaaacaatggctttagttgttggctatgatggaaaaattgtttttgatataacaaaaccagatggttcgcctcgtaaacttatggatgttacacgccttgagaatttgggttggaaatatcgttataatttaaaacaaggactagaattaacatataaatggtttataaataatcttgactcatttaggagttaa

SEQ ID NO: 14795 - DNA, 858 bp, Escherichia coli
atgagtcacgtagctgtttccttcgaatccccagaatatacagctgatgttgatgctataggtactttacgattattggaagctattcgttttttgggattagaaaaaaaaacccgattttatcaggcgtcaacctctgaattgtatggattagttcaggaagttccacaaaaagagacaacgccgttctatcctcgttcaccttatgccgtagctaaactgtatgcatattggatcactgtaaactatcgtgaatcttatggaatgtatgcatgtaacggtattttgttcaatcatgaatccccacgtcgtggggaaacgtttgtaacacgtaaaatcacacgtgctatagctaatatttcgcagggaatagaaaaatgcttatatcttggcaacatggattctttacgtgattgggggcatgcgaaagattatgttcgtatgcaatggatgatgcttcaacaagaccagccagaagactttgttattgccaccggcaaacaaatatctgtacgtgaatttgtccgtatgtctgctaaagaagttggacttgaacttgagttttccggtactggtgttgatgagattgcatttgttgtaaataaaacatcagattgcgccgttggtgttaatattggtgatgttattgttcgcgttgaccctcgttattttcgaccagcagaagttgaaactcttcttggtgatccaacaaaagcaaaaaatgtcttgggttgggagccagagattacagttgaagaaatgtgtgcagaaatggtggctagtgatttagaaaaagctaaacagcatgcacttcttaaaagccatggttttgacgtggcagtctctttggagcgttaa

SEQ ID NO: 14796 - DNA, 546 bp, Escherichia coli
atggaagtcaacaaaaagcagctggctgacattttcggtgcgagtatccgtaccattcagaactggcaggaacagggaatgcccgttctgcgaggcggtggcaagggtaatgaggtgctttatgactctgccgccgttataagatggtatgccgaaagggatgctgaaattgagaacgaaaagctgcgccgggaagttgaagaactgcggcaggccagcgagacagatctccagccagggactattgagtacgaacgccatcgacttacgcgtgcgcaggccgacgcacaggaactgaagaatgccagagactccgctgaagtggtggaaaccgcattctgtactttcgtgctgtcgcggatcgcaggtgaaattgccagtattctcgacgggatccccctgtcggtgcagcggcgttttccggaactggaaaaccgacatgttgatttcctgaaacgggatatcatcaaagccatgaacaaagcagccgcgctggatgaactgataccggggttgctgagtgaatatatcgaacagtcaggttaa

SEQ ID NO: 14797 - DNA, 933 bp, Escherichia coli
atgagcgaagaaaaaacattcaactccctcaaggagcgaattgcgttcattcaacgcgatgtggatctgcttgctcaaaataaggggagatcatttgctgatgacattatatttagatcacttgactcccatctgagcgatctccgagagagacaacgtgcaatcgataaccaacatcctttacgtgatttcatggagttgagattaaaaggtgttttggtcgatttcgggtctattccgttagatattctatctgtaatttcaggtaatctcgcatcccttgtacagaaagcagtttaccgacttggatctgggaaagattctagtcgtgtgccgattgatgttaaaaaatcattagacatgagattggcagacttgcgtccaggttcgacgaagttaggtgttactttttctactggttcttgcgagctcatcgaaacagtatccagtcatgctgttaaggagatttttgcactactctcatccattgatgaagaaacattcacggctaaaattgccgaaattggttcgcaatcaacagctaacctaaaaaacatcataaatgagtgcgaaaaatatagtcttaactttgatcttacttggattggacctttaagtgatggtaccagacaagtgtcaatttcttcagaagatataaaaaaactgaatgctcgcttagctttaacgaaggtcattcagctaccggatgagcatatatcaggcgaacttgctattttatccatgtacgggaaattggagattgcaagcgagcttggaaaaataaaggcttcttatccgattgatatgttaggagaaattcaaagtaaatataaagttggtgaacgaatatcgctcgtagtaagcgtttctgagattcacaatgaaagattaggaacatcacgacgtaactacatggttaaaaaaatcgaatag

SEQ ID NO: 14798 - DNA, 474 bp, Escherichia coli
atggaaaagcctagcttcccacctcttcttacagcaggatttcatgatatggatagtgatggcatcaagtctctttgtgtcgacaccttcccaaaatccgttagaagaagtatgctatactgtaattttatacagcttattgagcaatttaaacttgttaatcagcagtgtctatgtttctctgaagtgtggatcgatggttcattcactacagagaaacctgaacctgatgacatagatatactcgtggtcgtcgattatttggccctaaactctttgccaaacacgctgatgccattggtcagctcattgttaaatagagattttattaaagaaaactacagcattgacgttcttttgctgcctgaaaatcatccagaaatcgattatagtgaaaggcgaagttactggagagggtggtttggttttgatcggaaggagaatcctaaaggcctcgtgagggtaatgttatga

SEQ ID NO: 14799 - DNA, 669 bp, Escherichia coli
atggtagataacgctgttcgtacgcattttgaaccttatgagcggcatttcaaagaaatcggatttaatgaaaataccattaaaaaatatctacaatgcactaacatccagacagtgacggtgcctgttcctgcgaagtttttacgtgcttcaaatgtaccgactggattgcttaatgaaatgattgcttatctcaactcggaagaacgcaatcatcataatttttcagaacttttgcttttttcttgcctgtctatttttgccacatgcaaaggtttcattacactattaactaacggtgtgctatccgtttccgggaaagtgagaaatattgtcaacatgaagctggcgcacccatggaagctgaaagatatttgtgactgcctgtacatcagtgaaagcctgttgaagaaaaaactaaagcaagagcaaacgacattctcacagattcttttagatgccagaatgcagcacgcaaaaaatttgatacgcgtagaaggttcagtcaataaaattgccgaacaatgtggttatgcgagtacatcttattttatttatgcgttccgcaaacattttggcaacagtccaaagagagtttctaaggagtaccgttgtcaaaggcacacgggtatgaataagggcaacacgatgaatgctttagctatttga

SEQ ID NO: 14800 - DNA, 528 bp, Escherichia coli
atgaaatgtttctgggcttgctcagtctcggtggttttggctatgtcatttacagtcgctgctgcggagaataacgacaacgttacatatacaaaaccgtcagccgggagggacttatatcttacctgtaaaggttatcaggtgaagggggcatctgtaattaacgtcgagaaaccttcttaccttgaaggtactggtgagcaggttgaatttgcaatcattactcctgttggtgcgtctgacggactcaaggtcttttttgattcatggggtttttcttcatttggattgattgaaagccatgtgatgcatgagcactggtctttagttcatgttggggggcgtgcttcagtcaaaggtgaaaagattgattattcatttgtagataaccagccacaggagggggggagctataaacccaaaacaggtgtgttcctgtacggctgcatgaactcggataaaagaccatcttgggtcgaaaagatctacacaagaacaggtgtgtttcgagggggcatagaagactaa

SEQ ID NO: 14801 - DNA, 213 bp, Escherichia coli
atgggggattttgagcgtacctttggagctggtgctgattttgatcggataattgatgagaataacagcgaatattttcgagaagatcgccgaaaaactaaaaattcaaaaaaaaaattctcttcttttcaagatgctttggtttgggcgaaagctaatcctggcaaaacgataataagatctccagacggtgtggggtttattgaaaaatga

SEQ ID NO: 14802 - DNA, 180 bp, Escherichia coli
atggggctatacgataaatatgcgcgccttgctggcgagcgactgcaatttagtgacaacgggttaacaccgtttggcacctgtattgatgaagtgtattccgccaccgaaggccggatcggcaataaaaaagtgattctggccgggaccaataattatctcggtttaacctttaggtga

SEQ ID NO: 14803 - DNA, 276 bp, Escherichia coli
gtggcttctgtttctatcagctgtccctcctgttcagctactgacggggtggtgcgtaacggcaaaagcactgccggacatcagcgctatctctgctctcactgccgtaaaacatggcaactgcagttcacttacaccgcttctcaacccggtacgcaccagaaaatcattgatatggccatgaatggcgttggatgccgggcaaccgcccgcattatgggcgttggcctcaacacgattttccgccatttaaaaaactcaggccgcagtcggtaa

SEQ ID NO: 14804 - DNA, 207 bp, Escherichia coli
atgaagtcagtaactatagaagcaaaaacatttgctgaaatgttaggaataacagaaggtgagttaatctttgccattaagaaaactggcacattcaaaaacaagaccatcccacaacctcatgagccacataaatcaaataatagatttttatattcagacgtaatgaggtttatagaatcactaaaagacaaagagaaccggtaa

SEQ ID NO: 14805 - DNA, 1209 bp, Escherichia coli
atgtcggttttccacaactggctacttgagatcgcatgtgagaattacttcgtctacatcaaacgcctttccgccaacgataccggcgcaacaggtggtcaccaggtagggctttatatcccttcaggtatcgttgaaaaactctttccgtctatcaaccatacccgtgaactgaacccttcggtttttctcaccgcacatgtgtcatcgcatgattgccctgacagcgaagccagggcaatttattataacagccgtcattttggtaaaacccggaatgaaaaaaggattacccgctggggtagaggcagcccacttcaggatcctgaaaatacaggggctctgacgctcctggctttcaagcttgatgagcaagggggggactgtaaggaagtaaatatttgggtatgcgccagcactgatgaagaggacgtcattgagaccgctattggtgaagttatacccggagcgcttatatccggccccgcaggacagattctaggcggactatctctacagcaagcgccagtaaatcataaatatattctacctgaagactggcacctgcgctttccgtcgggaagtgaaattattcagtatgcagccagccattatgtgaaaaattcccttgatccggatgagcaacttcttgaccgccggcgcgtggagtacgacatatttctattggttgaggaactgcatgttctggatatcatccggaaaggatttggctctgtggatgaatttattgcgctggccaattctgtcagcaatcgccgtaaatccagagccgggaagtcgctggaactgcacctggagcatctattcattgagcacggcctgcgacactttgcgacgcaggccatcacagaaggtaataaaaaacccgatttccttttcccttccgcaggggcttaccacgatactgagtttcccgtagaaaatctgcgcatgctggcagtcaagactacctgtaaggatcgctggcgtcagatactgaatgaggccgataaaattcatcaggtgcatctgtttacactccaggagggagtttctctggctcaatatcgggagatgcgggagtcgggtgtcagattggtcgtgccatcatctctgcacaaaaaatacccggaggcggtgagagctgagctaatgacgctaggtgcgtttattgctgagctgacagggctttacgcagatattccatag

SEQ ID NO: 14806 - DNA, 870 bp, Escherichia coli
atgaagaaaattgattacaagtccataccaaaaccaatagactcagcatcagaacgaaaaaaacacaaaaaagaggctgaaaaattagcaaattatatcagttttattagaaacaatgctcacggcgatggcgacaggaagttgctttcagatgcccggacccaagcgttcagtatacttcgtaagcagatgcaatatcgtcttcatccaggctacataattgaaattcgcccgactgaaagacaattgttcttattaaactctgtctttgactttgtaaacgtagttggagatcttatcgacaggtctgtagataaggctcctgatacaaatagttttcttctaacaaataaagaatacttatatggtaaatttggtataaacggatggcaaaaatatgtacgattcttacgtgcattcgttgatgcgtataaaaattccgacatgatttatacatatttgcctggtggtgataattgtacgctttcggcagacaatagaatattcatacctatacttggtcttgggctgattaatgcagtaaatgaaagagatgttataattgttaagcagtggcgaaagcatgagggatatagatatctgccatgctttgatatattaaaaatacagaataaattctatgtaaaaattaaatataaagaagatgttttcttcctcagaaaaaacaaagatcttttacaagaactttctgggacaatagatgtcatcgtaggttctaggtttataaaagaactgaaagaaagcaggtctttctctcgtgtagagataagcgagtcagagttatggggtatatcaaataatcctgtaaaccacgctcaccaacgaaatccaaacaaaaagtggtcataa

SEQ ID NO: 14807 - DNA, 405 bp, Escherichia coli
atgatcaggattgcggcgctactctcaatactcttaactaccagcgccaattctgaatgctggattgtcacaaacctgcacgggtacggggcaatgaatggcgatcgttacgagtttacaaaagacagcacggaagattccgttttccacgtaacaataaatggcgataaatcatcagtttatgaatcagtttctggcgtctatccagagatgaaatacactgctttgtcatcgaacactatggtaggagaataccagtctggaggaggaataaccgttgaaacctggtcaatcactacaaacaaaaaagctctttactccaaagtaatgaacatcccaggtatgcaacaacttacatcaaccaaatcctttgttggtgatgtagtcggaacctgcaaccagtaa

SEQ ID NO: 14808 - DNA, 633 bp, Escherichia coli
atgagtatttcttccagggtaaaaagcaaaagaattcagcttggacttaaccaagctgaacttgctcaaaaggtggggactacccagcagtctatagagcagctcgaaaacggtaaaactaagcgaccacgctttttaccagaacttgcgtcagctcttggcgtaagtgttgactggctgctcaatggcacctctgattcgaatgttagatttgttgggcacgttgagcccaaagggaaatatccattgattagcatggttagagctggttcgtggtgtgaagcttgtgaaccctacgatatcaaggacattgatgaatggtatgacagtgacgttaacttattaggcgatggattctggctgaaggttgaaggtgattccatgacctcacctgtaggtcaaagcatccctgaaggtcatatggtgttagtagatactggacgcgagccagtgaatggaagccttgttgtagccaaactgactgacgcgaacgaagcaacattcaagaaactggttatagatggcgggcagaagtacctgaaaggcctgaatccttcatggcctatgactcctatcaacgggaactgcaagattatcggtgttgtcgtggaagcgagggtaaaattcgtatga

SEQ ID NO: 14809 - DNA, 216 bp, Escherichia coli
atgcaaactctttctgaacgcctcaagaagaggcgaattgcgttaaaaatgacgcaaaccgaactggcaaccaaagccggtgttaaacagcaatcaattcaactgattgaagctggagtaaccaagcgaccgcgcttcttgtttgagattgctatggcgcttaactgtgatccggtttggttacagtacggaactaaacgcggtaaagccgcttaa

SEQ ID NO: 14810 - DNA, 294 bp, Escherichia coli
atggttcgtgcaaacaaacgcaacgaggctctacgaatcgagagtgcgttgcttaacaaaatcgcaatgcttggaactgagaagacagcggaagctgtgggcgttgataagtcgcagatcagcaggtggaagagggactggattccaaagttctcaatgctgcttgctgttcttgaatggggggtcgttgacgacgacatggctcgattggcgcgacaagttgctgcgattctcaccaataaaaaacgcccggcggcaaccgagcgttctgaacaaatccagatggagttctga

SEQ ID NO: 14811 - DNA, 282 bp, Escherichia coli
atgatcataaatatcaagcataaaggtttgcgtaagtttgccgaaacaggtaacaacgcaggaattccgcaacagtttactcaacgtctgaagctgatcctaacagccttaagcacagcgacgaacttgcaggatatgatggatttaaaggcattgcgctgccatccattgaagggagaccgtcaaggagagtattcgttagaggtcaatggaaactggcgcgtagtgtttaagctcgaagaacctaacgtctttgacgtggatctcgaggattatcactaa

SEQ ID NO: 14812 - DNA, 297 bp, Escherichia coli
atgattaatcttgtcgatccagtacatccaggggtttttatccgtgagatgtttatggaaccgtttgaaatatcagccgcggacctgtctgaaaaactgcatgtatcaccttccactctaagtagagtgctgaatggaaaagctgatttaagtgttgagatggcattaaggctttctcgagttcttggtcgcagtgccgagtcgtggataaacatgcagactcaatacagtcttaacgcgagcaggaagtcacctaatgtcattaaggaattagatgaattggttcctatattttga

SEQ ID NO: 14813 - DNA, 2280 bp, Escherichia coli
atgaagaaaaaaattgaatcctaccagggagctgccggtggttggggtgctgttaaatccgtagcgaatgcagtacgtaagcagatggatatacgccaggatgttattgccatgtttgacatgaataagccagagggctttgactgtccgggatgtgcatggccagatcctaagcacagtgcgtcattcgacatttgtgaaaacggcgcaaaagcaatcgcctgggaagtcacggataagcaggtaaatgcctctttctttgctgagaatacggttcaatcattacttaactggggagatcacgagcttgaggctgcggggcgtctcacccagcctttgaaatatgatgccgtcagcgactgttacaagccattaagctggcaacaagctttcgacgaaattggcgaacgccttcaaagctatagtgatcccaatcaggttgaattctatacttcgggccgcacttccaatgaagctgcctttctttatcagctttttgctcgtgaatacgggagcaataacttccccgactgctccaacatgtgccatgaaccgaccagtgtgggtttggcagcgagtatcggtgtaggtaaagggaccgtgttgctggaagactttgagaaatgcgatttagtcatttgcattgggcataaccctggtacaaaccaccctcgcatgttgacttcgttgcgcgctttagtgaaacggggagcgaaaatgatcgccatcaatcctctacaggaacgtggcctggagcgatttaccgcaccgcaaaacccgtttgaaatgctgacgaactctgagactcagttggccagtgcctactacaacgtgcgcattggtggtgatatggcgttgctcaaggggatgatgcgcctgttaattgagcgcgatgatgctgcaagcgccgcaggtcggccctcattgctggatgacgaatttattcaaacgcataccgtcggctttgacgagctacgccgtgacgttctcaattccgagtggaaagatatcgagcgtatttctggactaagtcagactcaaatcgccgaactggctgatgcatatgccgctgccgaacgcaccattatctgttacggaatggggatcactcagcacgaacatggtacccagaatgtacagcaactggtcaatctgctgttgatgaaaggtaacattggcaagcctggtgcgggtatctgcccactacgaggtcactctaatgtacagggcgaccgaaccgtcggtatcaccgagaaaccgtctgcagagtttctggctcgcctgggtgagcgctatggtttcaccccacctcatgcacctggacatgcagcaattgccagcatgcaagcaatatgtacggggcaggctcgagcattgatctgcatggggggcaactttgcactggcaatgccagatcgggaagcaagcgctgtaccgttaacacaattagatctgacggtacacgtagccactaagcttaaccgctctcatctgctgaccgcacggcatagctatattctgccggttctgggacgtagcgagattgacatgcaaaaaagcggtgcgcaggcggtaaccgttgaggattcaatgtcgatgattcatgcctcgcgtggcgtgttaaaacccgccggtgtaatgctgaaatcagagtgtgcagtggtcgcgggtatcgcgcaggcggcactaccccagagcgtggtagcctgggagtatctggtggaagattatgatcgcattcgcaatgacattgaagctgtgctgccagagttcgccgactataaccagcgcatccgacatcctggaggttttcacctgataaacgcagctgctgaaaggcgctggatgacgccgtcaggtaaggctaatttcattaccagtaaagggctgttagaagatccctcttcagcgtttaacagtaagctagtcatggcgacagtacgcagtcacgatcagtacaacacgacgatttatggtatggatgatcgctatcgaggggtattcggtcaacgagatgtggtctttatgagtgctaaacaagctaaaatttgccgtgtaaaaaacggcgaaagagttaatcttattgcgcttacgccagacggtaagcgaagctcacgccgcatggatagattaaaagtggtcatttaccctatggctgaccgctcactggtgacctattttccagaatcgaatcacatgctaacacttgataaccacgatccattaagtggcattcctggctataaaagtattccggttgaattagaaccatcaaattaa

SEQ ID NO: 14814 - DNA, 207 bp, Escherichia coli
atggctaacccagtttcgctgatggatgaccagatggtcgacatggcgtttatcactcaactgaccggcttaaccgataagtggttttataagctcatcaaagatggtgcctttcctgcccccatcaaactcggccgcagctcccgatggctgaaaagtgaagtggaagcctggttgcaggcgcgtattgcacaatcccgtccgtaa

SEQ ID NO: 14815 - DNA, 498 bp, Escherichia coli
atgtcgccatcattacgcaaggctgtagcagctgctattggtggtggggctgttgccatagcgtctgtgctcatcactggtccgagtggtgacgatggtctggaaggtgtcagctacataccatataaagatattgttggtgtatggactgtatgtcacgggcatacaggaaaagacatcatgctcggtaaaacgtataccaaagcagaatgcaaagcactcttgaataaagaccttgccactgtcgccagacaaattaacccgtacatcaaagtcgatataccggaaacaacgcgcggcgctctttactcattcgtttacaacgtgggtgctggcaatttcagaacatcgacgcttcttcgcaaaataaaccagggcgatatcaaaggcgcatgtgatcagttacgtcgctggacatatgctggcggtaagcaatggaaaggtctcatgactcgtcgtgagattgagcgtgaaatctgtttgtggggtcagcaatga

SEQ ID NO: 14816 - DNA, 216 bp, Escherichia coli
atgaaatccatggacaagttaacaacgggcattgcctacggcacctctgcaggcagtgctggctactggtttttacagtggcttgatcaggtcagtccgtcacagtgggcggcgattggagtgcttggaagccttgtgttgggttttctcacttatctgacaaacctttatttcaagattaaagaagataagcgtaaggctgcgagaggtgaataa

SEQ ID NO: 14817 - DNA, 588 bp, Escherichia coli
atgatcgtggatattgaagagaaaacagttaatgacttctttaaaaacaatacactctcacctttttctgtaagaagattttattcagcatacttgatagtaaactgtacagactattcattgttaaagaacttgataggttgcttgaattgtgatggtgaaactacggctgtagttaaaaattcaatattatttgcatgtcttgctattttatcctcggaaaaaatgtttcagagttttttgtttgggtgtcttaatagtttaggaagcaaagttaaggctattattcactcggacatatctgcagcatggagactttgtgatatttcttcaagactatgtctgagtgaaagtttgttaaaaagaaaactaaaacacgaaggcttatcatttagcaaattaattcttgaagaacgaatggtgatggctgaaaggttattaagctacaatttctatcctgttgggaaagttgctaaaatatgtggttatgaaagcgcgtcatattttataagtgttttcagaagatattttggtgttcccccccatgaatattcatcaagattttttttagaaaaaggcaagatgtaa

SEQ ID NO: 14818 - DNA, 1962 bp, Escherichia coli
gtgaacacggtggcctctgaaaatccggatgaagccgggcgttacagcatggatgttgagcatggtcagtacagcgtcaccctgctggttgaaggttttccaccttcacatgccgggaccattaccgtctatgaaggttccagaccaggtacgctgaatgattttctcggtgccatgacggaggatgatgcccgtccggaggcactgcgccgttttgagctgatggtgaatgaagtggcacgtcatgccggagcgtcatcacagagtgcagcggcggcaaagaaatccgaaacggcagcagcctcatcgaagaatgcggcgaaaacctcagaaacgaatgcagctaacagcgcacaggcggcagcggcctcgcagactgcatcggcaaactccgcgacagcagccaaaaaatcagaaaccagcgcgaaaaatagcgagacagccacaaaggccagcgaaaaaaacgcaaaatccagccagacggcagcgaaaaccagtgagacgaatgccaaagacagtgaagccaacgcaaaggtgagcgaaacagcggcggcgaactcggcgaaagcatcggcagcaagccagacggcagcaaaagcaagtgaagatgctgccagagaatacgcaaaccagacagcagagccgtacagatatgttttacagccgctgccggatgtgtggataccctttaatgattcgctggatatgattacgggctattctccgggttataaaaaagtgaagattggtgataatgtggttcaggttgccagtgataaacaggttaatttcagtcgcgcatcaacggcaacatatatcaacaaatctggcgaactgaaaacggcggaaattaatgagccgcgatttgagtgtgatggcctgcttattgagggacaaagaacgaacttcttccagaacagtacagacccttcgaagtggaataagtcaacttcactggacgttacagaaacaggcacagatagtttcgggtttaattatggtcggtttgtcgtacaggattcgattgttggtacaagtaaagcgcataccattatcggactgtattcgagtaccggaggggttgatacttcaggggacgaaaagcatgtaactatatcctgtcgggtaaaaagtgaagttgataatatcgccgttcgtattttatttgaacattatgatggggaggtaaggacatcaataggagcagcaaacctgaaccttaccacccgcataattagcaagacaggtcagacaagccgtgttacagcaaggtctgttaaggatgatgcaactggctggatattttttgaggctacattaaaagcagatacaacagaaaatacggttggtggttttgtccagtattctccggatacagggcagatggttacatcaggggattatctcgatgtaaccactccacagattgaggctggtacaggcgcatcatcttttattgttacggggacggcaccggcaacgcgggcaagcgatatggtgacagtcccaatcaagaataacctttataatcttccttttacggttctttgtgaggtacataagaactggtataaaacgccaaatgcagcaccgcgtgtttttgacacataccggcatcaggcagatgcggggatcgtaatggggtttggttcatcaggtgggtacgacggttttccgtattgtgatataggtggttcagaccgacgaataaatgaaaatgccgggctggaaaaaatgcttattggtatgcgggtaaagtccgaacggtccacatgtgtagtcagtaacggtaagttaagcagcgaaactaaaaccaaatgggaatatatccggagtacagcaaccattcgcattggtggacaaactacagcaggattacgccatttatttgggcatgtgaggaattttcgtctctggcataaagagctaacagatgcgcagcttggggaggttgtggagtga

SEQ ID NO: 14819 - DNA, 402 bp, Escherichia coli; identical to SEQ ID NO: 14401

SEQ ID NO: 14820 - DNA, 1854 bp, Escherichia coli
atgaaaatgactttgccgtttaaaccccatgtgctggcgctaatttgcagtgccgggctttgtgccgcctctgccgggctatatataaaaagccgcacagtggaagcgcctgtggaagcgcaatcgacacaacagaatgcgcctgacatctccgcagttacgcttcctgcaacggtttccgcacctcccgtaacacccgccgtcgtcaaatctgcattcagcactgcacaaatagatcaatgggtcgcgcccgtcgcgctgtatcccgacgccctactttcgcaggtgctgatggcatcaacctatccgacaaacgttgctcaagcagtgcaatggtcgcacgataatccacttaaacaaggcgatgctgctattcaggcggtatctgaccagccctgggacgccagcgtcaaatcactggtggcctttccacagttgatggcattgatgggcgaaaacccgcaatgggtgcaaaacctgggcgatgcttttctggcgcagccgcaggacgtgatggactcggtacagcgattgcggcaactggcgcaacaaaccggctcgctgaagtcatcaactgaacaaaagatcatcacgacaacgaaaaaagtcgtaccggtaaatcagcccgccaacgcccctgtcacacaatcaaataccgtttctacgtccagccccgtcgtcgcagaacctgcaccgaccgtaataaccattgagccagccaatccggatgtggtttatattccgaactacaacccaaacgtggtttacggcagttgggccaataccgcttatccgccagtttatctgccaccaccagccggagaaccgtttgttgacagctttgtgcgcggattcggctatagcatgggcgttgctaccacgtacgcgctattcagcagcatcgactgggatgacgacgatcatgaccatcatcatcatgacgatgatgattatcaccaccacgatggcggtcatcgtgacggtaatggctggcaacacaacggcgacaacatcaatatcgacgtaaacaatttcaaccgtatcaccggtgagcatcttactgataacaatatggcatggcggcacaatccaaactaccgtgatggtgtgccctatcatgatcaggatatggcaaagcggtttcaccaaaccgatgtcaacggcggcatgagcgccacgcagttacctgctctatcgcgcgacagtcagcgtcaggcagcagcaagtcagtttcagcaacgaacacacactgcgccagtcattacgcgagatactcaacgtcaggctgcggcacagcgatttaatgaagcggaacattatgggagctatgacgacttccgcgagttcagccgtcgccaaccactgacccagcaacaaaaggacgccgctcgtcagcgttatcagtcggcctctcctgagcagcgccaggcagtccgcgagaaaatgcagactaacccgcagatccagcagcgaagagaggcagcgcgtgagcgtattcagtccgcctcgcctgagcagcgccaggcggttcgcgagaaaatgcagactaacccgcagaaccagcagcgaaaagaggcagcgcgtgagcgtattcagtccgcatcaccagagcagcgccaggtgtttaaggaaaaagtacagcagcgcccactgaaccaacagcaacgtgataacgcccgccagcgtgttcaatcagcatcacctgagcaacgtcaggtttttcggaagaaagttcaggagagccgcccgcaacgtctaaacgacagtaaccgtactgccaggctgaataacgagcaacggtcagcgatacgggaacggttgtctgagcgtggagcaaggagaatggaaaggtaa

SEQ ID NO: 14821 - DNA, 459 bp, Escherichia coli
atgaaatatattccactggtattatttatcttttcatggccggtattgtctgcagatattcatggacgggttgttcgtgtactggacggtgataccatcgaggtcatggactcacagaaggcggtgcggatcaggttggtaaatattgatgcaccggaaaagaaacaggattatggccggtggtcaacagacatgatgaaatcactggtcgcaggaaaaacggttaccgtcacatattttcagcgagatcgttatggtcgtattctcgggcaggtttatgcaccagacggaatgaatattaatcagtttatggtccgggccggggctgcctgggtatatgagcagtacaactcagatcccgtgctgcctgtccttcagaacgaagccagacaacaaaaacgtgggctctggtcagatgctgatccggttcccccctggatatggaggcaccgtaaataa

SEQ ID NO: 14822 - DNA, 876 bp, Escherichia coli
atgatgcaagctgaaacaggcgccatagtaggtcgcataggtgatgcatcaaatcggcttagcgaacacacccgaggcctactaaaggatattgagtcaagcaatgtacttacagttgagcagcaggcagagacagatcaaatagcaacggcagtaaaccaaatggtggcaagcattcaagaggttgcgagcaatgcacagcatgctgcagatgcggccggaagagcagacactgagacggcatctggccagcgtctggtagcccacacaagccagtcaatcactgcccttgaaggtgaaattaggcaagccactcaggttattcatgagcttgaaggtcaaagtaacgagatatcaaaagttcttgacgttatacgagggatcgccgagcaaacgaatttgttggcactcaacgcagcaattgaggccgcgcgtgctggtgagcaggggcgtggttttgctgttgtcgccgatgaggttcgcagtcttgctgctcgcacacagcaatcgacaacggatattcaaagcatgatcagcgctctacaagagcgagcgcaatccgctgttacagtcatggagcaaagtagtcggcaagcgcacacgagtgtagctcacgcagaggaagcagctacagctcttgatggaattggccaacgcgttaacgaaattaccgacatgaacgcgcaaatagcgactgcggtcgagcagcagggagcagtaagtgaagacataaaccgcagtattatcaatatacgcgatgctgctgataccaatgtacagaccgggcagaataatttgcaaagtgcgaaatctgtcgctcagttaactagcgctctgagcgaactggcaaaacagttttgggaaaaacgaggataa

SEQ ID NO: 14823 - DNA, 1803 bp, Escherichia coli
gtggaggtccagtccgtcaccgacggcgtgaaggtgaaagtgagccgtgttcctgacggcgttgctgaatacagcgtatgggggctgaagttgccgacgttgcgccagcgcctgttccgctgcgtgagtatccgtgagaacgacgacggcacgtatgccatcaccgccgtgcagcatgtaccggaaaaagaagccatcgtggataacggggcgcactttgacggcgaccagagcggcacggtgaatggcgtcacgccgcccgcggtgcagcacctgaccgccgaagtcaccgcagacagcggggaatatcaggtgctggcgcgctgggacacgccgaaggtggtgaagggcgtgagctttatgcttcgcctgaccgtggcagcggatgacggcagtgagcggctggtcagcacggcccggacgacggaaaccacataccgcttcacgcaactggcgctggggaactacaggctgacagtccgggcggcaaatgcctgggggcagcagggcgatccggcgtcggtatcgttccggattgccgcaccggcagcaccgtcgcggattgagctgacgtcgggctattttcagataaccgcaacgccgcatcttgccgtttatgatccgacggtacagtttgagttctggttctcggaaaagcggattaccgatatcaggcaggttgaaaccacagcccgctaccttggcacggggctgtactggatagccgccagtatcaatatcaaaccgggccatgattattacttttatatccgcagtgtgaacaccgttggcaaatcggcattcgtggaggccgtcggtcgggcgagcgatgatgcggaaggttacctggattttttcaaaggcaagataaccgaatcccatctcggtaaagagctgctggaaaaagttgatctgacggaggataacgccagcagactggatgagttttcgaaagagtggaaggacgctaacgataaatggaatgccatgtggggcgtcaaaattgagcagaccaaagacggcaaacattatgtcgcgggtattggtctcagcatggaggacacggaggaaggcaagctgagccagtttctggttgccgctaaccgtatcgcgtttattgacccggcaaacgggaatgaaacgccgatgtttgtggcgcagggcaaccagatattcatgaacgacgtgttcctgaagcgcctgacagcccccaccattaccagcggtggcagccctccggtattttccctgacatcagacggaaagctgaccgctaaaaatgcggatatcagtggcagtgtgaatgcgaactcagggacgctcaacaacgtcacgattaatgagaactgtcagattaaggggaaactgtcagccaaccagattgaaggtgatattgtcaaaacggtcagcaagtctttcccccgcacgagcacttatgccagtggcaccatcacggtaagaatcagtgatgatcagaaatttgaccggcaggtcatgataccgccagtgttattccgcggtggtaagcatgagaatttcaacagtaataaccaacagtcatactggtattcaacctgccggttaagagtgacccgcaatggtcaggagatttttaatcagtccacgacggatgctcagggcgtattttcctcagttatagatatgcctgccggacaggggacgctgacactgacattcaccgtatcttcatcaggagcgaataactggacaccaacaaccagtatcagcgatctgctggttgtggtgatgaaaaaatccacagcaggtatcagtatcagctga

SEQ ID NO: 14824 - DNA, 681 bp, Escherichia coli
atgacaccggacattatcctgcagcgtaccgggatcgacgtgagagctatcgagcagggagatgatgcgtggcacaaattacggctcggcgtcatcaccgcttcacaagttcacaacgtgatagcaaagccccgctcaggaaagaagtggcctgacatgaaaatgtcctacttccacaccctgcttgccgaggtttgcaccggtgtggctccggaagttaacgctaaagcactggcctggggaaaacagtacgagaacgacgccagaaccctgtttgaattcacttccggcgtgaatgttattgaatccccgatcatctatcgcgacgaaagtatgcgtaccgcctgctctcccgatggtttatgcagtgacggcaatggccttgagctgaaatgcccgtttacctcccgggatttcatgaagttccggctcggtggtttcgaggccataaaatcggcttacatggcccaggtgcagtacagcatgtgggtgacacgaaaagatgcctggtactttgccaactatgacccgcgtatgaagcgtgaaggactgcattatgtcgtggttgagcgggatgaaaagtacatggcgagttttgacgagatggtgccggagttcatcgaaaaaatggacgaggcactggctgaaattggttttgtatttggggagcaatggcgatga

SEQ ID NO: 14825 - DNA, 807 bp, Escherichia coli
atgagttggctgaaagaggttattgggacggaaaaagcggtcatcgccatgtgccatctacgtgcattgcccggcgacccgagttttgatgcgcagttggggatgaactgggttatcgacaaagcctgggacgatctgatggcgctccaaaatggtggggtggatgcagtcatgttctccaacgagtttagccttccctatctcacgaaggtgcgtccggaaacgactgcggcaatggcacgaatcatcgggcaattaatgagcgatatccgcatcccgtttggcgtgaatgtactgtgggatccggtcgcctcattcgacctggcgatggctaccggcgctaagtttatccgcgagatatttaccggtgcctatgccagcgactttggcgtctgggacactaacgtcggtgagaccatccgtcatcaacaccggattggtgcaggcgaagtgaaaaccttgttcaatatcgtcccagaggccgccgtgtatctgggcaatcgcgatatctgttctattgctaaatcgacagtatttaacaaccatcctgatgcgctctgtgtttctggcctgaccgccgggacgcgtaccgacagcgcgctgttaaaacgggtcaaagaaacggtgcctgacaccgtcgtgttggccaacacgggcgtctgcctggaaaacgtggaggaacaactcagtatcgccgatggctgtgtgaccgcaaccacctttaaaaaggacggcgtttttgccaatttcgttgaccaggcgcgagtcagtcagtttatggagaaagtgcatcatatacgccgataa

SEQ ID NO: 14826 - DNA, 168 bp, Escherichia coli
atggaaaaagcaaaagacatgtatcaacgcaaggttcgtttcccagaggatgtaaggaaggcgattgaaagaaatggagaaaaagagtgtcgacagttcaacacggaacttatttatcaattgagaaaagtgtacggactgattggagagaagaatgctaggacataa

SEQ ID NO: 14827 - DNA, 375 bp, Escherichia coli
atgagtagagaagaccctcaacttcggattaggcttcctgttgaattaaaaaaaataattgaagcgtcatcaaaacaaaataatcgttctatgaatgctgagattgtcactctgcttgagttggcgattcgtgtttgtcgtgattttgggccggaggatggtcctatcgttcagcagtttaaagaacaactagatgcgataaacagaaaatatgataaaagcgagcatgaaaaacttatacctcaacttttagaaatcatagaaaaacagaaaaaacaagtagataaacttattagcatggttgaaagatcaattcctctttcagaggaatataagcagaaatatcttggtgatgacaacaaaaaacccacctga

SEQ ID NO: 14828 - DNA, 600 bp, Escherichia coli
atgtcgccggaggactggctgagtgcagaaatgcagggagagattgtggcgctggtccacagccaccccggtggtctgccctggctgagtgaggccgaccggcggctgcaggtgcagagtgatttgccgtggtggctggtctgccggggggcgattcacaaattccgctgtgtgccgcatctcaccgggcggcgctttgagcacggggtgacggactgttacacgctgttccgggacgcttatcatctggcgggaattgagatgccggattttcatcgcggggatgactggtggcgtcacggccagaatctctatctggataatatggaggcaacggggttgtatcaggtgccgttgtcagcggcccagccgggcgatgtgctgctgtgctgttttggttcatcggtgccgaatcatgccgccatttactgtggcgacggcgagctgctgcaccatattcctgaacaactgagtaaacgagagaggtacaccgacaaatggcagcgacgcacacactccctctggcgtcaccgggcatggcacgcatctgcctttacggggatttgcaacgatttggtcgccgtatcgaccttcgtgtga

SEQ ID NO: 14829 - DNA, 474 bp, Escherichia coli
ttgaaagtatcattgatggctgcgaaagcgaaaaacggcgtgattggttgcggtccagacataccctggtccgcgaaaggggagcagctactttttaaagcattgacctacaatcagtggcttctggtgggtcgcaagacgtttgaatctatgggcgcactccccaataggaaatacgcggtcgttacccgctcaggttggacatcaaatgatgacaatgtagttgtatttcagtcaatcgaagaggccatggacaggctagctgaattcaccggtcacgttatagtgtctggtggcggagaaatttaccgagaaacattacccatggcctctacgctccacttatcgacgatcgacatcgagccagagggggatgttttcttcccgagtattccaaataccttcgaagttgtttttgagcaacactttacttcaaacattaactattgctatcaaatttggaaaaagggttaa

SEQ ID NO: 14830 - DNA, 285 bp, Escherichia coli
atgacaatcgtgccaccggctccaggtcttatcgaacagctcagacacatggtccaaatgctggtcgatccgttcggccagtttttcgatggcctcttgcttgagcttgtcactttccctgaactcgatgttcaaggccctggccacctggttgaggttccggccgatagctccaagctgccggcacgattcccgtacggtgttcacttcttcatcagtgaggaccggcatccggttcaacgaccgcagtcatttctgtacctaaacagtcctgcgaatatgtga

SEQ ID NO: 14831 - DNA, 1452 bp, Escherichia coli
atgcgcatccagcagtttacccgcagcacggaagtgaccgatgttagtcatgcaagaaccgataaatacttcgtcgatcttctcgccctgtaccgcagacagcggacgtgcgtcatccggatcgttcggtgcacagaggattggctctttaatatccgccagatcgatgtcgatcactgccgcgtattccgcatctgcatcggcttccagcagctcaggattcgccagccatttttccatgccctgaatacgacgttccagggtacgacgatcgccgtaaccttccgcgatcatccacttcagcaggacgatgttggagttcaggtattcgatgatcggttctttgttcagcttgatggtacaaccggcagcagaacgctcggcggacgcatcggtcagctcaaaggcctgctcaactttcagatccggcagaccttcaatttccaggatgcggccagagaagatgtttttcttgcctttcttctcaacggtcagcagaccttgtttgatcgcatacagcggaatagcgtgtaccagatcgcgcagggtgatgcccggctgcattttgcctttgaagcgcaccagaacggattccggcatatccagcggcattacgcctgttgcggctgcaaatgccaccagaccagaacccgccgggaaagaaatgccgatcgggaaacgggtatgggagtcaccaccggtaccgacggtatccggcagcagcatacggttcagccaggagtggattacgccgtcacccggacgcagcgacacaccaccacggttcataatgaagtccggcagcgtgtggtgcgtgttcacgtcaactggcttcggatacgccgcggtgtggcagaaagactgcatcaccaggtcagccgagaagcccaggcacgccaggtctttcagttcatcacgggtcatcgggccggtggtgtcctgggaacctacagaagtcattttcggttcgcagtacgcgcccggacgaatgcctttcacgccgcaggcacgacctaccattttctgcgccagcgagaagccgcggtcgctctcagcgacatctttcgcctgacggaacacatcgctgtgcggcagaccaagtgcttcacgcgctttggtggtcaggccacgcccgataatcagcggaatacgaccaccggcacgcacttcatcaatcagcacgtcggttttcagttcgaaggtcgccagcagttcgccggtttcgtggttacgcacttcacctttgtacgggtaaacgtcaattacgtcacccatgttcaggttagagacgtccacttcaattggcagtgcacccgcatcttccatcgtgttaaagaagatgggtgcaattttaccgccgaggcacaaaccaccgccgcgtttgttcggcacatgtggaatatcatcgcccataaaccacagaacggagttcgtggcggatttacgcgatga

SEQ ID NO: 14832 - DNA, 915 bp, Escherichia coli; identical to SEQ ID NO: 11095

SEQ ID NO: 14833 - DNA, 717 bp, Escherichia coli
atgtggcaagcccgtttttatcagtccctgccgcgtattgttgcggattatccagatgcacgctggatgttcctgaccctcacagtgcgaaactgcgcgatcggggaattgggtgagacacttaaccgaatgaacatggccttccagcgacttaaggatcgcaaagagtttcgacctgttcagggctggattcgcaccacggaagttacacgtggaagtgacggtagtgcgcacccgcactttcacactctgatgatggttcctccctcaatgttcacgcgagattacgttaaacatgaccgctgggtagagctttggcgagagtgtttgcgtgtgaattacgatccgaatgttgatgttcgagcagtaaaaccccgcaagcctaaggacggagaatcattggcttctgcaactgcggaacttgtacggggcgcagtggctgaaaccctgaaatattccacgaagccggctgacatggttgctgatcctgaatggttcctcgaattgactaagcagacacataagcgccgatttgtggctaccggtggcgcactcaaagacatactgaaactcgatcaggaaactgatgccgatatggtaatcggggatgatattcccgaaggcgatgatgatggttcacgcattgcttttgagtggaaaaccgaatccaaaaagtaccgtcgctcaccgtcaaaagataaagctgaatcagactga

SEQ ID NO: 14834 - DNA, 1575 bp, Escherichia coli
gtgctggcgcgatgggacacgccgaaggtggtgaagggcgtgagcttcctgcttcgccttaccgtggcagcggacgacggcagtgagcggctggtcagcatggcccggacgacggaaaccacataccgcttcaggcaactggcgctggggaactacaggctgacagtccgggcggtaaatgcgtgggggcagcagggcgatccggcatcggtatcgttccggattgccgcaccggcagcgccgtcgcagattgagctgacaccggggtattttcagataaccgccacgccccatcttgccgtttatgatccgacggtacagtttgagttctggttctcggaaaagcggattgcggatatcaggcaggttgaaaccacagcccgctatcttggcacggcgctgtactggatagctgccagtatcaatatcaaaccgggccatgattattatttttacatccgcagtgtgaacaccgttggcaaatcggcatttgtggaggctgttggccagccgagtgatgatgcatccggctatctggattttttcaaaggcgagatagggaaaagccatctggctcaggagctgtggacgcagattgataacggtcagcttgcgcctgacctggctgaaatcaggacgtccattacggatgtcagcaatgaaatcacgcagaccgtcaataagaaactggaagaccagagtgcggcaattcagcagatacagaaggttcaggttgatacaaataataacctgaacagcatgtgggctgtgaagctgcagcagatgcaggacggacgcctttatatcgcgggtattggtgccggtattgagaacacccctgacggcatgcagagtcaggtgctgctggcggcggacaggattgcgatgattaatcctgcgaatggcaatacaaagccgatgtttgttgggcagggcgatcagatattcatgaacgaagtgttcctgaaatatctgacggctcccaccattaccagcggtggcaatcccccaacgttttcactgacacctgatggtcgactttctgcgagaaatgcggatatcagcggtaacgtgaatgcgaactccgggacgctcaataatgtcacgattaaccagaactgtcggattctgggaaaactgtcagctaaccagattgaaggtgatattgtcaaaacggtgggaaaagcctttccgagaaatggcagttatgccagcggtacaataacggtcactgtgtacgatgaccaggcttttgaccgtcagatagtcgtcccccccgttctgtttcgcggtggtaagcatgaaaacttcaacagcaacaaccaacagtcatactggtattcaacctgtaagctgcaggtgctgaagaacggacaggaaatctttcagcaacccgcgacggatgtcagcagggtattttcatcagtcattgatatgcctgccggacacggccatgtcaccctgactttcaatgtttcttcatatggtgcaaataactggacgccaacgaccagtatcagcgaccttcttgttgtcgtgatgaagaaatcaacagccggcatcagtatcagttga

SEQ ID NO: 14835 - DNA, 207 bp, Escherichia coli; identical to SEQ ID NO: 5049

SEQ ID NO: 14836 - DNA, 273 bp, Escherichia coli
atggttgcagtgactgtactgatccccgccgtctggctggtgacactgctctccaccgtcccgtctggccctgtgatgaccgtcggggcagtcgttgcgccgttgcctcccaacacgctcaccgtctgcccggcaagcgtattaccgaacgcatcggtgaccttcacccgcagcgtgttcgccgtcgaaccgtccgcctctgaaccatccttaataaccaccagatccgctatcttcgccgtcctgacatcggcgataaatgtcacgttctga

SEQ ID NO: 14837 - DNA, 213 bp, Escherichia coli
atgctggcaccgaaagccagaactccccgtacacagacaacggataacggtaagcagaacacctatttctcctcactggataacatggttgcccagggcaatgttctgcctgttctgtacggtgaaatgcgcgtggggtctcgtgtggtttctcaggagatcagcacggcagatgaaggggacggtggtcaggttgtggtgattggccgctga

SEQ ID NO: 14838 - DNA, 1068 bp, Escherichia coli
atgtccattggagtctttaagctgtataaaaataaaataggtggcactgagaaagcagttgaaaatctaattgatatattaactaaaaacagcctacaagtgagatgtttttcagcaataaacgcacaagagatacaagttagagaagataatcggaaaaactacttattccaagacaatactgcatatgaagaaagcaaattaaggttttacattaaatatttgttttttttgagtgccaaaagtaaagaccttgaattaataatttccacggatatagctacatcatcattattgttattgattggtttttttcggtataataagaataaaattatttgctgggaacattatccatttgacaagaatagtattttttggagaaaagtatttaaatttcttttgtctcttaataaaaaagctgtagtagtttgtaattctcacaaggaaaaagataagtttagtttttgtaaaagggttgtaattataccaaattcaatcaaaaagcaaaaatataagcgcatacatcaaggaaaagaaactcttgatttgatttatattggtcggattgttaaagataaaggagttcaaaggttaattaatgcagtaataaatcacccgtctacaaaaaagtatgttttacacattgtaggaggtggtcaagagctggagtatctcaaatctaaatataagaataacaaccaaatacactttcatgggccgagtttaaacacagatgtttttttggcaaaaagtgatgtttttgtatccggttcatactttgaatgttttcctgttacaatacttgaagctatgtcctacggattacctgtaatttcaatggatatatctggagggacaagtagcgtgatttcttcatcgggtggcggatttgtgtgtcaatctcaaattgaatttcaggaaaaactaacttactttgaagataatgttaaacgaaccgaacacggaaatgcaggattcctattcgtgaatagacattattcagaagaaatagttagtgctcagtggatgagtttgatcaatcgagccaatagtcaagaaaattaa

SEQ ID NO: 14839 - DNA, 207 bp, Escherichia coli
atgctcaccccagtttcactgatggatgaccagatggtcgacatggcatttatcactcaactgaccggcctgaccgataagtggttttacaaactcatcaaggatggtgactttcctgcgcccatcaaaatgggccgcagctcccgatggctgaaaagcgaagtggaagcctggctgcaggcgcgtattgcacagtcccgtccgtaa

SEQ ID NO: 14840 - DNA, 1146 bp, Escherichia coli
atgtgtataagagacagacttagattggatgtttttgatgacagaacaagcgaatgtctttctgaagaaattaagatatatcaagaatgctatgaaaaattcgttaagtttttaaaggcaaacttcaaccaagaaatatacccacagctatatactcctgaaatattttatgaggcctgcagaaacctccagtcattttatgatcatcaggagacgtcacaaaacgctaattacagtgcaatagacaagaaaaaaagttattttaataaggaaatcaaaaatctaattaaaaagaatatttatcctgagctatacaatgaacaatgcttgaaaatccccgcctcatcgacagatgataaccaggaaataacatggcggaattttaaaactagcaatgcggcatattcacaactatgtgaaaaattatctttatttaaaagcgtgcccagtcggttaatagaaaaatcagcttactgctcaattgaaaacatgatcaccaataaatttgatgttgtcttttctttctgcggagatgatataaaggaatttatacttttattaccctataataaatcactggagatgtatgaacttaacgagcaaaagatccagtatttgactacccctaatattaatataaataaactattgctatcaaatataacaatagaaaagagcaacctttcatatgggtattattttggttgtgtattatccaatatatcatgttttgaaagcgacttatcaaacaccatcttttcaaatggagaaataaataatctcttcattaaaaaaagcaacatatttggaacatcgttcactaataccaggataaaaaatttgcgctgtgaagatattatgcctggtcgatggaacactcaacttgtcaataagcacttaggttacagatacacaggagtattcaaaaccctggcaagtattgatgacaaaccgtcccgtttcgaaattttgataccattgatacaaactttagttcgcgacaatgtaaagctaaataatgatgtgtataaagaacttaataattttatgctcgattacgacaaaacatcctcagaaatgagaaaataccttaaaagcatcaacgagtgtatgttccttatgaaaaacatagttcatcaagattaa

SEQ ID NO: 14841 - DNA, 477 bp, Escherichia coli; identical to SEQ ID NO: 8353

SEQ ID NO: 14842 - DNA, 234 bp, Escherichia coli
atgacagcgcttcccgaccatgccgccagtcccctgatgacccgactgcaggacgagctgcgcacggaatctgtccgctctcaggcccgtgaacagtttaccggtgcggtggaccggatatttgacacagcggagagcgtctgtgttgcctctgttgtccgtacggccctgcgcgctgttcgtgacacggtggtctctgttgcccgtgcggtatggaactggattttcttctga

SEQ ID NO: 14843 - DNA, 1128 bp, Escherichia coli
ttgttgtcaaaactgaataaagaactccgcaaaggcgcggatgagtcagaaacgctcagacaactggaagcgcttcagaaaaacagaggggaaaaacctgtaagatataaattcatttttaatgatgccacgatagcagcaattaaagatcagctttgtggtcagtggcgttcagtgggtatcatgtctgatgaagccggtataatatttgatgggtataccctgtctgagctgccttttattaacaaaatgtgggatggctccgtattgtcggtggacagaaagaatgaacccgaacagatgattgaaaatgccagaatgacattatccctcatggtacaacccggtctttttgaccgatatatggagcgaaaaggttctgttgccagggacagtggttttcttgcccgttgtctaatcagtaaacctgccaccacgcaggggaaacgctttattaacggagctgtgaccccgggaggatcattaacggcatttcatgaacgattaatggaactggccagaggcagtattgaaaaatccagtaaggatgaacgttattgtctgcatttttctcctgaagcgcaaaaaatatttattgatcactataatgttctggagcaggatttgtctccttccggacccttaagccagtttcggggacatgtttcaaaaaaaacagaaaacattgcgagaattgctgcgttattgcagtatttcagtcagggtgaagggaaaatctctgccgatatcatgacgtctgctgtcgtaataagttcgtggtacacagatgaatataaaaaattatttgcgttacctgatgaatctgaactgcagctgcaggacgcccgggagctgctcgactggctcattgaggagtgccgcggagaatgcccgccccgtgtcaggaaaaattatattctccagtgtggcccgggccggttccggaacaggaaaaagctgaacgtcctgctgaacattcttgcatctcaactcaggctctctgtcgtgcaggaaggaaaaaccacctatgtcctgctttccgaaataaacaatatcacgctgcctgaactgaatgcgtgctacagccagaaactgataagatggcatgagcaatcctttggcttataa

SEQ ID NO: 14844 - DNA, 477 bp, Escherichia coli; identical to SEQ ID NO: 8353

SEQ ID NO: 14845 - DNA, 999 bp, Escherichia coli
ttgactggtaacatagtatgcctgaataccgctgataataactggagcaatgcagatgctaaaattagcctaggtaataatgttattatagaggatgaaataaactcaacattactacgccatcaaaaaatattaaattattttgatggtaaagttaaatctccaactaatgacattattcaactcagctcacttattctatcagaaatattaacttatttagataaaggttatatagggcgaattttaaatacctttaatgaaaagattcggtttatgcttattgattcaggaaaaaaacatcttgatcgtaatagaattattgaaatagataaagtgaccttttcagaaaatcatatattctcaacatccatacacgctaaagcccaactcaatgctaaaaataaagaaaaattattgcgttcttatagcagagaggatgttttcaattatttggaaacaataaatgaaatatatggcctgcgtaacacccctgattcattaaaccaactgtgcattgtgacttattcgtggctcatgggtaatacgctgaatttattaatatcaaacgctattaaatatagcaattcagttagagatcctattagctatagatgggttaaatttgataaaaccaatcctgatcatataaacgcaaaaataatggaggcaatacaatgcattgaatctgaagttacttttaaacttgaaacatgtattgctcatttttatcagctatgtcaatcaattcacggcgatgaaaatgcaggcattaatctttcaccttatttagaatatggaacattagatactaacatcatagaacttcaagagtttggtttctctcgtttagccgcaattgaaattatagcaaagcacaaagagtgtgttacattcaaaacaaatgagacatcattgcaaataaacactcagaaattaagagctaagattgaaaagcacagtgtaattgatagagaactatcatggttgaatttataa

SEQ ID NO: 14846 - DNA, 471 bp, Escherichia coli
gtggggattgtcgggagtatcggcagcgccattggcggggctgttggtggcggcgcgtccgcgtcaggcggtacagccattcaggccgctgcggcgaaattccattttgcaaccggaggatttacgggaaccggcggcaaatatgagccagcggggattgttcaccgcggtgaatttgtcttcacgaaggaggcaaccagccggattggcgtggggaatctctaccggctgatgcgcggctatgccaccggtggttatgtcggtacaccgggcagcatggcggacagccggtcgcaggcgtccgggaagtttgagcagaataaccatgtggtgattaacaacgacggcacgaacggtcagatagggccacaggcgctgaaggcggtttatgacgtagcccgtaaggcggcaatggatgttgtgaccgggcagatgcgtgatggtggtctgttctccggaggtggacgatga

SEQ ID NO: 14847 - DNA, 330 bp, Escherichia coli
atgaaaaccttccgctggaaagtgaaaccgggtatggatgtggcttcgactccttccgtcagggaggtgcgctttggtgatggttactcccagcgagcgcctgccgggctgaatgccaacctgaaaacgtacagcgtgacgctttctgtcccccgttgggaggccacggcgctggaatcgtttctggcagagcacggaggctggaaagcctttctgtggacgccgccttatgactggcggcagataaaggtgatctgcgcaaaatggacgtcgcgggtcagtatgctgcgtgttgagttcagcgcagagtttaaacaggtggtgaactga

SEQ ID NO: 14848 - DNA, 144 bp, Escherichia coli
atgcggctgttttctgccgcaaccgctgcggtgatctgtgcgttcacatccggctgcgccgcgctggcgttttcgccctccttcgcaggctccacggtggtgatgtcagcctgcgaagcagtggctgaaacagttgttgattga

SEQ ID NO: 14849 - DNA, 687 bp, Escherichia coli
atgcagaaagcgaatatttctaatctaatttttagttcgtctgctactgtctatggcaatcctcattatgttccaatatctgaaaaacaccctgtcggtgaggtgatcaatccgtacggtcgttcaaagtttatggtggaacatatattgcgtgatttttgtaacgcgaatagcgacgcaaatatcacaatactaagatattttaatcctgtaggtgctcatgagactggattaattggagaagatcctttaggaactcctaataacctgtttccctatgttgcgcaagtcgcaattggaaaattaccctatctaaatgtttttggtaataaatatatgacaaaagatggaacaggtgtaagagattatatccatgtagtcgatttagttgaggggcatcttgccgctttaaaaaatctcaatagaaaccgggggcttaaagtttttaatttaggcactggtcaaggttatagtgtgttagatatcatcgacgcttttaaactggaaacaggacgcgatatacctttccgtatcgtttctgagcgaaatggagatgtggctgaatgttggtccgatccttccttagcaaacgagcagctaagttgggttgctaaaaggactcttaataatatggtggaagatgcatggagatggcaaacaatgaatccaaatggatataaagagtaa

SEQ ID NO: 14850 - DNA, 480 bp, Escherichia coli; identical to SEQ ID NO: 12357

SEQ ID NO: 14851 - DNA, 585 bp, Escherichia coli
atgtgcaaatgtaataccgtcacccgcgacgatattccgtttgccatctggtcagggcttcgccccgacaccccgcatcagtgcgtacgtgctcaatgtggtttccggttctcttccgcttcctcgcccactcgctcactaacgttcggtcgctggggctgcggcgagcggtgccacctctcgcatgttgtcggtgattccgctgttgttctttcggggataagtcgtcagatagcccttcaaacgcgctcagaagctctcagacgcacgaaacggggtttaaatgcccgtcagggcatggaaggcgcgaaaaacgcttacagagcgtttcaggaggtcaggcgcgccgatacccctagccaggggctttcaggtcgccaggaaccgcgccagccccctgcaaagcccatttgcacggtacaggcagccactcggttggtaggtggtcgtagaccgtcggtgttacagcgatgggggtctggggttctccccagacggtttccggttgcgctcaaggcgctgccggaaccgtggcggctcgatcgttctggagatcggggagcaaaaacacgcaagggattttga

SEQ ID NO: 14852 - DNA, 585 bp, Escherichia coli
atgtgcaaatgtaataccgtcacccgcgacgatattccgtttgccatctggtcagggcttcgccccgacaccccgcatcagtgcgtacgtgctcaatgtggtttccggttctcttccgcttcctcgcccactcgctcactaacgttcggtcgctggggctgcggcgagcggtgccacctctcgcatgttgtcggtgattccgctgttgttctttcggggataagtcgtcagatagcccttcaaacgcgctcagaagctctcagacgcacgaaacggggtttaaatgcccgtcagggcatggaaggcgcgaaaaacgcttacagagcgtttcaggaggtcaggcgcgccgatacccctagccaggggctttcaggtcgccaggaaccgcgccagccccctgcaaagcccatttgcacggtacaggcagccactcggttggtaggtggtcgtagaccgtcggtgttacagcgatgggggtctggggttccccccagacggtttccggttgcgctcaaggcgctgccggaaccgtggcggctcgatcgttctggagatcggggagcaaaaacacgcaagggattttga

SEQ ID NO: 14853 - DNA, 585 bp, Escherichia coli
atgtgcaaatgtaataccgtcacccgcgacgatattccgtttgccatctggtcagggcttcgccccgacaccccgtatcagtgcgtacgtgctcaatgtggtttccggttctcttccgcttcctcgcccactcgctcactaacgttcggtcgctggggctgcggcgagcggtgccacctctcgcatgttgtcggtgattccgctgttgttctttcggggatgagtcgtcagatagcccttcaaacgcgctcagaagctctcagacgcacgaaacggggtttaaatgcccgtcagggcatggaaggcgcgaaaaacgcttacagagcgtttcaggaggtcaggcgcgccgatacccctagccaggggctttcaggtcgccaggaaccgcgccagccccctgcaaagcccatttgcacggtacaggcagtcactcggttggtaggtggtcgtagaccgtcggtgttacagcgatgggggtctggggttccccccagacggtttccggttgcgctcaaggcgctgccggaaccgtggcggctcggtcgttctggagatcggggagcaaaaacacgcaagggattttga

SEQ ID NO: 14854 - DNA, 363 bp, Escherichia coli
gtgaatacttaccacatcacactaccctggcctccgagcaataatcgctattaccgccataatcgcgggcgcacgcacgtcagcgcagaggggcaggcataccgcgataacgtcgcccgaatcattaaaaacgcaatgctggatatcggcctggctatgcctgtgaaaatccgcattgagtgccacatgccggatcgccgtcgccgtgacctggataatctgcaaaaagccgcttttgacgcactcactaaagcaggtttctggctggatgatgctcaggtcgttgattaccgcgttgtgaagatgcctgttaccaaaggtgggaggctggaactgaccatcaccgaaatggggaatgaatga

SEQ ID NO: 14855 - DNA, 477 bp, Escherichia coli; identical to SEQ ID NO: 8353

SEQ ID NO: 14856 - DNA, 477 bp, Escherichia coli; identical to SEQ ID NO: 8353

SEQ ID NO: 14857 - DNA, 480 bp, Escherichia coli; identical to SEQ ID NO: 12357

SEQ ID NO: 14858 - DNA, 480 bp, Escherichia coli; identical to SEQ ID NO: 12357

SEQ ID NO: 14859 - DNA, 333 bp, Escherichia coli
atgccccagcgtcacagcagtatccagaccgatatacacttcacgtcctttgaaatatttctggaagaactttcttgcaccgtcggagatgggcagcaggccctcaacaatcaggcggatcatgcgcgggaacaacaccatgattgccgcaacggtaatcatcagactggcgcaacctttaaagccttcaccagccgccaggccaaaaatcagaccgagcactacgccgataatcaccggatcgccgaccatgccgtagcgtttctggatctcctgagcatcgatattgcgtcccttcatgaaagggattttttcatagatagcatcaagtag

SEQ ID NO: 14860 - DNA, 396 bp, Escherichia coli
atgaaacatactgaactccgtgcagccgtactggatgcactggagaagcatgacaccggggcgacgctttttgatggtcgccccgctgtttttgatgaggcggattttccggcaattgccgtttatctcatcggcgctgaatacacgggcgaagagctggacagcgatacctggcaggcggagctgcatattgaagttttcctgcctgctcaggtgccggattcagagctggattcgtggatggagtcccggatttatccggtgatgagcgatatcccggcactgtcagatttgatcaccagtatggtggccagtggctatgactaccggcgcgacgatgatgcgggcctgtggagttcagccgatctgacttatgtcattacctatgaaatgtga

SEQ ID NO: 14861 - DNA, 396 bp, Escherichia coli
atgaaacatactgaactccgtgcagccgtactggatgcactggagaagcatgacaccggggcgacgctttttgatggtcgccccgctgtttttgatgaggcggattttccggcagttgccgtttatctcaccggcgctgaatacacgggcgaagagctggacagcgatacctggcaggcggagctgcatattgaagttttcctgcctgctcaggtgccggattcagagctggattcgtggatggagtcccggatttatccggtgatgagcgatgtcccggcactgtcagatttgatcaccagtatggtggccagtggctatgactaccggcgcgacgatgatgcgggcctgtggagttcagccgatctgacttatgtcattacctatgaaatgtga

SEQ ID NO: 14862 - DNA, 174 bp, Escherichia coli
atgcagcgtgtggccgggaaaaaccgttaccccattgatgtggtgaaaatcccgatggcggtgccgcttaccacggcgtttaaacagaatattgagcggatacggcgtgagcgtcttccgaaagagctgggctatgcgctgcagcatcaactgaggatggtaataaagcgatga

SEQ ID NO: 14863 - DNA, 342 bp, Escherichia coli
atggattattcacagttaagtgattttgaaattaacagaatggtaggagacataatttttaaaggcctttgggcaagtaaaccggaaacatcagggaataacaccaacaaatggtattacggaaatgctgatacaacttttgagccattaaatcatttgcctgactactgcaatgatccgagcgcttcatggccgattattgagaaatacaggatttctatcttagaccagttaactgaatggtgtgtggatgcaaaaggcgtaagcccaatatttgataccagacctctccgcgccgccattattgtctttctcctgatgcaggaggccaataatgcttag

SEQ ID NO: 14864 - DNA, 240 bp, Escherichia coli
atggcagattgcccccagcacaccataaatcaggctaccggtcataagctggaccaccgtacccgtaatggcgtagtgccagtaattgtaaatatcgacgttcatcgttttggtcagacgggtgaccagcatggcgacattgagaagaaaaataactgggataatcatggcgccaatggctgtcgcataaccaacgccggaggcagggcctgcgccaacgtcaaagacatgcagggctag

SEQ ID NO: 14865 - DNA, 477 bp, Escherichia coli; identical to SEQ ID NO: 8353

SEQ ID NO: 14866 - DNA, 327 bp, Escherichia coli; identical to SEQ ID NO: 13325

SEQ ID NO: 14867 - DNA, 279 bp, Escherichia coli; identical to SEQ ID NO: 4856

SEQ ID NO: 14868 - DNA, 279 bp, Escherichia coli
atgaaaaagatccttgtggcatgcggtaccggcatgtcgacctcaaccatgattgcacacaaacttcaagaatttctgactgaacaaggcattgcggccaccatcgcccagtgctgtctgaatgagatcccactgaactgtaacggcatggaccttattgtgacctccatgcgaaccaacagtgattatggcgtccctacgcttaacggcgccgccctgctcacagggatcaatgacgacacgttaaaacaacaaatcaaggctctgttaacccaataa

SEQ ID NO: 14869 - DNA, 441 bp, Escherichia coli
atggtcaccgggatggcggaagacctgcagagtctggtcggcggaacggtggtcaggcgtaaggtttacgcccgttttctggatgcggtgaacttcgtcaacggaaacagtgacgccgatccggagcaggaggtgatcagccgctggcgcatcgagcagtgcagcgaactgagcgcggtgagtgcctcttttgtactgtccacgccgacggaaacggatggtgctgtttttccggggcgcatcatgctggccaacacctgcacctggacctatcgcggtgatgagtgcggttataacggtccggcggtcgcggatgaatatgaccagccgacgtccgatatcacgaaggataaatgcagcaaatgcctgagcggctgtaagtttcgcaataacgtcggcaactttggcggcttcctttccattaacaaactttcgcagtaa

SEQ ID NO: 14870 - DNA, 231 bp, Escherichia coli
atgaccagtgagcccgatgggcacggacagcggtttattccctccatgtgcgagaaaatccaaaaagtacgcacggcttttcctcagaccgagtgctgggccgacggtggaattacgctggcagctgcacagcaactggcagcagctggggcgcaacatatggtgattgggcgcgccctgttctcttcatctgactatcgcgcgaccttagctcaattcgccaccctgtaa

SEQ ID NO: 14871 - DNA, 237 bp, Escherichia coli
atggtgatgaccagtgagcctgatgggcacggacagcggtttattccctccatgtgcgagaaaatacaaaaagtacgcacggtttttcctcagaccgagtgctgggccgacggtggaattacgctggcagcagcactgcaactggctgcagccggggcgcagcatatggtgattgggcgcgccttgttctcttcatctgactatcgcgcgaccttagcccaattcgcccccctgtaa

SEQ ID NO: 14872 - DNA, 237 bp, Escherichia coli
gtgggaaaccgtcgtattcccggcgcgtttattcagcaactgaaaaatggccgctggcatgttatgcagcgtgtggccgggaaaaatcgttaccccattgatgtggtgaaaattccgatggcggtgccgctgaccacggcgtttaaacagaatattgagcggatacggcgtgagcgtcttccgaaagagctgggctatgcgctgcagcatcaactgaggatggtaataaagcgatga

SEQ ID NO: 14873 - DNA, 2244 bp, Escherichia coli
atgaaactgaatgcaacttatataaaaatacgtgataaatggtgggggcttccgctgttcctgccttctttaatcttgcccattttcgcccacattaatactttcgcgcatatttcttccggtgaagtttttctcttttatctgccactggcactgatgatcagcatgatgatgtttttcagctgggcggcattgccagggatcgccttagggatttttgtccgcaaatatgcagagctgggtttttacgaaacgctctcattaacggctaattttattatcattatcattctctgttggggcggttacagggtttttaccccccggcgtaacaacgtttcacatggtgatagccgtttaatttcccagcgactattctggcagattgtgtttcctgcaacgctgtttctgatacttttccagtttgctgcgtttgtagggttactggcgagcagagaaaatctggtcggcgtcatgccctttaacctcgggaccttaatcaattatcaggccttgctggtgggtaatctgattggtgtcccgctgtgctactttatcattcgggtggtgcgaaatccgttttatttacgtagctattattcgcaattaaaacagcaggttgatgccaaagttaccaaaaaagagttcgcaatctggctactggcattaggtgccttattgttgctgttatgcatgccgttaaatgaaaaaagcacgatttttagcaccaattacaccttgtcattattgctgcccctgatgatgtggggagcgatgcgctatggttataagttgatttcattgctctgggcggtcgtgttgatgatcagcatccatagctatcaaaattacattcccatttatcctggctataccacgcagctgaccataacctcctccagttatctggtattctcttttattgtcaattatatggctgtactggcaacccgtcagcgagctgtagtcagacgcattcagcggcttgcgtatgtggacccggtggttcatctgccaaatgttcgcgccctgaatcgcgcgttgcgtgatgccccctggtctgcgctatgctatttacacatccctggcatggaaatgctggttaagaactatggcatcatgctgcggattcaatacaagcaaaaactttctcactggctgtcaccattgctggaaccgggtgaagatgtttatcagctttcgggtaacgatctcgcgctgcggctgaatacagaatcgcaccaggagcgcattaccgcactggatagccatctcaagcaatttcgtttcttttgggatggaatgccgatgcaaccgcagattggcgtcagttactgctatgtgcgctcgccagtgaatcatatctacctgctgctgggagagctaaatacggtggccgaactttccatcgtgaccaacgtcccggaaaatatgcagcgtcgcggagcaatgtatttgcaacgcgaattgaaagataaagtcgcgatgatgaatcgactacagcaggcgctggaacacaaccattttttcctgatggcccagccgattaccggtatgcgtggtgatgtttaccatgaaattcttctgcgcatgaagggtgagaatgatgagctgatcagccccgatagcttcttaccggtcgcgcacgaatttggtttatcgtcgagtatcgacatgtgggtcattgagcatacgctgcaatttatggctgaaaacagagcgaagatgcccgctcaccgttttgctattaatctgtctccaacctcggtatgtcaggctcgttttcctgttgaagtcagtcagctgctggctaaatatcagattgaagcgtggcaacttatttttgaagtcaccgaaagtaatgctctgaccaatgttaagcaggcgcaaatcaccttgcagcatcttcaggaattaggctgccagattgcgattgatgatttcggcaccggctacgccagctatgcgcggcttaaaaatgtgaatgccgatctgcttaaaattgacggcagttttatccgcaatattgtgtcaaatagtctggattatcagatagtggcgtcgatttgccacctggcgcgaatgaagaaaatgcgggtagtggcagagtacgttgaaaacgaagagatccgcgaggcggtgctctctttggggatcgattatatgcagggttatcttattggtaagccgcaaccgttaattgatacgctgaatgaaatcgaacccattcgcgaaagtgcctga

SEQ ID NO: 14874 - DNA, 555 bp, Escherichia coli
atgaagatcgtggaagtcaaacacccactcgtcaaacacaagctgggactgatgcgtgagcaagatatcagcaccaagcgctttcgcgaactcgcttccgaagtgggtagcctgctgacttacgaagcgaccgccgacctcgaaacggaaaaagtaactatcgaaggctggaacggcccggtagaaatcgaccagatcaaaggtaagaaaattaccgttgtgccaattctgcgtgcgggtctggggatgatggacggtgtgctggaaaacgttccgagcgcgcgcatcagcgtcgtcggtatgtaccgtaatgaagaaacgctggagccggtaccgtacttccagaaactggtttctaacatcgatgagcgtatggcgctgatcgttgacccaatgctggcaaccggtggttccgttatcgcgaccatcgacctgctgaaaaaagcgggctgcagcagcatcaaagttctggtgctggtagctgcaccagaaggtatcgctgcgctggaaaaagcgcacccggacgtcgaactgtatactgcatcgattgactag

SEQ ID NO: 14875 - DNA, 153 bp, Escherichia coli
atgctgacgaaatatgcccttgtggcagtcatagtgctgtgtttgacggtgctgggatttacgcttctggtcggagactcgctgtgtgagtttaccgtaaaggaacgtaatattgagtttaaggctgttctcgcttacgaaccgaagaagtag

SEQ ID NO: 14876 - DNA, 177 bp, Escherichia coli
atggaaaaagaacagaaacaatgtggcctgcagctccccttgcatcaggatgtatctctccctgtaccccgtgacactttcagtatggagaaaaaggtaataacagcagagcaatacagagactggcaattaattgcagccagtctcaggaaaaagataaatggggaaagaagctaa

SEQ ID NO: 14877 - DNA, 810 bp, Escherichia coli
atgcttcgcattaaacctctttttattctttgcgccgccttactgacggccatacccacagcgtcagcggatgtgaacagcgacatgaatcagttctttaacaagctgggcttcgcctccaataccacacagccgggcgtctggcaggggcaggccgccgggtatgcctatggtggctccctgtatgcccgcacccaggtcaaaaatatccagctgatttccatgacgctgccggatatcaatgccggatgtggcggcatcgacgcctatctcggctcgttcagttttattaatggcgatcagttgcagcgttttgttaagcagattatgagcaacgctgccggttacttttttgaccttgccctgcaggcaacggtgccggaaatcaaaaccgcaaaagacttcctgcagaaaatggcaagcgacattaacagtatgaacctcagctcctgtcaggtggcgcaggggattgtcggaggattatttcctcagactcaggtgtcacagcagaaggtctgtcaggacattgccggtgagagcaatatttttgctgactgggccgcgtcccgtcagggctgcacggtcggaggacagtcatcgtctgttcgtgacaaggccagtgacaaagataaggaacgggtgctgaagaacatcaatatcatctgggactcgctgtccaaaaacaggatgcttgatggtaacaaagaactgaaagaatttattatgacgctcaccggtagtaagcgtaaactgaccgccgtatgtagccatcagacgagaattggtaacttagacgcccatctgatatag

SEQ ID NO: 14878 - DNA, 423 bp, Escherichia coli; identical to SEQ ID NO: 8332

SEQ ID NO: 14879 - DNA, 192 bp, Escherichia coli
atgaatatcagcacagaaacccgcgaaattctgcgtaattacagggccgtgattaatgcgcggcgtcgtgaaatggggcagaaaccgctcaccaccgcgcagattgttgatgaaatctgcgattttgtggcgaatcagcaggcggttttcctgggcggtcactacatcttacagggtagcagaaacaggtga

SEQ ID NO: 14880 - DNA, 258 bp, Escherichia coli
atgtcgcagacagaaaatgcagtgacttcctcatctggcgcaaaacgagcatacagaaagggtaaacctttgagtgaagcagaacgacagagagcagcttctgcgcgcaaacgatctgtatgtaaagagatcaaggttttcgtcagaccagaactgaaaaactaccttaccagtctgtgtgcagaggaaggggtaactcaggcagagttgatagaaaggcttatcgagaaagaggcctgtcacaggaacatgatgtga

SEQ ID NO: 14881 - DNA, 573 bp, Escherichia coli; identical to SEQ ID NO: 7694

SEQ ID NO: 14882 - DNA, 1491 bp, Escherichia coli; identical to SEQ ID NO: 8027

SEQ ID NO: 14883 - DNA, 738 bp, Escherichia coli; identical to SEQ ID NO: 7689

SEQ ID NO: 14884 - DNA, 2364 bp, Escherichia coli
atgattattagcccgccatttatacgagcgaaaaataacaatgaaaacgatgctcattggattgaaaggatgatgccagttgaacctgaccgtgactatcccatcaactatgggggatcatggcatggaggcatccacgttagacatacaaacagtgacaggcaaccagaatatgtccgtgccattgctgatggtgtcgtggtatctattcgcaatccctctgaccaggcagcatgtagtcttccgccgctcaattataatggaagcacagacgatgggtatgttctgcttcgtcatgaaactgaaataggcactggtgaggacggcaatattgtttattactctctttacatgcacctggaaaagattgaagagggtatcagtgaaggaaataaagtctaccggaaatcgtcactgggaatgccggggcatgtcgacggggatcgcggcctgcacttccaaattttctgcgatgatgacaatctgagaaaaataaccgggcgcactacacctgagatggatgtgagccgtcatgggcgtaccgacgtggtttacggggatatctatttttacctgccgcccggtacccgcttttacaggagtgcgccggaaaacaacgcagtagataacacaggtgaagtttttcagagcacggaaccgttggttgtcaccatgtgttttgatactggccattgtatcatgactacccgcagagcaaatccggtgataccaagccgttatgacattgtgggagaagtgttgacggatgctgacggcactgattatgaatacaacttgtacagtgctgcactgagactttatccgcaaagtccaagcgcagggtttgagttactgcgctttggtcgggttatcaataccgagcatgaaacactgatacccgcgaatgcgccactgtggcgaaccgtgagctatcccggtgggcaaggagtgataaatctggcggcagatgttgtgacaaaatttagcgacggtgattttccgcactggagtggctggcgactggtagatgacgacgctgacagcaacagtcagtgcaattcagtaatattacgtggtggtggttttacggattttcgtcagatgatttgccacttcccactggagtggtgtaatacgggaatagaagcgcgttacggctggttgaaagaaggggtaatacaggaacgtcaggaaaatgaggctaacagcgatttatcattaggtacggattactacaggccaaataatgtcgaatataatacgactggagatagccatggagaatctcctcagtcagctatatcagaaatgccagatttgtcttatgaacagtcaaatgcttatgaaaatgccgtcagagttttattactgggagaagaagactggcagacgttggtgaagcatattaaggcactgtgttttgataccagtagtattgctgaaggacgggtttggcattttaatccgggtgagtttattaagcattttaggaagtgtgggtgggttgacaaagcaatattgaagcgaatttttgcctctggtactaatgaccgtgatagagcggttattgaacaaaaagttgatatatatggtacggctataaatattgttatgaataaatatataatgaattctcctctgagacgtgctcactttctggggcaaggggcagtggaatcttcccgtttaagaagtatgcaggaaaaaagccagtatcaaactgttgatgaaaatggtcggccagtcggcggaggtattgttccggactcattacgtgatgagaattcggacttgggtcattggtatggtgcaattgagactgaggtcgatggatacttctctggtgttaaatataattctggtggaggacgaattgcaggctcatatgactggatactaggaaactgcgacactgaggatgcccagaagtttcgtgggcgaggttttaagcagttaactggtcgatcaaattatgccgaatattgggtctatcgtgcctggatagatacgaatagttttaccgctaagtggtgggaagaccctctgtggcgcttacatgatcgtcgtcgtttaactcgcataccggctaatatcgaagagcctcacagggttaccagaagcgaatataactgtatcgatactggtggattctttattgttaagaccgttgatcgtcggggtactcggtcaagtattaccagagcgatggatcaagacagtgaagttattcatttgaacaataccacgatagatacaacggatgaacaaacaataagaagtgtgtcccgtgcaattaatggtggtgaaaatggtttgccagacaggataaccttcacacgcgcagctaagaaggttttaatatga

SEQ ID NO: 14885 - DNA, 858 bp, Escherichia coli; identical to SEQ ID NO: 6105

SEQ ID NO: 14886 - DNA, 348 bp, Escherichia coli; identical to SEQ ID NO: 8336

SEQ ID NO: 14887 - DNA, 969 bp, Escherichia coli; identical to SEQ ID NO: 8348

SEQ ID NO: 14888 - DNA, 825 bp, Escherichia coli; identical to SEQ ID NO: 8349

SEQ ID NO: 14889 - DNA, 381 bp, Escherichia coli; identical to SEQ ID NO: 8379

SEQ ID NO: 14890 - DNA, 2262 bp, Escherichia coli; identical to SEQ ID NO: 4569

SEQ ID NO: 14891 - DNA, 486 bp, Escherichia coli; identical to SEQ ID NO: 4570

SEQ ID NO: 14892 - DNA, 699 bp, Escherichia coli
atgttaaaactgactgatatcacctggctttaccaccatttgccgatgcgttttagcttaacggtggaacgcggcgagcaggtggcgatcctcgggccaagcggcgcaggtaaaagtaccctgcttaatttgatcgccggttttctgacgccagccagcggtttgctgactatcgacgacgtagatcacaccacgacgccgccgtcacgccgtccggtgtcgatgctgtttcaggagaacaacctgttcagccatctgacggtcgcgcaaaacatcgggctggggctaaatccggggttgaaactaaatgcggcgcagcagaagaaaatgcacgcgattgcccaccagatggggattgataatttaatggcgcggttacctggcgagctttccggcggtcagcgacagcgcgtggcgttagcgcgttgtctggtacgcgaacagcccattttattgctcgatgaaccgttttccgcactcgatccggcgctacgtcaggagatgctgacgctggtgagttcgagctgccaacagcaaaaaatgacgctcttgatggtgtcgcacagtgtggaagatgcggcgcggatcgccacgcgctcggtggtggtcgccgacgggcgtatcgcctggcagggtaagaccgatgagttgttgagcggtaaggcgagtgcttcggcgctgttgggaattaaaggttaa

SEQ ID NO: 14893 - DNA, 234 bp, Escherichia coli
atgagcaaacgtaacgatattactgatggaatatttgcaacaacgaaaaagtatggattagtttataccgaagagttaggttggatcgatttggggcatgctcagggacaagatgccagaatattaaaaagaaaattggagcaagaacatttttcaacatattacgatgaatttcatgattggtattttcctgttgattatcatcaggaaatgggaattcggaaaaaatattag

SEQ ID NO: 14894 - DNA, 627 bp, Escherichia coli
atgaacccggttgatcgtccactattaaatattggcttaacgcgattagaattcttgcgtatatcaggaaaaggccttgctggtttaacaattgcccctgcgttactgtcacttttgggttgcaaacaggaagatattgatagcggcacagtaggcttgataaatacacccaaaggggtgctggtgacccatcgtgcgcgatgcacgggttgccaccgctgtgaaatctcttgtaccaacttcaacgatggctcagtagggacattcttctcccgtatcaaaatccatcgcaattatttctttggcgataacggggttggctctggtggcggcctgtatggcgatctcaactataccgcggacacctgccgtcaatgcaaagaaccgcaatgcatgaatgtctgcccgattggtgcgattacctggcaacaggaagaaggctgtattaccgtcgatcataaacgttgtattggctgtagcgcctgtactacggcgtgcccgtggatgatggccaccgtaaataccgaaagtaaaaaatcctcgaaatgtgtgttatgcggtgaatgcgcaaacgcctgcccaacaggggcgttaaaaattatcgagtggaaagatattactgtgtga

SEQ ID NO: 14895 - DNA, 288 bp, Escherichia coli
atggatatcacgtcgatacttcatgcgctttgtgccgtagcggtgcaggtactggctggtctttttaccggaaactgggcttacggggcgatagcgggttgtacgttcttcattgcgcgtgaacacacccaggcagaatatcgctggattgaaatgttcgggcatggcaagcggattaacatgccgtggtggggcggttttgatccacgtgcatgggatgtggcaagcctgatggattttgctgtgccggtggtggcgtgtctgctgatctggatgttgatccgttaa

SEQ ID NO: 14896 - DNA, 1785 bp, Escherichia coli
atgacggaggatgatgcccgtccggaggcactgcgccgttttgagctgatggtgaatgaagtggcacgtcatgccggagcgtcatcacagagtgcagcggcggcaaagaaatccgaaacggcagcagcctcatcgaagaatgcggcgaaaacctcagaaacgaatgcagctaacagcgcacaggcggcagcggcctcgcagactgcatcggcaaactccgcgacagcagccaaaaaatcagaaaccaacgcgaaaaatagcgagacagccacaaaggccagcgaaaaaaacgcaaaatccagccagacggcagcgaaaaccagtgagatgaatgccaaagacagtgaagccaacgcaaaggtgagcgaaacagcggcggcgaactcggcgaaagcatcggcagcaagccagacggcagcaaaagcaagtgaagatgctgccagagaatacgcaaaccagacagcagagccgtacagatatgttttacagccgctgccggatgtgtggataccctttaatgattcgctggatatgattacgggctattctccgggttataaaaaagtgaagattggtgataatgtggttcaggttgccagtgataaacaggttaatttcagtcgcgcatcaacggcaacatatatcaacaaatctggcgaactgaaaacggcggaaattaatgagccacgatttgaaaaagaaggtttattgattgaaggtcagcgaaccaactacatgttgaattcagcaactccagcttcttggggtaaatctgcaaatatgaatgtcgctgaggttggaactgatagttttggttttacttatggaaagtttgtttgtaatgaatcattaattgggcaaagtacaacccttaatatggcagtagtttcaacctcgggggctgtcgatgtatcaggcgataataagtgtgtgacgacatcgtgcagatttaaaacggatttggaactcctgttaaggatcaggtttgaagccttcgatggcagcgcttcatctaatcttggatatgccattgttaatacgcggtctttattggttgaaatcaccggtgtagctgccgacaggctcaccgcacgagttaacaaagatgaagctacgggctggatttttgtagaggcaacgattcaagcaagtaaagaaacttacataacctctgcaatacaatacgcaccaaaatctggtggcgtcgttgaatctggtgactatatttatctggccactcctcaggttgaggatggttcgtgtgtatcatcttttattatatcaggaacgacggcggcgacgcgcgcaagcgatatggttacagttccgattaagaataatctttataatcttccttttacggttctttgtgaggtacataagaactggtataaaacgccaaatgcagcgccacgtgtttttgataccggcggtcatcaaaccggagcggctattattcttggcttcggatcttcggcagatgggccagacggatttccttattgcgatattggtggatcaaataggcgtgttaacgaaaacgcatcgttgaaaaaaatggttatggggatgcgtgtaaagtcagatcagtctacatgtgcagtaagtaacgggcgtatatccagcgaaacaaaaaccacatgggaatatatccggagtacagcaaccattcgcattggtggacaaactacagcaggattacgccatttatttgggcatgtgaggaattttcgtctctggcataaagagctaacagatgcgcagcttggggaggttgtggagtga

SEQ ID NO: 14897 - DNA, 1221 bp, Escherichia coli
gtgtcgatcaagagccaagcatacttatttaaaagaaaagatgggatctggatgtttcagatttttgttcctaaatacttacgtcatctttacccttataagttgtggagaaaaagcacatctacacgagatctgaatgaggcgagaagattcagaaaccatctattattagaatgggaggaactaaagcgaaaacataatcctgataaccccgaaaggaggttacaaaaagctattgaatccttacattcagaggcaagggccaataaaaacacgcaaagagccgtaaaacgcggttatgcaccgccttccctgtgcctaatacgtgacgaatacgccgaatgctacagagagcgtcgttcatactcaacactacagaaatcagcaagggccgttgagctatttttacaaagcattcagaaagatgatattcatattgagaaaataggcagacggcttgtaacagtattcttagatgaccagaagcaacgaggagcagccgatcaatctcgtcaaaactggcttacatgcttaggatcgctctatgaatttgctaaacgccgttatgacggaataccagacagtaacccttttcacggtcataacctcgaagcacgtcgcacaatcgagagttatcaaccgattacacctgaacaaatgcaaaagctacttgatgcagcggagccggagatcagaaatattattttaatgggcttgttttcaggatgcagattagacgaactggcaagcctgaaaaagtcagaggttgtaactgtggaaggaatacgctgtttttatatcagcaagagtaagactaaagcagggatcagacacgttccgatacattcgagactatcgattattgtcgatgaatatttaaatcataattatggtgaatatttgttccctcactcgaacaaagtaaaaagaatcgacggcaagaaaggcccgttctattctcaagcattctcacgtttacgtcgtaacgtcttgccaatcgctacagatagacaatgctttcacagcttgcgcgggatgtttatcacttgtcttgatcgtgccggagtgcctgaacagcggatcggagccattaccggacatacagagcagagagctaaaacagaagcctttcgcacctactcacaaggggcaagcattccagaattagctgaatatgtagaattagtaaaatatgaattaaatattgattttaaggcgtaa

SEQ ID NO: 14898 - DNA, 1842 bp, Escherichia coli
atggatttaaacatctcaaccttaacaaacaaggttgtatttaaagttgattttgcatcattgcagaaagcacgcgatgcagggaagaaatttcaaaaagaaatggaaaacctaaccaatccaacgatgaaagggaagaaggctaaaaaagctatagacgatgctcatgatctggtaaaggctcgtaaagctacacaggctaaagctgatgctaaagcgtcagacaagcaagctcaaacggacaagaagaacgctgataaggtggcaaaggcagaagctaaagcgaaagctaaagccgctatagctgccgataaacagatccgcgctaaagcgacaatagcagagaaggcagagattaaacgccagcaagcttttagacagcttgaaggcatcaaaaaagggcgtatgggcgacggtatggatagcgcccagtactacaaaacattgcaatacatcaaagcacaaacggcagcgtatgagaaaggcgctataagccaggctaagatgaatcacttaatacgcgaccgcatcacgttagaacgccgtgcggcaattttgaaggctcgccaggtggcggctgatggtggcaagtatccacatatggctaaacagcttaaaggcggtcatataggcgctggtgtcggtgcaatggtaggcggtgccgctctcactgctgctactttcggcggtgctgcgatattcaataccgtaaccgatcaggcaagcaagatcacagacactaaccgcaaggcaaaggctgtcaacgtaaacactaacgccctgttagctctcaatcagtacggattagaacacggggtagactcatctgtggaacaaagacaagataaccttaaagacgttcaggaacgtttaggcgaaacggtaggtaataccaaatgggacgctaaaaaaggtcgctgggctggcggtaacggtgccgttgataacatccttaataaatatggctggagtcctgaacaggttaaaggtttccagactgatccattaggtttcctgggcgctgtagtgaaagaaggtgaacgccgtggattgtctgatcaggaactgggtcatattttggaggacctgggaaatgacctccaatatttccgtggtgcctttagtcgtaatggtgaagagctaaacaagaccatcgttaagatgcaaaaggccaatgccacctatacacaagcggatcttgacgctgccgaacgtctgcaagctgtgcaagccaatatgaatatggcatgggaaggtagtaagaaagctatcatgactggattcggtgaggagttcgacgctcaggcgggtgaagagtgggcgcaaatgttgaaagacctcaatcctctgtttaaagaactgggaagctcgacggctgaaatgatgagcgcctttgctggggctgtatcgtggcttactgctgcataccagaatataaatccagagaacaaacatgagaatctggactcgtccggtatgtattaccacgattcgtttgtaggcggtatggttgattggggtcgtagtgctttaggcttatcgcctattcctggcacagaagacaagccaacgactggcggaactgcaatccagaactatgtaagcccatctgataacgtgcaatcgctgaaagagaacgttagccgtgatctgaacactaccccatctatgacgtatgccccgaacatcgttgtaaacgtgccggaaagtaaggtggatgtgaatatcgcccctgatggtagtcagcttggatcgtacctcgattacaaagtgggaagtatccagcgagattttgaacgtagtttcacgttggcggctctgtctgggcaagcaccaagttaa

SEQ ID NO: 14899 - DNA, 192 bp, Escherichia coli
atgaacacacaaaacaacaatcccgttgaaatcctgaaagctgtttccaccttaccggaagatattctaaatatctcacaagtatgtaagtttttagggatctctaataccgctgtacgtcaaagaatttttgctacaggctgttccgctatggaagcagtgcaatattacgtatcaaaacagaataaataa

SEQ ID NO: 14900 - DNA, 1029 bp, Escherichia coli
atgattattggtaatgaatccgtcgatctggctccgctgtttagtctgcacgactctcgcaacttcctgttaactactctggacttcactgatccggtaggtgtgagttctcataaagtggctgttagccaactggtggaaactaacgaatctctgttcaacaaagaaacctctcgtttctcttctgaacataacgtgactaaacgtgaacagggtaaagaatttttagtagagatcccctacttcctgcgtgaagatatgattaagccgcaagacgttcaaggcaaacgtaaaccaggcgctaccgttgaagagactctgacagatatctacgcggaatatgttgctaagcaccacattgctttccagcgtactaaagagagcgtgctggctgcttccctgtttagtggtcgcacctacacccctaaaactgatgatgtgctgatccagtggggcgatctgtttagtgctgttccgatgactgcaaccatcgacgcatcaagcaccacaccttcaatggtgttccagcaattcgatcagatgcacactgatattatcgctaaagcacaaagccaggcggctgctgtagaacgtatcgttgtattctgtaaacctgctgctttcaacgctatccgttacagtgctggcatggttaacgctttccagtatgcaagccctaccgatgatgctaacgtcgtttatagtgtgcgctcactgctgccaggtgtgactaccttcactattccaggctctaacatcgacctgatcaaagttactgatccgctgctgctggctcatatgacttctgatgcggtggctgttccgaagttcgctaaaggctctaacgtctatcagaacattttcggcgctccttcttcaacgttcgacctgcttaactctggcgcgactgaatattacagctatgcatttagcccagcacgtaacgacgctgtaaacgtagttactgagaatagccagatggttgttaaccacggtgtaggcttctccgtacagatcacagtagcgtaa

SEQ ID NO: 14901 - DNA, 372 bp, Escherichia coli
atggctattattaatatgagcgatctgtttccagttcgcaaatcatttaccgatatcgtgagctatgcaactgatgagttcggttgtgtgcaatcttttaccgttgatctggcggttgatgtggaatgcggcgatctgattaccagtaacggcgctgaatatgtaagcggcggcgatgttcttgtggttgtgtctgatgcggtatccgctggcgacgctaaaaccgttaacgtgctgcgtagcaatgccggactggtttgcatcaagtctgatgctctgaatgttgaaggcgctattaaagaagctgctctggctgctctggctgctaaaggcttccagatggctggttttaacactgtattcacatcttaa

SEQ ID NO: 14902 - DNA, 216 bp, Escherichia coli
atgcaaaatctcattctaaagaatggtaacgaagaattgattatcactaatgaagcattcaatgctacggcttatatgttggggatcactccaacagaattgaaaaaacattgtgataagctttttaagtctgctgatgaacagaagcctactatgcaggatctgattaaagcaaaagcagaacaaatcaaacaatccaaaaaaggaaactattaa

SEQ ID NO: 14903 - DNA, 213 bp, Escherichia coli
atgacagtaaaaactaaacgtgtgcgcctcctggcactcacagaagaaggcaaagcgggtaattgcttcacagtaggcaagatctacactggcaatctcgacaattacacccgcctgatgcacgtaaccgatgataacggtaacgaacaaacaattgttttagatggtaattgtgtatttggtgattggcagttaacgaacgaaaagaactga

SEQ ID NO: 14904 - DNA, 309 bp, Escherichia coli
atgagcactacacacaacgtaacgcttcagatgtacgatcttattatttctttacagaaagcagttaatgcggctctgacctttccaagcgaactgaccatcacacaggcggttattaatctggaatcgacgcgggaagcactgcaattgcttattgaagcgtgcaaacaatccgaaggtgcacagattgaagctgatgatctgaataacctgattaccgtgatcaatgacaccactgaaatcatgcaacaagcggtagcagacttgcaaccactcatagcacaactaatcgataaggctaacaactaa

SEQ ID NO: 14905 - DNA, 222 bp, Escherichia coli
atgattaacaaagcaattttagagacaaccacttttcacgatctcaagcttctttcagaatgcttcatagatattatcgaacgagcaaaggaagagaacgatctggcaattctggatgacgttatagacagcattgcaacttataaaattccgctcactatcgctatgaagaaagcacgcgaagcacaacaacaattagaacaattagaggaagtggcataa

SEQ ID NO: 14906 - DNA, 393 bp, Escherichia coli
atgagcaagaaaaaaggtaagaaaaacggtaagaaaaacgtaataacaactattggcgaagcatgtgatcagtatgcgttaaacaatcctcgtaaatataactatgagcatgatgcggaaccaggcgaagaattgatcttcatacttgaagaaccaagcccagaattaacagacacagaattatcaatcattcaaagtatgcctggcgtttacttcaatccacgcccacgcaaaacaacaatcattgatagtagtcttcttaaaagatggcaatgtttgggattttcagacatggcccattttagggggtatatggcgcttaatagcctgcaatatgcaggagttcgagaaacagacttacttctacttgataaagtaaacattgacgattaa

SEQ ID NO: 14907 - DNA, 141 bp, Escherichia coli
atgattctgtttgattctgagttttccggtgtggtaggtgagcaatttttatatgctcttctcgatagcctaagtaaacaaggattattgcagtataccaaaactcatatgaaagcattcagaatcgactctgtagcttaa

SEQ ID NO: 14908 - DNA, 258 bp, Escherichia coli
atgaaatacaacctgacattaaacaaacgaacattcgaaattacagaaagcggctacacactggcaaaacagcttgctgatagcaattatgagctacccgcgattatcagctggcaggagttacctcatagtaaagaacacacacagcactggttaaatcacctgagccattttggggtaattaagtatgaggctgtgaatagtcagacgttccgtttgcttgagataagccctttcgaattgtgggtggcgctgtga

SEQ ID NO: 14909 - DNA, 666 bp, Escherichia coli
atgaaccaaaacaccaaaacaattgccgaagcaaaagcgcaatgcctcaataagaaagatagtaaacaaacatatgtagtagttgaacaatggctgaagatgtttaaaaagtggttctcaccgtcaggtaaggaatacaccgcgacacttccagccgttgaaatctacagttacgtagctgggttcaatgaacaagggcaagaatgttacgccaatcaaaaaacattagctaatattggaatggttagtgatcgtcaggtgcgtaatattataaatatgtttattgatatgggtgttctttctgtagaggcacgggacgggcaaacatcactctataaagcattaccctttacagatgcacacatcacaccaccggaagacgtaaaaacctctgtaaacgtagaacagcctgcacctgaaacacaggaaccgttagaagcgacacactctattgagcaggaaacacaggcagaaatcacggaacaatctgatctttttacatggcttatttccatagacagccaaaagcctatgcaagaagaaacagaaaattttataaaacgtgcactgacctcgaagaggataattcttgaagatgatgcttttaatgcactgatgatagccctgagaaaagaaagtgaaatctatgactcaataccattttaa

SEQ ID NO: 14910 - DNA, 177 bp, Escherichia coli
atgaatattaattttgattctgcaacttataacgcgttgttaaatcgtgcaaaggcagaagggaaatcaattccaaaacttgttaatgaattactaattacagtccttacaaaggaggaactaaatgaaccaaaacaccaaaacaattgccgaagcaaaagcgcaatgcctcaataa

SEQ ID NO: 14911 - DNA, 183 bp, Escherichia coli
atgaaatggtatacaccggaacacgtcgtagaggcatttaaaaaaggtgagctaacacgacatcaagtaaggatgaacaggaacacagcgcggcgctgtggttatccagagcgtgaaaaatgctttgacgatgcactaaaaattattgatgaactgcgtaaggcagaagcagagaaagaataa

SEQ ID NO: 14912 - DNA, 579 bp, Escherichia coli
atgaaaggtattagccaagccctcaagaatgtagacgaggtaaaaacagtagcagcagagctacagcgcaatagtaaaaccaacctgttttattgcttatgggtgtttatgtatgaaagcgggttgcgtgtctctgacgtactcaagctaaaatatcaggatgttgaggggcaatctcatttgaagataaagcaggagaaaaccggaaacgtagtaaggccaaaagttacccccgccatgttgtcagtggtggcacaacgcaaggcagagcaaacgaagatgcctgtagctacagattttattttcagtgctggcacattacgcagtaaaggcgaagccgtaacccgtaacacggtattcactgaatttgggaagatgggacgtagagccggattctctaatgtgggatgccatacgccacgtaaaagtcggggccgtgtgatgtttgatgcaggggtagctatagagacaatagcccatttcctgggacagacagatccgcgctctactatgtattacatcgggtatggtcaggatgtgcaggatgatttagcagaggagttttctttagaatggtga

SEQ ID NO: 14913 - DNA, 216 bp, Escherichia coli
atggtgatccaaattaaatgcttatttgttctgacgttggcgctattgcctgccctatcgaatgccggacagataacaatggtcaacccacaggaagaacagacggagaatggaaaaacgctgtgcacgtatcagaacagcaattatctgttcacttacgtaactaaggggaaatgcccttatgcaaagacatttgacacttccgccaaagaataa

SEQ ID NO: 14914 - DNA, 420 bp, Escherichia coli
atgcctgggattttagcaagcacagctactgctgtaggtatcattgacaaagctgtaggtattgcaaagaagctcgctgatgatggcggcgaacttgataaagcaacgcttaaacttgagcttgctaacctcatgagcgaacttgcaagtgtgaagatggaagtaatcacaacccaagcacttctttttgaggctgaacagaaaaataagcagcttgaagatcagctaaaggataagcacaccttcactttcaaagatggactttactggaaagaaggcgatgaaacagcctactgtcccaaatgctttgaagttgataaggtgcaaacacacatggttttttcgcgtgccgttggtcaatactccgcgagttggtattgcattaattgcaaaaacagcatttatccaaaatcccgttaa

SEQ ID NO: 14915 - DNA, 621 bp, Escherichia coli
atgaaaatcccttttaagtcaccggcctttaatgaggaggcattcaattgtccgttttgcatggcatatgctcaacaggattggtctgggttgagagataagtacggagcacttaaagaagtttctctttctaaatgccgcaattgcagccggattgcatattggtatgacaagcgaatgattgtccctcaagcgagtgggattgagcctcctaatacagatatgcctgctgattgtgttgccgattacatggaagcaagaaatattttcaatctttcacctaaaggttctgctgcaatccttcgtctttgcttacaaaaattgatggtgcatctcggtttagagggagacaagatcaatgacgatattgcaactttagttcaaaaaggtttgccagaagagattcaacaagcgttggatatctgtcgtgttgtgggtaataacgcggtgcatcctggtgaaataaacattgatgactctccggaaattgcagcttcactttttggattgataaatttgattgttgaagaaagaatcacacgaccacagaaagtagcgaaaatgtacgcgaatcttcccgcgggagctaaagccgctatcgaaaggagagatgccaaataa

SEQ ID NO: 14916 - DNA, 834 bp, Escherichia coli
atgagcactatcactaaagaacgtatcgaattgttcattaaatacccgcttgaaaacgggcttacccgtggcgaacaaatggaactggcacgaattgcactggcatcactggaacgcgaacagattcgccacgagcatgccaaatggtctgactccacatttggctgcgttggccccattggtccactgaaacacctctcaaaagaggcactggaagccgcagccgaaccagacgatcttagcgagtgggctgatatgcagtttctgttgtgggatgcacaacgccgtgctggcatcagcgatgctgaaattaacgttgctatggaagataaattgaagatcaacatggagcgccagtggcctgagccaaaagatggtgagcctcgcttgcacattaaagaacccggcaactctccggtaattccggatggtttatccacggtatgcgctgaggcttatcaggttgtaggagttatggcagatgcgcttggtgtattcggtgatgcagcagtacagaaagttctggataacctgtcacagcaaaaacttgttcacagagatgtgctgccgttctcgcttccggtaactccggatagttggataagctgtagtgagcgaatgccagaaatgggagagcgacaatgctatgtgttagctgctgactttaaaaacaactacccaccaagcatccccaacactcaggtcggcgtatatggcgactggtttaatgatggcaagcccacttgggatgacggtggtggcgaagacctgtatctcaaggaggtaacccactggatgccgctgccagaaccgccgcaggaggtgaatcaatga

SEQ ID NO: 14917 - DNA, 750 bp, Escherichia coli
gtgagcaagattgactatcaggtactgcgtgaggcggcagagaaagcaactaaaggaagctacatcgtagggcatacatctgttaaccagcacggcaatttaacaggagtttttgtttgccaaaaatggaaaggagaacccggtggcgtgattgcagaatgtcatgttaactgcctgattgaaacagatgctcaggcttatgcaaacgctgaattcatagcagaggctaacccggctaccgtgctggcactgctggatgagaacgaaagcatgtgccgcgacctcattgctcgcaatggtgagattgaagggcttcgaaaactggttgctgaacttgaggagacaaaatcacaactcaacgagcagcgtgagtattacgagggcgttatctcggatggaagtaagcgtattgctgaactggagaaaagcgaagagcaactcattaacgagcgtgaccatgctgagtctgctttagctgatatgtactttgcagcaaccggtaacaggccggagtggagcaactggttcggcttttcagatgctgtcgatgccgtggttgacagaattgctgatttagaagctaaacagccatcgccagtagtgccggaaggactggttaaagctgtgcgcttctatgagcaggtaaaacgtgagaatccgccagccgaaaccggagcatggaaagacgctatttactggatgctaaaagaggcctgccaggttgtaaacattcgcatcaaaggagagtga

SEQ ID NO: 14918 - DNA, 351 bp, Escherichia coli
atgcgcatgaatgttttcgaaatggaagggtttcttcgcgggaaatgtgtaccacgagatctgaaagtgaatgaaacaaatgctgagtatctggtgcgtaaattcgatgaagtacgtgctgaggctcgcaacgagggtattaactataccgcaagccgtcttgctgcggctttcaatcacggatttatcaataagtctttacgtgaagttttcgacgttacacgcatgattctgtcagcgaaagaagagttggctaatgaaccacacccgattgatggcctgtccggtgaatatgcggagaaatccctagaagaatgggcggaacagattcgcaaaggaggcaaccagtga

SEQ ID NO: 14919 - DNA, 174 bp, Escherichia coli
atgctggcaaccgaacgccgcgatctcgggcttgatgatagctctttctggcctgtactggaaggtatcccggcaacagagatgttcaaagtgattccactgtcgccaggccatgcctacgggatgtttatggaacgttttaacgagttatcggagttacgcaaatgcgcatga

SEQ ID NO: 14920 - DNA, 282 bp, Escherichia coli
atgatggagatattctggaccatgctggccagccaggacaggaagcgcattcgtgagtacattgcggagcagaacctgatggccgccattgaactggacgaacggattggttattcagccagcagcctggccgggcagccgtataaaggtcgcaacggtcgtgtggaaggaacccgggaactggttattcacccccattttgttctggtttatgaggtcgacagccagtggggaaaagtgtatgtcctgcgcgtgttgcataccgcacagaagtggccataa

SEQ ID NO: 14921 - DNA, 270 bp, Escherichia coli
atggcacaggttaatatgagtttaagaatcgacgctgaactgaaggatgcttttatggccgctgcaaaaagcatggaccgtaatggctctcagttaattcgggattttatgcgccagaccgttgaacggcagcataatacctggttccgtgaccaggttgcggcaggacgtcagcaactcgagcgcggcgatgtgcttccccatgacatggtcgaatcttctgccgctgcatggcgggatgaaatgagcaggaaggtttccgataaatga

SEQ ID NO: 14922 - DNA, 2826 bp, Escherichia coli
gtgaatgaagtttatgtgattgccggtggtgagtggttgcggaataacctgaacgccattgccgcctttatgggaaccaggacgtgggattccattgaaaaaattgcgctcacattgtctgttctcgcggtggccgtaatgtgggtacagcggcacaacgtgatggatttgctgggctgggtggccgtgtttgtgcttatcagcctgctggttaatgtccgcacatcggtgcagattattgataacagtgacctggtcaaagttcaccgggtggataatgtgccggtcggtctggcgatgccactttcactgacgacccgcatcgggcatgcaatggtggccagttacgagatgatcttcacgcaaccggacagtgtcacctacagcaaaacggggatgctgtttggcgcagaaatggtatcaaaaagcaccgactttttgtcccggcatccggaaatcgccaatattttccaggattatgtgcagaactgcgtgatgggggatatttacctgaaccacaaatacacgctggaggagctgatggcctccgctgatccctacacgctgattttttcccgccccagcccgctgcggggcgtttatgacagcaataataatttcgtaacctgtaaggacgcgtcggtttcgctgaaagacaagctgaatctggacacacagagtggcggaaaaacctggcattattatgcccagcagctatttggtggacgccctgatccgaacctgttgttcagtacgctgattggcgacagttacagttacttctatggctcaagtaaatcagccagccagatcatccgccagaatgttaccatcaatgccctgaaggaggggatcaccagttatgccgctcgtaatggtgattcggccagcctggtgaatctggccaccacctcatcgatggagaagcaacgtctggcacatgtctccatcggccatgtagcgatgcggacactgcccatgacgcagaccatcctgacggggatcgccattggtattttcccgctcctggtactggcggctgtcttcaataaactgacgctgtccgtcctgaaaggctatgtgtttgccctgatgtggctgcagtcatggccaatgttgtacgccattctgaacagtgccatgacattttatgcgaagcagaatggtgcaccggtggtgctctcggaaatttcacagatacagctgaaatactccgatctggcctccactgccgggtatctttccatgatgatcccgccattatcctggatgatggtcaggggactcggggccggattttccagtgtgtacagccatttcgcttcctctgctatcagcccgactgccagtgcggcaggtagtgtggttgacggtaattactcctacggcaacatgcagacggaaaacgtgaacggcttcagctggagcaccaacagcaccacatcgtttggtcagatgatgtaccagaccggcagtggcgcaactgccacacagacccgtgacggtaatatggtgatggatgcgagcggggcgatgtcccggttaccggtcggcatcaatacaacgcgtcagattgcggcggcacaacaggaaatggcccgggaagcatcgaacagagcagaaagtgccctgcatgggttcagcagcagtattgccagtgcctggaacacgctcagtcagtttggttctaaccgggggagcagtgattctgtcaccggtggcgctgacagtacgatgagtgcacaggactccatgatggccagccgtatgcgcagtgcagtggaaagctatgcgaaggcgcataatatcagtaatgagcaggcgacaagagaactggcatcgagaagtacgactgcatcagctggattgtatggtgatgctcatgccggattagatgcaaagcccagcctttttggtgtgcgtgttgatgttggcgctaaggttggtgggcgagccagtattgacggtagtgatctggactcacatgaagccagtagtggcagcagggcttcccatgatgctcgccatgatattgacgctagagccagtaaggactttaaagaggccagcgattactttaccagtcgcaaagtcagtgaatccggcagccatactgacaataatgccgattcccgtgtggaccagctgtctgcagccctgaactcagcaaaacagagttacgaccagtacacgacgaatatgacccgcagccatgaatatgctgaaatggcatcccgtactgaaagcatgagtgggcagatgagtgaagacctatcgcaacagtttgcacagtatgtgatgaaacacgctccgcaggatgcagaagctattctgacaaataccagttcgccggagattgcagaacgccgtcgggcaatggcgtggtcttttgtgcaggaacaggtgcagcctggtgttgataatgcctggcgtgaatcccgtggtgatattggtaaaggaatggagagcgtaccttcgggtggtggcagccaggatattattgctgaccatcagggacatcaggccattattgagcaaagaacgcaggacagtaatatccgaaatgatgtaaaacatcaggttgataatatggtcacagaataccgaggcaatatcggggatactcagagcagcatacatggcgaagaaaatattgtaggaagacagtattctgaactacaaaatcaccataaaacagaagcattatctcagaataataaatatgatgaagagcgagaaagtcaaaagataatacctgagccatcaggagaggctgtgaaagaaatgattgatggtaaaaaggaacgactgaaggggccattatga

SEQ ID NO: 14923 - DNA, 273 bp, Escherichia coli
gtgatcggcttccgcaatgttgatatggcggaactgcgtatccacaccccggctgagcgcatagctatagctgaaggccatcttttccgggtggcttttgcgatattttttcagctcagtcaggctgctgaattccaggacgtctcactcttccccggtgtattttttcttcccggcaacaagaagcgtgtacgacgcgatgttaacgtggatatttcgggtactcatcctgctttctcctctctctggttttcagcccccatcatctgttga

SEQ ID NO: 14924 - DNA, 1047 bp, Escherichia coli
gtgcgagtattacttcgacctgttctggtaccggaactcgggctggtgatcgttaagccgggccgtgaatccatgccggtattccacaatacccgggtactggtggagccggaaccgaaaagcatgcgtaatctgccgtccggggttgttcctgccgttcgccagccgctagtggaagacaaaacattgctgccgtttttcagtaacgcacgggtgattcgtgctgctggtggtgctggtgcattgtctgactggctgttgcgccatattaaatcctgccagtggccacacggcgattatcatcacagcgaaaccgtcattcaccgttatggtaccggcgcaatggtgttgtgctggcactgcgacaaccagctgcgtgaccagacatccgaatcactcgagcaacttgctcatcaaaacctgtcagcatggatgattgacgtcatactccatgcaatgaatggctcgcaggaacgggaattatcgctggctgaattatcctggtgggcggtccgcaatcaggtggcggacgcgctaccggaagcggtattacgtcgttcgctggggttgcgtgcggaaaaaatccgctcaatgtaccgtgaaagcgacatcgtaccgggagagcaggccgccaccagcatactgaagcagcgcacaaaaaatcttgcgccgctgcctcacgcccaccagcaaaacccgccacaggaagagacggtggtcagcattgccgttgatcctgagtctccggaatctttcatgaaacgacctaaacgtcgccgctgggttaacgagaaatacacacgctgggtgaagacacagccgtgtgcgtgttgtggtaagccagccgacgatccccatcacctgattggtcatggtcagggcggaatggggacaaaatctcacgatattttcacgctaccgctgtgtcgggagcatcacaacgagcttcatgcggatcctctggcgttcgaagaaaagcatggttctcaggttgatttaatttttcgttttcttgatcacgcctttgcaactggcgtgcttgggtaa

SEQ ID NO: 14925 - DNA, 375 bp, Escherichia coli; identical to SEQ ID NO: 4955

SEQ ID NO: 14926 - DNA, 198 bp, Escherichia coli; identical to SEQ ID NO: 4957

SEQ ID NO: 14927 - DNA, 1890 bp, Escherichia coli; identical to SEQ ID NO: 5127

SEQ ID NO: 14928 - DNA, 981 bp, Escherichia coli
atgaatattgcaatcatcggcgcgggtcctgccggcatcatttctgcccgtaatgcgattaaagcaggtcactccgtggttctgtttgagaagaatacccgaattggggggatctggaacccttggagtggtggcgcttaccgtaatgcctgtatgcagaactctcgttatacatttcattatactggctttccccctggcgatatcgatgaatttccaggagtggaacaggtattcagatatctttcggccgtggccggagaggatgccctccgtgagtcgatccgactgaatactgaagttgtttcactcagaaaagacgccggacaccgggtgatccgctgcgcttctgaaggaaaagacacggaagacatttttgaccgggtcatcattgcaacaggtgaactctggcaaccccgccggccccccctgccaggtgaggaaaacttctccggaacgttgatcacgtcgagagattatcaggagccagaggcatttaaaggaaaaaatatcctcatcattggcggcggtgtcagcggtgcggatattgcctcagaccttgttccctttgccagaagcgtaagtctgtccgtcaaaaagatgggactttatctgccgagacaattcccgactggcccgaatgacatgatgcactcctatctgggcaggtgtctgctgagccaaatgaattatgaagattttatcggttatctcgacaccatgatgcctgactacatgcaggcctaccgagcatccagtctgttgcccgacatggcgaacaataacgcggtgcatgttaacgaaaaaatcataccgaatgtggccgccggtctgataaaagttaaaccccaggcagagcgtttcaccggagaaggcgctattaagttcgtcgacgcatctcaggaaaaatatgatgtaataataacctgtacaggctatgaaatgcctgattactcgttcattcgtaagcgtacagcctga

SEQ ID NO: 14929 - DNA, 3594 bp, Escherichia coli
atgaagtttttaccctatatttttcttctctgttgtggtctttggtcgaccataagcttcgcagacggagattacatcgaatatcgtggcatcagtagtaacaaccgtgtcacacttgatccactacgtctgagcaacaaggaattacgttggctcgcgagcaaaaaaaatcttgtgattgcagtacacaagtcccaaacagctacgttgttgcataccgattcgcagcaacggattcgtggtattaatgctgattatttaaatcttttaaaaagagcgttaaatatcaaattaacactccgggaatacgcagatcatcaaaaagcaatggacgcgctggaagacggtgaagttgatatagtgttatcacatttagttgcttcgccgcctcttaatgatgacattgctgcaactaatcctctgataattacctttccggcgctggtcactacccttcacgattcaatgcgaccgcttacctcatcaaaaccagtaaatattgctcgagtagcaaattatcccccagacgaggtaattcatcaatcatttccaaaagcaacaattatctcttttacaaatttatatcaggcattagcatccgtctcagccggacagaatgattactttattggtagtaacatcattaccagcagtatgatttcccgttattttactcactccttaaatgtagtgaagtattataactcaccgcgtcaatataactttttattaaccagaaaagattcaatcgttcttaatgaagtactcaatcgatttgttgatgctttaacaaatgaagttcgctatgaagtatcacaaaattggcttgatacaggaaacctggcctttctgaacaaaccattagaactcactgaacatgaaaaacagtggattaagcagcatcccgatttaaaggtgctggaaaatccttactcgccaccctattctatgacagatgaaactggctcagttcggggcgtgatgggtgatattcttaatattattaccttgcaaacaggtttaaatttttctccgatcaccgtttcacataatattcatgctgggacacagcttaaccccggtggatgggatatattgcccgccgctatttatagtgaagatcgagaaaataatgtttcatttgctgaagtcttcataacaacgccttacgtttttgtcatgcaaaaagcgcctgacagtgaacaaacattaaaaaaaggaatgaaagttgccattccatattattatgagcttcattcgcaattaaaagagatgtatccggaggtagagtggataaaagtcgataacgccagcgctgcatttcacaaggtcaaggaaggtgaacttgatgctctggtcgcgacacagttaaattcgcgttacatgatcgaccattactatcctaatgaactttatcattttcttattcccggcgttcagaatgcatcactttcgttcgcttttcctcgcggagaaccggaacttaaggatattattaataaagcactgaatgcaattcccccaagcgaagttctgcgcctgaccgaaaaatggattaaaatgcccaatgtgaccattgacacatgggacctctatagcgagcagttttatattgttacgacattatccgttttattagttggcagtagccttttatggggattctacctgttacgctcagttcgtcgtcgtaaagttattcagggtgatttagaaaaccaaatatcattccggaaagcactctcggactccttaccgaatccaacttatgttgtaaactggcaaggtaatgtcattagtcataatagtgcatttgaacattatttcactgatgattactacaaaaatgcaatgttgccattagaaaacagtgaatccccctttaaagatgttttttctaatacgcatgaagtcacagcagaaacgaaagaaaaccgaacaatatacacacaggtatttgaaattgataatggcatcgagaaaagatgcattaatcactggcataccttatgtaatctgccagcaagcgaacatgctgtttatatttgtggttggcaagatattaccgagacgcgtgatttaattcatgcactcgaagtagagagaaataaagcgatcaatgcaactgtcgcaaaaagccagtttctggcaacaatgagtcacgaaataagaacaccaataagctccattatgggcttcctggaacttctgtcgggttctggtcttagcaaggaacaacgggtggaggcgatttcacttgcctacgccaccggacaatcactcctcggcttaattggtgaaatccttgatgtcgacaaaattgaatcgggtaactatcaacttcaaccacaatgggtcgatatccctactttagtccagaacacttgtcactctttcgctgcgattgctgcaagcaaatcgatcgcattaagttgcagcagtacgcttcctgaacgctacctggttaagatcgaccctcaggcgtttaagcaggtcttatctaatttactgagtaatgctctcaaatttactaccgagggggcagtaaaaattacgacctccctgggtcacattgatgacaaccacgctgttatcaaaatgacgattatggattctggaagtggattatcgcaggaagaacaacaacaactgtttaaacgctatagccaaacaagtgcaggtcgtcagcaaacaggttctggtttaggcttaatgatctgcaaagaattaattaaaaacatgcagggcgatttgtcattagaaagtcatccaggcataggaacgatatttacgatcacaatcccggtagaaattacccaacaagtggcggctgtcgaggcaaaagcagaacaacctataacactacctgaaaagttgagcatattaatcgcggatgatcatccgaccaacaggctattactcaaacgccagctaaatctattaggatatgatgttgatgaagccactgatggtgtgcaagcgctacacaaagtcagtatgcaacattatgatctgcttattactgacgttaatatgccgaatatggatggttttgagttgactcgcaaactccgtgagcaaaattcttccttacccatctgggggcttacagccaacgcacaggctaacgaacgtgaaaaagggttaaattgcggcatgaacttatgtttgttcaaaccgttgactctggatgtactgaaaacacatttaagtcagttacaccaggttgcgcatattgcacctcagtatcgccaccttgatatcgaggccctgaagaataatacggcgaatgatctacaactgatgcaggagattctcatgactttccagcatgaaacgcataaagatctacccgctgcgtttcatgcactagaagctggcgataacagaactttccatcagtgtattcatcgcatccacggtgcggctaacatcctgaatttgcaaaagttgattaatattagccaccagttagaaataacacctgtttcagatgacagtaagcctgaaattcttcagttgctgaactctgtaaaagaacacattgcagagctggaccaggagattactgttttctgtcagcaaaatgactaa

SEQ ID NO: 14930 - DNA, 387 bp, Escherichia coli; identical to SEQ ID NO: 12817

SEQ ID NO: 14931 - DNA, 501 bp, Escherichia coli
atggctgacagtttccagaatgaagttcccaccgctcgtgtaaatatcaagcttgatctgcatacaggcaatgctaaaaagaaagttgaactccccctcaagcttcttgccgtaggcgattacagtaacggaaaagagcaacgtccgctgtccgaacgggacaaggttgatatcaataaaaacaacttcaacagcgtcatggctgagttttcgcctgcggttaatttaacagtagaagatacgctaaacggaaacggtaatgaacaaaatatcgcgcttgaatttaaaagcctgaaggattttgaacccgaacaggtagcaaaaaatattccgcaacttcgtgtattactcgctatgcgcaatttactacgtgacctgaaatccaatctgctggataacgcaacgtttcgccgtgaactggaaaatattctgaaagacccgacgctcagttcagaactgcgtgatgaactggcgaaaattgcgccgcaggagaacgtttaa

SEQ ID NO: 14932 - DNA, 1743 bp, Escherichia coli
atggaaagaaaacagaaaaactcattatttaattatatttattcattaatggatgcaagaggtaaatttttattcttttccatgttattcattacatcattatcatcgataatcatatctatttcaccattgattcttgcaaagattacagatttactgtctggctcattgtcaaattttagttatgaatatctggttttacttgcctgtttatacatgttttgcgttatatctaataaagcaagtgtttttttatttatgatactgcaaagtagtctacgtattaacatgcagaaaaaaatgtcgctaaaatatttgagagaattgtataacgaaaatataactaacttgagtaaaaataatgctggatatacaacgcaaagtcttaaccaggcttcaaatgacatttatattcttgtgagaaatgtttcccagaatatcctgtcacctgttatacaacttatttctactattgttgttgttttatctacgaaggactggttttctgccggtgtgttttttctctatattctggtatttgtaatttttaataccagactgactggcagtttagcgtcactcagaaaacacagcatggatatcactcttaactcttatagtctgttatctgatactgttgataacatgatagcagctaaaaagaataatgcattaagacttatttctgaacgttatgaagatgctctcactcaggaaaacaatgctcagaaaaaatactggttactcagttctaaagttcttttattgaactctttacttgctgtaatattatttggttctgtattcatatataatattttaggtgtgctgaatggtgtagttagtatcggccacttcattatgattacatcatatatcattcttctttcaacgccagtggaaaatataggggcattgctaagtgagatcaggcagtcaatgtctagcctggcaggttttattcaacgtcatgccgagaataaagccacatctccttcaataccttttctcaacatggagcgaaaattaaacctgtccataagagagctttcatttagctatagtgatgataaaaaaatacttaattcagtcagtcttgacctttttaccggaaaaatgtattcattaaccggacccagtggttcaggaaaatccacccttgtaaaaataatatcaggttactataaaaattactttggagacatttatctgaatgatatatccttacgtaatatcagtgatgaggatttgaatgatgctatttactacctaacacaagatgattatatttttatggatacactacgatttaatctccggctcgcaaattacgacgcgtcagaaaatgaaatgtttaaagttcttaaactggcaaatctttctgtcgtcaacaatgaaccagtgagtctggatacacaccttataaacagaggcaataactattcaggagggcaaaaacaacgaatttcgttagcgcgactgtttttgagaaaacctgcaataattattattgatgaagccacatcggctctggattatattaatgaatcagaaattttatcatcaataagaactcattttcctgatgcgttaattataaatattagtcaccgaataaatcttctggagtgttccgattgtgtttatgtattgaatgaaggaaatattgttgcttctggccatttcagggatttgatggtcagcaatgaatacatatcgggactggcttctgttactgaataa

SEQ ID NO: 14933 - DNA, 1542 bp, Escherichia coli
atggaaatatttaatgtcaagttaaatgatacttcaattagaattattttctgtaaaacgctttctgccttccggacagaaaataccatcgttatgctcaaaggaaaagcagtttcaaatggcaaacctgtatccacagaggagattgccagagtagtggaagaaaaaggtgtttcagaagtaatagaaaatttagatggtgttttctgtatcctaatttatcattttaatgatctccttatagggaaaagcattcaatcaggccccgctctattttattgtaaaaagaatatggatatttttgtttcggataaaatttctgatatcaaatttttgaatccagatatgacattcagtctaaatataaaaatggcagaacattatctgtcaggaaatcgaatagcaacccaggaatcactaatcactggcatttacaaagtaaataatggtgagtttataaaatttaataatcagttgaaacctgtgctacttcgtgatgagtttagtattaccaaaaagaacaattcaactatcgacagtatcattgataatattgagatgatgcgggataatagaaaaatagccctattattctccggaggattggattctgcattaatttttcacacacttaaagaatcaggtaacaaattctgcgcttatcattttttttctgatgaatctgatgacagtgaaaagtattttgctaaggaatactgttcaaaatatggagttgattttatatctgttaataaaaacatcaactttaatgaaaaactttatttcaatttaaatcctaatagtccggacgaaatccctttgatatttgaacagacagatgaagaaggtgaaggtcagccccccatagacgatgatttattatatctatgtggtcacggtggagatcatattttcggacaaaatccttcagaactttttggcattgatgcatatcgaagtcatggcttgatgtttatgcataaaaaaatagtagaattttccaatctcaagggaaagagatataaagatatcatattttcaaatatttccgcattcattaatacatccaacggatgttctccagcaaagcaagagcacgtatcagatatgaaacttgcctctgctcagttttttgcaactgattatacaggaaaaattaataaactaactccattcctgcataaaaatattatccagcattatgctggcttaccagtttttagtctatttaaccagcactttgatcgttatcccgttcgttatgaagcgtttcaacgatttggttcagatattttctggaaaaaaaccaaacggtcatcttcacagctaatattcagaattctatccggtaaaaaggatgaactagtgaatacaataaaacagtcaggattaattgaaatattaggcattaaccatattgaattagaaagcattttgtatgaaaatacgactacacgtctgacaacggaactaccatatatacttaacttataccgtctggcaaaattcattcaacttcaatccattgattataaaggttaa

SEQ ID NO: 14934 - DNA, 627 bp, Escherichia coli
atgatccgttactgcttaaccagttatagagaggatcttgttatcctggatataattaatgatagtttcagcatagtgcctgacgcaggtagcttgctaaaagaaagagataaattgcttaaagaattcccacaactatcttacttttttgacagtgaatatcatattggaagtgtttctcgtaatagtgacacttcttttcttgaagaacgctggtttctaccagaacctgacaaaacattatataagtgttctctatttaaacgatttatattattactcaaagtcttttactatagctggaatattgaaaaaaaagggatggcatggattttcataagtaataaaaaagagaataggctatactccttgaatgaagagcatcttatccggaaagaaattagtaatctttccattatctttcatcttaatatttttaaatctgactgtcttacctattcatacgcactaaaaagaattcttaattccagaaatattgatgctcatcttgttattggtgtaaggacacaacctttttatagccactcttgggtggaggttgggggacaagttatcaatgatgctcccaatatgcgggataaattatctgttattgcagagatatag

SEQ ID NO: 14935 - DNA, 177 bp, Escherichia coli
atgattaagcattttcattttaataaactgtcttctggtaaaaaaaataatgttccatctcctgcaaagggggttatacaaataaaaaaatcagcatcgcaactcacaaaaggtggtgcaggacatgtgcctgagtattttgtggggattggtacacctatatctttctatggctga

SEQ ID NO: 14936 - DNA, 510 bp, Escherichia coli
gtgtgtcatccgaatatctactacttccataatctgacgcccggttgggtgtcattcaatggtgaaaaaccggagattgccatcgtaccccagagcctgcaccggctgatttatggccctgacaaacgggccacaccgcccctggatgatgatctgatagtgaatttatgcaccagtgaacatctgctggttcatcatccgatgctggaaggcattctcctgtctgaatgtgaacgtctgaggcagcgttcgctggcaaataaactgatcagcctcttccgtcagtttggtggcacggagttgcgcctcaaactggtctggctttgctggcttgatttaatgaccggaaactgccttgacgactggacggagaatctgaaacggaaatcagaaaaagagctggaggaatggatcatcaaccgtcagaagcagagcgcagcactgacggatctgatggatcagtacgtgctcctggcataccgcacaacggttgacgataagcgcacctga

SEQ ID NO: 14937 - DNA, 1485 bp, Escherichia coli; identical to SEQ ID NO: 10788

SEQ ID NO: 14938 - DNA, 510 bp, Escherichia coli
atggtcgggaagcgctgtcatgagcgcactgaccagcgtatccagttcccagccggtgcgggccgatacggccacaaccggatgtacgggccggaacagacggaataccgcctccgttttctcccgaatgttctgtgcctgtgcgggagaaggctgaatgccggccatatcccattcatggcagggctccgttttgtcggcctgcgtcaccacaaacagcacctgctgatgtccgcactgcaggatgtgtcgccagaaatactcatccacagacagggcacggtcatcggctttaatcagccacagtaccaggtcaagttcaggcagaatgtcacggtacagggcctcatactctgcatccctgtcccggctctcgcccaccccgggcaggtcagtgataaccatgctgtgaccgtggccactcagacggaagcgccgtacttcccgggtgccggcgtgaacatcactgaccggggtgacctccccctgaaacagtgcattacagagtga

SEQ ID NO: 14939 - DNA, 1272 bp, Escherichia coli
atgtttgcactggctgatatcaacagtttctacgcctcatgtgaaaaagttttccgcccggaccttcgcaacgaaccggtcatcgtactcagcaataacgatggctgtgtgatcgcgcgcagcccggaggcaaaagcccttggcatcagaatggggcagccctggtttcaggtgagacaaatgcgcctggagaagaaaatacatgtattttccagcaattatgcgctgtaccacagcatgagccaacgggttatggctgttctggagtcgctttctcccgcagttgagccctactcaattgatgaaatgttcattgatttgcgggggataaatcattgcatctctccggagatttttggtcatcagctcagggaacaggtaaagagctggacaggactcaccatgggggtgggcattgcgcctacaaaaacgctggctaaaagtgcccagtgggcaacaaagcaatggccacagttttccggtgtggtcgcgctgacggcagaaaaccgtaatcggatcttgaagctactggggttgcagccagttggtgaggtctggggagtaggacgcagactgacggaaaagctgaatgcgctgggtattaacacagcactgcagctggcgcaggctaacacggcattcatccggaaaaacttcagcgtcattcttgagcgtacggtacgcgaactcaacggcgagtcctgcatatctctggaagaagcaccgccggcaaaacagcagattgtctgtagtcgcagttttggtgaacgaatcacagacaaagatgccatgcaccaggctgttgttcagtatgcagagcgggccgcagagaaactacgtggggagcgtcagtattgccggcaggtgacgacatttgtacggacatccccctttgcagtaaaagaaccctgttacagcaatgccgctgtggaaaagcttccattgcccacacaggacagccgggacattattgccgcagcatgcagagcgttaaaccatgtctggcgtgaagggtaccgctatatgaaggcaggtgtcatgctggctgatttcacaccatcgggtatagcgcagccgggattatttgatgaaatccagccccgtaaaaacagtgaaaagttaatgaaaacactcgatgaactgaaccagtcgggaaaagggaaagtgtggtttgcggggcgaggaaccgcccctgaatggcaaatgaaacgggaaatgctttctcctgcgtataccaccagatggacagatttgccagtagcccagttatga

SEQ ID NO: 14940 - DNA, 369 bp, Escherichia coli
atggcgaattttaaccctggtccaagaacagccattgcagctgtcagggattccaagaacgatatagaaacctggaagaaaaatggtatccgtagggaagagattgtgactgtgctgaatgaacgttacggcctgaatatctcactggttgcgtttgataaggctctttacagattgagaaaaagtacagatgaaccgtctcttgctgatgtggattctgtgtctgctgcagaaacgaatttctctgaagccagtgggcctgaaaatggtttttttctgtccgagaatgacttcatgcgagcagaagaagaatctcaaagaatggttgagtcattcagagatagccttggcaggaagaaaggattctga

SEQ ID NO: 14941 - DNA, 150 bp, Escherichia coli
atgccatctgaatatgatgaacaactgggttcgactgatacgcagcttcccggcgaatatgacctttttgatttaatggcgcaggttactgaagagaacctgcacgccccggtggattttgggccacctgtcggccgtgaagcgttatag

SEQ ID NO: 14942 - DNA, 675 bp, Escherichia coli
atgagaacaatagtttacgtagatgggttcaatttttatcacggattggtgaagcgttcgggatataagtggttagacctttataagctctttgaagaacaactgcttccgataagagcaagagaatcacagttgattcaggtgaaattctttactgctgagatcaaagcaaagtttgcttctcagggggaattggcgcaccaggctcagcaagcctaccatcgagcattagtacagatctatggtgataagctacagataatcaaaggttattactcagagcgtcaggaatgtgcaatgacctttaatgaagggcagccgccatcaaaaacggatagaacaacggtctggaagttagaagaaaagcagaccgacgttagaatggctttagaaatgtatcgcgatgcgattcgtggtgaggcagaacagttagttctctgcactaacgactcagatatgataccgccaatagaaatgataaaagccgatcggcctgagttaaaaataggaatcgtagtgccaagggaacaagatactagtcgagtgattagtagtctggctagtttaggggattggagcttgccatatgtatcctatgaagccttaaggttagctttattgcctgataaagtccccactaggcggaagccaatactgaagccaaatcactggtaa

SEQ ID NO: 14943 - DNA, 417 bp, Escherichia coli
atgtcagatcaaaaaaataatttagaccttcaaaaacagacacttgaatctaaatgggggaaggaagcattaagcatgggatggtcagccattcctacatcccttttcttcctgcagggcgcactcaatatgacccccacaacattcaatgtgctacttcatctaattattcactggtggaaaccctatgattggccacatccatctcaagagagcatcgcggttagaatgggagtttcatcaagaacagttcaacgctcactccaagaacttgaaaattacggattgcttacaaaaattcgtacaagcaaggataaccctaagtacaaagggcgaaacatttacgatatgtctctattagttaagtcactaaacattctaacgccagacctcaatgccaagctgaacgaaaagtaa

SEQ ID NO: 14944 - DNA, 264 bp, Escherichia coli
atggctgtatacacctctgagactaaacaatttttagacagtgtttcacacgataaaacttggtggacatcacgatataaccctgctgacgatgtacctgtatcaggtatctatcgttgtactgtttgcggaaaagagataaccagcaataaagatgacccgtttccgccgcaaaatcatcatcaacacagccaaagtcaggcaatcaaatggcaattaattgtcaggacagatacgcaaggaaatggttgtggttctaaataa

SEQ ID NO: 14945 - DNA, 372 bp, Escherichia coli; identical to SEQ ID NO: 5344

SEQ ID NO: 14946 - DNA, 381 bp, Escherichia coli
atggtctccactggcagccagtttgtcagccacagactgagtattgtatgcatggataaccggatgcccctgcagcgtcagacgcccgttttcctgggtgaatgtaccggagatatccgcagctccgtccatcaccagagcaccggtaacgccttcaggcaggcgattgtccacattcagattgcctttcagttgtccgtgaaacagataccctgcagtattgaaacggtcagctaccagtttctgtgcatccccctgactgtgccccacaaactcccaggtggcgttgctgctctggtccgtggggaaataaccataggtgctctgcttcaggatgaagtaatccgtcgtatttgtgtacgggttattgtatttatataa

SEQ ID NO: 14947 - DNA, 480 bp, Escherichia coli
atgcaggttatcgcccttaacaccattaacctgccagtttacggacaccccgttgtccacaacaataccggcaccggtccaggtacttccgttagaggttgttactgtgtaattatcacggaacgtcagggaacccgccccctgagaaaccgaatccttaaggttaatctgaccattctgcccctgaaatatcaggttcttaccagcattcaggtcatttccctgctgcccgtgcatggcatatgtggtggttccctgtgtcagcgcaccagctccggtactgctgttaaagctccactccagtgcaccaccttccgatgttctgaacgtgaccggggcatcattgtcttcattaaatttctgcccgataaaatccagtggaataacagcccagttatttcccctgccccccgcgccattccccgcagtaagaacaccgaccagcacccatttattctgaacagtatcaaaagcaaataa

SEQ ID NO: 14948 - DNA, 423 bp, Escherichia coli
atgacgaaagtaaaaagtgttccgttcagccaggtaaagcaaaaactgcttaatactccagaagctgttaaagggtatgaagatgctgacaaagaactggagatggtagaaatgttatacgaaatgagagaaaaagcggggttaacaaagtctgcgctggccgaacgaatgggattacgcccgtcagccatcagccggctggaaagtaatccttatcagactgatatcccgcgcgtttttcttcagcccgtccacattcagccccgctatggcacgccggtataccatccggccgccacacagcacgcattcgagcgggtcacgactcaggaactgtttcaccatttgtgcatagcacacattcgccaccggttctggcatactttatgtgcaggcataacggtgctctccctgaatttgtga

SEQ ID NO: 14949 - DNA, 156 bp, Escherichia coli
atgaaaaaaagaaatttcagcgcagagtttaaacgcgaatccgctcaactggttgttgaccagaactacacggtggcagatgccgccaaagctatggatgttggcctttccacaatgacaagatgggtcaaacaactgcgtgatgagcgtcagtga

SEQ ID NO: 14950 - DNA, 915 bp, Escherichia coli
atgctctcaataaaaaaagtaaccatgctcttggggtgcctagtcctcacctgctcgatagcatttcaggcgagtgcagctgaaaaattcaaggtcattacaacttttaccatcatcgcagatatggccaaaaacgtggctggagatgctgcagaagtctcatccataaccaagcctggtgcagaaattcatgagtatcagcctacccctggcgatattaaacgtgcgcagggggcacaactgattctcgccaatggtatgaatctggaattgtggttccaacgcttttaccagcatctcaatggggttccagaagtaattgtctcttcgggtgtgacgccagtagggatcaccgaagggccctatgagggcaaacctaacccccatgcctggatgtcgccagataatgctctgatttacgtcgataatattcgtgatgcgtttataaaatacgatccggcaaatgcacaaacctaccaacgtaatgccgatacttataaagccaagattacccaaacccttgcccccctgcgtaagcagattgcggaactccctgagaatcagcgatggatggtcaccagtgaaggggctttttcttatctcgcacgcgatttggggctaaaagagctttatctgtggccgattaatgccgatcaacaaggaacaccgcagcaggtacgtaaggttgttgatatagttaagaaaaatcatatcccggcagtctttagcgagagtacgatttccgataaaccagcgcgtcaggttgcgcgtgaaaccggcgcgcactacggtggtgtgctctatgtcgattccctgagcacagaaaacggcccggtacctacgtatatcgaccttctgaaggttactaccagtacgctggtacagggaattaaagccggaaaaagggagaaataa

SEQ ID NO: 14951 - DNA, 360 bp, Escherichia coli; identical to SEQ ID NO: 5306

SEQ ID NO: 14952 - DNA, 432 bp, Escherichia coli; identical to SEQ ID NO: 10632

SEQ ID NO: 14953 - DNA, 186 bp, Escherichia coli; identical to SEQ ID NO: 8659

SEQ ID NO: 14954 - DNA, 411 bp, Escherichia coli
gtgaagcaaacaatattcctccgaactaagcaacaacagcaagctgcaataaatgccatcctcgcaacaccactcgataaagacaagccagtcaccatccgcattactgactacaagcgcaaccttgaccagaacgcaaaatttcacgcgatggtcgcagatatcgctaggcaagttcagtggcgcgataaatggttaaaaccagaacaatggaaggttttgttgatcagcggtcatgcagtggcaacaaaacaggaagctgatgttttgcccgggcttgaaggcgaatacgtcaacattcgcgaaagcagcgcgcagatgagtgtgaagcgtatggcaagtctgatcgagtacacaacagcatgggctattggtcagggtgtcagatttaccgacaggaggtacgaatga

SEQ ID NO: 14955 - DNA, 375 bp, Escherichia coli
gtgccggacagtgaatgcgtttttgccgtagtgctgacccgtggggatgtgcgtcacatagcccaggactggagcctgtcagacgatgagctggaaaccgtcatgcagcggctggacgatgcttttgagcatggtgcggatgtcagcgttgttcacgacgttgttcgtgaactgatggaggaaaagcacgccagccgtcaggtgacagtcccggcggtgatgctggaaaaagtgatggcgctggcaggcagtgaaatgaagcgcctgtatgccgtcgggagtgagaacgggggcgacggtgatgcgttcgtcagggaagaacgcgaagcaatggacgttgtgttacaggcgctggacggggagaacatgtcatga

SEQ ID NO: 14956 - DNA, 195 bp, Escherichia coli
atggaaagagtctttcgcagccttaaaaatgaatggcttccgaaaggtggttatggtgattttatccatgcggtacgtgatataaaccagtggattaatggttattacaacgtttatcgacctcacacgaacaacgatggtttaccgccttgcttacatgaagaaaaatggaaacaggttattccggtgtcctga

SEQ ID NO: 14957 - DNA, 825 bp, Escherichia coli
atgtctcagaacttagacgcaaccgcaattaatcaaatccatgcccttatttctgctcagggtgttaatgaaattatcagtaagattggtgccgacgcagtggcattacctgagaatttccgcattcatgatctggaaaaatttaatttaaatcgcttccgtttccgtggtgcgctttccactgccagcatcgatgactttacccgttattctaaagatcttgcggatgaaggcacccgctgctttatctatgccgataatatgcgtgccgtcagtgtgcttaacctgggtactattgatgagcctggtcacgcagataacaccgccactctcaaactgaaaaagacagcaccgttctctgctctgttgtctgttaacggcgagcgtaactcccaaaagtcactggcagaatggattgaagactgggccgactaccttgtgggctttgatgctaatggtgatgccattcaggcaacaaaagcggctgcggcagtccgtaaaatcacgattgaagcaaaccagaccgctgattttgaagacaatgacttcagcggcaaacgctccctgatggagtctgtcgaagcgaagaccaaagatattatgccagtggcatttgaatttaaatgcgttccgtttgaaggcctgaaagaacgtccgtttaaattacgcctcagcattatcactggcgatcgtcctgtactggttctgcgcattattcagctggaagcagtgcaggaagaaatggctaacgaatttcgtgatctgcttgttgagaaattcaaggacagcaaagtagaaacctttattggtacttttaccgcctga

SEQ ID NO: 14958 - DNA, 258 bp, Escherichia coli
atgcttatcgacctgatggctgcaatgtcgcataaagactggctgagtcgtcgtcaacgacaaaaacagggaattgaacgtgcccatactttaggtaagtatcggggcaaacaggcagatcgggaacgacatcagaaagtaatgtactaccggcagatcaagaaactgcgcatccgtgaaacggcagaggtgacaggctatagtacttcccaagtttgtcgcattcaggcgctctataaagaggttaaacctgattaa

SEQ ID NO: 14959 - DNA, 180 bp, Escherichia coli
atgtcagttttgcaagtgttacatattccggacgagcggcttcgcaaagttgctaaaccggtagaagaagtgaatgcagaaattcagcgtatcgtcgatgatatgttcgagacgatgtacgcagaaaaagtattggcctggcggcaacccaggttgatatccatcaacgtatcattgtaa

SEQ ID NO: 14960 - DNA, 393 bp, Escherichia coli
atgttatataatataccttgtcgaatttatatcctttccactctgtcattatgcatttctgggatagtttctactgcaaccgcaacttcttcagaaacaaaaatcagcaacgaagagacgctcgtcgtgaccacgaatcgttcggcaagcaacctttgggaaagcccggcgactatacaggttattgaccaacaaacattgcagaactccaccaatgcctccatagccgataatttgcaggacatccccggagtagagataacagacaactccttggcaggccgtaaacaaatccgcattcgtggctggatttgcccctatatttccagacatctgttatcacttaacccattacaagcccgctgccgcagatattcccgtggcgagcgataa

SEQ ID NO: 14961 - DNA, 180 bp, Escherichia coli; identical to SEQ ID NO: 14959

SEQ ID NO: 14962 - DNA, 258 bp, Escherichia coli; identical to SEQ ID NO: 14958

SEQ ID NO: 14963 - DNA, 468 bp, Escherichia coli
ttgttctataagttgctcagcaagctcattttcgctgttcttcatcgtgccgaaggctgcagtcgtcagcagatggctggtcagttccatctggcagaccattttgacctgcgggtagagcgccgggttcccggcatgtgtctggcgggggaaggctgcatcgttctctggtgtatccggtgtgcgccagaacacaccatcgatggccagcagggtcaggccgcaccagtgcggatgcggcgtggcgttatgccagagctgcgctgttttcgtgaacacgcggcggacagcctcaattcccagacgctggcgggtctgaataacggcactgggggcaacgaaggggcgattgcccggcagcatgatgtccaggcgattcacaatctggtgaagaggttctttacgctcaagcgccatgccaacaatacaccagaccatcatttcgaggggaagacggcgcttgcgtag

SEQ ID NO: 14964 - DNA, 348 bp, Escherichia coli
gtgtttgaccggatagaggagaagcgtgatgccatgcagtcgctggtcctgccgccaccgacacgccaggcgctggcacaggcggcactgacttaccgttatggtgacgaacatcagcccgtcaccaccgccgacattctgacgccacgacgccgggaggattacggtaaggacctgtggagtacttatcagaccatccaggagaatatgctaaaaggcggaatttccggtcgcagtgccagaggaaaacgtatccacacccgtgccattcacagcatcgacaccggcattaagctcaatcgcgcattgtgggtgatggcagaaacgctactggagagcctgcgctga

SEQ ID NO: 14965 - DNA, 141 bp, Escherichia coli; identical to SEQ ID NO: 6191

SEQ ID NO: 14966 - DNA, 426 bp, Escherichia coli
atgcagtatgcgaaacctgtcactctgaatgttgaagagtgcgaccgtctgttttttctgccttacctgtttggccaggattttctgtatgccgaagcgtctgtgtacgcgctggcgaaaaaaatgatgccggaatatgaaggcggattctggcacttcatccgcctgccggacggtggcggttacatgatgcctgatggcgaccgttttcatctggttaacggtgaaaactggtttgaccgcacggtcagtgccgatgccgcaggcatcattttgacttcccttgtgattaaccgccagttgtggctgtaccacgacagcggggatgcagggctgacacacctgtacaggatgcgtgatgcgcagttgtggagccacatcgaatttcaccctgaatgcaacgcgatttacgcggcgctggactga

SEQ ID NO: 14967 - DNA, 207 bp, Escherichia coli
atggcggagagcatcaatggtctttacaaagcggaggtaatacaccgtaagagctggaaaaaccgtgcagaagtggaactggccacactcacgtgggtggactggtataacaatcgacgattgctggaaaggctgggccatactcctccggcagaagcagaaaaagcttattatgcttccatcggaaacgatgatctggcagcctga

SEQ ID NO: 14968 - DNA, 210 bp, Escherichia coli
atgtcgctgatgccaacgatagatgatagttatttatcagttagtgttcgcgggtgttcgccgtggtgtatctgtctcatttattgctatgattataaaggaaaatttcgtttttcttgttcgcccttgttcgtcgctgtttgcccttgtacgatgcacggtgtagtcaatggtgtagttaattttgatgaccggaaatacgaaacatga

SEQ ID NO: 14969 - DNA, 198 bp, Escherichia coli
atggctgtaagacagcataccccacacctagcgcacacacaaacggcctttgtgtggcgttttctggcactgagtgccggagaatctcaaatcgtccacgtaaccgcctggacagaacgcgaagcgcgtaaccgttgtccgtccggttgtgtcgctgtattcgctgcccgtattcgtcagggggtgtgccatgattaa

SEQ ID NO: 14970 - DNA, 312 bp, Escherichia coli
atgattaacctgtcacttactgaccttaaccgcattcagtttcgtgagaaatttaccgggcagctactggtcaatgtggataaaggccgcgtggtgtgtaattaccacctgccagatgaagcaattgtcgcaacaagggaatcattacaggaactcgcagacaaagcgcataagcacgccaccagcgaaacagaatatgccggggctttcgttcctcactcactggctgttatgcaatttagtgctgatatggcgctgaatgaggcaggcaaaattcttaccgcagatattcaaggggtgcaccatgcatga

SEQ ID NO: 14971 - DNA, 228 bp, Escherichia coli
atgcatgatgaccgttattttaaatcaatgagccatgcagaaaatgcactgactaacagtgaatgcttgcggcaaatattgcttatttggcttgatggtttaagtgatgcgccggaagatgaacgtgaatctaatcttgctggtgcgtttatttcattactcgatacggtaatcgtcgaattaaataaagcgatcgaaattcacgataaaaaaataaacgcggaataa

SEQ ID NO: 14972 - DNA, 288 bp, Escherichia coli
atgaaaaataaaaattctggctttaccgccagcggccccgctcgtcctgaatttatgaacggcgatatttaccgcgataaatatggcggcatggtaacgattaaaggcgtggcagaacggcgcatcacttaccgccgtgatggctacgaatatgactgcgtgatgcctgtttatcagttccggcgtgatttcacgctggtgggccatcgtaaagccgtaaatcagaaacgtgcagcaagctatatccgcaaaatccgtgaaatgctggtcgcagggggtaagaaatga

SEQ ID NO: 14973 - DNA, 1755 bp, Escherichia coli
atgaaactggcaccgaacgtaaaaaaacaaccacgcggaataaaacacaaagacacagaggtaattattttcgcgggtagtgatgcgtgggcacatgcaaaacagtggcaggagcaggacggccccgcatccggcgatgatgtgccgcctgtgtggcttgggccaaatcagcttgccgaacttgatgcgctgaaaattgttccggatgggaaaaaacgcgtaaggctgtaccaggccggagaactggatttagtggagaccaaaaagattggtcagaagctggcggcggcagatattcaggatgcgaatttttaccctgaaggaacgcacggtcaggaggtggaaaactggcgcgaatatctggcccgtgagcgccagaatctttctgatggtctggtgattgagcttccggtaacgcaaaaggcgcaactttcgcagatggcagacagtgagcgcgcactgctgctggctgatcgctttgatggcgtttgtgtgcatccggaaagtgaaatcgtccacgtctggcgcggcggggtatggtgtccggtcagcacaatggaactgagtcgcgaaatggtggcgatttattcagaacataaggccactttcagcaagcgcgtaatcagtaacgccgttgaagcgttaaaagttattgccgaaccaatgggcgagccgtccggtgatttgctgccgttcgccaatggtgcgcttgacctgaaaacgggggaattttccccgcactcgccggagaactggatcaccacgcacaacggtattgaatacacgccgccagtaccaggggagaatatccgcgacaacgcgccaaactttcataaatggcttgatcacgctgccggaaaagatccgggcaagatgatgcgtatatgcgccgcgctatacatgattatggcgaaccggtacgactggcagatgtttattgaggccaccggagacggcgggagcggcaagagcactttcacgcacatagccagccttctggcagggaaacagaacaccgtaagcgctgagatgacatcgcttgatgatgctggtgggcgtgcgcaggttgtcgggagtcggcttattgtcctggcagaccagccgaaatatacaggcgaaggcacgggcatcaagaaaatcacgggcggcgaccccgtggaaattaacccgaaatatgagaagcgtttcacagcggtaatcagggcggttgtgctggcaaccaataataacccgatgatattcaccgaacgggccggaggtgtggcacgtcgtcgcgtgattttccgtttcgacaatatcgtcagtgaggccgaaaaagacagggagctaccggaaaagattgcggctgaaatccccgtcattatccgccgattactggcgaactttgcagaccctgaaaaggcgcgggctttactactggaacagcgtgacggtgatgaagcactggcaataaagcagcagacggatccggttattgaattttgccagttcctgaattttctggaggaagcacgtggcctgatgatgggcggcggtggcgattccgtgaagtacacaaccaggaacagcctttaccgcgtctatctggcgtttatggcgtacgcaggcaggaccaaaccgctaaacgtaaatgattttggcaaagccatgaagcccgccgcaaaagtttacggacatgaatatattacgcggaaagttaagggggtaacgcagactaacgcaataacaaccgacgattgcgacgcatttttataa

SEQ ID NO: 14974 - DNA, 258 bp, Escherichia coli
atgcacacatcaggaaaacttaacaatcagaagaagcaacatagccgccccattgaccttacagagcactggctgagggtggcgataaaaatcatcgaccgcaacgcgggagaaggatacgcgaaagcacatcctgaactgataagcgcattcatgaccacggcggcagcaaactttgccacgctgacagaacgggagattgccgaagcggaacaggtgacaaccatcaacgttaaaaccggagagcagacagcatga

SEQ ID NO: 14975 - DNA, 423 bp, Escherichia coli
atgacagcacagatagcagcttacgggcggctggtggctgacccgcagttaaagaccaccagcaaagggacacaaatgacgatggcgagtatggcggtcccccttccgtgcagccaggcagatgacggacaggcgacgatgtggttatccgtgatagcgtttggcagacaggccgaagcgctggcaaagcaccgcaagggggaactcctgagcgtggctggtaacatgcaggtgaaccagtggacaggccagaacggggaaacgcggcagggctggcaggttatcgcagacagtgtaatcagtgccagaacggcgcgaccaggtggtaaaaaaggccaacaggggcaggccactgacgcactgaacagggcaaaacaacaggcggggaatgatgatccgtacggggataacataccgttttaa

SEQ ID NO: 14976 - DNA, 207 bp, Escherichia coli
gtgaattgtattaacgacctgaacacaggcgaggtaaaaggtggttccgttcatctggatgcgcagaccgttatgcgccttaagcagtacaggatcgaccatataaatcatcatcctaacaaaccattaccaggtgtggcgcagattgtcagacatgccgtaaacacctggcttaatcagaatggttttgcatcggtgggggaataa

SEQ ID NO: 14977 - DNA, 1914 bp, Escherichia coli
atgaatcgctggtacaccattaaggcggcggatgttcgtggagcggcggatatatctatctatgaggagattggcggcttcggtgttactgcaaagcagttcgcggaagacctgaaagcccttggcgatgtttcacatatcaatctgaggatccattcaccaggtggtgatgtgtttgaaggcatcgccatctataacctgctacggaatcatccggcagacattacggtttatatcgatggtgttgcggcttcaatggcttcggtggtcgcaatggctggcgatcgtgtagtgatgccggagaacgccatgatgatgatccataaaccgtgggggatctctggcggaaatgctggcgatatgcgtgattatgctgatttgctggataaggtggaaaccgtgttaatccctgcttatgccagaaaaacgggcaaatcagcacaggaaattaccgccatgctggaggatgaaacctggatggatgggaaagaatgccttaagcacggttttgctgatgaattgttgccatccgtcagagcaatggcgcgaattgaatcgaaacgcacaggagattttttacatatgccggaaaccattaaaggaatgattacaccgccacagggagcggcaaatattgctggtaatgaacagaagcgcatcaatggaataagtgaagtgtttagcctgttcggcagtcgttacgacgggatcaaaatggcgtgtctggaagatgcatcatgtacaccggaaatggcccgtgaaaagctgttgaacgagctggggcgcgagtccacgccatccaataaaaataccccgcctcatatctatgccggaaacggaaacataacaggtgatgcaattcgtcaggggctttattcccgtcttgggtatgaacgccctgaacgaggcaacccttacgcgatgatgagcctttttgaaatggcccaggcatcactggttgatcgtggtatcactgtgagcggttttattaatcgctcgcaggttgttaatgcggcttttacacacagcagcagtgatttttctcatattctggctggtggggctgaaaaatctgtactgaaaggctggcaggacagcggcgaaacgttccagaaatggacgcgtaccggttcgctttcaaactttcatgaagcaaagcgcgttggtctgaatggtttttcaaagctggataaagtaccggaaggtgcggaatataaatacatcaccaccagcgataaaggtgtacctattgcgctggccacgtacgggaatattttttccgttacccgtcaggccattatcaacgatgacctgacccagttaactacaatccccatggcgatgggacgcgcagccgccagaacagttggcaatctggtttatctcctgttaaccagcaacggcaagtttacggatggtaaagcgttattccatgccgatcataaaaatcttattgcgaaggatatggacatggtggggcttgatgaagcccgtaagcggatgcgcctcctggaggatgctaacggcgactccctgaatattacccctgcttttgttctggtccctgccgcgctggaatctgccgcgcgtcgcgccattttgtcatcgtcatcagtctttccggttggtgatgagagcactatcaatcagaaccccggcatcattaacgtggtgaaagatatggcagaagtaattgttgagccacgtcttgataaggccaatagcaaggaatggtatgtagccgcagctaaggggatggacacaatagaagtcgcttatcttgatgggatggatacgccatatcttgaggagcaggtgggctttactgttgatggtgtcgcctggaaagtacgcatagatgcaggtgtcgcggccctcgattatcgcggattactgaaatcgagtggagcatga

SEQ ID NO: 14978 - DNA, 486 bp, Escherichia coli
atggatcgagaactgaaaaatctgatgctgaacattaatcaactggcggcgatagcgggaatatgtcgtcagactgcggcggcaaggctgaaaaatatccagccagccggagggcatgacaagctgaaactctatcgggtgactgacattctgacctgttttcttgatcttcccgttccggcatcactggaagaaatggagccacatgaccgtaaggcctggtatcagtccgaacgtgagcgcctcaagttcgaacaggaaacggcgcaactcatacccgccgatgatgtgcgaaaagagatggctatatggggggaaatcgtaagcgaggaactggcaaaactccccaatattctggcacgtgatgccgggcttaaaccgatggcagtaaacagagtgcagtcaattattgacgatttgcgtaatcagattatcagccggatggtaaaaaatgacgtagtgaatgaggtcgcaaaacaggcatga

SEQ ID NO: 14979 - DNA, 282 bp, Escherichia coli
atgaccgaatctgaaatactgcgattaatccgctgtgctggtggaatcagccagttggctgacgaacaggccgcgcagccggatacagtcaccgctgaaaattacgcgcgtgtggtggctgaggtgatgctccgtgacggtattgagcttaacggcgtggatatgcgcaacatacgaacaagagtccttgagttgctggcataccgtcgccgttctcaacaacggagggagagcgcgaaaaatacttaccagtggaagaggccggagcggttacggcggtaa

SEQ ID NO: 14980 - DNA, 450 bp, Escherichia coli; identical to SEQ ID NO: 11605

SEQ ID NO: 14981 - DNA, 534 bp, Escherichia coli
atgttaaaatcaactttggggattgctattgctttttcattgtgtgctgttgcacatgcagccaatcaagggcaaggtgttgttaattttaaaggaactgtaattgatgcgccatgtggtattgctccggaatcagcagatcagacaattgattttggtcagatttctaaatcgcatttgaaaaacgacggtatctcagtcaagaaagatttagatattaaattggtcaattgtgattttactgatcctacagcgaaaaaaacagtaagtgtcacattctccggtacgcctgttaatggtcatactgatgagcttggtactgctggtgataccggtactgctgttgttgtatccgcctcagatggttctatggttaaatttgatggtacaacatcaagcaatgcaactcagttgcaggatggcgataacacgctgaaatatacgacttgggttaaaaaatccagcgccgcaggtactgaagtcaaagaaggcgatttcactgcagttgctaactttaatctgagttatcagtaa

SEQ ID NO: 14982 - DNA, 981 bp, Escherichia coli
atgtcgattaagaagctcgaaggtggtcaatatgaagtggacgtatggccgcgcggacgtaacggaaaacgtatccgcaggcgatttgagaagaaacaagaagcagttctttttgagcgttatgtattagccaacgccgacaaaaaagaatggctgggcgcgagcgttgaccgccgcaccttaagcgagttgttagatacctggtggctgctatatggacagactcaggaaaatggcgagattgaaaagcggcacctgaataaaacaatcaaggcgcttggtgatccagccgttaaccgactgaacaagcgaatgattgcacagcaccgaagccaacggctggaagacggtatcagcgcagcaacgatcaaccgggatatttaccgtttgtccgggatgttcagcacgttgataaagctggaagagttcagaaaggaaaacccctgtaagggtctggaaccactgaaagaagcgccgccagctatgacttatctcgccaaatcagagatcagcaaattgctggatactctgaccggcgacgatcgacgtgtagcactgctatgcctcagcactggcgcacgctggggtgaagggagcacgctgcgaggtgagcaggttaatcacgggcgtgtgacgttccttaagaccaaaaatgggaaaaagcgcacggttccgatatcggaagaactggagaaagagatcaagaccagcgacaccgggccactgttcaaagttgactatgaaaacttctgcgaacggctcaggttggttaagcctgacttaccacgcgggcaggccacacacgtgcttagacatacttttgcaagctggttcatgatgaacggggggaacattattgcgttacagcaaattctggggcacgccagcatacaacagacgatggtttatgctcaccttgcacctgattacctgcaacacgcagtaacgttaaaccctcttggcggcgggctgacggtgtga

SEQ ID NO: 14983 - DNA, 321 bp, Escherichia coli
atggtagagatccctaccccgtcaagcggcgtgggtgaaaaaatcagagctatcagggatgcggaagggttaacaaggcagcaattctttgaattaactggaatacctgctggcacgcagaagtattacgagacaggaagagtggagagtattggtagcgatatcttgcttaagatcactcagcattcacgtttcgcaaaatacacgctctggcttatgactgataagaccgcccctcaagctggtcaaatcgcaccggccctcgcacacattgggccagagtcaactggatcagaccgctccgagaaacaaactggttaa

SEQ ID NO: 14984 - DNA, 282 bp, Escherichia coli
atgacagagaaagagttagaggggttcattgaagtgcgtcacgccgttgacgcggttccataccctaaatttgccgagttaatcggtaagaagcccgccacggttaagagcatgattgaagacggtaagttgccgatcatcccgtggaagaacccggaaagcctgggcgcccgtgctgagaattggatctatattcctgagttcaatcgtgcaatgcgtgacgcctactacaaccgtccgagagagcagcgcgacgcttggttgctgtggatcggtctttga

SEQ ID NO: 14985 - DNA, 204 bp, Escherichia coli
atgagccagaaaacagccaaccacgaaaaccgggtgcgtgaatgcaacgacattctggacacccatttaaaagatatgcaaacgggattcatgattcgcaccaatagcggcgagtttatgatcagggataaaaagctgattaagaaaataaccaaagacgtggcccgccatgttgatggtgaattgcttaaattgggaatgtga

SEQ ID NO: 14986 - DNA, 207 bp, Escherichia coli
gtggctgtgcaattaatacagttaagtcgtcactcatatttatatcgtggcttcacgattcaaaagtgcccgcgtaatccatttacgtttaagcactcttatcgtatttccagtaatggcgattattacgggcgtgactttgctttagcggaagccatgcgcacggttgatcagatgtataagcaagggggcagcaatgcacgatga

SEQ ID NO: 14987 - DNA, 231 bp, Escherichia coli
atgcacgatgaaggcccatcactggcaagcctgcttaagcatggatgccaggttacacacttcaagaactcacgcggctggctggaaacaccagacgggcaattctttaagcctgagcctagcaaggttcaatttattaagggaatgagtaagccctttgtttatacgaagaagataaacaaaggattactttttaactttgttaatgctttgagaaatttaatcggctaa

SEQ ID NO: 14988 - DNA, 435 bp, Escherichia coli
atgtttaataaactgtttggaaaaaaagtagcagcggcaaaagttgaacttaagaaagtggaaaatcgcgatcttatggaagctattgtcggcggttgtcttttggtatctgccgccgatggcgagatcgaaaaagaagaaaccagcaagctggatcagcttatccgctctaacccgcgccttgcgcatttcggcaatgaaattacatccaccatcaaccgctatacggaacagcttgaagctggcttccgcgttggccgcatgaacattttgcacgaaatagacgacatcaaaaacgatccgaaagaagccgaagaagtcttcgtcaacatgctgactatcgccgaagcggacggccagatcgaaccagaagaacagaaggtgctggaagaggtcgggcgccgtctggggctgcgtgttgaggattatctctga

SEQ ID NO: 14989 - DNA, 183 bp, Escherichia coli
atgctgcgcgtgctggattcactacgtccggcgctggccctgctgttggccttcatggtcgtagcagtggatttcaccagctacctgctttcggtgattggcgacgccttcttcgttggcgctcttcttctccttgtctggcctgccctcaagtcagctaaccaatcagcggatcaccagtaa

SEQ ID NO: 14990 - DNA, 213 bp, Escherichia coli
atgactaaacgcgatcaatataacttcatcctgcacgttctcttacctgctgttgagcgtgaagggctgacgattaaaacccgccgcgatggtgagttaaccctttcttctgacgatccctctgtttcctgctttatcgacgacatgcgccagcgccttaccacggcgttgcagcgtccggctgttccatcttccccttacggagtcctgtaa

SEQ ID NO: 14991 - DNA, 954 bp, Escherichia coli
atgatccgcccgttcatcaaatgggcagggggtaaaacccgtgtccttcctgacctgctgccgcaccttcctacagccgactgcctgatcgaaccgttcgtaggtggcgcatcggtatttctggcgactgagtaccgccgctatgtgctggctgatatcaacccggatcttattaacctgtatcgggaagtcacccgttacccggacttagtgatcgatgcggcccgcgaactgttcaacagcaagaacagcccgcaggggtacaacgaagtccgcgccgcgttcaataagcaggtgggtacggtaaaaagcggtgggttgcgttatggcgctgaaatggcgtgcattatgcgcgctgctcaattcctgtatctgaatcgtcacggttataacggcttatgccgatacagccggaagagcggctttaacgtgccgtttggcaagtataagagcgtctactttcctgaaaatgaaatccgcctctttgccgaaaaggccaacgatacaaaggcaatatttctttgcgcgccgttccagcgttctctacaggtcgtcacgggtggcgatgttctcgtttactgcgatccgccttacctgcctgaaagcaaaacagccgattttacccaataccacaccgaaccattcacggaagacaaccaccgccagttagtccaggcactgctggaagttaaccgtaagcatggcgtgaaggtcgtcatttccaacagcgacaccgaagccacccgcgcgatttatcagcccttcaagatgcacgaaatcagcgtgcaacgttccgtcagcaccgacaaagaaaaccgccagaaggccaaagaagtgatcggcgtgctgcctgtctgcgactgctgcgggcgtcatggtggtggctattgcccagactgcggcccatgcgctggctattccgccgactttggagatcacgccgatgccttctaa

SEQ ID NO: 14992 - DNA, 195 bp, Escherichia coli
atgccttctaactcacatgaatttaatcaaggcgcgctgcacgcactgaacgaaatcaagttgatagcgttggcgttagccacgcacgtgggcgtgatgaatgggcaggaagaggcgcgggcgataaaggccactctcgacggaattgtagatccgcttatcacgaaataccgcaaagcggaggggcagcagtga

SEQ ID NO: 14993 - DNA, 915 bp, Escherichia coli
gtgaccgcctactacaacgaaatcgatccctttgccgcgcaatacctgcgcaacctcattgatgccgggcttatcgcttccggcgttgttgatacccgttccgttgaggatgtaaccccaaatgacattaaaggattctctcaaatccacctgtttgcaggttttggaggctggccccgtgctttgcgcgttgcaggatggccggacgaccgcccagtatggacagcaagttgcccatgccaacctttcagccaggcaggcgaaggaaaacaatttgatgatgagcggcacctatggcccgccgttcattggcttgcaggccagcaacgccctgtcgttatatttggcgaacagtcttcaagcaaagatgcagaagtctggatcgaccttgtacaaactgacatggaaagtttgggctatgccttcggggcgtcggcgtttccgtctgcgggcgtcggtgcgccgcacatccgggagcgtacttactggctggccgactccaaccgcgagcaatacgaagaacgcttatcaggatgccgagaaggtgatcgccaggaagctggctggtcggcagtcgaacttacaggactttgcttgtcttgcgggctggcccacccctgcggcgagggatggaaagggcgggtatcaggggggaaggatgcggcacgggaagctgtcaacggatacgctggatgtgacagcgcagatagcaggcccggcccggttaacggattctggggatctgctgactggcttttctgccgggatggaaagtggaggccagttaaacccggccttaagcctctggttgatggggttccctccagagtgggaaaactacgcgccagcggaaacgccgtaaatatctatgcagccgctactttcttaaaagcctacatggagatcgcgcaatga

SEQ ID NO: 14994 - DNA, 2355 bp, Escherichia coli
atgaccacggcaacccgtggccgtcgcgccccttctccacctccatcgtatccgggtagcactgataatgctatcccttacgcttatggcgggaacaaaccataccagccgattggcgttgatgtagcgccggggctggatggtttcgactatctcacgccggacggcacccgcaagcatattgcgttcagtgaactggtagcggaggacgaaaagccggagcgcagcaagctgctgcgtcgccgtctggcttcccttccgcagtatatccgccgccactttgccgcgaagctggatgcactggacgcgaaagaccgtaaagcggcagatcactggctggttaatacctttgagcgccacgtattaacgcgtattgatagcgtgaacagtgtttaccagcctgacactgtgatgcccggcattctgctaccaatccgcgatcagcttttccgtatgctctgggcagggaagaaagagttaaaaagactggcttatacgcttgccgatatctttacgagcgagtttatacgcgagtccgatcaccagttggcacgcaccggagatcctgagttcgcggcgctttcgggctatggccgtattgcgtcgctggcggtgcatctgaaaacgccgatccccggctggacggcgtattgcaatgaagaactggaagcggaggacgcgttacgcgcggttcttcgccttgagtcaccgcagtggtggttaaaccgcctgcgccgtatccatgccaggtggcgtgagcatttgatgatcgcagcgggatacgtccagaaaaaatcttccccatacagtagcgccccgtgcctcacggaatggctggcccagaaaaaggctaaccgtgaataccttaaggctatggaactggaagaccaggacacgggcgaacgcatttcactgatcgataaagtcgccggtagtgttgccaatccggccaaccgtcgccgcgaactcatgacgagaatgcgcggatttgaagatttggcgaagctggaagggctggccggtgacttctacacgctaacagcaccttcccgttaccactccatgcagcataacgggcgccgcaataataaatactgtggcgcgtcgccgcgcgagacgcagcaatatctttgcaaagtctgggcgagaacccgcgcagcgtggaagagaaaagggatccgcgtctttggtttccgcgtggtcgaaccgcaccacgatgcaacgccacactggcatttacttctttttatgcgcccggaatgcgtcaagcaggcgcgcgaaatcttccgtaaatatgccctgaaagaagacggcaacgaaccgggagcgcaggaaaaccgctttcaggttgtgccgatcgacgatgcccacggcagcgcaaccggctacatagcgaaatacatttcgaagaatatcgacggcttcgcgctggatggtgagaaggacgacgaaaccggggaagacctgaaagaaatgtcactccgcgttagcgcgtgggcatcgcgctgggctattcgtcagtttcagcagatcggcggtgcgccggtcacggtatatcgcgaacttcgccgcctgggcgatcgcgaactggtgctacaccctgaactggaaaccgcccggcaggccgctaacggtggcgaatgggataactacgtattagcccagggtggcccattggttgagcgcgataagctgcgcattcgtctgaattatgaaaccactgagaacggcaacgcctacggcgataacgtccagcgaatcaccggtatttactgcccgattacgggcaatgactctttgatcttcacccgcaccactcaatacaaaatcgtgccgaagcgccagagcgttgacggtgtggccgttgacgttggtttttcaggcggcaacgccgcccctcggagttctgtcaataactgtacgcgggatcccgcgacaagtgcagacggtcttgaacatgccgatcacgaagtgggcgagacggtgaattttgatgctctttcacggcaagaaaaacgggaactggcgcagcgattaagtgacgatgtacgcgccaagcggaaaacgcggccaccggaacgggaagagggagcagggctatcagtcaaagagcagcagatcagtgaactgctggcgctacgtgggattgatgccagcgctggaatggtcagatcgatgatggccggtgcgtcagtggcgtgcggcgatcttgttatgaccgtgcaggacgggcggctggtatcgcgcaaccgcgcagcgtccgggctggataagctaccgtcgcaggtgatggcggcgaagcaaaaaacaagtgatcttgtgaacaggatgaaagcagcattttcgcggaactaa

SEQ ID NO: 14995 - DNA, 999 bp, Escherichia coli
atgacgaaccataatcagatgagtcagatatattctaaattcggccgggccgggtttaatctctcttacatccgcaggttgttgcctgactggtgggatgagaagcttgctgacaccccatcagggcgccagtatgcgtgcctgcaccttgcgcgtatgtttagcattctcccggatagcctgaaagatggtagcgaaggggtatgctttaattttggtggaaaccataaatataaacatcgccaaaatgtagccgagaacgatttagatatcgctactgctgttgcctatactgcggccggtattgtcgcgtctaatttcaaagtcccttacgattccagtgcagtgcttgatcctttggcgataagaacccagattcttactaaggaatcatgggtatcgttagatagcctggtaacatactgtcattcgattggcattcctgttgtttatctaaaatgcttccctcaagctgccaaaaaaatggccgggctggcactaatgagtcacgggcgcccggtgattgttcttactcagcctcagaaatatggctatatgctgtttgatctcgcgcatgagttaggccatatcgccagagggcatctgaacgcagaaaacgggcagtgccatattgatgcaaaaattgagaatgcttcgacggacaacgtagagaaagaagccaacgaattcgctttccaggtcatttcggggcagaagtctttacgtatcgttcctaccgctggcaggttgaatgggcctggcttggctcgcgcggctcaaaagtttggaagtgataatcacattgacccgactcacatcgctttaaattatggtttcgcgcagaactgctggggtgctgctgttaacgctgttaaagcactctgtgctggtgaagactcagatcaggattttgtgagggccatgatgaaaagcgggatggatttagaaaatatccacgaagatgatcttaaggttttagaaaatctaatcggggaataa

SEQ ID NO: 14996 - DNA, 639 bp, Escherichia coli
gtgattgttctttctgacaatgatgtcattttgaagctggcccagtgcaatctgttatcacaactgccagtggtttttaatcaaccccccgaacagatcttcattaaccctgctgctcgttttcagcttctgccgaaaaatcctgataaagcaatcaggaagtgtggtagccaggttgtttacgagcaggtgggagccttcattgaatctgtacaggatatcccggaagttcaggactcacagcttattgagcttttggggagtgtgcccggaattgatgtaggcgaacagctattgcttgcctcgtgcatagagaacccagaagccattttcatgacgggtgatcgccgctgtttgactgcaattgttgcaaaccaaccggccctttccgtgattcatcagcgtttactggatgcagttgttacctttgagtcgtcacttttgttatgtgtccacggtacagatcaggctcaagtttatgaaaatttggtgagcaatcctaaacctgacggcatgttgaaattggctctttcaaacgctggcgctgcaatgtgcgaatgtatcttttcccatactcgtgagttttacgattaccttgccttcaaagatcgacttcctgatcgggagtggggaaggtaa

SEQ ID NO: 14997 - DNA, 915 bp, Escherichia coli
atggagtgcctcgaatgccataacaatggccgctggtatgaaccaccgatcagcccttacgggctggcgcgcatgttcgacgttgccgcctatcaccagtcaccgctgatatttaaacgcaatgttatcgccagttgctacataccacacccgctattgacccggcaggagttcaccgcctgggtgcaggattatttaattttcggtaactgttacatggaatgccgccgcaaccgactcggccagccgattgaactgcggcacagccaggcgaaatatacgcggcgcggcatagacccggctcaattctggtttgttccgcgctacgttgacgatcacgcgttcgaaccgggcagcgtctgccagatcaagaaccccagcccgcaccaggagatctacggcgcgccggaatatctggccgcgctacaaagcgccatgctgaacggtgaagcaacggtgttccgccgcaactactacattaacggaagtcatgcgggtgtgatcgtctacctcaccgacccggtagcgaataataacgatgtggaaaagcttaagaagtcgctgaaagatgcacgtggcaacggtgcttttaaaaacctgtttgtctacgcggcgggcgggaaaaaagacggcctgcaaattatgccgttcagccaggtggcggcgaaggatgagtttaccggcatcaaagacgccacccgagacgacctgttagccgcgcaccgcgtaccgcccgttctgatgggggtaatgccgaataactccggtggcttcggcgacgtagagaaagcggcgaaggttttttccatcaacgaactggccccgatacaagaaagcctgaaagagttaaacgactggctggggatcgacgtggtgcgcttcaacccttacgcactgttgcaggcagcaatctga

SEQ ID NO: 14998 - DNA, 1713 bp, Escherichia coli
atgaatacagccgaagacctcagcacaaaagccaaaagcctctactggcaggcgtttagcatcactcagatttctaaggaaatcggggtgagcattaacacgatctacagttggcgccgccgctatgaatgggataaagccacccccatgcagcgggtgcaggatcgcacgcacgttcgttacttgcgcctggtggaaaaggacgacaaaaccccgaaggacttcaaagaaattgacctgctggcgcgccagcttgaccgcttcgaacggcatgaacgacgcgaccaggagaaagagaagaaggcgaagaccccgaaaaaccatttcaccgaagaacagataacccagcttcgcgccctggtctttgattcgctatacgagcatcaaaaacgctggttcaaacagtggaaccggcgtaaccgctttatcctcaaatcgcgccagattggtgccacctggtactttgcccgcgaagcgctgttgcgtgcgctggaaaccggaaataatcagatattcctgtcagccagccgcgcccaggcgttccagttcaagcggttcattcagaagctggcacaggaaatcggtgtagaactcaaaggcggcgacgccatcgtattgagcaacggcgcaacgctgtactttctcggcacctctgccgcgacggcacagagctacaccggcgatctgtacatggatgaagccttctggatcagcaacttcatcaacctgcgtaaagtcgccgcaggcatggcgacccacaaaggactacgccgcacctacttttcgacaccttccagtgaagaacatgaagcctatcccttctggactggcgatcagttcaataagcaccgttcacgggccgatcgggtggatatcgacaccagttataagacgctcaaaaacggcaagctgggcggggataacatctggcgccagatagtcacgctggaagacgccgtgaagctcggcttcgatctggttgataccgatgaaatccgtaacgaaaactcccccgacgaatacgccaacctttacggctgcatgttcgttaaagccggagaacgcgccttcgactacaacgcaattctgggctgcggcgttgatggctacatgccggacgcatggccggactggaacccgtttgcaccccgcccgctgggtaatcgccctgtctgggttagctatgaccccaacggcagcagcggcaaaggcgacagcgccgggctggttgtgctggccccgccagccgtgccgggtggtaagttccgcgcggttgaacgccaccagttacgcggcatggagtacgaagagcaggccaaatttattaaagagatcaccacccgctacaacgtgcagcacattgctatcgacggcacggggattggcgatgcggtttatcaactggtgatcaagttcttcccgcaggcggttaaatacaactattcaccggttcttaagcggtcgatggtgctcaaaatgttgatggtcattcgtgccgggcgctttgagttcgatgccggaatgatggatctcgcccagtcgtttatgaccgtgcgtaaagtcaccgcaggcggcgttattacctaccagtccgatcgggcccgtggcagcaatcacggcgatctggcatgggcaacgatgcagggcatttacaacgaaccgatcggcgcggaagtgaccggcgataacggcagttttgtggaggagttttaa

SEQ ID NO: 14999 - DNA, 846 bp, Escherichia coli
atgccaatgacaaattttttccgcgccgcagtagagggcgcaacctgtgacggccgagtactggaacgtcagcacatcaccgaaatggccgaacagtacgatccccaggtctatggtgcccgcgtcaatctggagcacattttaggctggtcgccgacaagcgatttccgcgcgtatggtgatgtggtcgagactaaaaccgaagagattgccgaaggcccgttaaagggcaagttggcgcttctggtgaaggtggacgccacggatgaactggtcgaactgaagaagaaacgccagaaaatctaccatagcattgaggtgcatccgtcttttgccgacaccggcaaagcctaccttatggggctggcctgtaccgataacccggcaagcctgggcaccgaaatgatgaagttttgcacccagaacgccagcgccaacccactggccgcgcgtcactacgcacctgaatgcttcttcactgaaaccctggaatcatccctcgaatttgcgcaggaagagccgccagcgtccgacaccgggaagaatttcttttcccgtatcaaggaaatgctgaccggaacccgccagcacttcgatcgtgaaaatggcgatattcgccaggcggttgaactggtagcagaaagccagggtgaattgctggacaaggtggaaaaactgagcgcagggcagcttaagaataagcagaccgccgaagcggtggagaagttgcgctctgagttcgacgagatgaaagcgcagctttctacccaggacgccagcaaataccgccgtccggaagcgaccggcgcaactgaaaaatctaacgcccagcttgctgattgctga

SEQ ID NO: 15000 - DNA, 1047 bp, Escherichia coli
atgcgtaattctacccgtgaattgtttgatgcgtatcttgagcgacaggccgaactcaaccacatcaacaaatcccacgtaacaaaggcgttcagcattgatccgagcgttgagcagacgcttgaagacaaggtgcagcagtcttccgaaatgttgaagaagattaatatctacggcgttaacgatcagtccggtgaaaaaatcggtctgggtgtgagcgggccgatctccagcaccaacaattccactaccgatcgccgccagcctgtttccgtcacggcgctggattcgaacaagtacacctgtaataaggtgaacgcggatactttcgcctcttatgcgcagcttgatgcctgggctaaattcccggatttccagcagcgactgagcaatcagatcattcagcgtattgcgcttgatcgcatcatgatcggctttaacggaaccagctacgcggataagtccgaccgcaacgctaacccgcttttgcaggattgtggtatcggctggctgcaacagtaccgcgcaaacgcgccgcaacgtgtcatgaaagatatcaccgtgaccagccgcgacgattccaaccaggtgattgctaaaggtgattacggtaactacgactcgctggtttatgacgcggttaactcactgatggacgaatggtacaaagattcgcccaatctggtggtgatcaccggtcgtaatctgacggttagccgttcgttcccgatcatcaacgccgtcagcaccaataacccgaactccgaagcactggccggtcagttgatcgcatcgcgtaagacgatcggcaacctgccttcgtttatcgcgcctttcttccctgatggcagcatgtttatcacttcgtgggaaaacctgtcgatttactggcaggaaggtgcgcaccgccgccgcattgtggaagagccggaatacaaccgcgtctctacctacagttcgtcaaatgatgcctatgttgttgaagattacggcttcggctgtctgatcgaaggcattaccgccgccgaaccagcaccggcaccataa

SEQ ID NO: 15001 - DNA, 849 bp, Escherichia coli
atgttgacacctgctcaacaacattttaatcgcgtgatggctgaacgccgccacgccagccgtgagccgtcgcagcttgaaatgacggcatacgaaaccatgcttcaccgcctgcgactggataaagcccgtttgagccgtgtccagtcccagaaggctaaagcggatttaaaacgcgaactgctgccggactatcagccgtggattgaaggcgtacttacggcagattccggccagtctgacgacgtgttaaccaccgtcatgatctggtgttgtgactgcggaaacatcgccgaagctctgcgcattggtcagtacgtattgcgccataagttaccgatgccggatcagtatcgccgcaccaccgccaccgtactggtggaagaaatttgcgatccagtcctggctgcattcaaagctaacccggctgttgcgccggtcgccgctgacctgctggaagcgttacggggcttaaccctgaacgaagatatgccggatgaggtgcgctcaaagctgcttaaggcgctggggtatacgctgcgcctgacggacaacgttgaatcgctgaccgctgcggttgaatacctgcgccaggcggcagtattgaacccgaaaaaagcaggcgtaacccgtgatattgagcttctgcaacgtgcgcttaagaagtccggacaacctgctgacggtgacggcgaagacggcaagccagaagcaaacagcaccgaaacccagacggcaaagccgccagcccagccaaaagcgaagcgggaaaccaaaaagcctgcggctaaaagcaaaccggcagcgaagaaaagaaccacgacagcccgccagaaggcggcgtcataa

SEQ ID NO: 15002 - DNA, 489 bp, Escherichia coli
atgagtctggtagccactgagccagtacggccaccatccgatccagtgcctgatgatggcggcgcgaaggtcgaaagcctgccattctggccggtcattttgctggctgaactacgccgcgcgatgcgtcttgatgggcaggtgacaaccgatcgcctgatgtcgcgaacggtggaagcggtggcccatgttaatgatcagcttttcctgtggcgtcaggtgcagattgatgcgggctatgagtcattggcagaaattccggccagtccggtgaatggcacttccgtgaaggtatggcgatataaaaacgccgtgtattcactcactaaggcgctgttgattgaaggctaccgcgatattgacaccaccagtaaaggcgaagaccacgcggcggcattgagcacgcagatcgatacgctgtggcgggatgtgcgctggtcaatccgtgatatccaggacgaaagccggggtctggcggagttggtgtaa

SEQ ID NO: 15003 - DNA, 201 bp, Escherichia coli
atgaacgttcaggcgcagcaaaacgacacgatcgacctgctttgctggcgctattacggcagaacagcaggcgttaccgaggcggtgatcgatgccaataagggcatttccgccgccactgagttgcaggccgggcagattgtctacctgccagagatccagccgccagcccagcgggaaaccgtgcagctatgggattaa

SEQ ID NO: 15004 - DNA, 336 bp, Escherichia coli
atgcacgacacaccaccgggattactcgaacaaacaatgaaatggatcgctacttatctgccgacactgtttgcggctggtgcggcgctgagtatttcggcgctaatgagcctttacgatgggcagtctttgcttaaaaccgccaccggatcgctggtatgtgggattgtcacgcttgctgtggccggttcgctggaatatctggggcttccgtccaacgcagtaacattcgtgggcgcctcaatcggatttatgggcgcggataaagtccgcaacaaagttaccgggtttatcgaaaaccgaatcggagggatgaaaggtggagatgagcaataa

SEQ ID NO: 15005 - DNA, 441 bp, Escherichia coli
gtggagatgagcaataacggcatcaacatgctgaaaggctttgaagggtgcaggctggccgcttatcaggattctgtaggcgtctggacgatcggttatggatggactcaacccgtcaacggtgtgccggttggcaagggtatgaccattacgcaggaaactgccgatagcctgttgcgtagcggtctggtgcagtatgaaaaaggcgttacggggctggttaaagtcaccatcaatcaaaatcagttcgatgcgctggttgattttgcctacaacctgggcgtaaaggcgctggaaggttccacactgctgaaaaagctgaatgctggggattacgccggggctgcggctgagtttccgaaatggaataaagcaggcgggaaggtgttgccggggctggttaagcgtcgggaagccgagcgcacgttatttctggcctga

SEQ ID NO: 15006 - DNA, 534 bp, Escherichia coli
atggggctgttgtcacgctggaaagtgatcgtttgttttgtgctggccgctgctgctgtatggggttttagccactggcgttacagcgccggttacggtgatgccgataagcactggcgtggagagtgggcacagcgggatgcacgcgacgccaccgcgctggcgaaaaggcaggcagaggccaggacagaagaacaacgccgacaaggtgaaattgatgcgatcagaaaacaagccagtcagcagcttgctggcgtgcaggctgatgccgatcgtgcccgtgctgcttctcgtgggctgcacgacagggccgacaaactcgccaggcaactggcagaccgtgaacgcgcctgcggtgccggaacttccggcagaagcgaggcagaaaccagcggcgccgtactgctcgccgacctgttccgccgcgctgacgatcgagcggggcaactggcaaaagatgctgatgaagcaagagccagaggattagcctgtgaggctgcgtatgatgcggttaagtccgggagggagaagtaa

SEQ ID NO: 15007 - DNA, 495 bp, Escherichia coli
atgcttaaacccgatttgctgcgccagatgataagccagcatgtgccctggctgcgcgagaatcccgataatctggcggtttacctgcgtaaaggccgtatggtcagcaccggccagcgtgctgctgcgtttgagtatcgctatacgctggaagtgctggtgatggattttcctgaatctctggatactatcagcgtgccggtgctggcatgggcgcgcttatatcagcctgatctgttgtttaacccggacaggcagcagaacggcataacatttgaagccgatattctgagtaacagcacgatggacgtgctgatccagattcaggctgatgaagcggtgatcgtcacccgtgaagatggcgagatcgtcacccgtcaccgtgctgaccctgcaccggggccagaaattggcgcgtggtcactggtatttgttgatgaggtcagcggcgaaacatggcaggacaacaaaccgatcccctcttccagcagttag

SEQ ID NO: 15008 - DNA, 645 bp, Escherichia coli
atggcaggacaacaaaccgatcccctcttccagcagttagacgacttgctagccagtgtggccgcgcagctttcgccggggcaccgtcgcaagctgacgcgcgacgttgcgatcgggctgcgtaagcgccagcaaaagcgtatcgccagccagaagaaccccagcggtgaaagctatcaggcccgccgccgcaaaatcctgcgcacccagggcgggataaagttcatatggaatgatgaggccagggagttacgcaactggcgaaccacgggcaggggtgagcaccgagcaatcaccggctatgacgttgatcgcggcgccctgcgcacgttctataagcgcgatatccagcgctatattgaaatcaatctcaaccagtccaggcagaaccgcaccagaaaggatccgatgttccgcaagctgcgcaccgcacgctttcttaaggcttacggtacgggcggcatggctgtggttggctttcaggggcataccgccgaaattgccagcgttcaccagtacggtgaagtcgataacgtggtgccgggtgcccgtgcacgctacccggtgcgtgaactcctgggcatgaccgagggggatttagactggctggccgatactgttgtcgccttcatgcaagagatttga

SEQ ID NO: 15009 - DNA, 630 bp, Escherichia coli
atgaatttaaacgaactctatcgccttatctgcaatctcgcccgcattggcaccgtgctggaagtggatacggaaaagtaccttgcgcgcgtcgaaacaggcgagaacaaaaccgactggatccgctgggcagtgccgcgcgccggtgaagccgtgacgtggtgggcgccgacagtgggcgaacaggtttatattttgtgcccctgcggtgagatggaaacggcattcattgccggaagcctttacagcgaagacgcaccgccgccagatgctggcgctaccacctgcgtgatcctgcacccggatggcgcccgtatctcatatgacccggaggccagcgcgctggttgtcagcggggtgaaaacggcaagcgtcaccgcgtcggaatccattaccgccaccgtgccggtggtaacggtcaaggcagatacgcgcgttaccctggacacgccggaagtggtctgcaccaacaagctgatcaccgccacgctggaagtacaaaacggcggggaaatgaagggcaatattactcattcaggcggatcgctttcgtctaatggtgtcgttgtccattcgcacaaacatagcggcgttcagtccggtggtagtaatacaggtggcccggtatga

SEQ ID NO: 15010 - DNA, 363 bp, Escherichia coli
atgagtacagtccgttacagcggcatgaatgccagttcaggctatgccatcaccgacaacgagcatatagcgcagtctatcggcgatattctgttaacgccgatcggttcccgtgtaatgcgccgcgcttacggttcgcagcttttcaacctgatagatcagccggtcgataacgccataacgaagctgcgcgttatgtctgccatctacagcgccctgtatttatgggaaccgcggatctctctgaccagtatcaccctgagcgcgccgggtgccggtcggctggttgccactatccaggccaaccgcaccgataatcagacgccatttaacgccgatattacattgaggggccaggcatga

SEQ ID NO: 15011 - DNA, 912 bp, Escherichia coli
atgagcggcacgatcgatttatcgcagctaccgccgcccgtggtggttgaaccgctggacttcgaaacgcttttcgcgcagcgcaaggccgcgtttattgcgatgtacccggaagatgaacaggaagagatcgcccgcacgcttgagcttgaatcggagccgatcaccatgctgctggaagagaattgctatcgcgaattgctgttgcgccagcgggtgaatgaagcagcccgcgcggtaatgctggcttattccacggatagcgatttggataatctggcggtcaatttcaacgttgaacgtctgaccattcaggaagaagacgacagcgttaccccgccaattgaagctgtgatggagtcagacgcggatttacgcacgcgtacccagcaggcttttgaaggtctgagcgtggccgggccaacggctgcatatgagttttggggccgttcggctgacgggcgcgtagccgatatttcggcggtcagtcctacgcctgcctgcgtcaccatttcggtactgtcgcgcgagggtgacggaacggccagcgatgatctgctttccgtggtcgctgccgccctgaacgatgaagaggtgcgcccggtggctgacagggtaacggtacagtctgcggagatcgtgccgtatcagattgatgcgacgctttacatctaccctgggccggaagccgaacccgtccggcaggcatcggaacagcagttacaggcgtatattgccgcgcagaatcgcttagggcgcgatatccgtctttctgctatctacgccgccttgcacgttgaaggcgtccagcgcgttgaactggcgcagcctgttgcggatatcgtgctgagtgactaccaggcatcgcactgcaccgaatacaccataacggtggggggttacgatgagtaa

SEQ ID NO: 15012 - DNA, 615 bp, Escherichia coli
atgagtaatgacctgttaccacccagcgccagccgaatggagcgagtcgccgcgcgcgtctgcgcgtcgttgggtgaagtgcccgtgccattgcgccagttgtggaacccgtggacgtgtcgggccgatctgctgccatatctggcgtgggccttctccgttgatcgctgggatgaggcctggccgatcagcacgaaacgaaaggctgtggccgatgcgttctatctgcataagtacaaaggtacaacgggcgccatgcgccgggttgttgagccgttcggcttcttcatccgggttaacgagtggtggaacattgataccgcaccgggcaccttcacgctggatattggcgtggaagaccagggcattagtgaagaaacctatcaggagcttgaacgcctgatcgccgatgtgaagccgtgcagccgtcatatgctgggaatgtctcttcacctgcaaacaaccggcgatctgtatatcggcgcgggcagttattccggcgatacgctgaccgtgtacccgtatttccctgaaaccatagccgtgggcggtgatgattacaccggggcggcaatccatttaattgacaccgtggagatcgcaagtggtgactaa

SEQ ID NO: 15013 - DNA, 1029 bp, Escherichia coli
gtggtgactaaatattatgccgtgctaaccaatgtgggcgcggcgaaactggcaaatgccacggcattgggtgcgcaggttgagatcacccagatggctgtaggcgatggtaacggtgcattgccgacgccgaacccggcacaaacggcgctgattcatgagctgcgacgcgcaccgctcaataccctaagcattgatccgaacaacgccaaccagattattgccgaacaggtgatccccgaagacgtgggcgggtggtggatccgtgaaatcggcttattcgataaagacggcgatatgattgccgtagccaactgcgcggaaacctataaaccgcagttacaggagggaagcggacgcgtgcaggtagtgcgcatgatcctgattgtcagcagtaccgccgccgtaacgctgaaaatagacccttcggtagtgctggcaacccgccagtatgttgatgatcagataatccaggtgaaggcctatgctgatcagcaactggcggcgcatgttgctgcggctgatccacatacgcaatatttgcttgagtcggatattgataaatatatccctgtgggtttcccgcttccgtggccgcaggcaaccccgccagagggatggttaaagtgtaacggcgctacatttgataaagccaaatatccgaagctggcgacggcatacacttcaggtactttaccagatttacgcggtgagtttttacgcggatgggatgatgggcgaggtgtagattcaggacgtgcattaatggcatggcagaaagggacactggtaggtgggagggatgataatgatactgggctggatatttcgtatatgagtaacggcaccaccgttgattatggcggcgataagatcctttctgcgagttatcaaagtgactatctctggtatatggatttaggcactgtaactaatgctcaacgcagaaccgcagttctcaaggatggattctttaatgtaacccgtccgcgaaatattgcatttaactacatagtgagagccgcataa

SEQ ID NO: 15014 - DNA, 597 bp, Escherichia coli
atggcaaaggcaaaattaaacagtgaatttattgctactgtggccggtgatattaccgtgtttaacttcgagggtgagacgcgcgaatacctttcttcatccgttgaatatctggccgtaggcgtcggtcttcccgcaaactcttgtactgacgcaccaggtaaaactaaagccggttcggccatttgccggacagccgatttgaccgcctgggaatacgtcgccgatcaccgtggtgaaacggtatacagtactgaaacaggcgaatccttgatcgtttctttgcctggcgattacccggaaaataccaccaccctggcacctgctacgccatatgatacgtggaacggtagcgagtgggtgacggataccgaagcgcagcacgcggcggacgtggaagcggcggagcaacagaaaacagcgttattgagtgaggcgcaggcaacgatcagtctctggcagacggagctacagttaggcattatcagcgatgaagataaaaccagcctgatcgcctggatgaactacatcaaagccgtgcaggcggtggacacgtcaaaagcgccggatatcatctggccggataagccggaataa

SEQ ID NO: 15015 - DNA, 450 bp, Escherichia coli
atgatgatgattctggggatgttccccttttcactgcaaaccacgccttaccagagtgcgaataaaaccaactcctggcggcacgtcaaaaacgatcgcgtggggaaatccccgcgctatcagttcatcggcgcagatgaagaacctttcgtacttagcggcacgctgtaccccgaaataagtggcggtgatgtgtcgcttgtcatgctggaaactatggccttttccgggcgaccgtggcccctgatagaaggtacgggcaggatctacggcatgtatgtgattgagcagatcacgcaaaaccggacggagttttttaaggacgggaaggcaaagaaaattgattttacgctgaacctgaaacgggtaagcgaggacatacgggaaaagctggccgaaactaccaccgacgatctcttctctctggtgaaaaccaacctttcgatataa

SEQ ID NO: 15016 - DNA, 2934 bp, Escherichia coli
atggcagaccgcaatttaaatatcagggtggcattcagcgccctgaataatatgtcccgccctgtcaacgcggcgcgccagagtgccgccgcgttggcatctcaaatcaatcagaccaaaaccagcattaaagggcttgagcgtcaggcaaccagctttgaccgcctcaccgcagccaataaaaaaaccaccgaacaactggcccaggcgaaagaacaggcccggcaaatggcggcggcttatggcccgttacgccagcgtagcgccgaacaggttgccgctctcaatcagcaacgtgcagccattcgccagttaacccagcagcagaaaggcgagcagacgcagcttaaccagttgcgcgccagcttctacagcgaaggcattgcgatcagcagtgccagccgggcgacggaacagatcaaccagcgcaccgcgcaatacaatcgccagcttgccgaacagcagcgacggcttgacgctgttaaccaggcgcaggcccgttacagccgcgccaaagaaaccggcgaaaagatgatgagcgggggaatgaaaaccgccgcagtaggggcggcaaccctcgcacctgtcgccgctgcggtgaaatcctacagcagccttgaagacgcgatgaagggcgtagccaaacaggtaaacggcttgcgtgacgacagcggcaaccgcaccccgcaatatgaagaaatgcagcgggcgatcatggatgccagcgaaaagctgccaatggctaacggtgctgttgactatgccgccctggtcgaaggcggcgcgcgtatgggcgttgcaaacagcgatgatccgtgggaaaaacaaaaagccgatctgctggctttcgccagcatggcggcaaaagcttcggtagcctttgaactgcccgccgatcagctttctgaaagcctgggtaaaattgccgggctgtataaaatccctacccagaatattgaacagttgggcgacgccataaactacctggacgataacgcgaagtcgaaaggctccgatattatcgacgtgctccagcgcgttggcgggcttgccagccaactggattacaagcaagccgccgcgctgggttccacctttctgacgcttggatcacctgccgaagttgccgccagcgcaaccaatgcaatggtgcgcgaactatcgattgccacagtacaaagcgataaatttttgggtgcgctggatgaaatcggcgtcaatgctgaaaaagtccagaaaagcatgtcagtggacgcgatgggcacgattatttcagtgctcgaagcctctaaaaaacttgcaccagataagcaggtagccaaccttacccagattttcggtaaagagttcggggatgatgcgcagaaacttgccaacaacctgccagaactgcgccgccagatagaactgacgcagggcgcagccgctaaaggttccatgaaccgggaatctgatattaataaagcttccctttccgctcagtggcaattgaccaaaaccggcgcggttaacgcattcagttcagcaggggaaacgctccgcgaaccgctgatggatatcatgcttaccgtcagtaaggtgattggcagcgtccgccgctgggttgaggcaaaccctgcgctggttggctcaatcatgaaagtcaccgcagccataggcgcgttgctggttgtcgtgggtggtctgatgctgtctatcggcgcagtgctgggcccgatggcgcttgttcgcctcagcttcaccacgctggccggggaaggaggaatagcacggctgactggcggagtaatgcgcctgggtggtgcgttccagtggcttgctggctcgcctatgcaggcattattaagcgccggtcgcatggtattcggcccgcttatcacgctactggctggcatttctgcgcccgtatgggggctgattgcgctctttgcggcagcagcagtggccgtcattaaattctgggaaccaatacaggcatttttcactggtttctttaacggtatcatgacgggcttgcaacctgtatttgatgctttcaacgctgttttcgctccattagccccaatctttgacgcgataggctccgctattagcggcgtttgggattggtttacaaaattgcttgaaccgatcaaattttccagcgatgcgttagaaacttgcactactgttggcgaaacatttgggagggttctgggtactgcaataagcggtttgctttggccgctacaaaaattgatggagggtgtcggctgggtactggagaaacttgatctaattcctgctgggcttgatgcagcaaacgccaaagcaaatagccttaaaaaagatcccgttgtctgggagtgggatccgcaacaaaagaaaatggttaaaaaggattggaactggtcgccagataaaccaaaccagcctaaaccgccaaaaccgccaataacacctaagccagttggtatcccagaccttatgggatcgccgaacttaaccccgaagatgagcaagagtctggataaaatcgcagacaacacgggaaaaatggcagcaaaagacgggcccggcgaaatcgtcttcaagaataagcagccttatatcccgatccggggcggatattcggaaccgcttaagcaggcgcagcgccagctaccatcccttacggattgggtgacgcagcaggccggatctctgatcgcttccgttacgccgtggcaggttgagaagcccgccgcacgggtgcccgtttcggcgtcgccgtctgcggcctccgtcgctgcgctgatgcccgcgccgggtggcgatgtatataaccttagcttcgactttagcggccagaaactggatgaagaaaccattatcaggcgcgtgcgcgaagaacttgcgttagcgaagcagcaggccgaccggcgcaagcgctcccaactgatcgatcacgtctaa

SEQ ID NO: 15017 - DNA, 336 bp, Escherichia coli
atgagcaagaccaaagaaaacaccgttattcttaccgcccctattacgcgcggtaagaccaaaatcaccgaggtggcgatcacttccgtgcttaaacaggctggatcactgcgtggtttaaaagcctatgacgtgttgacgtccaactatgacgcgctggttattcttctgccccgcgttaccgctccggcattaactgccgatgagattgccagaatggatacctgggatttttgccagctagccaacgcggtggttgattttttgcaaccctcttcggatctgaacgagacggatacgggcaacgaatcatccgatgcccctgcgaacgcatag

SEQ ID NO: 15018 - DNA, 516 bp, Escherichia coli
atggcactgcctaagaaacttaaatatttcaatatgttttttgacggtgataactacttcggcatggtgccggaaattacccccgccaaactcaccaaaaaaaccgaagactaccaggcgggcggtatgccgggttcggttgcggtggatctgggcttcgacgctggcgccctggatatggatatcacgcttggcggtctggatgccggattgcttaaaaaatggggcgttaccactgctgacgggatgcaaacacgttttgctggctcctatcaggacgatgcgaccggcgacgctgtaccgtgcgaaatccagacgcgtggccgcttcactgaactggatcccggttcggcaaaagtcggggatgacacttcgcataagtacaccctgaaaaacacctattacaagctgaccatcaacggcgaagagattatcgaagttgatgtgctcaacatgatctacaaagttgccggtgtggatgtgctggaaaaacaccgcgctaacatcggcttataa

SEQ ID NO: 15019 - DNA, 1194 bp, Escherichia coli
atggccactaactaccatcgcggtgtaaccgtcacggaaaccaccgaccttagcacgatgatcaccgacattgattcggcggtgatcggtgttgtctgcaccgctgatgatgcggacgaaacagcgttcccgctggatacccctgtactgatcacccgcgtggctaacatgctgggcaaggcaggtaaaaccggcaccctgtttaccaccctgaaagcgatttcagaccagaccagcccgcaaaccattgtgatccgcgttgctgatgctgcaaatatcgaaccgccagaaggcggcaccgctccaacacaggatcaactggttattggcggcaccgatgcaaacggacgctttaccggcatgtacgcgctgctgtctgccgaaatgcgcgtaggcgtgcgcccacgtgtgctggctgttcccggtcttgatacggaagcggtggccgcacaactcggcgtcattgccgaaaagctgcgcgcgtttgcttacgtggcagcgaacggctgcaacaccatcgccgaagtgaaggaataccgcgaacagttctcccagcgtgaaatgatggttatctggcctaatttcatctgctacgacatcaacgccggggcgaatgctaccgtgcccgtgggtgcccatgcggttgggatgcgcgccaaaatcgacgcaacgcagggctggcataaaaccatttccaacgtgcccgttaataacgtgctggggatggatcgggatatctatttcacgttgcagggcaccgataccgacgccgacgaactgaacgcagcaggcgttaccacgctgatcaagcaggacggctaccgcatctggggatcgcgtacctgcgacgcagaaacgtatatcttcgaaagctatacccgaaccgcgcagatcgttgcggataccgtcgccgaagcccatttcgcctatgttgataaaccgcttaccccgtcgctggttaaggacattgtggacggcatcaataagaagctgacctcatacgtgacggctggcaagctgctgggcgcccgctgctggtatgacccggaaccgaatacctcggaaaccctgcgcaatggtcaactgaccattaagtacaactacacccctgttccaccgctggaaaatctcagcctggtacaggagtttaccgacgaatatttcgctacgttttccagcgcagtgaataactaa

SEQ ID NO: 15020 - DNA, 1119 bp, Escherichia coli
atggacacgacagaaaaccgatattcgccgcgtccggcgttcagtattgaaattgaaggtaatcagcttacggcgctggataaccggctgatctctctttccctgactgataaccggggctttgaagcggacacgctggatctgactctggatgatgcagacgggcaggtagcattaccaccacgcggtgcaaagatatcggtggcgctgggctgggataatgatccgttggtttttaagggcgtctatacggttgatgagatcggacacgctggcccgcctgaccagctaacgatcagtgccagaagcgcggatttccgcgataccttcaacgtgaagagggaatatagctggcacgatattaccgtgggggatgtggtcgccagcattgccagtcgctacgatctgcgtgcgggcgtcagcgaagaactggcgaagattgagatagaccacgccgatcagacgagtgaatcagatatcagcttcttaacgcgcatggccgaaatgctgggcgcggtggcaaccattaaaaacggtatgcttctgtttatcacgccgggcaagggagtgacgcagagcggcaagccgctgccggtgatcgagatagtccggtcaagcggtgataaacatagctttaacgtagctgaccgcgacgcgtacacgggcgtaactgcatactggcttgatctcaactttggcaagaaaccatccactaccgtcaagaaaacaacccgcaggcgccgaaccagccaggccaaaaagaaagagcctgcatccagcaaaaaagagggggattatctggccggggcagaaggtaacgtttttgttatccgtaaaaccttcaagacggaaaaggcggcaaagcgtgccgctgcggctaagtggcgggagttgcagcgtggagcggcgacgttcagcatcaccctggcgcgtggccgaacagatttgtacccggaacagcccgccagcgtctgtggctttaagtccacgatcgacagtgggaactggacgataacgcggtgcgttcacgatattggcgggggagggtttaccacgtcgctggaactggaagtaaaaatcgacgactggacagcggagagtgacgattcaacgtcttaa

SEQ ID NO: 15021 - DNA, 243 bp, Escherichia coli
atggcaatgcgctgtcctcgctgccgtgcaatagcaaaaaccagaaccagcgttgagctgagtttgcttgtacggcgcagctatcaccagtgtcaaaatatgttgtgcgggtactgtttcaccagcatgacggaaatagacggttcactaaaccagacccagccagcgcccggcgcgatggtgccacaagaagcttttccacgaagtcaccacggcgaagatcagttgtcgctggcattataa

SEQ ID NO: 15022 - DNA, 648 bp, Escherichia coli
atggaaacaatcatcaccgttatcgctgctgttgctgggatcgctttttgggttgggctaatcaatcccaaatgggtttttatgccaaatcgaaagcgttcatctgctatctacttcggggtgtgcctcttggcagcaatcataggttcaatggttgcaccagtcgcgccgaaagctgttgctgataataagcctcaaccagcagtgacaaccacagatcaaacacaacctgcggctaaatccaaagagcaattaacaaccactatcgacttttcagaagcgaccaatcaacttcccccggctttatctaaggcgctcggtaagttgaacctcacagttaagcccgtcatttacaacaaagctttagtggttgcattcaattttgacagcatagaagaattacaggcgacaagcgccgtccagtccgtatgtctcagctacttcaatcatggggaatctaacagggcatggaaggctagtttattcgatcatatttatgtgactaacgacattttaaccaaaggctacgtttttcaaggtggcgaatcttcgtgtgatatctggggcaagaaggctggggatagtggcgatcaatatttaagtgaaaaccttacacgatcaaggtttgtagccataaatatgaaatga

SEQ ID NO: 15023 - DNA, 342 bp, Escherichia coli
atgacaaggataaaaataaacgcacgccgtatcttcagcttattgattccttttttctttttcacttctgttcacgctgaacaaacggctgctcccgcaacacctgtaactgtggaagcgaagaatgaaacctttgccccgcagcatcccgatcaatatctctcctggaaagctacctcggaacagtcagagcgtgttgacgccctggcggaagatccacggctggtgatcctgtgggcagggtatcccttctcgcgcgattacaacaagccgcgtggacatgcctttgctgtgaccgatgtgcgtgaaaccctgcgtaccggtgcgccgaaaaaacgctga

SEQ ID NO: 15024 - DNA, 690 bp, Escherichia coli
gtggctaattttcagctaagtatgctctgtctggcaattacgctagttatctattttcttaacaaacgcctttatcgccgctttcgtaaattgccattgatgcctctggtgctgacgcctacgctactggttatgctgctggtttttggcaatatttcctggcaaaactatattggcgaagcgcactggttactatggctattaggtccggccaccatcgcctttgcggtaccagtgtatgacaatcgggcgatcattaagcgtcactggatgtcgttgacggcaggcgtactgacggcaacggtggtggcagtgaccagctcagtgtggctggcgcgattgtttaccctgccagatgagatccagcgtagcctggcggtgcgttcggtcactacgccatttgctttggcagcgagccagtcgctcggcggacagcctgatctggtggcgctgtttgtggtggtcaccggtgtgtttggcatggcgattggcgacgtgttgtttttacgtctctctattcgcgaagggatggcgaaaggtgctggattcggcgcggcatctcatggtgccgggactgcgcggtcgtatgaactgggtcaacaagaaggcgtagttgcaagcctggtcatgatgctttcaggtgtattgatggtattggtttcgccgctggtggccaggatgatgttctga

SEQ ID NO: 15025 - DNA, 153 bp, Escherichia coli
atgccttcgatgatagcgataattttactcatcatccttcacatctggctctgtaggcagggtggtgatcacttctggagtgaatccagattaaacatctcattgctgatgcttgaagttgagcatatggcgcgcggtaaggggctgcgttga

SEQ ID NO: 15026 - DNA, 468 bp, Escherichia coli
atgagcagagtaaccgcgattatctccgctctggttatctgcatcatcgtctgcctgtcatgggctgttaatcattaccgtgataacgcaatcgcctacaaagagcagcgcgataaaaaagtcagtgagctgaagcaggcgaccgccaccattactgacatgcagcaacgccagcgtgctgctgatgcactcgatgctaaatacacgaaggagttagctgatgcgaaagctgaaaatgatgctcttcggcgcaagcttgataatggtggcagggtgctcgtcaaaggaaaatgccctgtgccatcctcagccgaaacctccggcgcctccggcatgggcaatgatgccaccgtcgaactctctccagttgctggacgaaacgttctcggtgtccgggacggaattatccgcgaccaaacagcactgagaacgcttcaggaatacatcaggacgcaatgccttcgatga

SEQ ID NO: 15027 - DNA, 243 bp, Escherichia coli
atggtggagcgttgttctgtttgtgagcagtcattaagttattcacgagaagttgaacaagatggcgttgaatataaatcttgcccaaaatgttctgctgatgccggagtgcacgttttttataaaacaatagactttggttatagggatatgggagacggaaggcatatcgttcagtcatggtgtccggcttgtcgttctggtgaaaaaccgtctataccaccagcatttaaatgttgttaa

SEQ ID NO: 15028 - DNA, 198 bp, Escherichia coli
atgaaatcattaaccacggaaaccgcactggatattctgattgcgtggctgcaggacaatatcgactgcgaatcggggattatcttcgacaacgatgaggataaaacggattcggcagcactgctgccctgtattgaacaggccagggaagatatccgtaccctgcaccagttgcagtttctgcaacagaactggtga

SEQ ID NO: 15029 - DNA, 825 bp, Escherichia coli; identical to SEQ ID NO: 11800

SEQ ID NO: 15030 - DNA, 1569 bp, Escherichia coli
atgcttggcagacaacaaattgcaggtatacctactgccttgagtgagttatttaaaaatgctcatgatgcctatgctgataatgtcgaagttgatttttttaggaaagaaaatcttcttatcttgagagatgatggattaggtatgacaaccgatgaatttgaagagaggtggttgactattggaacctccagcaaattaatcgacgatgatgcaattaataaaccagcagtggatagtaataaagcctttcgccctatcatgggagagaaaggaataggccgtttatctatcgcagcaattggaccacaggtgctggttcttactagggccaaaagagacaatgagcttaagccattagttgctgcatttgttaattggagtttatttgctataccatcacttgatcttgatgatatagaaataccaattagaactattatcaacgacgaatgcttcactaaaaaaactcttgatgagatgattgagcaagcaagaaataatttagactctttatcacacaaaatatcaaaatcaaaagtatcacaaataaatacacaattatcatcttttgaatttgatcctattctatgggaaaaaaaattaggtgggctaagactatctggagatgggcatggaactcacttcataataatgcctaccgaagaaatattaatagatgacatttccacgagcgatagcaataaaacatcagagcagtcttctcgcttagaaaaagctttattaggttttacaaacacaatgtacagtgattcaaaccctcctattatagctcgttttagagactatctggaagatggtgagtgcattgacagaattagcgaatcaattttttttacaccgcaagaattcaatcttgcagatcaccacattgaaggatggttcaatgaatttggtcaattcagtggaactgtttctgtttatggtgaagagccaattcatcatgtcgtgacttggaaaaataataatcaattaacccaatgcggtccatttaaaataaaattagcgtatattcatggtcggcttcgtgattcacgcttacccatggagttgtgggcccctctgaaggagaaaacagatagatatggtggtttatatatctatcgagatggattaagaattttgccctatggagattcagatacggattttctaaaaatagaaaagagaagaacgttatccgcttctgaatattttttctcatatcgacgtttgtttggagcaatagaattaacaaaagaaaacaatgcttcattagttgaaaaagctgggcgagaaggattcattgaaaataagccatataaacagtttaaagaaatgcttgaaaatttcttcatcgaaatcgcaagagatttctttaaggacgatggcgatatgtctgaattatttgttgagacaaagcaacgtagaaatgaagaacatgatttgttatctaaaagatctaaacaaactaaagctaaaaaagatagattaaagaaagatctgtatgatttttttgataagttagataactgtctcttatacacatctccgagcccacgagactaa

SEQ ID NO: 15031 - DNA, 144 bp, Escherichia coli
atgacggtgtcccatgtggtgcatttgcatggtattcagcccagtctgttgtttagtggaaaaaacaataccaggaaggaagtctcactgctgttgctgccggagaggatgttgttcctgcctcagaactggctgccgctataa

SEQ ID NO: 15032 - DNA, 426 bp, Escherichia coli
atgaacggtataaaaacggggctggggatgacgccgggtgaacacattatcagtgccgactctgcgctcagcagaaatatccggcagtgtttctgcctttcctgtcgtggccggttgattttgcagacagatgctcagggggcgtggtttgagcatgatttacatgccctgagcgcgcaacagaaggcggcctgcgtggtgctgaatccggaaaagtcccacccttacattgaggatatggcgatgtttttatcgccattaccggtcgtgctggagtggcattgtgtgatgtgtgagcagttttttcatgggaagaaattctgtgaggcctgtggtacggggatttattgcagagcggtatgtacgaagtctgtttacagctaccagccagacttgtttcaggactgcggaggtgcgagtacttaa

SEQ ID NO: 15033 - DNA, 675 bp, Escherichia coli
atgagagcatataaatttaggtcggcttctcaaatagcatttaccctagatataatttttaatcgtaggcttttttgctctgactggaaaatgttgaatgacccaatggaagggatgtttgttttctctcatcaaacatctgatggttacgactataaaaaagaaattcagcagataatagaagaaaagaaacggcttaaggtttgttctctttcagctacatatgagtctcatttactttgggctcactatgctgggggggttgatggttgcgctatcgaaattgaaatcccagacaatcatcacagtattaaacaaattgaatatagaggtgtatttgcaaatttagcaatgcccaatatttatagtcctgatgaacttgctaaccaagttttatcctctaaatatcgagaatgggaatacgaacaggaagttaggattttgcaaacgaatgagtggttttacttagataaaccagttcgacgagtaatagcagggcatagaatgccttcggcattatttgaagccatgaatataatatgcaactcgatggggattgaattttgccgtactggaattggtgatgaggggattgatgccgattatgttgagccctcaaaaattctaacgccgaataatcatcttgactgggatgtactaaaaaatgaccgatga

SEQ ID NO: 15034 - DNA, 627 bp, Escherichia coli
atgaggcggttttgtactgtactggttttgttaagtatggcttatttcattataggtggtttatttgcgtatttaaataaattggaactgccaatttatttaaatgggatggctattgtaggttttgtaatgactattgtttgcatctattcattgtcgaagcctgctattacacagtcagatttagaacagcttgaggccacttcattagagtccataactaagactattagtgagttaaaatccctaaaaacgaataaaaactcaactcaagaagaaatcttagatcttgagaaaaaaagaaaggaaatggagcttttagtaaagaaagccagtatggcattgtttttccgtgagcaacttaattaccatgaaagacgtatactttcagaaataaagggaagtgaaaccctcaaccatagtttgtcagagataaaagaaataaaaggcaaacttaaggcattggatgaagaaattgcatgtgatccagaagttgagtttctgcgttcaatacttttggaagcaagcaggcgaacgccaacactcgatgagctaacagagggtatgccatttatatttagaattatggctcgctcaacacagttaatacttgggaataagatataa

SEQ ID NO: 15035 - DNA, 528 bp, Escherichia coli
atggcagttcgtggaattaacaaggtcattcttgtcggtcgtctgggaaaagatccggaagtccgttacatccccaacgggggcgcagtggcaaacctgcaggtcgccacgtcagaaacctggcgcgacaaacagacgggggaaatgaaggaacagacggaatggcaccgcgtggtgctgttcggcaagctcgcggaagtggcaggtgaatatctgcgtaagggcgcgcaggtctacatcgaggggcaactccgtacccgtagctgggaagataacggtattacccgttacgtcactgaaatccttgtgaaaaccacgggcaccatgcagatgctggggagtgcaccacagcagaacgctcaggtgcaaccgcagcctcagcagaacggccagccacagagtgctgacgcaacgaaaaaagggagcgcgaaaacgaaaggccgtggacgtaaggctgcgcagccggagcctcagccgcaaccgccggagggtgaggattactggttttcagacgatatcccgttctga

SEQ ID NO: 15036 - DNA, 198 bp, Escherichia coli
atgacccgcctgcaggacgagctgcgcacggaatctgtccgcgctcaggcccgtgagcagtttaccggtgcggtggacaggatatttgacacagcggagagcgtctgtgttgcctctgttgcacgcacggttctgcgtgccgtccgtgacacagtgggctctgttgcccgcgcggtatggaactggatcttcttctga

SEQ ID NO: 15037 - DNA, 198 bp, Escherichia coli
atgacccgcctgcaggacgagctgcgcacggaatctgtccggtctcaggcccgtgaacagtttaccggtgcggtggaccggatatttgacacagcggagagcgtctgtattgcctctgttgcacgcacggttctgcgtgccgtccgtgactcggtggtctctgttgcccgcgctgtatggaactggattttcttctga

SEQ ID NO: 15038 - DNA, 477 bp, Escherichia coli
atgcagcagctttcctttctgcccggagaaatgacaaccagagagcgcagcctcattcagcgggccctgaaagccctggaccgccatcttcatgaacccggcgtggccttcacctccacccgtgcggcacgggaatggctgattctgaacatggcgggactggagcgggaagagttccgggtgctgtatctgaataaccagaatcagctgattgccggtgaaaccctcttcaccggcaccatcaaccgcacggaagttcatccccgggaggtgattaaacgcgccctgtaccacaatgccgctgccgtggtgctggcacacaatcacccgtccggtgaagtcacacccagcaaggcagaccgccttatcacggaacgtctggtacaggcactggccctggtggatatccgggtaccggaccatctgatagttggtggcagtcaggttttctcttttgcggaacacggcctgctttaa

SEQ ID NO: 15039 - DNA, 1752 bp, Escherichia coli; identical to SEQ ID NO: 11847

SEQ ID NO: 15040 - DNA, 435 bp, Escherichia coli
atgaaaaaaaataagaaactctgtctcatttcaattaactcatataatgaacttaccggaggaggagtatatttacgtacgcttgttagttttctacaaaaacagaatgttaatttaacacttattgataaaaaatcctcaggtaaactattcgaagacaatacttttcaacatatatcatttattaaaggtaaacgtcaggatataatatccaggcttttttttataccatcattttatgtcccttatattttctcaataattaaaattttacggaagcaagatattcttgcttttcacaactctcggcttggattgttatgtctgctttttagaatactcatgccccacaaaaagatcatattgtttacggataacttcgaatatgacttaataagacaaaaagataaaaacctgtctcttatacacatctga

SEQ ID NO: 15041 - DNA, 282 bp, Escherichia coli
gtgcgtaaagtctggcgtcagttgttacgggaaggaatcagggtagccagatgtacagtggcgcgcctcatggcggttatgggacttgccggtgttctccggggtaaaaaggtccgcactaccgtcagccggaaagccgttgccgcaggcgaccgcgtaaaccgtcagtttgtggcagaacgtcctgaccagttgtgggtggctgattttacttacggtgtgcccggagttcagggcgggcatggatgcttaaatgaaccgcgagtctgtctggaatattga

SEQ ID NO: 15042 - DNA, 231 bp, Escherichia coli
atggttcttttcgaagcaatgattctagataaacctataatatcaactgacattactggttctagaagtgctcttgaagggcgttctggtgtattagttgaaaatagtgtagacggtctcttcaacggaatgcgggactttatcttgggaaggttggagtttaaacattttgacattgaatcttatcaaaaaaatgctttgtcgatgttttatgaaaaatgccttcattaa

SEQ ID NO: 15043 - DNA, 231 bp, Escherichia coli; identical to SEQ ID NO: 15042

SEQ ID NO: 15044 - DNA, 585 bp, Escherichia coli
atgctgttccacgcggttaatcgcctcaacgggttgcgccagtttgctgttgatctcaccgcttgccggaaacgctgccatccggtcgcgcaccagttcgcccagcgtttttcctttcaggcacaccagttcggcgaccagcagccacgggatcatgccgctgtcgcagtaagcgaaatcacggaagtaatggtgggcgctcatttcgccaccgtagatggcgtcttccttgcgcatacgttctttaataaaggcgtgtccggttttcgacatcaccggcgtgccgcccgcggccgtcaccacatcaatggtgttccaggagagacgtggatcgtggatgatcttcgcgccgggatttttttcgaggaacgcttctgccagcaggccgacaatgtagtagccctcaataaactgccctttttcgtcaaacaggaaacagcggtcaaaatcgccatcaaaggcaatgcccatatccgcgccgtgtttgatgaccgcattgcgggtgtcgtcgcgacattccggcagcaacgggttaggaataccgttggggaaattgccgtccggcgtgttgtgcactttgattaa

SEQ ID NO: 15045 - DNA, 312 bp, Escherichia coli
atgggagttgagcagaataatttcaggcacatgctgaccggttatctgtccggcccgtcgcagacgcagcatatgtttggtatattcccggcggctctggtcgcgcacacgggtctggcaggcgaagaacggctgaaagccttcccgctgcagattttccaggacggtgatggtgggaatgtacgcataccgttcactgcgggaggtgtgccggtcttccgcaaaaatactcgggacgtggtacatcagttcttcgcgtgtcagcgggcgctcccggcggatctgatttacataaccaaaacggctggctaa

SEQ ID NO: 15046 - DNA, 654 bp, Escherichia coli
atgtacagggatgatgtacatttttaccgcaagggtaaacccaattactgggtacctaaccttaatctgaaaccagaaaataacattacccgtgagattggcgcaggtattcaactggacggcctgcttacaggcaatgatcggctgcagttgaaaggcggatatttcggaacggatgccagaaactatattgccacgcgcgtggatatgaaacggatgcgttcttattcttataatgtatcccgggcccgtatctggggatgggatatgcagggaaattaccagtctgattattttgactggatgctttcttataaccgcacggaaagtatggatgccagcagcagggaatggctgggctccggcaatcctgacacactcatcagtgacataagtatacctgttggtcatggaggagtttctgccggatggcgtgctgaactttcggcagcagccacgcatgtgaaaaaaggcgatccccatcaggctggctatgccgtacattccttttcactgtcttataagcctgtaagtgttaaaggctttgaggcatcagtgactctggataatgccttcaacaagcttgccatgaatggcaaaggagtgccgctttcaggcagaactgtcagtctttatacccgttatcagtggtaa

SEQ ID NO: 15047 - DNA, 438 bp, Escherichia coli
atgcgttcttattcttataatgtatcccgggcccgtatctggggatgggatatgcagggaaattaccagtctgattattttgactggatgctttcttataaccgcacggaaagtatggatgccagcagcagggaatggctgggctccggcaatcctgacacactcatcagtgacataagtatacctgttggtcatggaggagtttctgccggatggcgtgctgaactttcggcagcagccacgcatgtgaaaaaaggcgatccccatcaggctggctatgccgtacattccttttcactgtcttataagcctgtaagtgttaaaggctttgaggcatcagtgactctggataatgccttcaacaagcttgccatgaatggcaaaggagtgccgctttcaggcagaactgtcagtctttatacccgttatcagtggtaa

SEQ ID NO: 15048 - DNA, 489 bp, Escherichia coli
atgaaactggccctgacgctggaagccgacagcattaacgtgcaggcactgaacatggggcgcattgtcgttgacgtcgatggtgttactctcgctgaactgattaacgtggtctgcgataacggttactcccttcgtgttgttgatgaatctgaccggacatcagcagagcgcacgccaccatctgcggcccttaccggcatacgctgcagtaccgcacatatcacggaaaaggataacgcctggctgtactcgctgtcacaccagaccagtgacttcggtgaatcagaatggattcatttcacaggtagcggatatctgttacgtaccgatgcgtggtcatatccggttctgcggcttaaacgcctggggctgtcaaaaacgttccgtcgtctggttgtcacactcatccaacgttatggcgtcagtctcattcatctggatgccagcgctgaatgtctgccggacctgcccactttcgactggtaa

SEQ ID NO: 15049 - DNA, 324 bp, Escherichia coli; identical to SEQ ID NO: 10084

SEQ ID NO: 15050 - DNA, 222 bp, Escherichia coli
atgaaaatcatcacccgtggtgaagccatgcgtattcaccgtcagcatcctgcatcccgtctttttccgttctgtaccggtaaataccgctggcacggtagcacggatacatataccggccgtgaagtacaggatattcccggtgtgctggctgtgtttgctgaacgccgtaaggacagttttggcccgtatgtccggctgatgagcgtcaccctgaactga

SEQ ID NO: 15051 - DNA, 657 bp, Escherichia coli
atgaccagtcaactcatccccgtattcaacggcactatatctaacgaaacagccctactttgtaatgcccgcgatctgcacgcttttttaggtgttaaaaaggtgtttgcagcatggattacaaatcgcatatcagaatacgaattcattgaaaatcaagactatattttgctttccaatttgggaaagcaaacatctggtagaggcggccacaaccgcaaagagtaccacctcacccttgatacagccaaagagctggcgatggtcgagcgtaacgaaaaaggtcgccaggtgcgacgctacttcattgaatgcgagaaacgtttaagacaacaagaaacaaaagtggagaaggtcttgtcaggcttcatgcccgccattatggaggcgatcaagctggaagacaaaaaagaatacagtgccccactgaagcccggctaccgcagcctgattcactcgccgtctggtgttctcggcctgacggagcactcactgctgatgaatctgctgaaccagttacaggacgacgggcacgacgtatcgggcgcggcggcggagctgaccaccatgttctgctacatcgtcggtgtgagcaaatgcctgcgtgatatccagactcacgcggagtacatcaacgacaaggcagggttcttctga

SEQ ID NO: 15052 - DNA, 249 bp, Escherichia coli
atgaagcagattatggttgcacacaacggcgtcaggtttgaagtcgtcatggttttgactaagttccacaatgatgaggtattgcacagaaaagaaactgtaacttaccgttataaacaccgcagttcagctgttagaaaattacggaagattgcggaagaactaaaaaatgatcctcatcgtgttattgaggtaaaaggcaacccatataaaatcaaaacttcagtggagctaagacatatgcaataa

SEQ ID NO: 15053 - DNA, 651 bp, Escherichia coli
atgactaagaaatacacgctaatctatgcagatccaccctgggtataccgggataaagccgcagatggtaatcgcggtgccggttttaaatatccggttatgagtgtgctggatatctgccgccttcctgtgtgggatttggccgatgaaaactgtctgttggccatgtggtgggtgccaacacaaccactcgaagcactaaaagttgttgaagcctgggggttccgtctgatgaccatgaagggcttcacgtggataaaatgtggtagtcgacaaccagataaactggttatgggtatgggacacatgactcgcgccaatagtgaagattgcctgtttgcagttaagggaaaactacctccgcgcattaatgcagggatcgttcagtcatttaccgcaccgcggcttgagcattcaagaaaaccagatgtcgttcgtgaaaaacttgtgcaattgttaggcgatgtttctcgcattgaactgttcgcccgccagacgtctcatggcttcgatgtttggggtaatcagtgcgaagacccggcagtgcaactacaccccggatacgcgttggatattggcggattaacaaatgcattcagcaatgctccgctgtcaccaacagacaaccagggacgggagcgtgcagcatga

SEQ ID NO: 15054 - DNA, 441 bp, Escherichia coli
ttgaagtttaacattagaatatctaatagttttctaaatggggaaagcaacacccctttcgctgtagacggacctttccttactgacgatgaaataaaaatcatacaaaggtttttagaagatgttgccaatggaagggcgcttgttggaaaaaacaagccatcgtgggttgatgataaccatgataaaattcccggctcagacaattatgagcaagagaattattggcattatcattgtgggccaacatggtatccaaacacatttaagaattataccattaacttaaatttcaaccccggcggaatgcattctaatgaatgcattcattatgcaaaaaatgataatgaaattgtcgttgttggattttcaagagaacacatacctttcctttcatcagatggaaacgacaatccgcttttttatgatgaagaagaatag

SEQ ID NO: 15055 - DNA, 168 bp, Escherichia coli
atgacagcgttgaaaaatcgtactcagcacaatgaacaagccaagcaatgctgggatgtcattggaaaagttatgcttggccgcgcaagcaaagagcgcgacaaggatatggtttaccagacaggaacatctttcagcgacttcaaggcggcatttcgctccaaatag

SEQ ID NO: 15056 - DNA, 498 bp, Escherichia coli
atgatctgggcatttgtaaaagcataccgtaaacagttacttatcgtggcgatgcttgctgttctggtcatatcaggagttgttgcctggaatgtgcacggcatccgtcagtacgatgccgggtatgcgcaggcgaaggaagatcagaaacaggctgatgataagttaaggtcacagcgtgagcaggagaaaacacaaattgaacgtgaagcacaatcccgtatcgatgcggcgcgtgctgatgctgagtatgctaattccgctgctgacagcatgcgcgccgagcttgacaaaaccaggcggctcgccgaacactataccggatctttcccccctggcacgccagccagcaaggtcatcggtgtgctcgccgacatgcttgaagaaagcaaccgagtttacaacgcaacagcagctgaggctgaaaagtatcgtatcgcaggggaattctgcgagcagcaatacgattcactgaagaagaaaaaatcgtggcactga

SEQ ID NO: 15057 - DNA, 1836 bp, Escherichia coli
atgcgaaccctttggcgatttattgccggattttttaaatggacgtggcgtctgctgaatttcgtccgtgaaatggtacttaacctgttctttatttttctcgtgctggttggtgtggggatctggatgcaggtcagtggtggtgattcgaaagaaacggccagtcgtggcgcactgctgctggacatttctggtgtgatcgtcgataaacccgacagttctcagcggtttagtaaattaagccgccagctgcttggtgccagttccgatcgtctgcaggaaaactcactgtttgatatcgtcaacaccattcgccaggcgaaggacgaccgcaatatcaccggtattgtgatggatctgaaaaacttcgcaggcggcgaccagccgtctatgcagtacatcggcaaagctctgaaagagtttcgtgatagcgggaaaccggtttatgccgttggcgagaactacagccaggggcaatattatctcgccagtttcgccaataaaatttggctgtctccgcaaggcgtggttgatctgcacggctttgccaccaacggtctgtactacaaatcgttactggataagctgaaagtttccacccatgtgttccgcgtgggtacgtataaatctgccgttgaaccgtttattcgtgatgatatgtcgccggcagcccgcgaagctgacagccgctggattggtgagctgtggcaaaactatctgaatactgttgccgctaaccgccagatccctgctcagcaggtattccctggcgcgcaagggttgcttgagggtttaaccaaaaccggtggcgataccgcgaaatatgcgctggaaaacaagctggtcgatgcactggcatcgagtgccgaaatcgaaaaaactctgaccaaagagttcggctggagtaaaactgataaaaattatcgcgccatcagttattacgattacgcattgaaaacgccggcagatactggtgacagtatcggtgtcgtcttcgctaatggcgcaattatggatggcgaggaaactcaggggaatgttggcggtgataccactgcggcacaaatccgcgacgctcgccttgacccgaaagtgaaagcgattgttctgcgtgttaatagtcccggcggcagcgttaccgcgtctgaagtgattcgcgctgaactggcagcagcccgggcagcgggtaagcctgtggttgtatcgatgggcggcatggcggcatctggtggttactggatttccacaccagctaattacattgtggctaaccccagcaccctgacaggttctatcggtatcttcggcgtgatcaccaccgtagaaaatagtctggattcgattggtgttcatactgatggtgtctcaacttcaccgctggcagatgtttctatcaccagggcactgccgccggaagcgcagcagatgatgcagttaagcattgagaatggctataaacgctttatcacgctggttgctgatgcgcgtcattcaacgccggagcagattgataaaatcgcccagggccacgtctggaccggccaggatgcaaaagctaacgggctggtcgatagtctcggggatttcgatgatgcggtcgccaaagcagcagagctggcaaaagtgaaacagtggcatctggaatactacgttgatgaaccgaccttcttcgacaaagtgatggacaacatgtctggttctgtccgggcaatgttgccagatgcgttccaggccatgttacctgcaccgctggcctcggtagcctctaccgttaaaagtgaaagcgacaagctggcgcgtttaacgacccacaaaaccgttatgcgttttgcctga

SEQ ID NO: 15058 - DNA, 1014 bp, Escherichia coli
atggaaaatactgacagaaaatatttacatgaaatatatataagcatcaagaaaaattcactcaacttatttaaaaacatcgataaagtaattgtgttcataatattcgcatgtacttttactggatcatggtttatatatagttttgttcgtactcatggtgtgaaatttatagatttaatacaaacaaacttattaataagttttggtgcattttcattcatcacaatattaattattattttaatctttatggcttctcttttcatctcaccaattatagtcagaagtttatattttaatttcatcttgaaagaaaaaatcaaaaaaaacaagaagcgaaaaattctttacttcacttattatgctttatgcggagttatagaatttgtgtttttttataacattacatgtggattattattactacttattttagtggcgtgctatcattttatcattatacaaagcccattctgttataagaaattatttaaaacaataaaactatttataagcacagcattactgataataattccttgtttaattttatcattcctctctatcacattaaatttcaatatcgaaggctcattaacttttaattctatactacagtccgtatttatatcattcaccattattatctttgctggcgctggattcgcagatagacatcaaagaattcgagatacaaaaaataggattcaatactatttgattttttcagtggcaatttgtttatatatgttcacagctttttctgcgggcatatcagaaaaaattgttaatttgatagggttaggatatcaatatagatgttattatgatacagaccttaatcaatatcttattcctgatgaattcattcaagataaattcaataataaaacaaaactatttgtagtcgcagatatagatggcaaaatgtatatcgcccccaaaaacaaacacactgcatcattctatttcactgcgaaggaattagctcaggtgagttgtaagaaatag

SEQ ID NO: 15059 - DNA, 846 bp, Escherichia coli
atgaatacaatctatcattattgcagccctgaatctttcttcagtattattcagagtcagcgattatggctaagctctatggatcatatgaacgattacatggagaaaaagtggttttactcgacacttaaaaaatatttatataaaaacttagatgctaactgcgttgaccagtttatagcacatttggatgacaatatatctgttggaacaccatttgcttgttgtctatctaaatctggggatattttaagtcaatggcgtgcgtatgcaaaagatggctttggtgtatccatcggattcgacagagaaaaactcgatgtctatgatgggattataggtaatcaccttgatcctaaacaccgactaactcttagcgatatatcttatatggatattaacgaaattgagtgcttagctgaaaggatattatcaagatattcattcataaaaaaatactatatgaatgaaatcatatcgacatcaaaatttaaccgctacgacaaatgtattcttgaattaatttccaatattattcacttaaataccacaactaaaaacccagcgtttgaggaggaaaaagaagtacgattagtttatcaaactcttgatactggaagatatgaatacccagaatcatcatcaattaaagatctgaaatatagaatatccaataatcaaattatatcttattacgaatttggtttccccaaagatgccgtttcagaattgatattaggtccaaataataaatttaaagaaagcgatattgttaactttttgcagtataatggtttcgaacacagcataagaatattgaaatcaaaggccagttatggagcttaa

SEQ ID NO: 15060 - DNA, 531 bp, Escherichia coli; identical to SEQ ID NO: 12243

SEQ ID NO: 15061 - DNA, 588 bp, Escherichia coli; identical to SEQ ID NO: 14

SEQ ID NO: 15062 - DNA, 1446 bp, Escherichia coli
atgtacgcacaaggggaatacctgttcgccattaccacgctgatattgagctcagcggggctgtatattttcgccaatcgtaaagcctacgcctggcgctatgtttacccgggaatggctggaatgggattattcgtcctcttccctctggtctgcaccatcgccattgccttcaccaactacagcagcactaaccagctgacttttgaacgtgcgcaggaagtgttgctagatcgctcctggcaagcaggcaaaatctataattttggtctttatccggcgggcgatgagtggcaactggcgctcagcgacggcgaaactggcaaaaattacctctccgacgctttcaaatttggcggcgagcaaaaactgcaattgaaagaaagcgccacgcagcctgaaggcgagcgcgcgaatctgcgcgtgattatccagaatcgtcagacactgagtgacattaccgccattctgccggatggcaacaaagtgatgatgagctccctgcgccagttttctggcacgcagccgctctacacactcgacggtgacggcacgctgaccaataatcagagtggcgtaaaatatcgtccaaacgaccagattggtttttaccagtccatcactgccgacggtaactggggtgatgaaaagctaagccccggttacaccgtgaccaccggctggaaaaactttacccgcgtctttaccgacgaaggcattcagaaaccgttcctcgccattttcgtctggaccgtggtgttctcgctgatcactgtctttttaacggtggcggtcggcatggttctggcgtgtctggtgcagtgggaagcgttgcgcggcaaagcggtctatcgcgtcctgcttattctgccctacgcggtgccatcgttcatttcaatcttgattttcaaagggttgtttaaccagagttttggtgaaatcaacatgatgttgagcgcgctgtttggcgtgaagcccgcctggttcagcgatccgaccaccgcccgcacgatgctgattatcgtcaacacctggctgggttatccgtacatgatgatcctctgcatgggcttgctgaaagcgattccggacgatttgtatgaagcctcagcaatggatggtgcaggtccattccagaacttctttaagattacgctgccgctgctgattaaaccgctgacaccgctgatgatcgccagcttcgcctttaactttaacaacttcgtgctgattcaactgttaaccaacggcggcccggatcgtcttggcacgaccacgccagccggttataccgacctgcttgttaactacacctaccgtatcgcttttgaaggcggcgggggtcaagacttcggtctggcagcagcaattgccacgctgatcttcctgctggtgggcgcgctggcgatagtgaacctgaaagccacgcgaatgaagtttgattaa

SEQ ID NO: 15063 - DNA, 294 bp, Escherichia coli
gtgcatctggctgatgtgctgttcgcgccagaacaaaccagtaaatatgagctggtagaagggctggtggtttattttctctatttcgaatttatcgcgctgattgtgaagtactttcagtccggttttcacttcccgctacgttactttgtctatattgggatcaccgccattgtgcgcttgatcatcgtcgatcataaatcgccactggatgtgttgatctactcggcagcgatcctgttactggtgatcaccctgtggttgtgtaattcgaaacggctgaagcgggagtaa

SEQ ID NO: 15064 - DNA, 411 bp, Escherichia coli
atgccagttagccgttatctctgcattttcataaacgttggtttgggagaagcggcaaaacgggacgtgggaacaggggaaaatcagataccggatatggtttcatttagtggtgtgagggatttttatggaaaacaacttttgccaggagggttgatactccagtggctgacgattccatcaagtgcagcagtcaaagctgtaacactggataatggtaattatcagctgtcaggctataaatggccccagtcatttggtgtcctgtttgctgtgtttgccacaaaagtttctggctcgactaacgaagcatacgcaatctcagttaatcgtcactctaccgatgtaattgtcacctggaatgcccgtaaggctgatgatgtccatattttaggaattgggaaattatga

SEQ ID NO: 15065 - DNA, 396 bp, Escherichia coli
atgatttatttctcaaaatcgactaatggttttttctttgatggtataaacagcgacatgcctgctgacattgttgagataagtacagacttatacaatgaattaattgccggacagcaggaaggggggaaattaatcacgtcagatgaaaatggtttaccggtactgaaatctccggcgattgattatgtcgtacgtgctgaaaatcagcgaatgcagttacttgctcatgccgataatgtcacagctgactggcgagtggaattaatgcttggtgatatcagcagtacagataaagaaaaactatccgcctggatggactacaaaaaagaagtaaaagccgtcgacacttcgacggctcctgagattagctggcctgagttaccggaggtgtag

SEQ ID NO: 15066 - DNA, 1776 bp, Escherichia coli
atgccaaatgaaaatcttgatattgactcaaggactaccgagcaattatacgaatggtatttgcaaggaaatttgatagtcaatagacgttatcaaaggaaacttgtatggtctctagaagaaaagacttctttaatatcttctatgctgcaacaatatcctattccgttattattatttgttaccatcaatgaacaaagagaaatattggatggaatgcaaagattagaagcaattatgagcttcatcgaacagagattttcattagatggacaatattttgatttggactctatagctttaacaaaacaacttaaagataatggaactttaattcagaaagaaccaatcctttcccgtgattcttcagcaattattgcacgttatcgatttgcaatatcagaatatagctccacaaatgaaaatattgacgaagtattcagacgaataaactcaaacgggaagattttatccaaacaagaattacgtagtgcaggaacagttagtaacttctctgaactggtcagatcgatatcaacatcgatcagaggtgatactagccattctgacattatgaatctccagcaaatgcacaaaatttcaatcagtaacgatagattggagtacggggtaaatatcgataaccacttttatataaaacatcatattttaacaagacgaagtattcgtgattctgatgacgaggaattgatagccaatatccttgcatatatcagtctagaagaaaaacccacatctgggtcaacttctctcgacacattctatggtcaaggaaactcctctcatgctcatggtgtcagacagcaattagagtctttcattcaaaccaataacgctgccactattaagcagaatttcatagctgtatatgaattaattacaagcctatatgacggaaaaaatgatacttttagaagccatattttaggggaggataattcatctcaagaatgccctcgttattatcaagctgtgtttttgtctatttatgaacttcttttcaaccaaaatatgcaattaattgataaagaaggtttattctcgcaattaaaaaacactggcaataccataattatggttaccgatggtggccgctgggctgcaagcactcgtgaaaaaagtgttaatgatcttgttgcattaataagtcgttacttccaacctgctcctcaaaagtatgtgaatcatgcttgggtaactgaaattcgcaatctattaacaaattctagaactgaacaaccaagttatgatttcaaacaagggttctttaatttatcaggtaaaaatgaatttgatgatgaatgtttaaaaggaatattacaaacttgcgtagcaataaataatattggaaaaagcgcaaaaggctatattttagttggtattgccgaaaataaattaaccgcagatagaattcaacatttatatgaagtaaattcaattgagttcaatgggttctatataaacggaattgatcatgaagcaatgttagtctctggtagcattgatgattactttatgttaataaaacaaaaaatacaaggatacaatttcactgaaactctaaaacagcagatacttaagaatattgagttttgctcttacaatggcttacacatactcaagataactattcagagcacaggtcaaatttgcgactttgagaatatgttttatatcagacaaggctcatcgactgatccagttacggatacacaaaacatctcagctctatttaactcttacatgaacagctaa

SEQ ID NO: 15067 - DNA, 1035 bp, Escherichia coli
atgggaaagagtaagaagaaccgcgctgcggcgacgaaacagatccagcttaaaagccagactacagccgaagcattcagcttcggcgatcccgttcctgttctggaccgccgagaattactggactatgtggaatgcgtacagatggaccgttggtatgagccgcccgtcagctttgacggactggcgcgcaccttccgcgctgcagtgcatcacagttccccgattgcagtaaagtgcaacattctgaccagtacctacatccctcacccgctgctcagccagcaggctttttcacgttttgtgcaggactatctggtatttggtaacgcctacctggagaaacgcacgaaccgattcggtgaagttatcgcccttgagcctgcgctggcaaaatacacccgacgcgggttagacctggatacctactggtttgtgcaatacggcatgactacacagccgtatcagttcacgaaaggcagcatttttcacctgatggaaccggatatcaaccaggagatctacggcctgcccggttatctttctgccattccgtcagccctgctcaacgagtccgccacgctgttccgccgcaagtattacattaacggcagccacgcaggcttcatcatgtacatgaccgacgccgcgcagaaccaggaggatgtaaacaacctccgtaacgcgatgaaaagcgccaaaggaccaggcaacttccgtaacctgtttatgtactcgccgaacggcaaaaaggacgggcttcagatcatcccattgtctgaagtcgcggcaaaggatgagtttctgaatatcaaaaatgttagtcgcgatgacatgatggcggcacaccgcgtgccgccgcaaatgatggggattatgcctaataatgttggggggtttggggatgtggagaaagcgagcctcgtctttgtccgcaatgagctgatgccattgcagaaacgactgcaggaactgaatgattgggccggagatgaaattatttcattcgcaccatatgttttagggacatattaa

SEQ ID NO: 15068 - DNA, 1440 bp, Escherichia coli
atgacgccaaaagtttttatatcatatagttggagtagcccagctcataaggaaagagttaaagcaatagctgatagacttttgagtgatggagtggatgttgtcattgacatatatgatttgaaggagggcaatgataaaaacgcattcatggaaaaaatgattgttgataaaagtatcaccaatgtgcttgtgatgtgtgattcagtttacgcaaaaaaagctgataacaaacaaagtggggttggcacagaatcccagatcatctctcaacaagtctacacaaaagtcgaacaatcaaaatttatacctattgtttgtgaatttgatgagaattcagaaccttgtcttcctgtttttatgagttcgttaatatggattgacctttcaacaccagaaaaagaaaatcaaaattgggaacggttagtaaggctgcttaatggaaaaccagcagatataaaacctaagcttggaaaaagacccagttatttagatagtgggcaatatgatccggtgagtgaaccacacgcaaaatttaatagcttgaaacaagctgttttgcaaaatagggcaggtgttagttattatcggcgtgatttcgttgattcagtagtcaagtaccttgacgggatgagaatccgagctcgcccagagcaaaatgatttgcaaagcatgggtaggaaaataattagcgacgttgctgccatgaagcctatcagggattatgtgtgtgaatggataactcttgaggcagagtttacgatgcaggatgaattttcaacagaactagtaaagttctttgaaaaagttctgttactaaccgaagctcctagcgatgtcagttcatggcaattaaactggtatgatgcacaaaaggtatttgcatacgaaattttcttatattcagttgctatattgattagattagagaagtttcaattagtacgtgcgattttatctgccagattcctttctggtgataggcagttaccaccggaacatagactcgtgtcaattagcgctttcttagctgattctgaaacgctacaggcaggttttgaagaagatataaggtattactctccagttgcagagctaattaaaagaaatgcagatagggaagatattaccttttctgatcttatgcaggctgatgtgctagttcttttttattcattttgtaatgatggtgtctattggtatccatacactatttattatgcgagttataattatagacctgaactatttttaagagcgacacagcataagtattttaaatatttagcaatgattgctgggatagcgtcagcgcaagagatcaaattgaaggttaaggccggcgctcagagtatgcataattcaggggttagatatggacgtatgggaactggttttgaaagtatgatgaacgccgataaccttgattctataaaatga

SEQ ID NO: 15069 - DNA, 678 bp, Escherichia coli
atgaaaattaataatgtagcgttaccaatatctcttgctgtaatcctaactggttgcgtgccacatgcttctaaccgaaatatcactgctattgaagtggtgaagcctgctattgggcaaagtgctaccgcctacatgggcgatcccattatcacatctgctactggatttaaaacggacgtactagaacttggtgcggctaatggtgcattgtcttctatcgctgctggtacatattgcagtgaggggaatggaatttaccgcaattatcataaccctcaagctgttgcgttaaaaaatctctatgggcaaatcggtaactatgttgattatgttagttacgatgctgcaaaaaatgagatatcaccgccaaatggtacttcttatactgcatcagaaatttctatcaaacgtgttcctgatgggctgtgtcgagttagtaactcattggttaagactatcgaatacaatggaaatgcaggcggtgtaatgaagttcacctatcgtgaatttgcaaacgatatggctcgtgcagcatttacaacagatttttctgtagattctaagggaagtgacgttatcgcttacaaaggtgccaagttcaaagtgaacaaggctgataactcgtctatttcttatacaattatttctggctttgacaaggctgtcacgttctag

SEQ ID NO: 15070 - DNA, 534 bp, Escherichia coli
atgagcgcaaaaatcaaatacggcctgtcagctgctgttctggcgctgattgctgcaggcgcgtctgctcctcagatacttgaccagtttctggacgaaaaagagggtaaccacacaacggcataccgcgatggttccggcaactggaccatctgtcggggggccacgatggtggatggaaaacccgtttttcccggtatgaaactgtcgaaggaaaaatgcgaccaggtcaacgccattgagcgtgataaggcgctggcatgggtggagaaaaacatcaaagtgccattgagcgaaccccagaaagcggggatcgcgtcattctgtccgtacaacattggtcccggtaagtgtttcccgtcgacgttttataaacgaattaatgcaggtgatcgcaggggagcgtgtgaggcgattcgctggtggattaaggacggtggcagagactgccgtattcgttcaagcaactgctacggtcaggtatcccgtcgtgaccaggagagcgcgctggcgtgctggggtatcgacagataa

SEQ ID NO: 15071 - DNA, 216 bp, Escherichia coli
atggaccagatggaaaaaatcacaacaggtgtgtcatacactacgtcagcggtgggaacgggctactggttcctgcagttactggacagggtttccccgtctcagtgggcggcaataggcgtgctggggagtctgctgtttgggctgctgacatatctgactaacctgtatttcaaaatcagagaggaccgtcgtaaggcggcacggggagagtaa

SEQ ID NO: 15072 - DNA, 1050 bp, Escherichia coli
gtgcgggtattacttcgacctgttctggtaccggaactcggtctggttatcgttaagccaggccgtgaatcaatgtcagcattccataacggcagaatactggtggagccggaaccaaaaagcatgcgtaatctgccgtccggggtcgttcctgccgctcgccagccgctggtggaagacaaaacattgctgccgtttttcagtaacgcacgggtgattcgtgctgctggtggtgctggtgcattgtctgactggctgttgcgccatattaaatcctgccagtggccacacggcgattatcatcacagcgaaaccgtcattcaccgttatggtaccggcgcaatggtgttgtgctggcactgcgacaaccagctgcgtgaccagacatccgaatcactcgagcaacttgctcatcaaaacctgtcagcatggatgattgacgtcatcggtcacgcaataagcggtacgcaggagcgtgaattatctttggctgaattatcctggtgggcggtccgcaatcaggtggcggacgcgctaccggaagcggtattacgtcgttcgctggggttgcgtgcggaaaaaatccgctcaatgtaccgtgaaagcgacatcgtaccgggagagcagaccgccaccagcatactgaaacagcgcacaaaaaatattgcgccgctgcctcacgcccaccagcaacagaacccaccacaggaaaagacggtggtcagcattgccgttgatcctgagtctccggaatctttcatgaaacgacctaaacgtcgccgctgggttaacgagaaatacacacgctgggtgaagacacagccgtgtgcgtgttgtggtaagccagccgacgatccccatcacctgattggtcatggtcagggcggaatggggacaaaatctcacgatattttcacgctaccgctgtgtcgggagcatcacaacgagcttcatgcggatccgctggcgttcgaagaaaagcatggttctcaggttgatttaatttttcgttttcttgatcacgcctttgcaactggcgtgcttgggtaa

SEQ ID NO: 15073 - DNA, 1146 bp, Escherichia coli
atgagcatgaatatcgcacaaacaccatttactgataaatcgtttaatcctcgtcgccttgaggaggcaagagaggcaaaagggttgacgatggctgaacttgccagagtgctcaatatttcaagacaagctatttcgtcatttgagaaggggttgaagtctccctctgctgatacactttctgcaatagccaaggtgttaggatttccagaacgatttttcttagcctccagtgcttctccatctctggagggggcgattcattttagaagtcgttcaactgcgaccaaaaaggctcgagttacagggaaaacacgtgggcgttgggcggcattaatattggatgaatgtctaaaatatgctcaattaccagatgtggttctgcctgaattcgatattattgattttgaggttctgtctctatctgatattgaggatatgtccacccaattaaggcgtttttgggggttaggtgatggtccaatactcaatttaactagacttgttgaaaataaaggaatcgtggtttctcatttaccttctggtgagaaagttgatgccttttcgttctggcataatgggcggcctttaattatgttagatagctcgaagacggctgttcgcatgcgatttagtcttgctcatgaacttggccatttaattatgcatagggcagtggaggatgactacctgaatgataaagaattattcgacctagtggagttgcaggccgattattttgcctccagctttttaatgccagccacgactttcgggcgtgaattttatagtccaaatttatcagcgttagaacgattaaaactacgttggattacatctatcggtagtattgccatgaggagtcatagccttaagttaattagcgataatcagaaaagctatatatttaagcaattagcgccattccatcgtagggagccgttagatgatgcaatcccaaaagaagagcctgagttacttaataagttacttttacttcttgataagcattcaatcataaaggtaactgagttaactgatatctttgctcttcctttaaatgagttatctgcaattacacgatttaaagaatcagatatgattcattctgacaatgttatttcatttaccataaaacaaaaataa

SEQ ID NO: 15074 - DNA, 615 bp, Escherichia coli
atgcagaatttatctcaacagttgttagaagcatatgacaaggagtgccgcaaagagctttcgatcgcgttagcacaggcttatcttcattcgcatatgaaggcaaaagagtttggttctttttgggctcaagcacagtcatatttgcgctggttttatgccgatgcattgcttgagaatgcggctaagcgtgtggggctggattttgaagtcggtagcaatgctgctaaaaattgtaaacacattgcgattcactcgaacaactggaaaatgacggcacatcatttatcgggtaatgcgccacttcctaagcaggcattgtatagagctgtttacgctaatcaaaattatgaattgaattttggggatgaaaatgccgactccctggatgggagagcgtctggtggacatgtttatatgttacatgatggcagtaatcagcacttgtccaaactgaatttaactgttccttcttcggataattacgggattctttatactgagtctttaccaattatgacgatggtagaagttgaagcagaaaatgtggattctgagattgaagataaaatcaagattcttaccgagcaaataattaaatcacagcaatcatga

SEQ ID NO: 15075 - DNA, 2799 bp, Escherichia coli
atgtggggaagtgaaaacaaacaaaatctggacgtactggatcctgtgcagttggtgcgtatcgaagcggtacaccgggggttcctttaccagcatctttacgctgtaggctgcttacttttggcgcagagggctgctatggactcagtaactgtcgagcttgatgaggatattgagctgaaatccaaacaggaacgtctctacattcaggttaaaacccgttcaaagcctattatgcccaacgatgtgtcgggggctctggagcgatttgtaaagctcagaaatgagcatacttcggcaaaccgcgaaggggtggcttcttttgtgattattgtaaaccaggcgcctggaccgctgcttcagaagatgattgacgataaaaagcttccttctgatgttcttattgtctggccccagtcgacagctggacgtcatccggcacttccgcccgcatggagtactctggctgatgcggccacatggtgtatcgcagaagcagaaaagctgaaattttcactattgtccccagaatccttgatttggaagttagcagggttggttcagcttgccgccaccggaggcgataccaatggacaacatacgtttttcacggaggaacttactgaactatttgaacagttgatcgttcagctacaggactttcctgcaccaccagcactgtaccgcccacaaaacgaagaaccttctctcacatctggtgagcggatccgtatcctttgtggactctcaggtgcaggcaagacagcttgggccgcacaggccgcattacactccactgcactttgtgcttattacgacaccggtgatcttcccggtccagctctggccagtacgctggtgcgcgagatggctgctagatttacagcccgtgaccaagacggtttgcgcaggattttgctccccggtgccagtggttttgaggctcttaggagttttgatacctacctgaaagagcagggtaccaccttggtgctggttctggataacgcccatcgtgtacctgcggaaaatctacgggatgttctgaatgcaactacacatattcgttttgtgctgttgtgccagcctcacgaaaacgttcgcgaactggaggtcatgacggggctacagcgcgagggcctgcagggatggaatctcgatacggtagctgtcgttgtaaacgatatcggaggatttgccaccgctatgggatacgagcagctacgggcttacactggtggtcttcccctgtatgtagagagcgccgcaaaaatcgccgtttctgattatgagcgtagtgtcgatgctctgtgtgctgaactccagcaacaaacccatactgcggaaaccgcccaagaaattattctgtcacgtgtatttcagggatttgaatcactacttcagagcgcgctggcattgttcagtctctctgacgtagggctgagtcgcgaagagatttctacgctcctaatcaattcgctgaacatttcaccaagcagtgcggcttctttaattaggaaaatgcgcgctactggcactattgaaatttatggaaaccagaccctgaaggtacatgatgctgtcagggggctaggactgcaacatctggaactgatggatcagggtatatcgaacaaagcgctactagcgctgaaagaccttttagttgaaagtcttcataatacccgcaatacaaaacggttatcgttgttgactcaactttatattaagctcaatgatgtcacgacgttgatcgaactctcaggccaagaaatgttttatgagatgggcgtgacggtcgacattcttgcaagcttggagcgtgctgcaacatcggacttattgggacctgttcataaattctgggcattggatggccttgttttcgttgagcttaaagacggaatatccgaccacattgctcagaggttaaacatcatgggagctttacttgcggagcacaagttcggctatcaagaagagatggcctatgcaatgaaacgaatgttattttcggcagaaagcaatgatgcacgagaagttcaaaagctggcacaggaagtccgcccccaactcccagatgaagaacataaacgcatctttgactacaaccatgccattgcactctggagattaaaaaaactcaaggatgctgaaacattaagctgtaatgttatacaagggtactattctttatttggtatcacacctgctgatgtcataggaaaaaacgccgacgcattatggaaaactattaatcattccgaaaatatgcaggaacactttaaacatatggctgatgctctggagttgctggccagaattcgtgatgcgcagggaaaactgtcaccattactgcgtattcattcgatgaagttctacaatctggccatggccccggaatccatggttagggtgggccaagatctggcggatgagtttgttgccataaaggattacgacggtgccaaggaagtcatggagcaacatgtcctgccggttgtcaatgaggcaggtctagtacaccgactgattcaggttcgaagccagtacgcagtcatattggcactatcgggtcagcataaagcagctgatgtcgaaatgcagcgccttgctccctatatcgaaggcctcacaggtgtacagcgtcaagaaatccaaaatcaatcaaattacatcgtacagcttgcccataaagcagcaaagactaaattaactgaagtttttggtgcggtcggccggaatgaacaatgcccctgtggctcgggaataaagtacaaaaaatgtcacggtgcctga

SEQ ID NO: 15076 - DNA, 417 bp, Escherichia coli
gtggcaaaagtttttactcccgaactgcgggaagaagtgaaggcgcgcattgtggaactggtacgcagagatgggcgaaaaacgcgtaaacaactggaaaatgaaaccggggcgacgagacacctaatagaagttctggcgaaagagctggtagttagtggcgcagtatatggttcaggacatggaatatttccttcggagcaggctcgtaaggactggggaaaagcccgcaaaaaaatgtcgagagcggcagtgaaaaagaagagcgaccctgacctgatttattcattgctagatggcgaaatacgccgttacaacagacgacagaatataatttgttgcgagtgtcgtcagagcgaagttatgcagcgtatactagaattttatcagggaaatgttcggtatttattgaagtga

SEQ ID NO: 15077 - DNA, 1521 bp, Escherichia coli
atgaggagcgtaattacataccttcggtacagttcagccatacaaggcgctgaaggtgcagattcaaccagacgacaaaacgacctgttcaagcagtggctgaagaagaatggcgatgctcaaatagtagcgtctttcagtgatgaagggttgagtggttacaaaggtaaacaccttactggtcagtttggtgacatgttagcccgtattgaggctggggagtttccagaaggtacaattctgctagttgagagtatcgaccgtataggccgattagagcatcttgaaacagaagccttgatgaaccgcatcttaggcaacgggatagagattcacacattgcaagatggccttatctacacaaaggatgctttagccgatgaccttggcataagcatcatccagcgtgtcaaagcctacatagcgcatcaggaatctaagcagaagtctttccgtgtttctcagaaatgggggcaacgtgcaaaacttgcccttgctggtgaacaacgtcttacaaagatggttcccggatggattgaccctgagacttttaaactcaatgaacacgctgagactgtgagattgatattcaaactgctgctagatggtgaaagtctgcataacattgcacgtcaccttcaaagcaacggtataaagtcgtttagtcgccgtaaagatgctaatgggttctctgttcactctgtacgcaccattctaaggtcagagacaacaataggcacgttaccagcatcacaacgtaatgaccgccccgctataccgaactactacgaaggtgttgtagatataccaacgttcaataaagctcaagagattctcgacaagaatcgtaaaggccgtacacctgcaagtgataacccattaacgattaacatcttcaaaggtctgtttaggtgtcagtgtggggctagtgtccatcctaccggaaccaagaataagtatgcgggggtctacaggtgtaataaccatcttgacggtcgctgtgatgttcaaccgttgaagcgtaaaccgtttgataagtgggtgcttgaaaattttctaggaatgattgacgtggggaatgatggagaatcagagaggaagattgcagcgttacagcatgaggttgaaattgtcacagccagaatcaagaaagctaccgccctacttcttgagatggatgatattacagagttgaaaacacaggtgaagggacttaaccagaagcgtacagaaatacaaactactatcgacactctgaagcgtaaaacctcactcagtgacaaaggattaccccaacttaaagatattgaccttatgactaaagcgggtcgtgtcgagtgtcagttgattttgtccaagcatctaaaagggcttacattgggtaaggattcggtaactgtaacgctacagaacgacactgaaatcaccatacctacaaacccgttaccgctaaatgatgggtcaccaatctttgaaattgctgataaagagctactggatattgacgcttatcaactgtaa

SEQ ID NO: 15078 - DNA, 771 bp, Escherichia coli
atgatttacactaatcagcttcgttacagtggcaaagatggtgtttacttccatctacaaggccaaccagataatttcttgtcactatcagctactgagaacatggaatttgatagccctatgatggttaccactcaaaatatgcaatcagggcaggctgtcacagataatgtaatgcgttcacccagaactatttcaatcagtggtgtggttgtggttggtgaatccggtagtatcctcatctcaagagataataagctggtggaaaacttcatcgacactctggaaagctggcgtgaccagaagcaaattatttcggtcatctgtcgagacggaattaaaattgacgattccattattacgagttttaaagcctctaaagatgttggaatttctaatggcctaagaatccagctaacttttcagggaattaactttaaagctatcgtagggcaaactgatatttcatctgcaactggaaagaccgctaccacgaatgatggcggtgctaccagtaaaaagaacaccggaaacactacaacgagccttggaagccctatgctgacctgtaaagagctttttagctattcggcaagtgagttatcagatgaagcgctaaaagcccgtgtaacgtgctctaagagcgttagcgttaaaaatggtgagagcaccttctcagatgccgctaatgagcaagcttcaaaggtgcttaagccgggtaatgctctgcgaaagtactctgtgaaccctaacaagaagggcacttattga

SEQ ID NO: 15079 - DNA, 2040 bp, Escherichia coli
atggcacagtttaaagttgatgacttcctgattgagttaagttttaactctcagaaagttttaaaaggcttggaaaaagccgagaaacaaacgatgcaaatcgcatcaagaattgaaaaacgactaaataaagcattcagagttaatcctacgcctttaaatgattctctcaaggtcatggaaagaaatgtcgataaaactgtttccaagattgagcagcgtcttaaaaacactaaagcgtttaagattaaaacggaaattgaggatactttaaagccacttagacaatcaaggcaaccacgaattagcggaagcagagcaatcacagcagcttattcagcgagtatgaccaaactgaaaggtcttaacccaattgtcgagaaatacattaagagccagttttacgcattaagtagtaaagctggtcagatggataacaccaagtttaatgaagcccttgctaaactaaattcaagtgtacgagaagcaattgctaaagccagaggtcatacatccaccagcattaatggtgacagagcagctaatagtcttgataacctgtcttcagcagcagttaaaacagcaggtgcatttatctcaatgcaagctgtattagccagttatcagaagattatggaagttggtttacagcgtgcatcatcggaaagaagtattgatttcgtattcggtgaccaaagtacacaggttaaaaagttcattcaggatttaactcaagtcacgggtatggacacgaccgaaacacaagctcagtttgcctcattcggtgcatctgcaaagaatacgatgggtcttgaaggctcagaggaattatttaaaaacttaactggatatgcccgtctaatggggcgttcagatgagcagattcaaagagcattaaccgcagtatcgcagatggcttctaaggggcaggtgatgtctgaggagttgaaggggcaattatctgaagctttaccgggtgctactcaggcatttgcaaaggctttaggtctgactgaaaaacagcttttcgataagatgaaaaatggtgatgttaaagtctctgatgcactccctaagtttgctaaagaacttggtgcacagattaattcaagaggtggctggaaagctattcaggactctacgcagacaatgttagggaacttaaagaatacctggaataactcattaacggatattttcaaaggttctgaaaatggtctgcaagattttacacgaagcttaacaacgcttttaaatagtttagatggaagtggtaaaacattaggtgaaagtcttggtaacttgatgagtgatatgtcacatggtatcgataacctgacttatattagttacagggtgagagcgttctttgatgaggtgacattagcttatcgtggtttaaccgatgaacaaaagaaagttgttgatgctttgggttctggcttgattaatagtttaaaagtcttggctggtgttattgctgtaaataaagttgttggtgtaactagaagtatttacgggcttatgactgctatcacaagattaggtcaggtcgctgatactacagcagataacgtaaataaaaagaacgggaaaccatcaaggtttaatcttgggaatatgctattaactggtagtgcaatctatgcaggttatgagagattagcttctacgcctgaacgaatggaagcacaagctaaattaccagagctagctaaagagtctggacttaaacccgctttcactatggatgatgttaaagggtggtttaatagtgctgccatgaatcttgctaacttccagcatccagaattaaacaacattaagcaagattcagcattaacgagtgcagatatccaaagcctgagagatgaaatctccgctttgagtaaacgtattcaggagcctgtgaaagtttcacctggtggtgaagttgccattaaaccagatgaaaccagctttatgacctttagcggtaatatctacgaccaatacgcagaagctacgctattaagttcatcattcccagaagatgattga

SEQ ID NO: 15080 - DNA, 213 bp, Escherichia coli
atgtttgaagaacgtttagagactattcggtctgtttgcgaaagactccagctacaaccaaatagacaaaagctacgaattaagaataaccgtcattacatcacctcacacaaaccaaaaacacgcaagattccaaagtggtgtattgaccgtattccttctgatgctcaaattataggtgaaacggaactacattatcttgtccgacattaa

SEQ ID NO: 15081 - DNA, 705 bp, Escherichia coli
atgtctatccgtgatgaacatgaaatgattatcgaacacaaaccaagcgcacttgatatttacgaattaagtttgcgtgaatcttttgatagagcttggcgggaatcacacgaagtaaataaaggtccatatattccaccagaaccactcgagattccaagagttgaaattgatttttctatgaacgaacggtgtgaacttgatttgaagttgaagctacaacgccgatatttccaagctattaaagactctcaagaagcaatgagaagtgtttacgagaaaattcagtccaagcttgaagacgaaattgacgaaatggctattttgatggagcttcaaaccaatccttatgcttatttctctcgactagaccgtgacggttgggggtatgaccctgtagagattggtaaagtgattgcagatttaccagaaggtcaaagagttgttcgtacagaaagagccattagagcgccacatcgactgtctctaattgttgctgataaatcacaagctgagcttgaagaaattgccaaagagaaactgatgaaagcaagagaaaatgagattaatttgctgaaatcaagactggctaagctgattagtgaccatcaagcgctggctaaggagtaccgtcaagagttggcacagattatcagcttcaatgattttctgagtgttccacgagaatttagcaaggctgtttga

SEQ ID NO: 15082 - DNA, 324 bp, Escherichia coli
atgaataattttccattacagattttcgttgataacgacacggtaaatatgcttcaacacttcattgatgcaggtattgacattgactttgacaggttgttagctttgatggttgataatgcagaaaacatttctgactttattcagtcggtggagtttaacgagcctcgaatgatgttaccaattgcagacagcgacatgaagcgattggttattgaagaaacgaacagatacaacatttccccagagcaatttctgaaaggtgctgtgataatcttgtatgctggcaatattccgattatggattctgtgaggattcactaa

SEQ ID NO: 15083 - DNA, 216 bp, Escherichia coli
atgctatgcgttacctttgaatgccacacagataaaatgattcgctacatctccgacctcctgattgaaggaaacggattcggtgacatccataactcaaaagatattttcattaaagccattggcccaagtgaagcactgaaaacagcagttacagcggaatggtttgagcgtcacaagattgaattaggttattggggtgaggaggttttataa

SEQ ID NO: 15084 - DNA, 282 bp, Escherichia coli
atgaaaaacaaacacactttaacccgtattacaaagacagcctttgacgaacttaaccgaatcaaaaacattacaggtctgccacactcagcagtgatgaaacttgcaattaaccgtgatattaatgaacaggatttgcttaatagtcgcttagaggctgcaagacaccatatcaggattaagcaagatgaccttgatagtctgaaatctttaaatgcttttggactggatttagcaaggttactaagtatcaagattcacaagttagcgatggaggtttaa

SEQ ID NO: 15085 - DNA, 555 bp, Escherichia coli
atgagagatgcagaatttagagcgatgcttcaggcatcaaaagaacgtaacaagcacaactcctacgcttacacaaacacccccgccagctacgaactgccagcctttagcaaatccgaacgtagaaacattgaatcggtcattcgtagcattacgccacgagacagatttatgccaacacgtaaaacaacagagaatactttaaaaactttcttgatgagctttgattcttacgagcaactaccatcaaaaattgaagatttaattatcggcacttgtcgcagtcttggaagagataattatcaccggaaagttttctatttactgcgaagtcttgatgagattaactcaagcacagtgacgagccatcttcaaagacaagcaaccagacttagctacgaattaccgtctgatgggtattgcgctaatttaactaccatttgcaataaagttatcgagacaatcaatcatcatgttgaggttggtaatatcagccttacgattagtgagccagactttgaatttgacgtatacgcacaagcagaggaattttaa

SEQ ID NO: 15086 - DNA, 186 bp, Escherichia coli
atggtaaatctccctgagctggggtcacctgatgtatgggctggtggaggtattggactgattgcaggtctgccactccgctatttcatcgtcagagtgtttatcgtgttcagattgtttggtcgtgaatggtcatttgacctcaaggacaggacccgaacagacaaccacacagaaccccgttaa

SEQ ID NO: 15087 - DNA, 552 bp, Escherichia coli
atggagacaatcggttattgcagggtgagtacagatgaccagtctatcgctaaccaacaaatgcaaattgaagaggcagggtacaacattgctaaatggttcactgatgaggctgtcagtggttctgtcaaagcttcttcaagagatggtttcagcagactattagcttatgcacgagaaggtgacaccgtggtggtggtggctgtagaccgtctcggacgcgacacaatcgatgtgttatcaaccgttaaagctctacaggctaaaggtgtgcgggttgtttcgttgcgtgaagggttcgacctgtctacaccaattggtgaagcaatgttaggcattatgtcaacgttggcacagcttgagagaagcttgatagcagagcgcagaaaggctggtattgagcgtgctaaagctgaaggggttcacatgggaagacccgtaaaagcttcttcaaaggctgtacagacgcttatttcacaaggtaagacacggttacagattcaggaagagttaggaatttctaaagcaacttattaccgattagcgaagtga

SEQ ID NO: 15088 - DNA, 666 bp, Escherichia coli
atgagcaacactactgattggggaagcatgatagccaacatagttatggctactaccgctgtctgggctgcattcaaagctaatgactggtttaaaaccaagcgtcttgagagtgctgaaaacttctataaagaagtacacaatctccataaacgttactattcagctatccaatacgttgaggattcaagaagaatatttgatagtcagtatgggttgcattcgccaatatctgaacctaaagacaagtcattgcaatgggaggttaaatcgaactcttacaaaatcatcgctgaactagattatctggcatcgtcactacaaatgatggatgcaatgggtaacaaacttagccctaaatcggcttcactggttagtgatatgatggaagcacatggacgattctgtaatgatgtgatgaacttcaatgactcagtttggaaggttataagggcaggtataactgaagagaacatcccacatacgcgaggctatgtgaacggcgattacatggctatccttaccagtatggatgaacctgtaagaatatcttttaagttaaaagaaatcagttttaaagatttttacctacatgaaactactatgcagtcagtaataacgaggctgaaatcgcttatcgccagaacaggtaaaaacaggacataa

SEQ ID NO: 15089 - DNA, 303 bp, Escherichia coli; identical to SEQ ID NO: 12251

SEQ ID NO: 15090 - DNA, 321 bp, Escherichia coli; identical to SEQ ID NO: 5987

SEQ ID NO: 15091 - DNA, 930 bp, Escherichia coli
atgttgaataaactcctggtaataagtctatttttatttagttcatatacggtggcaaacatgaatactacaaaatattctgcatattttaaaacgcaaagtggagtttgcttattgcagataaatggagtgatttatattgatactctacgaggcccaaaaactatcagcacaggttcagatatatcaggctggctggagaacggagaaaatgacattgggcttgcattttaccctgcgaagacaaagaaccaatacgacgaaaaaaattgtgaggtaaaaattgtcaaaacaactcgggataagcaagagaaaataatcacacaatttaaaataacgtttgatgggaaaagtgaacgctcagataaatccgcctattctatcatcgatgttagcgatgtcaccgggaataaaatttcggaaggtatatataataaaataaagttcaaaaatgatgcagcaccaaaagactggatgactgcaacacgaaaaatcaatatctctgacattccagattgggaatggacaaaagctacgccactgagtgatagttcaaatcttcgccatgaactcatgtcagcttatcaggatttactttccgatttaaataaaaatgatctggagacaattaaaagaaaatattccatcgcattagaggaaaatgtaaatttagatccttcatctagcaaagatgaatttttcgagtctataggtattgaggatgcaatgaaagaaggtgcattggatcttcatcctgactggagtaaatataatatttatttttatcaaaaaaatagagttttttgtctcgcaatggaggaaagtaaaaggaattcccccattcgtttctatgacaaaaatggtgattttgttttcgcctggaatccattcttctcaatgattaatggaaaattagtattggtaagataa

SEQ ID NO: 15092 - DNA, 1620 bp, Escherichia coli
atgaccagtactaccgcaggttcgccaacatgcaattgtaaaaatccagatacctgcactcatatggtaaacattgatgcagacggaaaacagtatagctataaacaaggagaaccgatccagaccatttatttacatgattctgaagctaaaggtataacaataacagttacactcatagaaaaaacttgcatcagcgaaaatccagattgtcccgcaggagtaatatataatagttatcacttaactcaattaaaaaaaggaagcactaatgacacattaaaatacttaagtgataaagatatgcttatgctaactacatttggtgacacaggaagtgatgagggttcgtcaaaattagctaaatatgcgcaagaaacattccctgaattagatataatcacttttctatcagatatagtattggatggaatgaaaaatgtaaataagacaatgtattatttacaggttggggaatgtatgggagaacctataacagtaaaagaatatccattggcaattcccggaagtaacagggccatactaccaccttaccttactgttaatacagacattatcgtttatccaaagtttgaatggagcattggtgtagatattactcattccgataagagcggtgttgaaagcctttctgacgatgaaagatacgatattcttatggggaatagttccactcatccgtcatcaaattcaaattcgatgtctatagggaaatatgctataacacgaggggtgcaaatggatggaaaagctcaaatcagtataggtcacgagtctaaagactactcgaaaacaatggagagagattttactcgttacaaagaaaaattaactctcttaacaaatgcagaaagagtgattgattccattagtaaaatttataaagggaaagatgatagtgtacagttactatccatttcgataaaatacccaatcattaaagtaaatggtcatggaaaattactgcttaatagtaaaaatacaccttatcttaactgtggcgttggcgtatctctagacccactaatcgatttcactataaaattcgactttctacaggcatttgcaaaatattttaaagtagattcaatcttagctaagattcgcgaaaaagctgcctccgggaaaggagactataaagatgggaaaaatagtatttatggcgagatagtgcttgcccttattgtatctggtaatatcggtttatcatatgaataccaggctgatgaaaataatgaatttcactctgaaatatcaggggaaggtaatagaggagagctttctataactcttgaagcaaaagtagaagctggcatgagagtgtttatctttaatgggctgtttattgctaaagcagaattgattgcaaaaggtttttttgaattcgagaaaaaagaaaaaaaagattttgaattaatattgttccatgatggagttagagcaaaagtttactacaagattaaggcgaaaattggaagtgatgacgatggggatgctgacgatgatggtgataatggttatagtagggagggcggaggagaatggattctctgtgataagttagaaaaggaaaaatctccctatagaatctcattttag

SEQ ID NO: 15093 - DNA, 816 bp, Escherichia coli
atggaaacggcacccgtacagtacgccattgttgacggtgctgttgaggaaggactgctggattttctgaacgaggtgaatcccccacactgctgtctgtatgcagaacccatacagctggatctggtcgcgctggccccttatctcgtggaggtcgttccggaagttgaagcatggctgagtgttaaagcgtcgccgtggggaatatatctgactacgtactccacgatgaatgtgttgcgtcaacatttgcgaagatatttacaggtgttaataccggatgagacaaagccggtattacttcgtttttatgacccaaggaatatatgggattttctttctgttctgtctgaatgggaaaagtatctcttcgttggtccggtagataagataactacgctctggaatggtgaagagaaatgcaaaactttccacgaaattaaagataaatttcctgtagatagtggcacacgccgcaagataatgaaagtatctcgcgctcagatggatgccctgatattaatttttgaagaacgctacattgaatctctggcagaaaaactcaaatcatggggcgaaccacctgaaaaaatcaacaaagagataattggaaatacattgcagtggttaagacatcagggaataactgatgaccgcagtatccgtggattgttttacttattccacagccgtgaatgcctgactgttgatactatacctgaagatttcagaagaattttgggtgacggggatgatgagggggtatttaaggcagagacacttctcatccgtgaactgggcaacgtcccactgtaa

SEQ ID NO: 15094 - DNA, 444 bp, Escherichia coli
gtgctgaacagcaaggataagcgggtcaactatgaccggacggtcagcatcgggcatgatgaatccctggtggtggcaaatgaccggaaagtgacggttgaaggtaaacaggaccataaaaccaccaaagaccacgtcagcctgacagagggcaatcagggactggaggtgaaaggcgatctggcacagaaaataagcggcgcgctgggtatcagcgtacagggcgatattgttttacagagcgacagcaaaatcagtctgcgggtgggaggttcatttgtggtgatccattccggcggcgtggatattaagggcgcgaaaatcaatcttaacggcggaggcagtccgggagacgtgatcctgccgatgcgcccggtgatcctgaaagccgcagccgggagtggttcgatgtttgtggcgcactgcccgaaggaggataagtga

SEQ ID NO: 15095 - DNA, 306 bp, Escherichia coli
atggctacaggttcaaaaaacgcaaaatcacaatcactgacagctcggatcccgcatgatgttattgaaggcatggaatccgtaaaactggacggtgaaagcaacgccggattcatagtaaccgccatgcgcggtgaaatcgcccgccgccaggcagaaggaagcggagaaaacctcctggtttcttcgctcgatgccctagcgcaggtggaaaaaatcggagtcaaagccgccgaggagatcgggcaactcgtcaccgtcgcgcgtgaagaactccagcgacgcaaggtcaaagagcaggaatag

SEQ ID NO: 15096 - DNA, 315 bp, Escherichia coli; identical to SEQ ID NO: 12237

SEQ ID NO: 15097 - DNA, 840 bp, Escherichia coli
atggatagtgtgaaatatttattttcattcaaaaccactcgtagtggatgtatgtttaagataaatgggtttccaataactaataattttaattataacagtgggacaataacaacaggagggagtttaaccgcattcgctaacaatggtttaaataaagttgagctaatgatggggccaatagatcctgatgacaatagcactttatataatgactcatcctgtaaattggttatcaccaaagacacattaaatacaagtcaactggtaacagatataactttgtctgtcgacaaagataataaaattgttgcgtcatccagttataatggagtccagaaaggaaatggaattaacgaagagcaatcacctgaggatactaaactgaattggcatcgtttttctcgtaatattaatttgagtgacttacctgagtggttatggatgaaagcgtcgcctgtcactaataaagatttgccactaatcaaaaatatgtatcaaaaaatttgggcatcaatgagaataagggatattcctgctttgaaggagatggctgttatctccagcaaagaaattggcgaagctgaaggtgtcactcctgagataatatttgattcatacggtctgccacaagtaatgagtgacacatcactgtctgtagttggcctggaatgggagaagtataaattagttacttactgcgatagtagagtattcaggcttgcttttggtgtttatcaacactctcctctaaaattcaaagaccagagtgggaatataagattcacatatagcccttatttttccataattgatggggaagttattttagtaagataa

SEQ ID NO: 15098 - DNA, 1614 bp, Escherichia coli
atgaccagcactaccgcaggttcgccaacatgtaattgtaaaaatccagatacctgtattcatgctttaacattgaagttgggggataaagcatatgagtataagcaagatgattttttctcatcaatctccattattaataaaacaaaacaacccattcctctgactttatctctatcaggtaaaagttgtgtatccgataatcctgaatgcccaaagggaattatatataatccagatagtaaacaaacacttaaaaccttcacgcaaggcattgtaaattatgaattagattatgtttttgctgaccagaatattataactgatacgattaacttcatagaacagcatatattaaatcacaaaagcccattggattggttaccacagcagcattatatattaagagtcgggcagtgttatggagatccttttgtttcagaaacaatcaattttataaatggcgctcgacagatagtaaatatagctccgcatgatagattgtggacattaatttatatttacccgaattttaaatggaaggcaagtgttacaattcaggcaaaacaagaggttattgaggctagtgatcaagaattaaaaaaagagcagcgtcaagaaaataaagatactgacaagatgtcgaggaatacgagaggctggactaagcgaaatagattttcaattatagattcattggaaataggcggttcactttcatatgagcttaataataattcgcctatagagcttagtagtcagctaaaacgagacttcaaacagaaagcgaagcagcttacaccattgcaagaaacaataacctggttcgataaaataacgggaaaattgagtacaaacgaagggaaaggagctgacattaagcttttaaaggctgatatgcaatttccaaagcttgttatagaaggtagtggggaactaacggagaataataacgcccattcagtctacatgaaagggaaagtatctgttgtatttgacccgttgataggtatccgcataacattagacttattacaagcttttgctgcatgctatcattttgaccaatttacggccattgtacgagaagaattaactgctagggaaaaatctgtcaataatggtaataatggtgcctatgtaggtctgagttttgacttatatctagaaggtacaataaaaactaccgtatcatgtgagtctgatgccgacaataaattgagctggaatcttgacgatggtaatgaaatcgctcttgagattggcatatctataaatgtcagaacaggcattaagttttatcttgtagaaggagcttttagcgtaattggtaaaggttatgccaagggcatggtatctctcaaatcaactgattcctgtgataatataacagcagtattttatcataatggtgtaaaagtggaggtcggtgtaagtatggttggaggaatatcagatagtaacaatcaaaatcaagatggtggccgaggaaaaacgaaaaacacgacatctgatacagatagaataactaagggtataggcggaaaatatgaatggacaatttacccaccgttggaagagagtaaatcaacatgtcggtatgtgttgttttag

SEQ ID NO: 15099 - DNA, 183 bp, Escherichia coli
atgacccatcctcacgataatatccgggtaggcgcgatcactttcgtctactccgttacaaagcgaggctgggtatttcacggtctttctgttatccgaaatccgctgaaagcccagcggctggctgaggagataaataataaacggggggcggtatgcacaaagcatctcctgttgagttaa

SEQ ID NO: 15100 - DNA, 681 bp, Escherichia coli
atgacaccggacattatcctgcagcgtaccgggatcgacgtgagagctgtcgaacagggggatgatgcatggcacaaattacggctcggcgtcatcaccgcttcagaagttcacaacgtgatagcaaagccccgctcaggaaagaagtggcctgacatgaaaatgtcctacttccacaccctgctggctgaggtttgcaccggtgtggctccggaagttaatgctaaggcgctggcgtggggaaaacagtacgagaacgacgccagaaccctgtttgaattcacttccggcgtgaatgttactgaatccccgatcatctatcgcgacgaaagtatgcgcaccgcctgctctcccgatggtttatgcagtgacggcaacggccttgaactgaaatgcccgtttacctcccgggatttcatgaagttccggctcggtggtttcgaggccataaagtcggcttacatggcccaggtgcagtacagcatgtgggtgacgcgaaaagatgcctggtactttgccaactatgacccacgaatgaagcgtgaaggcctgcattatgtcgtggttgagcgggatgaaaagtacatggcgagttttgacgagatggtgccggagttcatcgaaaaaatggacgaggcactggctgaaattggttttgtatttggggagcaatggcgatga

SEQ ID NO: 15101 - DNA, 366 bp, Escherichia coli
gtggtggatggtaaacctgttattccgggcatgaaactgtcgaaggaaaaatgcgcccaggttaacgccattgagcgggataaggcgctggcatgggtggagcgtaatataaaagttccactgaccgagccacaaaaagcaggtatcgcgtcattttgcccctataacattggccccggtaagtgtttcccgtcgacgttttataagcggcttaatgccggtgatcgtaaaggtgcctgtgagtcgattcgctggtggattaaggacggtgggcgtgattgccgcacacgttcaaataactgctacggtcaggtatcccgtcgtgaccaggaaagcgcattagcctgttgggggatagatcagtga

SEQ ID NO: 15102 - DNA, 600 bp, Escherichia coli
atggctccggaggactggctgcaggcagaaatgcagggtgagattgtggcgctggtccacagccaccccggtggtctgccctggctgagtgaggctgaccggcggctgcaggtgcagagtgatttgccgtggtggctggtctgccggggggcgattcataagttccgctgtgtgccgcatctcaccgggcggcgctttgagcacggggtgacggactgttacacgctgttccgggatgcttatcatctggcggggattgagatgccgaattttcatcgcggggatgactggtggcgtcacggtcagaatctctatcttgacaatatggaggctactggtttttaccgtgtcgcactgacagaggcgcagccgggcgatgtgctgctgtgctgttttggttcatcggtgccgaatcatgccgccatttactgtggtgacggcgagctgctgcaccatattcctgaacaactgagcaaacgagagaggtacaccgacaaatggcagcgacgcacacactccctctggcgtcaccgggcatggcacgcatctgcctttacggggatttgcaacgatttggccgccgcatcgaccttcgtgtga

SEQ ID NO: 15103 - DNA, 246 bp, Escherichia coli
atgacagcgaagcacacaaaaaaatcacaatcgcacgcccttgatttgacggaacactggttaagggtgtcgataaaaatcatcgaccgcaacgccggggaaggatatgcgaaagcacatcccgaactgattagctcattcatgacaacggcagctgcaaactttgccacgctgacagaacgggagattgccgaagcggaacaggtgacaaccatcaacgttaaaaccggagagcagacagcatga

SEQ ID NO: 15104 - DNA, 714 bp, Escherichia coli
atggaacttactgatactcaaaaaatttttctgaataatgcggctaaaagatctttcagagacatggctgatcaagattatctaactgctcgtatttgctttaaaaacaatcttcctttccaatttttatggatgtctcaacaagcaattgaaaaatatataaaatgcattcttatttttaatagaatccctgttaaaaatattggacatgatcttgttgcaggaattaaaaaaattaatgatattccatatattaaactagatctgagtgataaaagcatatatttcatagagtatctaaatgaccaaggaccaaatagatacttccaaaaagtcatgtatactaatgggtttgaaattattacattagatagaactgtatgggaattacgcagatactgccgcttactaaattatcaactcaaaacccctaaaggtgagctaatagatatgctagaagtagaattacggaaaattgagcactcaaggaatgtaccgccacataaatataaaatcacagatggttatttggaaaagcgattaaaagacaataaatataatcacggaaacattttaacatggaagaatctattttttgggaagacgaaaaaaaacacaataaaaattggacgctcacaacgtatcagttaccctactcaatatatacatcctgaaagcttagagttattcaataaatttttcaaaactaactaa

SEQ ID NO: 15105 - DNA, 405 bp, Escherichia coli
atgagaaaaataaaagaaaaaatctacttgcctacaactttaacaggaaacatggataaacactatatccctgttttagatgatttaagaaaatcaatatacagcgacagaatgttatcaaggcttgcagatagcggcaatattgttatccatagttcagttgggtatccggttgctaaatacaaaaacacggggattagcataggtatagaaccattaaatccaatgataagacaagatctaactcttggatatatcgtggtagtcagaaacggaaaagtatcacaggaaattaatgggttacttaacaggtcattgccaaaagcgataagcacttttaaggatcacatcaacgaatatgaatcagtaaaaagtaaaatgcgacaacaaactatgatctggtaa

SEQ ID NO: 15106 - DNA, 279 bp, Escherichia coli
atgtttaccacttcatccccacgatatgttgttgtatcgaagtctatatcaaagttcacaattacacaggatgttaaggataaaaatactgatgtcataatttctatcatctatgatctaattaacggtaccaccgacgaggtttttattaataacattgaaaaagcaaacaatgaatgtattgagaagaatagtttttcaaaaaaatttaaagcttgcataaataacataccccctgaagaaactcatccaaccagaaacaatcccgcccccaaatga

SEQ ID NO: 15107 - DNA, 480 bp, Escherichia coli
atgaaagttgaacttaaaggtatcacatctgatgagttatcgggggttgtatttattgatgaaattgatgctcatttgcatgtttctttacaacggaaaattttctcattttttgtaagtgccttccccaatatccaattcattgtcacaactcattctccttttgttgctcaatctgtgaatgatgcgataatttatgatctaagcacgaatgaacaacttgaagatctatcaatgtattcctatgaggcaattgtcaaaggtttacttggtgtcgatactcaatcagacctgcttaataagcaattagataaattagcattgttaataaatgatgatattattgatacggataaattacaagaggttgtaaatagcattcaaccatatgaaaatcaattagatatgagatcaagaacatttttattaatgggtaggaatgctcttttagatgcgaaagatgcaactgaaggagaatga

SEQ ID NO: 15108 - DNA, 291 bp, Escherichia coli
atggtgaagaccatcgcgccatcagccagaaaaccgaattttgcagggtgggctaacgatatccgcctgatgcgtgaacgtgacggacataaccaccgcgacatgtgcgtgctgttccgctgggcatgccaggacaacttctggtccggtaacgtgctgagtccggccaaactccgcgacaagtggacccagctcgaaatcaaccgtaacaagcaacaggcaggtgtgacagcctgcaaaccaaaactcgacctgacaaacactgactggatttacggggtggatttatga

SEQ ID NO: 15109 - DNA, 255 bp, Escherichia coli
atggatgcgcggcgagggcgcatcttacagggacgttcccttgcgcccgacccggtagccgcaagggataagctgagggaaccgcgcagcggcgattttgttcgccagagcctgggggtgcagggggcggcggcgattggccgccccctgcgcgctccctgcggcattgactttatatggcatagcacattaaaggagcgcaaccgttctcatattccaaatagttttgcccatatgttatctaatcagccttag

SEQ ID NO: 15110 - DNA, 957 bp, Escherichia coli
atgctacaaaattgcgcacaatcaaattgccgcattattcctaagaaattacgcgatatgaaacgtgaagagatttgccgcttgctggcggataaagttaataaactgaaaaataaagaaaatagtttgtcagaactgttgcccgatgtgcgtttgttgtatggcgagacgcctttcgcacgtacaccggtgatgtacgagcctggcatcataattctcttttccgggcataaaatcggttatatcaatgaacgcgtgtttcgttatgatgccaatgaatacctgctgctgacggtgccgttgccgtttgagtgcgaaacctatgccacgtcagaggtgccgctggcagggttgcgtctcaatgtcgatattttgcagttacaggaactgttgatggacattggcgaagatgagcatttccagccgtcgatggcagccagcgggattaactccgccacgttatcagaagagattttatgcgcggcggagcggttactcgacgtgatggagcgaccactggatgcgcgtattctcggcaaacagatcatccgcgaaattctgtactacgtgctgaccggaccttgcggcggcgcgttactggcgctggtcagtcgccagactcacttcagtctgattagccgcgtgctgaaacggattgagaataaatacaccgaaaacctgagcgtcgagcaactggcggcagaagccaacatgagcgtatcggcgttccaccataattttaagtctgtcaccagtacctcgccgttgcagtatttgaagaattaccgtctgcataaggcgcggatgatgatcatccatgacggcatgaaggccagcgcagcagcgatgcgcgtcggctatgaaagcgcatcgcaatttagccgtgagtttaaacgttacttcggtgtgacgccgggggaagatgcggcaagaatgcgggcgatgcaggggaattaa

SEQ ID NO: 15111 - DNA, 225 bp, Escherichia coli
atgcatacagtttctgaaaatcagtgcggtaaatacgcattactgctgcaacaggccagaaccgaagcacaggccgacgcagcgacgcgcttttcttctcatcttgacgccatgattcgccatatcacaaaggcggagttatcccgcgtggagatagtcgagctactcagtcaggagtcggaaaaatttcacaatatcggattgtctcgcggggaggtgctttga

SEQ ID NO: 15112 - DNA, 996 bp, Escherichia coli
atgtctattaaaaagctcgatgatggtcgttatgaagtggacgtcagaccgcagggtgcagatggaaaacgtatcaggcggaaatttaaaactaaaggtgaagctcaggcattcgaacgtcatgtattggttaactaccacaacaaagagtggttggagaaaccagccgaccgccgaactcttacagagttgttaggtagatggtggatatatcacggaaaatcacatgagcgtggagatattgaacgggggcgtttaacgacaataatcgccaaatttgcagaaatgggagtgtccagagctgaccagctaacaaagaaaacgataactgattatcgcgttgtaatgatgaacgatggtctaaaaccagccagcgtaaatcgacatctggcaataatgagcgggatgttcaccaagttaattgacgccggtgaataccactcccacaacccgttccgtgagattaaacggttacgtgaagctgttacggaaatggcttttttgtccagtgaagagattacgcggctgttatccatgcttgatggtgatgaattaaatgcaactctggtctgcctttctactggtggacgctggagtgaagtgtctaatttaaaagctgaacacatcattaaccagatggttacgtttatgaaaactaaaaacggaaaacgcaggacaattcccgtttcgcaggacctgattaaacggatcaagaccaaaaattcaggcaggctttttaatgccagttactacaaagtgcgtaacgctctcagggaagtaaaacccgatttacctgacggacaagcagtacatgttttgaggcatacatttgccacacattttataatgaatggaggtaacataatcacattgcagcgcatcctgggtcattctaacattcagcaaactatgacctacgcacactttgcaccggatttcttacaagatgctgtgactcttaacccggtgtcaggaatgtccataatgcgtccataa

SEQ ID NO: 15113 - DNA, 300 bp, Escherichia coli
atgtcaagtgaacaaagtgagaaactaaagctcatccgtgaatccgaacgccttaaaactaaggaacttgctgaattaattggaattaattactacacatatcatggatatgaatcaggaaaatcaaaaatgcctatggaagcaggtatgaagctgtttaagcatccacgctttcgcaagtatcgtgactggttcatgtttgatgaaacagatccagcagctggacaaatagccccggctctcgcacacattgggcaagactcaacaaccttgcaccactcagaccagaagactggctga

SEQ ID NO: 15114 - DNA, 357 bp, Escherichia coli
gtgacgacaaatgtagaaatttcttgtccaactagcgatgaggcaagtttcgaaaatgaagccaaacgtaaaagcattcagatttcagagcgcccatctgatttgctgtcgaaagaaggttttgctctttacatcggtaagacaccacgcgcggtggctgaaatggctaaagcaggaaagctgccagccttctacatgacagacccattaaaaccaagagggaaagctgaattatggattaatcgccgtgagtgggacaagtacgcagcccaactggttgatgaagctccgacagaatggcatgactggaaaaatcgcattagttacagcaaatcaagacatggccgtgcggcttaa

SEQ ID NO: 15115 - DNA, 273 bp, Escherichia coli
atgcaagatgttagtgttattcttaaattaattgccagaggcttgattgatatcagaactgcagctaactctggaaatgcaaaggcttgttttatattgtctgattttatacatgttctgcctcatacagctaattgtatggtcaatgatggacggcgttatgaagatgttgtgcatgatttgtatgagcgggctaaaattaagaacatggatgattggcttgaaaatgctttaaatgatatagaattaaatcagaaaaatcatagcaaataa

SEQ ID NO: 15116 - DNA, 738 bp, Escherichia coli
atggaaagccctactccacagcctgctcctggttcggcgaccttcatggaaggatgcaaagacagtttaccgattgttattagttatattccggtggcctttgcgttcggtctgaatgcgacccgtctgggattctctcctctcgaaagcgtttttttctcctgcatcatttatgcaggcgcgagccagttcgtcattaccgcgatgctggcagccgggagtagtttgtgggttgctgcactgaccgtcatggcaatggatgttcgccatgttttgtatggcccgtcactgcgtagccgtattattcagcgtctgcaaaaatcgaaaaccgccctgtgggcatttggcctgacggatgaggtttttgccgccgcaaccgcaaaactggtacgcaataatcgccgctggagcgagaactggatgatcggcattgccttcagttcatggtcatcgtgggtatttggtacggtaataggggcattctccggcagcggcttgctgcaaggatatcccgccgttgaagcagcattaggttttatgcttccggcactctttatgagtttcctgctcgcctctttccagcgcaaacaatctctttgcgttaccgcagcgttagttagtgcccttgcaggcgtaacgctattttctattcccgtcgccattctggcaggcattgtctgtggctgcctcactgcgttaatccaggcattctggcaaggagcgcccgatgagctatga

SEQ ID NO: 15117 - DNA, 531 bp, Escherichia coli
atggatagttcgtttacgcccattgaacaaatgctaaaatttcgcgccagccgccacgaagattttccttatcaggagatccttctgacccgtctttgcatgcacatgcaaagcaagctgctggagaaccgcaataaaatgctgaaggctcaggggattaacgagacgttgtttatggcgttgattacgctggagtctcaggaaaaccacagtattcagccttctgaattgagttgtgctcttggatcatcccgtaccaacgcaacgcgtattgccgatgaactggaaaaacgcggttggatcgaacgtcgtgaaagcgataacgatcgccgctgcctgcatctgcaattaacggaaaaaggtcacgagtttttgcgcgaggttttaccaccgcagcataactgcctgcatcaactctggtccgcgctcagtacaacagaaaaagatcagctcgagcaaatcacccgcaaattgctctcccgtctcgaccagatggaacaagacggtgtggttctcgaagcgatgagctaa

SEQ ID NO: 15118 - DNA, 1278 bp, Escherichia coli
atgaaaaccaaagttgctgctatttatggcaagcgggatgtccgtctgcgcgaatttgaactgccagaaattaccgataatgaactgttagtgagtgtaatttctgacagcgtctgtttatcgacctggaaagcggcgttactcggtagtgaacataaacgcgtacccgacgatttagaaaatcatccggtcattaccgggcatgaatgtgccggggttattgttgaagtgggtaaaaatctcaccggcaaatataaaaaaggccagcgttttgtattgcaaccggcgatggggttaccaagcggatattcagcgggctacagctacgaatattttggcggtaacgccacctatatgattattcccgagatcgccattaacctgggctgcgtattaccgtaccacggctcttattttgctgcggcgtcgctggcagagcctatgtgctgcattattggcgcttatcatgccaattatcacaccacgcaatatgtttatgagcatcgcatgggcgttaaacctggcggcaatattgcgctgctggcgtgtgcaggtccgatgggcattggcgctatcgattatgctattaacggcggcatacaaccgtcgcgggtggtggtggtcgatatcgacgacaaacgcctggcgcaggtacaaaagctgctgccggtggaactggcggccagtaaaggcattgagctggtgtatgtgaataccaaagggatgagcgatccggtccagacgctgcgggcgctgacggatgatgccggatttgatgacgtatttgtctatgcagcggtgccttcagtcgtcgagatggctgatgaattactggcggaagatggctgcctgaacttctttgccgggccgacggataaaaacttcaaagtgccgtttaatttctacaacgtccattacaacagcacgcatgtcgtcggtacgtccggcggttcaacggacgacatgaaagaggcgattgcgcttagcgccacggggcagttacagccgtcgtttatggtgacccatatcggtggcctggatgcagtgccagaaaccgtgctcaatctgccggatatccccggaggtaaaaaactcatttataacggcgtgaccatgccgctgactgccattgccgattttgccgaaaaaggcaaaaccgatccgctgtttaaagaactggcgcggctggttgaggaaacgcacggtatctggaatgaacaggccgagaaatatctgctggcgcaatttggcgttgatattggggaggccgcgcaatga

SEQ ID NO: 15119 - DNA, 444 bp, Escherichia coli
atgcggcttattaattattttccagaatcatcaatttcagttatacattcagcaaaagactggcaggaagctatcgatttctcgatggcatcattgctggataaaaactatatcagcgagaattacattcaggctattaaagattccaccatgagtaatggcccttactatattctcgcaccaggcgtggcaatgcctcatgcgcgaccagaatgtggggcgcttaaaaccgggatgtctttaacgttacttaaacaaggcgtttattttccggggaatgacgaaccaattaaattactcatcggactctctgctgccgatgccgattcgcacattggcgctattcaggcgttaagtgaattactgtgcgaagaagaaatactcgaacaactcttaacagcatcatcagaaaaacaattagcggacattatcagccgcggataa

SEQ ID NO: 15120 - DNA, 1563 bp, Escherichia coli
atggaacgcactcttccctggaagcccctcctttgtttgttatttcttttatcaactggctgcgatagagcagaaaaacagaaaattgccgcacagctgcaacaagacaaagaggccatttcctctgtcgtcaaaaagagttatcgcgcattatgtggccctgagtttgttatcagcacagattcgcacgatcgccttgcggaaatgcagcaagtatttacgcctgctttaatggagcctgtactgaaatactggcaagagtcacccaaaacgtgtaaacgacgtttccccagttatagcgatcctttagcgaccttcgtcgaaggcgacaaggcgcagattggtgctttttttggtcaccaatctgatattgatattccaatggaattaatccgtgaaggggatggtaaatggaagattgcggcgattgattttgcatcgttacacgagtttgaaaaaaacggtcgggttactgatgaggtgcagaaaaaaatagatttgcttaaaaaacgctcattcaagcaacgtagggatttccctctgttgacgaggaccgagcctgagcgggtcagtaagtcccctttgacatcggtggagcaaacagttacggagccagactcttcctggctggatgtcttactgacaataggcaaatatgccctttatctgggagcgataatacttattctcgccttggtggctgttttgtggattggttatggcctggtgttcgccggacatcgccttttcaaagcatcctgtaaagatccctcaattcaaaaaattcctgctgccgaacgttgggcaatggcagtcggcgcgccttatgccattgcgggtaacaatcactgggcgcgacgagtcgttaatgatgattccgtggaagcagagaatgattgcaaaagtgaagttgagtcacttgctgacatgtggggcgtctttgatcgggattcgttacttgagcaactcttagctttgtttgtagcagggcatcgttcagtttatgaagaacagatcaaaaacgatagcgaaatgccggatgctgaatatcgcgcgttcgctcagcaattagctcagaacgcgaaatcaagtagcgaagcgaaagagcgtttgtggcagctacagatggtcagaaaaaatcgacgtaaaatatgcgatatagatttttgtgcctgggatatggtgcgttttgtcatgctatgtaatagcggggcgcaagtgggatacattacccagcgtgaaatggtcgatttttcgatgctggcagccagacgcgtacagcaacattacagaagctggcgcgaattggccgggcattttttgctggcccgttggtactggaaagcaacggataaacggcacctgattacccatattctttttaagaaagccattacatctttattaaaagagcaggggagtccgtggcgtactttaccctgggataccccattacctgaagggacagaggctgcatttgcctgggcttgtggcgtaagcactgccgatgtcgtagaggtgcgatcggatacaccggataaagcaatctacgaagcgaattga

SEQ ID NO: 15121 - DNA, 330 bp, Escherichia coli
atgctttacttttctgactatgggatgtcggtcagcgatagtgctaatcctgttcatcatgatggccatatacaaggaggctacagcgttcccctgattattaccgccagtgacatcacgtctcatcagtccgtcagcagaaaaatcagtgcccgtcatttcgcaggtatttttcagtggctgaccggcattcgtactgaaaatataccgccattcaatctgctgacagacgaagataatgaacccgttatggtttttaacggagagaggaatgtactggcagacagtctgaaaccacagcctctgattcttccggtcaagggaaaataa

SEQ ID NO: 15122 - DNA, 432 bp, Escherichia coli
atgtcggtatatggctatcccgtgccaaccacaccgtggctgaatactgctcccggtttatttattgacggctatacatcggcagcagccagtactgtgccttccctgagccggacactgatttatgactatgagcagaaccctgattccggcaacaacgtggtggcgctggcagcaaaagcaggatacagcacatggtggatatccaatcagggaaaactgggagagcatgacacacgcatctctgttattgcttctgatgcggagcataccgttttcctcaagaaaggcagcttcgcttcccgtaaaacggatgacatgttgttgttacaggaaacagaacgtgcactggcggataaatcctctccgaaggtgattttcctgcacatgattggctctcatccgaatccgtgtgaccggcttaactcctag

SEQ ID NO: 15123 - DNA, 627 bp, Escherichia coli
atggaaagtaatatcaaagggttagttgccgccgggcatgagatggcttcggaactgaaagcagaatgtggtgccgttgatatgcgcagtgtggcaaagctgatcagcgatttggcaacgcaactggaagtgcaactggtgcgtgctaatgcgctggccgaagaccagcagaaagcgattgagtcaattaagcaggctgattcggctgttaagttggcgcacgagaagttttcggcgctggcagcggagaatgcggggctgaaacacgcaatggccgtaactcttgagcatgtgtcggtcacggatgcagggcaggccggagttgctgcaatgattatcaacgatgccctgcaccacagcgaaaccccagccaccgatgctttcctggctgaagtgaagactgaagcacgcaaggagggcgcttactttgtggcgaacacaatgctggctgcctgggaagctggttttattgatgatactgcgaagaacgccgcggatattgcccggatgattcttacctctactgagtttatggctaatgcgccggaaggcgattttgaccgctcattctctgatggcgttctcgaagatatcgccgcccagcttcgcaaaggaggcaaccagtga

SEQ ID NO: 15124 - DNA, 426 bp, Escherichia coli
gtgagcaagattgactatcaggtactgcgtgaggcagcagtagcaattgaaacagtagcaacgcctcaaaaattgctggcatttcgtatgaaagtcacacctcaggttgtgctggcactactggatgaacgggaagcagacaaaaagcgcattgcagaactggaagcacgggaaataaaaccagccaaaggtgaagttcttgtcgttgtttctggttttactggttgcggaaaaagcgccatcgccggggaaatagaaatcgcgatgcaggctattggtgtaccggttcagtggactaatggcgatgcggaaaagcgcatgacaggagctgactggctgacagcgattgagatgtacaaaccaacagtgcgcatcgtggaagttaatgtgccacgcgcccctggcattcgcatcaaaggagagtga

SEQ ID NO: 15125 - DNA, 195 bp, Escherichia coli
atgaatgcattcattatgcaaaaaatgataatgaaattgtcattgttggattttcaagagaacacatacctttcctttcatcagatggaaacaacaatccgctttttaatgatgaagaagaagaataagcccgcgctgcgggattttttgtggacgaaacaaaagtcagtgctacactcattgacgccacattga

SEQ ID NO: 15126 - DNA, 159 bp, Escherichia coli
atggaagggcgcttgttggaaaaaacaagccctcgtgggttgatgataaccatgataaaattcccggctcagacaattatgagcaagagaattattggcattatcattgtgggccaacatggtatccaaacacatttaagaattataccattaacttaa

SEQ ID NO: 15127 - DNA, 1254 bp, Escherichia coli
gtgagccgtactacaactgttgatggagctccggcaagcgacactgacaagcaaagcatttctcagccaaatcaatttattaaacgcggtacgccgcaatttatgcgtgtcaccctggcgcttttctctgccggactggcaaccttcgcacttctctattgtgtgcaacctatccttccggtgctttcgcaggagtttggcttaacgcctgctaacagtagtatttcactgtccatttcaacggcgatgttggctatcggtttgctgtttactggcccgctatccgatgccattggtcgcaaaccagtgatggtcacggcgctactgttggcctccatttgtacgttactttcgacaatgatgaccagctggcacggcattttgattatgcgcgccttgattgggctttcgttaagtggcgtggcagctgttggcatgacttatcttagcgaggaaatccaccccagtttcgtggccttttcgatggggttgtatatcagcggcaactcaattggcggcatgagcggacgcttaattagcggtgtcttcacggactttttcaactggcgaattgcgctggcggcaatcggttgtttcgcgctggcctcggcgttaatgttctggaaaatcctccctgaatcacgccattttcgcccgacttcgctgcgacctaagacgttgtttatcaactttcgtctgcactggcgtgaccggggattaccgttattgttcgcagaaggctttttgctgatggggtcgttcgtcacgctgtttaattacatcggctatcggttgatgctctccccctggcatgtcagccaggccgtggttggcttattatcgctggcttatttgaccggtacatggagctcacccaaagccggaacaatgaccacccgctatgggcgcggtccggtgatgttgttttcgacgggggttatgctgtttggtttactgatgaccttatttagctcgctgtggctgatctttgccggaatgttattcttctcagccggattcttcgcagcccactccgttgccagcagctggatcggcccccgcgcaaaacgcgctaaaggccaggcctcctcgctgtatctgttcagttactatctggggtcgagtattgccgggacgctgggtggtgttttctggcataactatggctggaacggcgtcggcgcatttattgctctgatgctggtcattgctctgctggtcgggacgcgtttgcatcgtcgtctgcacgcctga

SEQ ID NO: 15128 - DNA, 774 bp, Escherichia coli
atgttccgccgtctgcttatcgcaacagtcgtcggtattcttgcggcctttgccgttgccgggtttcgtcatgcaatgctgctactggagtggttgttcctcaataatgactcgggcagtctggtcaatgcagcgacaaatctttccccctggcgacggctgctaactccggcgctcggcggactggcggcgggtttgttgctgatgggctggcagaaatttacccagcaacgccctcatgcgccgaccgattacatggaagcgttgcaaaccgatgggcagtttgattacgcagcaagcctggttaaatcccttgcctctctgctggtagtaaccagcggcagtgcaattggtcgcgaaggtgcgatgattcttttagctgcccttgccgcctcctgttttgcccaacgttttacgccacgccaggagtggaaattatggatcgcctgtggagctgcggcgggaatggctgcggcctatcgcgccccgcttgctggcagtttatttatagccgaagtgctgtttggcactatgatgttggcctctctcggcccggtgattatttccgccgtcgtggcattgctggttagcaatctgattaatcatagcgacgcgttactctacagtgtacaactctcagtgacggttcaggctcgtgactatgcgctgattatcagtacaggtgtgctggcaggtctgtgcggaccactgttgttaacgttgatgaacgcctgtcatcgtgaatttgtaagtctcaagcttgcgccgccctga

SEQ ID NO: 15129 - DNA, 669 bp, Escherichia coli
atgagtgaacaaatcaaacaggatatcgatctgattgagattttattttatctgaagaaaaagattcgtattatcctttttattataactatctgtatggcaatggtgctgttgtttctgtatatcaataaagataatataaaagtgagttacagcctaaaaataaaccagacaacaccaggcatacttgttagctgtgatagcaataataactttgcctgtcagaccacaatgactgaagatgttattcagcgaattactacattttttcagaccagcccagatgtcaagaacagagaaataaagctggaatggtcaggagataagagagatttaccaactgctgaagcggaaatatctcgcgtgcaggcgtctattatcaaatggtatgcgtcagaatatcataatggcaggcaagttctcgatgagatacaaacaccttcagcaattaacagtgagctttatacaaaaatgatatacctgaccaggaactggtcattgtatccgaacggtgatggctgtgtaactataagctcaccagaaataaaaaataaataccctgctgccatttgcctggctctgggattttttataagcattgtaatttctgtaatgttttgccttgtcaaaaaaatggtagatgaataccaacaaaactctgggcagtaa

SEQ ID NO: 15130 - DNA, 852 bp, Escherichia coli
atgagtgaacgtctgagcattaccccgctggggccgtatattggcgcacaaattacgggtgccgacctgacgcgcccgttaagtgataaccagtttgaacagctttaccatgcggtactgcgtcatcaggtggtgtttctgcgtgaacaggccattacgccgcagcagcaacgcgcgctggcccagcgttttggcgagctgcatattcatcctgtttaccctcatgccgaaggggttgacgagattatcgtactggatactcataacgataatccgccagataacgacaactggcataccgatgtgacatttattgaaacgcctcctgctggggcgattctggcggcgaaagagttaccctcgactggcggcgatacgctatggaccagcggtattgcggcgtatgaggcactctctgttcccttccgccagctgttgagcgggctgcgtgcggagcatgatttccgtaaatcgttcccagaatacaaataccgcaaaacggaggaggagcatcaacgctggcgcgaggcggtcgcgaaaaatccgccgttactacatccggtggtgcgaacgcatccggtgagcggtaaacaggcgctgtttgtgaatgaaggctttactacgcgaattgttgatgtcagcgagaaagagagcgaagccttgttaagttttttgtttgcccatatcaccaaaccggagtttcaggtgcgctggcgctggcaaccaaatgatattgcgatttgggataaccgcgtgactcagcactatgccaatgcggattacctgccacagcggcggataatgcatcgggcgacaatccttggggataaaccgttttatcgggcggggtaa

SEQ ID NO: 15131 - DNA, 885 bp, Escherichia coli
atgtctcatttaaaagacccgaccacgcagtattacactggtgaatatcccaaacagaaacaaccgacgccaggcatccaggcgaagatgacaccggtaccggattgcggcgagaaaacctatgttggtagcggtcgcctgaaagatcgtaaagcactggtgacagggggcgattccggaataggtcgcgctgccgccatcgcttacgcgcgtgaaggggctgacgtggcgatcagttatcttcccgtggaagaagaagacgctcaggatgtgaaaaagatcattgaagaatgcggacgcaaagccgttctgctgccaggcgatttaagcgatgagaaatttgcccgttcgctggttcacgaagcgcacaaggcgttaggcgggctggatattatggcgctggtcgccgggaaacaggttgccattccggatattgcagacctcaccagcgaacagtttcaaaagacctttgccattaacgttttcgcgctgttctggctaacccaggaagcgatccccctgctaccgaaaggtgcaagtatcatcaccacttcgtcaatccaggcataccagccaagtccgcatttactggactatgcggctacgaaggcggcgattctgaactacagccgtggcttggcaaaacaggtcgcggagaaaggtattcgggtgaatattgtcgcgccaggcccgatctggacagcactgcaaatttccggcggacaaacgcaggataagatcccgcagtttggtcagcaaacgccgatgaaacgtgcggggcaaccggcggaactggcccctgtatatgtttatctggcaagtcaggagtcgagctacgtcaccgcagaagtgcacggcgtgtgcggcggcgagcatttaggttaa

SEQ ID NO: 15132 - DNA, 1041 bp, Escherichia coli
atggtctggttagcgaatcccgagcgttacaggcagatgcagtaccgctattgcggaaaaagcggtttacgcctgcccgcgttatcgctcggtttatggcacaatttcggtcacgttaacgcgctggaatcacagcgtgcgctcctgcgtaaagcgtttgatttaggcattacgcactttgatttagccaacaattacgggccgcctccaggaagcgcagaagagaactttggtcgcctgctgcgggaggattttgccgcttatcgcgatgaactgattatctctaccaaggctggctacgatatgtggcccggcccttacggctctggcggttcacgtaaatacctgctcgccagcctcgaccaaagcctgaagcgtatggggcttgagtatgtcgatatcttttactctcatcgcgtcgatgaaaatacgccgatggaagaaaccgcctctgcgctggctcatgcggtacaaagcggtaaggcgctgtatgtcgggatctcctcttactcgccagagcggacgcaaaaaatggtcgagttactgcgcgagtggaaaattccgctgttaattcatcaaccttcgtacaatttactgaaccgctgggtggataaaagcggcctgctggataccctgcaaaataacggcgtgggctgcattgcctttactcctctggctcagggattgctgaccggaaaatatctcaacggcattccgcaagattcacggatgcatcgtgaagggaataaagttcgtggtctgacgccgaaaatgctcaccgaagccaacctcaacagcctgcggttattgaatgaaatggcacagcagcgtggacaatcaatggcgcaaatggcgttaagctggttgctgaaagatgatcgcgtgacgtcggtattgattggtgccagccgcgcggagcaacttgaggagaacgtgcaggcgctgaataatctgacatttagcaccgaggagctggcgcagattgatcagcatatcgccgatggcgagctgaatctgtggcaggcgtcttccgataaatga

SEQ ID NO: 15133 - DNA, 354 bp, Escherichia coli
atgaaagtaattagcatgaaatttatttttattttaacgattattgctcttgctgctgtttttttctggtctgaagataaaggtccggcatgctatcaggtcagcgatgaacaggccagaacgtttgtaaaaaatgattacctgcaaagaatgaaacgctgggacaacgatgtacaacttcttggtacagaaatcccgaaaattacatgggaaaagattgagagaagtttaacagatgttgaagatgaaaaaacacttcttgtcccatttaaagctgaaggcccggagggtaagagaatgtattatggcatgtaccattgtgaggagggatatgttgaatatgcgaatgactaa

SEQ ID NO: 15134 - DNA, 816 bp, Escherichia coli
atggaaaccttaactgttcatgcaccatcaccatcaactaacttaccaagttatggcaatggtgcattttctctttcagcaccacatgtgcctggtgctggccctcttttagtccaggttgtttatagttttttccagagtccaaacatgtgtcttcaggctttaactcaacttgaggattacatcaaaaaacatggggccagcaaccctctcacattgcagatcatatcgacaaatattggttacttctgtaacgccgaccgaaatctggttcttcaccctggaataagcgtttatgacgcttaccacttcgcaaaaccagcgccaagtcaatatgactatcgctcaatgaatatgaaacaaatgagcggtaatgtcactacaccaattgtggcgcttgctcactatttatggggtaatggcgctgaaaggagcgttaatatcgccaacattggtcttaaaatttcccctatgaaaattaatcagataaaagacattataaaatctggtgtagtaggcacattccctgtttctacaaagttcacacatgccactggtgattataatgttattaccggtgcatatcttggtaatatcacactgaaaacagaaggtactttaactatctctgccaatggctcctggacttacaatggcgttgttcgttcatatgatgataaatacgattttaacgccagcactcaccgtggcattatcggagagtcgctcacaaggctcggggcgatgttttctggtaaagagtaccagatactgcttcctggtgaaattcacattaaagaaagtggtaagcgataa

SEQ ID NO: 15135 - DNA, 528 bp, Escherichia coli
atgaccagcaataaagataagaacaagaaagcaaacgaaatattatatgcattttccataatcgggattattccattaatggctatattaatacttcgaataaatgatccatattctcaagtgctgtactacttatataataaggtggcatttctcccttctattacatcattgcatgatcccgtcatgacaacacttatgtcaaactacaacaagacagcgccagttatgggtattctcgtttttctttgcacatataagacaagagaaatcataaagccagtaacaagaaaacttgttgtgcaatcctgtttctgggggcccgttttttatgccattctgatttatatcacactgttctataatctggaactaacaacagcaggtggtttttttaatttattatctcataatgtcatcactctgtttattttatattgctccatttactttactgttttaaccatgacatatgcgattttactgatgccattacttgtcattaaatattttaaagggaggcagtaa

SEQ ID NO: 15136 - DNA, 1536 bp, Escherichia coli
atgagtgataatgaaggtagtgtaccgacagaaggtattgattacggggacacaatggttgtgtggccgtcaacaggacgaattccgggcggtgatgtgaaacccggaggctcatcaggtctcgctccatccatgcctccgggatggggggattacagcccacaaggtatcgcacttgtacaaagtgttctttttcctggaattattcgccggattattcttgataaagaacttgaagagggagactggtcgggatggtctgtcagtgtgcatagcccctggggaaacgagaaagtttccgctgcacgaacagttcttgaaaatggtttacgtggtggtttgccagaaccgtctcgcccggctgctgtttcttttgcccgtctggagcctgcttccggaaatgagcaaaaaattattcgtcttatggttacacagcaactggagcaggtaacggatatccctgccagccagttaccagcagcgggtaataatgtaccggtaaaatatcgtctgacggaccttatgcagaatggtacacaatatatggctattatcggaggtattccgatgacagtgccagtagtggatgccgttccagttccggaccggagtcgtccgggaaccaatattaaagatgtttacagtgcccctgtatcaccaaatctaccggacctggtattaagtgtgggtcagatgaatactccagttcggtctaatcccgaaatccaggaagatggcgttatttctgagacagggaattatgttgaggctggttatacgatgtccagtaataatcatgatgtcattgtccgttttcctgaaggcagtggagtttctccgctatatatttcagccgtggagattctggacagtaatagtttaagccagcgccaggaagccgaaaataacgcaaaggatgacttcagagtcaagaaagaacaagaaaatgacgagaagacggtcctgacaaaaaccagcgaggtcatcattagtgtcggtgacaaagtcggggaatatcttggagataaatataaggcgctttcccgtgaaattgcagagaatataaataattttcagggaaaaacgattcgtagttatgatgatgcaatgtcttccattaataagttaatggctaaccccagccttaaaataaatgcaacggacaaagaagccattgtgaatgcgtggaaagcatttaatgctgaggatatggggaataaatttgctgcgttgggtaaaacgttcaaagcagcagattatgcaataaaggcaaacaacatcagggagaagagtattgagggttaccagactggtaactgggggccattaatgctggaagtcgagtcctgggttatcagtgggatggcatctgctgtagctcttagtttgttttctttgacattaggctcggcccttatagcctttggtctttcggccacagttgttggttttgttggcgtagttattgcaggtgctattggtgcatttatcgatgataaatttgttgatgagttgaatcacaagatcataaaataa

SEQ ID NO: 15137 - DNA, 513 bp, Escherichia coli
atgaacataagtgtggaagatttgtttccggagtcatttcaacgaattaaagaagaagaagaagcgaacaggcctgatcctaactggtttgcacatttaccgcctgaaaaaatcaatgcgtatatgtccaagtatcctttcaaatcctttgatgatattcctctggacaacagtggtttgcaatacccttcactacaggaactggagttttattttcccccggcggccctggctgctaattgccatcaacttcctgagagaatgagacaaaagcctgtggtcacgatgattaatgggttaaccctgttaaggtcgcttggcgttcaggctttcaatatcgatccacgccgatggcacaaaattaaaacctatttaagtcaaggaacgattgaatatccacaaatgtccgaagacgggaaagtaattatagatggcaggcatagaatactacttattatgcagatttataaagtaactgatgttcccgttttttttctgaaaggaataagctga

SEQ ID NO: 15138 - DNA, 462 bp, Escherichia coli
atgtataaacaggcaacagaattaatgctgaactttaaagaccgcattctgattaagggggaagaagataccggcaagtcaactctcctgactgaaataagaatcagtgatagtgattcccggtattacaactttaaaactcttaactctgcggggtacaaccggctttgtgatgaaaatattgataattttgattttctgaatacacctgaaaagacgttaatccttgatggagtcaggctgtgtgaaaagaaaatgacatcaaaagttatcaggttaattaaacaggccagaaaatatcataaacgcctggttgtggttgcagactcatgtgagtctgagtttatcgaactgttgtttgatggtgttattgcattgtccttcaattctgacagagaaaggagctgcaatgtttatacgccatcaaggcatcgtaatacagataatatttatgccaggtaa

SEQ ID NO: 15139 - DNA, 453 bp, Escherichia coli
atgagtaataatataaaatatggctccagaatacttgatatgggtgttctgctggagatgaaagcgcttgtgaatgcaaatggtggtgtgtcacggtgcattatggagtgtcggcagcttgccagtgaggtccgtcattcgcaacaattactggataagctgtcatgtattgacgactggttgtgccggttttcctcaataatgtatcaccgttttgataaagaacagattcagtggcgggaggatgtggacagggattatcccagagaaaaagtttatattttcagtcccgataatgtctccgtccataataatgatattaaagactctgccaataacacatcaggaataaccgtgtcgattacagccagtaaaatatgcgcaggtcagaaagagtttgatgcttttttaaaactggcagaaaaactgagagaaaaccctacgggtaattaa

SEQ ID NO: 15140 - DNA, 3291 bp, Escherichia coli; identical to SEQ ID NO: 14675

SEQ ID NO: 15141 - DNA, 2205 bp, Escherichia coli
atgactacacgctatttttcgtcacttattgaacaatcgttgtctcgttcaactgaagcaacgctcagtatcatgggcgttaccaacccgcagctgcgtgaacatctcgcgcaacaaatgggggctgattgtgggaaaccgggctcattccttgcttctccggtattccagcaaatgtttggctggaaggagtcaaaccacacgatgcgcagcctgacggaaggcaacgcattgttgagcaaagcagtggttgattcactggatgatcagaataatggccggtaccggtttggtgctgactggaggccttttacgcaccagttagccagttggaaagctttgctggaaaagaaacattcagtggtggtaaccagtggtacgggttcaggtaaaacggaatgttttatggtaccggtgctggaagatctttaccgggaactgcatgaaaatggcaacaatccgttggtcggtgtccgagccctttttctctatccattgaacgccctgattaattcacagcgcgagcgtctggatgcctggacgcgtggttttggtacagggatccgctactgcctttacaacggcaacaccgaaaacctacacgcttcggtaaaaagcgaacaggcaaaaaggccgaatgaggtgctctcgcgcgaaaaaatgcgtgaagaacctgcgccgattctggtgaccaacggcacgatgctggaatatatgatggttcgccaggtcgacgccccgattatccagcaatctaaagcacaaaaatcactacgctggattgtactggatgaagcgcatacctatgtagggtcgcaggccgctgaactggcgctccagctgcgtcgtgtgatgaccgcgtttggcgtgacaccagatgacgtgcgctttgtcgcgacctctgcgaccattgccggcagcgacgctgaaaagcagctgaaaaaatttctctctgaattatccggtatcccgcaggagcgcatcgatgttctggacggaagtcgggtgattcctgaactggaaccatccaaaaacgtttctgttccgttagacgagatagagcaaatacctgatctggatctaagagataaaaatgataataaaattaaagggataagtcctgagcgcttttatgcgcttacgcattcccccgaagcgcgttacatacgtgagatgttggtcaaacagcccaatccgatgaagctggatgagataacagagcggttacacgtgctgacaaaacagcattacagccagcaggaagtactgcgttggatcgatgtctgttcagggactcaacctaatgcaaaggatcccgcatttcttaaagtcagggcgcatatcttccagcgtaatacccagggaatatgggcttgtgttgataaagattgcagattaaagcacggtacaccgctcgacaaaggctggccctttggctatgtgtatgtgaaccagcgacaaaattgtgactgtggaagccctgtatacgaagttgcattctgtaatgattgtaatgagcctcatcttctggcacgggacaaaaagggcaaactagtccagtgggaaaataaaggtggcgatgaattctctttgcaggatgaagtacctgttgaacatgacgctacagaagaaaaagtcgaaaaagagaacagttttcagcctccgttgattattgccgcaggagagaccagcgaggcaggttataccctacaacgcctcgaccgtcagacgcgccgtattggcgttattaacaatgacagcattccgctgattattaatgatattgaacaggtttgtagtgccagtggctgtggctacagaggcatgagtgggaaacagcccttccggcgtgcactattaggtgggccattttacgttactaatatcgtgcccaccgttctagagtattgtcaggactttaccagtgatgaaggcaaagagggcgtcggaccagattcgttgccaggacgaggtcgtcgactcatcacctttacagacagtcgacaagggacagcccgaatggcggtgcgtatgcagcaagaagcagaacgcagtcgcttacgcggaagcgtagtcgaaattctcagctggcatcaaaggacgcaaacgtctacagcgccgaatgccaatgccgatctggaaaaattagcggccagggcgaagcatgaaccgccccgggtttcctggagagtgttttatctgtga

SEQ ID NO: 15142 - DNA, 1224 bp, Escherichia coli
atgagtagaaaaaatgctgtaaaaataaaagtcaatgattcggaatcaagtggctattttttcaaagcaagctccaaggatgattcttttgtaatttcatccaagcacggcctttgttctagacagtcagattgtgaagaatttcttgataatgttcagaattgttgccgtttatgcactcaagatttaaatattgacaatatatcttttgaaattgaaggaaataagaagctaaagccaataagttatttcagtcttgaaaacaaagatattgtcatcaccaaagtggatggggtatctaattatcctttaaggataggaaagatagaaaaagaaaagtattatacttatggttacaagagtaaatgtgataagcctggcagaattttattaaatgagccagatttattagatgggatttgttatttcaatatatgttccgatgcaacacctgagttgattgagaaaagtgaagaatattatggaatttcaggttcattagtttttgattctccagaaaaagatgttttaaccgcacatgcagtaataacaactaatgaaaccaataatgacttaggttcagaaatattacatgatattgatttcaaagaaattaataactttttcggctgtgaagtattcttgggtaaaaaactccaatttcaactagatgatacttttagtaaaaatttttcaaagattggagaagtgcttgttagcgacaaactccaaattgaaatatttatttcatcttataaaggtataccatattttaatttgacaccaattgctgatgcattaattcaaagtaagttttattatgtttttggaaatgttagtagaagtgatcatataaatataatcgctgcatcaaacattatactcaacaaatctcatttagaaccagctaataaattattaactagcaaattaactgaatcgatattatcagcacctcatatttattccactagcattgatgataataattatcatcatattcattttaaacaaatgacttctggtgatattgagctcataatatcatgttatggtggaggagatgatcttcctaaagatataaatggcactttaactgagttgttacacaatataaatacttataacttaaataaaaattcaataattgagaggtcttttcttaatcaaaaatttacagatgcacaatgcgaaattttatatgagatttttttgagcgattaa

SEQ ID NO: 15143 - DNA, 837 bp, Escherichia coli
gtggaaaaagaaaatatcaccctcgatccgcgttcttcatttactccatcttcgtcggcagatattcccgtgccaccagatggattagttcaacgcagtacccgaattaaacgcattcaaaccaccgccatgttgttattattttttgcggcggtaatcaattatctcgaccgcagttcgctgtcggtagcaaatttaacgattcgtgaagaattgggattaagtgccaccgaaatcggcgctttgctctccgtgttttcactcgcttacgggattgcgcaacttccttgcggcccactattggatcgtaaaggcccacgcctgatgctgggactggggatgttcttctggtcactgttccaggccatgtctggcatggtgcacagctttacgcagttcgtgttggtgcgtatcggtatggggattggtgaagcgccgatgaacccatgtggcgtaaaagtcattaacgactggttcaacatcaaagagcgcggacgcccgatgggcttcttcaacgcagcttctaccattggcgttgccgtaagcccaccgattctggcggcgatgatgctggtgatgggctggcatgggatgtttattaccattggtgtgctggggatttttctcgccattggctggtatatgctctatcgcaaccgcgagcacgtagaactgactgccgttgaacaagcttatctcaatgcaggtagcgtcaatgcccgccgagatccgctcagttttgccgaatggcgcagcctgttccgtaaccgcacaatgtggggaatgatgctcggattcagtggcatcaactacactgcgtggctgtatctggcctag

SEQ ID NO: 15144 - DNA, 471 bp, Escherichia coli
atggcggctatccctttcctgtttggggctgccgggatgctggtcaacggttacgttactgactggctggtcaaagggggaatggctccgattaaaagccgtaagatctgcattattgccgggatgttctgttctgccgcctttacgctggtcgtaccgcaagcgacaacatccatgacggcggttctgctgattggcatggcactgttctgtattcactttgccggaacatcctgctggggcttgatccacgtcgcagttgcttctcgcatgacggcgtcggtgggcagtatccagaactttgccagcttcatctgcgcctcttttgcgccgatcattactggttttattgttgataccacccactcattccgtctggcactaatcatctgcggttgcgtcaccgcagcgggagcactggcgtacatcttcctggttcgtcagccgatcaacgacccgcgtaaagattaa

SEQ ID NO: 15145 - DNA, 687 bp, Escherichia coli
atgaccaatttctacacgattaactatggaagcgagcttttagatgatggcaaattgagcgaatccatcggttcaaaatgcgccgctccatcaggtcaaaatgacacgatggaagaggtcaaaatgaaacgctccattggttcaaaacgacccaatgtcatcgggtcaaaatggcccgatgatcctacagagaatacaacagagattactacagagaataaaaacacttttcgtccggaagcttcgcaaccggacccgcagacggctgaacaggattttttaatccggcaccctggcgcagttgtgtttagtgcgaaaaaacgccagtggggtagccaggaggatctggcgtgtgcgcagtggatatgggggcggatcgtgggtctctacgaacaggccgccagtgatgatggcgagatcatgcgaccaaaagagcctaactggactgtctgggccaatgatgtgcgcacaatgcggatgctggatggcagaagccacagacaaatttgtgaaatgtttggtcgggtacagcgggatccattctgggtaaaaaacatcatgagcccgtcaaagctccgcgaaaaatgggacgaactggtcatccgcctggggcgttcacctgtacagcgttgtgttaatcatatttctgaaccggatacagaaattccgcctggtttcagaggataa

SEQ ID NO: 15146 - DNA, 1569 bp, Escherichia coli
atgagtcagaaatacctcattcgcatcgctgagctggaaaggctgctctctgagcaggctgaagccctccgtcagaaagaccagcaactgagtctggttgaagagacggaggccttcctgcgctctgcactggcacgtgccgaagaaaagatcgaagaagatgaacgggaaatagagcatctgcgggctcagatagaaaaactgcgccggatgctgttcggaacccgttctgaaaaactgcgtcgtgaggttgaacaggctgaagccctgctgaaacaacgcgagcaggaaagcgatcgttacagtgggcgtgaggatgacccgctggttccccgccagttgcgacagtcacgccatcgtcgtccgttaccggcatatctcccccgtgaaatataccgcctggagcctgaagaaagctgttgcccggagtgtggcggtgagctggattatctgggggaagtcagcgcagaacaactggaactggtgagcagcgccctgaaagtgatccgcacagaacgggtaaaaaaagcctgtacaaaatgtgactgcatcgttgaagcaccggcaccatcccgtccgatagagcgtggtatcgcgggcccggggttacttgcccgcgtgttaacgggaaaatactgcgaacacctgccactgtatcgtcagagtgaaatctttgcccgccagggtgtcgaactgagccgtgccttactctccaactgggttgatgcgtgctgccagttaatgactccgctgaatgatgccctgtacagttatgtgatgaacacccgcaaggttcacactgatgacacaccagtaaaagtactggcaccgggcaggaagaaggcgaaaacaggatatatctggacgtatgtccgggatgaccggaatgccggttcgccagaacctccggcggtctggttcgcctactcaccggaccatcagggtaaacatccggagcaacaccttcgtcccttccggggtatcctgcaggcagatgcgttcgcaggttacgatcggctgttcagtgccgaacgtgaaggcggcgcgttgacggaagcaggatgctgggctcatgcgcggcgcaaaatccacgatgtatatatcagtactaaaagcgcgacggcggaagaagcactgaaactaatcggcgaactgtacgccattgagcacgaaatacgcgggttgccggtgtctgaacgcctggcggtcaggcaaatgcagagtaaaccgctactgacttccctgtataagctgatgcaggagaaagaacacacgttatcgaaaaaatgccgtctgagagatgcgttccggtatatcaggaagcactgggttgcgttgtgcaacttctgtgatgacggtctggcggaggcggacaataacacagcggaaagagcgcttcgtgcagtctgtctcggaaagaaaaattcttatgacctttgtcaaatattaagcccaaaaagaccttacgcagctccgggagcttcgttatatcgcggattaaagaacctgaaacagtcagactgtatcttggattttacaaactcttattcggggattttagccccatga

SEQ ID NO: 15147 - DNA, 1104 bp, Escherichia coli
atgaaaatattagttactggtgcaaatggttttattggtcgtaatttatgtttgaggcttgaggaacttggttataaagatcttattagaattgatcgagaatcaacgaagcaagatcttgaacaaggcttacaggatgccgattttatttatcacttagctggtatcaatagacctaagactgatgatgagtttatttctggaaacagtgatttaacaaagcatatagttgagtatctcctttctattggtaagaatacaccaattatgctaagttcttcgatacaagctgaacttaataatgcttatggggttagcaaagctgtagctgaaagctatgtcgaaaaatatgctgctgctagtggttcttcgtattatattttcagatatccaaacgtttttggtaaatggtgtaagccaaactataattcttttatagcaactttttgctacaatatttccaatgatattgagattactatcaatgatgcagcagcgccagtcaatctggtctatattgatgatgtttgtactgatgctatagctcttctctctgggacggttgaaagtggatataaagttgttgcaccaatttattcaacaacagttggtgaagttgcagaattaatttatagcttcaaaaatagccgttccaccctgatcacagaggctgtcggggcgggatttacccgtgcattgtattctacatggctgagttatttaccagcagagaagtttgcgtacaaggtacctttttatggggatgcccgcggagtcttttgtgagatgtcgaaaacgccttcagcggggcagttttcattttttactgctcaccctggtattacgcgtggcggacattaccatcacagtaaaaatgagaagtttttggtcattcgaggtcaggcatgctttaaatttgaacatgtgattaccggtgagcgatatgaactgaaagtttcatcgggtgagtttaagattgttgaaacagttcctggttggacacatgacattacaaatattggaactgatgaattaatagtcatgctctgggcaaatgaaattttcaaccgtgatgagcccgatactattgcgagacctctataa

SEQ ID NO: 15148 - DNA, 1212 bp, Escherichia coli
atgaaacttgctttaatcatagatgattacctgcccaacagtactcgtgttggtgcaaaaatgtttcatgaacttgctcaagaatttatccagcgtgggcacgatgttacggtaattactcctggtacgggcatgcaagaagagatttcttttgatacctttcagggggtaaaaacatggcgttttaaaagcgggccgctcaaggatgtaagtaaaattcagcgagcggtcaatgaaacgcttttgtcctatcgggcgtggaaagccatcaaaaaatgggtaaaaaaagagacctttgagggggtgatttattattcaccttccatattctgggggcctttagttaaaaaaattaaagctcgttgccaatgtcctgcttatcttattttaagagatatgtttccacaatgggtaattgatgcaggaatgcttaatgctggttccccaatagaacgctactttcgtctttttgaaaaaatatcttatcgtcaggcaaatcgtattggacttatgtctgataagaatcttgatgtttttcggaaagataataaaggctatccgtgcgaagttttgcgtaattgggcatccctaacaccaacgatcatacccaaggattatataccactacgtaagcgacttggcctagaggataaaaccattttcttctatggtggaaacataggtcatgcacaggacatgacaaacttgatgcgacttgtgagaaacatggcagcatatcctcaagctcatttcctatttattggccagggggatgaagttgaattaattaattcattagcatctgagtgggcattgacgaatttcacctatttgccctcggttaaccaagatgaatttaagttcattttgtcggaaatggatatcggcttgttttctctttccgctagacactcttcccataattttcctggtaagttattaggctatatggttcagtcgctacctattttaggtagcgtaaatgccggaaatgatttgctcgacattgtcaatcaaaataatgcgggattaatccatgtcaatggtgaggacgataaattatgtcaatctgcgctattaatgttgcatgatattgatgtgcgccggcaacttggttcgggggcgaatatattgttgaaagaacaattctccgttgagtctgcggcacagacgatagaaatgaggttggaggcatgcaatgcgattaattga

SEQ ID NO: 15149 - DNA, 399 bp, Escherichia coli
atgcgattaattgataatgaccaactcgacgaattatatgatcaagccgggcaatcggaacgtttacgttcccaccttatgatgcacggctcgcatcaagaaaaggtacagcgtttacttattgcattagtaaagggcagctatgttgaaccgcattatcacgaacttcctcatcagtgggaaatgttcattgttatggaggggcaacttcaggtttgtttgtatggtagaaatggtgaggttataaagcaatttatagcaggagataatactggaatgagcattgtggagttttctccgggcgatatacacagtgtcgaatgcctatctccgcgtgctcttatggtggaagttaaggaggggccatttgacccttcttttgcaaaatcgttcgtgtga

SEQ ID NO: 15150 - DNA, 1194 bp, Escherichia coli
atgagtgagtcagtgcacactaacacttcgttgtggtcgaaggggatgaaagcggttatcgtggcgcagtttctctctgcgtttggcgataatgcgctgctgtttgccactctggcgttactgaaagcgcagttctatccggagtggagccagcccatcctgcaaatggtgtttgtaggtgcttacattctttttgcgccgtttgtcggacaggtggcggatagcttcgccaaaggccgagtgatgatgtttgccaacggcctgaagctgctgggcgcagccagtatctgctttggtatcaatccgtttctcggctatacgctggtgggtgttggtgctgcagcctattcaccggcgaaatacggtattctcggcgaattaaccacgggtagtaagttagtgaaagctaacggtttaatggaagcttctaccatagcggcgattttgctcggttccgtagccggtggtgtgctggctgactggcatgtcctggtcgccctggccgcatgcgcactggcctacggtggtgcggtcgttgccaatatctacattcccaaactggcggcggcgcgtccggggcagtcctggaatctcatcaacatgacccgcagtttcctgaatgcctgcacctcgctatggcgcaatggtgaaacgcgtttttcgctggtgggcaccagtttattctggggagcaggtgtcacgctgcgtttcctgttggtgctgtgggtaccggtggcgctgggcattaccgataacgctacgccgacctatctcaacgcgatggtagcgattggtatcgtggttggcgcaggtgcggcagcgaagctggttacgctggaaaccgtatcacgctgtatgccagccgggattttgattggcgtggtggtactgattttctccctgcaacatgagctgctgccagcctatgccttgttgatgctgattggcgtgctggggggcttttttgtcgttccgctcaatgcgttgctacaggagcggggtaaaaaaagcgtcggggcggggaatgcgattgcagtacaaaaccttggcgaaaacagcgctatgttgttgatgctgggcatttactcgctggcggtaatggtaggcatcccggtcgtgcccattggcattggcttcggtgcgctgtttgcgctggcaatagcggcgctgtggatctggcagcgccgtcattaa

SEQ ID NO: 15151 - DNA, 960 bp, Escherichia coli
atgaaactctcacgtatcagcgccatcaactggaacaagatatctgacgataaagatctggaggtgtggaatcgcctgaccagcaatttctggctaccagaaaaggtgccgctgtcgaacgatattcctgcatggcagacattaagtgtcgtagaacaacaactgacgatgcgcgtttttactggcctgacgctgctcgacacgctgcaaaatgttatcggcgcgccttcgctgatgcccgatgcgctcacgcctcatgaagaggcggtattatcgaatatcagctttatggaagcggttcatgcccgctcttacagttcgattttctcgacgctgtgccagaccaaagatgtcgatgccgcctacgcctggagtgaagaaaacgcgccgttgcagcgaaaagctcagattattcagcaacattatcgcggtgataatccgctgaaaaagaaaatcgccagtgtgtttcttgaatcttttttgttctattccggtttctggctaccgatgtatttttccagccgcggaaagctgaccaataccgcagacctgatccgtctgattatccgcgatgaagcagtccacggttactacatcggctataaatatcagaaaagccaggaaaagatctcccaggcacaacgtgaagagttgaagagtttcgccttcgatttgttgctggaactttatgacaacgagttgcaatacaccgatgagctgtacgccgaaaccccgtgggctgacgatgtgaaagcgtttctctgttacaacgccaataaggcgttgatgaatctgggctacgaaccgttatttcccgcagaaatggcggaagtgaatccggcaatcctcgccgcgctttcgccgaatgccgatgaaaatcatgatttcttttccggttcaggctcttcatatgtgatgggaaaagcggtcgaaacagaagatgaagactggaatttctga

SEQ ID NO: 15152 - DNA, 753 bp, Escherichia coli
atgtgtttcagccacgaccagaatgaggatgttacagagaaaatgacagagtttagtcgttcttatcttgacaaattaaaggatgtatcgggatttgtggtttgtgcaaaatctcctagctgtggtatggaacgcgtgcgtgtatatgatgaaaatggtaatcgtggtcgtaaagatggagtgggactatttacgagcacgttgatggaaaggttttcctggctaccggttgaagaggatgggcgactacatgatccagtgcttcgtgaaaactttgttgaaagagtatttgctttacatgagctcaatcatctttataaagcgaaattatcaagaagggaattattagcttttcatagccgttataagcttcagttgttggcgcatagccaggccggttataaagagatggggccatttgtggctgcaatacatgagtgggcagaccttgaatcatactttgaggtgtatcgtgagaagctgatggcgattctcagaaaacctgcatcacgtaaaaatcacacgaatgtgctgatgcatatacagggatattttagtaactgcttaaatacacgtcagcgtaaagagttgagcgatgttatacttaactatcgagctggcacgctacctcttcttgcgccattaactttgctgaagcattacttggcagagtatcctgatgattatttgcttatacagaattacttccacccctatcctgatgaactggctctaagactcttggtgaactag

SEQ ID NO: 15153 - DNA, 324 bp, Escherichia coli
atgtcaggctccgttatacacagccagtctgcagccatggtaccggcagtgtattctgccggacagtctgcacaacttcctgttgccattgattatccggcagctctggcactccgccagatgtcgatggttcatgatgaactgccgaaatatctgctggctcccgaggtgagtgccctgcttcattatgtcccggatctgcgccgcaagatgctgctggccactctgtggaacaccggcgcgcgtattaatgaagcactagcgctgacgcgggggatttttcgctcacgcctccgtatccgtttgtgcagcttgcgaccctga

SEQ ID NO: 15154 - DNA, 684 bp, Escherichia coli
atgggcatggggggggaccatgtattttgtgagaaaatcccgtttggaataataaaagagttatttttccatgggagtttgttaacctcatgccgtaagttattacagatagctcgccttcatggcataaatatgaaagatgtcttattaatgcatactaatagtatgcattatcttataactgaagcacagtgttatttttccaaagatgttataaaaaaccttcactatgacagaaaaacagtaagtgaagaaagaaagtcagcccttcaggaggctattcttgataatgggacgagcctgacgctgagtcttacggaaaacgatatattcccttttacagaccagaggatgataggctatggtctgaaactcagagttgaggagtcatttgatactacatcaaaacgatttcaatacagaaaagcgattaatgacagatataaatttgtatttaccagaaaagataaggggcatataacaggtgcatatcagtcggcccttagtgttaataaggaccgtgttattaatcttctgcgccatgggcagttcgcgacacacggtttgttaaacttggagggggtagagcgagcaatagaaacaagttctcatggcatcggtggagtcagttttattcttatgaaattaattgctgcagaacttatctttgaaggatatttataa

SEQ ID NO: 15155 - DNA, 315 bp, Escherichia coli
atgacttcattctactttaagccgaatatacatcatgtcaatattaataatgaaataactatccttgatgagatatctgatcgttatatccttctttcagaaaagcaatcaattctcttaaaagagtatatgagtgatggttctcataattatgtcggtgatacaatgaacctggaaggtataatttctaaggagtcgggtactcctttggcaaagagtactccgtctcctcagggggttggtatattgacctggaacagttatgtcagcactcggttgggtattgccagtttttttatatctctgaagcaataa

SEQ ID NO: 15156 - DNA, 369 bp, Escherichia coli
atgagaatgattcttgtccgaaaacgtctccagtcaaagggttttcaccattgccttgagcattgtcgttgtgcgcttagccagaagagttttccgtacatttccctgaaagataaattaattattgggcagaagttgagccagagtattaaaattgcggcaccgtttatcccgggcaaggttaaatgccttgagttttcacttgttttgttcgacatgttagtgtcaagaaaaatcagtcccacattatttattggattccagcgctatgattttctttctcatgcatggctggaaattgataatgaagtggttgcagaccaagataacctgaaaacaaaacttacaccaataattagagtgggataa

SEQ ID NO: 15157 - DNA, 312 bp, Escherichia coli
atgtttaatgtgattactcacccgaccgcactggatgagctgctggaattaccagacaatctgcgtggtcgcatggccagactgattgaacggctggaacaggaaggtaacaaaatgaaaatacctcacagccgtgtaattggcggagggctttttgaactgagagtcggggataaaaatatcgcaaggacactgtacgcttatgcaacgggtaacgaaatttatctgctgcatgcatttgtgaaaaagacgcaaaagacaccaacgaaagctattgaaatcgccaggatgcgcctgaaggagatgaaatga

SEQ ID NO: 15158 - DNA, 1284 bp, Escherichia coli
atggagtatattcataaagattttaacttagctcatgtattaaaatatggtatagcatttcaccatggttcactacctctatttataagaaaaagaatagaggacttatattccaaaaagaaaataaattttatcttttgcacatcaactttacttgaaggggtaaacttacccacaaagaatgtttttatttatccattccctaaaaagactgttaacgatgaaaaaaaatgccgattagatttttggaatctggcggggcgagctggaagatacagaagtgaattgactggtaacatagtatgcctgaataccgctgataataactggagcaatgcagatgctaaaattagcctaggtaataatgttattatagaggatgaaataaactcaacattactacgccatcaaaaaatattaaattattttgatggtaaagttaaatctccaactaatgacattattcaactcagctcacttattctatcagaaatattaacttatttagataaaggttatatagggcgaattttaaatacctttaatgaaaagattcggtttatgcttattgattcaggaaaaaaacatcttgatcgtaatagaattattgaaatagataaagtgaccttttcagaaaatcatatattctcaacatccatacacgctaaagcccaactcaatgctaaaaataaagaaaaattattgcgttcttatagcagagaggatgttttcaattatttggaaacaataaatgaaatatatggcctgcgtaacacccctgattcattaaaccaactgtgcattgtgacttattcgtggctcatgggtaatacgctgaatttattaatatcaaacgctattaaatatagcaattcagttagagatcctattagctatagatgggttaaatttgataaaaccaatcctgatcatataaacgcaaaaataatggaggcaatacaatgcattgaatctgaagttacttttaaacttgaaacatgtattgctcatttttatcagctatgtcaatcaattcacggcgatgaaaatgcaggcattaatctttcaccttatttagaatatggaacattagatactaacatcatagaacttcaagagtttggtttctctcgtttagccgcaattgaaattatagcaaagcacaaagagtgtgttacattcaaaacaaatgagacatcattgcaaataaacactcagaaattaagagctaagattgaaaagcacagtgtaattgatagagaactatcatggttgaatttataa

SEQ ID NO: 15159 - DNA, 252 bp, Escherichia coli
atggagagttatattaagtctatcaaatacttctgttttgtattggcagtaggctataccaagatcagttttcctcgggaaatggtgatgaatactggcttttctgataccaatttctttttccagatctgcgtaactgaaccccaaaaatccgcgttgctggatcagagtatccgttatgcgaagtatattctcataagtagacacggctttacctgttatgtattaaagggactattatacatattttaa

SEQ ID NO: 15160 - DNA, 3117 bp, Escherichia coli
gtggagatcagtgtcaccagccagacggcgggagccagtacagtcactgccagcatcaacagcagcagccagagccggaacgtcacgtttatcgccgatgtcaggacggcgcagatcgcgagtctggaggtgaggcaggataactcagtggcagacggcgcaatggcgaacacgctgcgggtgaaggtcaccgatgcgttcggcaatgcgcttgccggacagacggtcagcgtgatggcaggcaacggtgcaacggttgctccgacggtgattacagagccggacggcacggtggagatcagtgtcaccagccagacggcggggatcagtacagtcaccgcaaccatcaacagcagcagtcagagccgggatgtgacatttatcgccgatgtcaggacggcgcagatcgcggatctggtggtcattaaggatggttcagaggcggacggttcgacggcgaacacgctgcgggcgagggtgaccgatgcgttcggtaatacgcttgccgggcagacggtgagcgtgttgggaggcaacggcgcaacgactgccccgacggtcatcacagggccagacgggacggtggagatcagtgtcaccagccagacggcaggaatcagtgtggtcaccgccagcatcaacagcagcagccagagccgggatgtgacgtttatcgccgatgtcagaacggcgcagatcgcggatctggtggtcattaaggacggctcagtggctgacggcgcgacggcgaatacgctgcaggtgaaggtcactgatgctaacggtaatgcgcttgccgggcagacggtcagcgtgatggcaggcaacggcgcaacgactgccccgacggtgaccactcagccggatggcacggtggaaatctctgtcaccagccagaccgccggaaccagtgtggtcaccgccagcatcaacaacagcagccagagccagaacgtcacctttgtaccgggtgatgcatcgcagctcacttcaaccgttgaaacaaataagtcgaactatacggttggagagacaatcaccatcacggtaacgctccgggatgcgttcgataatctggtaaccggtgcagcttcacagttagccgctaatggtgtgctgacggtggctggcaccgacccgtcagaaacgggaagctgggttgaatcaggtggcgtgtataccacaacccgaatggcgacgattgccagtaccaatcagcacgccaacctgcaattgcagtcgtggagtgatggcgtaacgtcagatcgctatgacatacagtccggttctccggcgcaagccacatcaactatcgccacggataaaaacgcatacaccgctggcgagaccataaccgtcgccgtgacgctgaaagacgcgcacggtaacctggttgaagggggcgagtccttactgtctggtgataacgtaatagtggaaggagccgtacgttcaggaggatggtctgaaaacgccggtgtttatactgctacatggtcggcgcaaatggcgggagactctcaccacgcgacgctgaagttgtctgagtggggcagcagtaaacaatcagagagttattccatccacagcggtgctccggtgcaggcaaattctgctatcaggacagataaatcggcatatatcgccggggagccattaaccgtcacagtaacgttacgggatgagtttggtaaccctgctttcgggctgacatcagaagtcatcgagtcttatattgatagtttcgcggtaggcggcgcaactcccgattctatgcagtgggtcgagcagaataatggtgaatataccattgtctggacagcatggggtgccgaggaaaatctggttgccagtctgaaattaaaaacatgggcagcggagattaagtcctcattatatggaatacaaccaggtgcagcggcaaaaactcaatcaacgattgtcgcggacaaaacgatatatatcgctggggatagcataacggtgaccgttgttcttaaagatgcccagggtaactttattactgatggtgttgttcagcttaatgaggaaaacgtacaagtcaggaatgcggatcctatccagggcaataattgggtttacaacggcaatgggcaatatcaaagacagtatatggcacattttgcggaagcgaatttgaatgcgcaactgaagatggctggttggagcgatgccaattattcaaacaattatactatcaaaccaggtgaagtgagtccgcttggttcacagcttcgtatacgagaagttttagtagtggaaggggcggatttacctgtcagtgctttattagttgatgattttggaaatccggtggataacggtctggatttgctggatgatgcagtgtacttacaaaatgtagaaaagaaagaaggggaaaaatggagatatgtgggtgatggcatatatgaacgtacatatatggcctaccaagaaggagaaaatttaacttcatttatggagattaaaggttggcgtatatacgggcaaccatcctataacatccttccttttgtggaagtcgagtcgctgagtgttaatggtgtaaaattcagggcgacagatggttttccagaaacagggtttgatggtgcaaaattcacgctgttactaacccataatatgaaaaatacggattataattggacggctgggatttatggaattaatgttgatagtaatggagaagtaacattatctgtgctgataagaagtgaagttactattactgggaaacccaagaatggtaaagggaatgatgttgtatttaaattcaagattaaaaaatggtttactagtttaggtgctagcagtagtaatacctgggatatcataaatacttcatgtagctatggtcaaatgccgtcatctttagaattagcgcagcggccaagcggtggggtagtaccgcgaaaagtaggtacgttgtggggcgaatatggtaatttaaaaacgtatgggaacgcttttagcagtacggattattggacaagtactcagctcatgggagtacacgagaaatttaatcctgaaactggtatatcagagcttgggacaggaaagtcttctggcttgtgcgtagagtattattaa

SEQ ID NO: 15161 - DNA, 1698 bp, Escherichia coli
atgcaactgcaacatggaaaaaatactacacaacaatatatatttggcgactttgtattaaaaaacaatggaatattattattcaaaaacaaagaatatcatattccaccgaaagaacttggcgttatcattctattacttaatgctgacggtgaaattgttagcaaagaagagattatcgataaggtctggagcgcgagtgttgccagtgatgaatctctaacacgatgtatttatgcattgcgcaaacttttgcatgagaataaacagtgtaagtatatcgaaacggtctatggtcgtggataccgttttactgtacctattgtgattgtgaccgataatgaaccggtaaagtcgaccaccactcttgccgtttttccctttcgtaccgaaggttcgatcaatgttctaaaactccattacgaacttgtccagggcctttcaaaatatgctttttgtggtttagatattttacccgcttcggtaacaaatgaggccagtgatttctccactatccatcagtttatcaataaaacaggtccagaatattatattatgggtcaggtcgttcactatggtaaaaactggcgtttatttattgagttaattcatgccagaacacataaattgattgatcatcaaagcattgatttcaatcccgataatcctctttccgtattattatcacaagtaattaatattcttattgaaaaaatacccaacattaattttaaatctattaatacacaacaaatgccatctctggattctgctgttatgtatatgaatggcagaatggaaatgtaccgttatacaccagagagtttgaaacgagcattagtaatatttagagattgtgtaagtacgcaaccgcaaaataccttgccctactgttgcctggcggaatgccatatatcattagccctccttggactcagtgaacaaaaacaagcaataactacggcagtaacctccattgaaaaggctcttgaaattaacccttcaaattctcaggcattgggtttactgggtttaatcagtgggctaaaagatgaacattcagtgtctaatgtgctatttaagcaagcacatttactcaaacctaattcgccagacgtttattattatcagtctctgctatgttttttgaacggtgaccttgcaagagcatttaatctaatagaaaaaagcattgctcttgaacccaataaaatgggtataagcattcttaaattaattatactttattacacatcccccctcgataacgcgatatcttttgcattaaatcttaacagtcaaaacacctgtaacaatccaattattacctctattctggctatgttcatggcactgaaaggacataatgataaagccaaaagtttattgcttaaacttgagcctgaacatggtcttgattacacctgtgttaactcgctttatacgaagtttctgatctatggcgcatctataaaaaatgacattatgaagttactggcaaatattagcaccaacaaaatcaatggtgttattttgccgttaatttacactgtgtatggtaaaaaagaatatgaaaagcgctggcaacaattaattaaagagaatgatttatggtcaaatgttttgcttcatgacccccgtttgctcagtgtgaaaaacgaatttaatactattggtgtgatgcgtacttctgcgtaa

SEQ ID NO: 15162 - DNA, 1152 bp, Escherichia coli
atggccacctatgaaattaaaaatgcgaccagcacacataatattaacaatctcgataaaacaatctttgatagagattatagtaaagaaaacaacataccaaatgataataaaattgtgcaatactataaccttaaagatattaagcatgacataagctctcagtttataatattaaaaaatacagacagagaagtctgtccggaactaagagtaaaactattggataatcttaattattcaaggaatacgctagataatttgaggggtgaccttaacaaacctacaattacatccagtcaatcaagcagttctacagagcagaccactattaaaatatctaaatttaatatccttgatatgctagataatttgaccatgcgacaacaagctgttatggaggaatttttaagggtattcacatcaatgtataaagcctcagctatgtctgaggctattatgagcaatgtttttgaacaacttgtccagtatcagagaaaagaaaccgaacgcgccacagcagcaagttcgataggtgttattatcgggtcaggagttggcgcagtcggggcctcggcatctgccgtagcaaattacagaagccatcccaaaaagatggtaacccttacacctgaccaagagcatactatcgaaagaactgatgataatgcacagcgcgcgtcaaaaagggaagttatagagcaacaagcttctctcaaacaaatagatgaaaaaataaaaaatacaacgaaagatacgaatcttaatgaaaaagaaaaagaagaggcgctgaaatcatatgataaagaaaaagaagctactctagaaaagattagagatacaaacgagaaaattagcacaaaacataacaataggtataataaatattttactataggtaaagcagatgtactttcacagcttagcaatgaatcaattcgagcaacatctagatatctagaaagcactactcatgcagaaaaagacattgttgaacaggctaaaaatgttatgcattcagttatgagtagctatctggatcaaattagtcgtgatgttcaaggaagagatcaggcacttaatttattacaacaaataatacaaaccattattgatactgatagcgctatcgttcaaggcattcgctcataa

SEQ ID NO: 15163 - DNA, 1782 bp, Escherichia coli
atgtcggcaccgattacgggacaaacgatcacgtttgaacaaatcagcgaaacattgcgcacacagtatagcgatgcggaaaaaagactgcaggacagcagcaaaacgcaagttgatcccatgcggcttaataaaaacccgaaatcccttgataatgatattcgcgctcgtcttgaaaacaaaccgatgcttgctccgcctgaaatgcaggttttagattcagacaacgccactacagcaaagacgaacgatgcccgcctgacgatgattttgggtaatctaacaggcattgccgatcaggatattacaacacgattgcataataaccttgacagcaccctgcttcgacacgaaatggcacataataagtttcgtgaattaagtgacgcttactcctcgtcattagattccgcgcaaaaagccgacgacatcatgcatcaggccaataataattacaatgcggtcgataaaaaggtgcaatcgctggagaaaaaagtcaatgcattgaatcaagagctgtcgcaactgcaacctggcgatccgcaatataataaagtgctgacgcaaaaaaatgcggctgagaaaacactcacgctatcattacaaaaaaaatcgttagctgagaaatcgttaaatacagccattatggatgctgatgctgcgatcggccaaagtatggaaatttttgacgaaattcaacagcaagaacagattaataactttaccaccaatatttgcctgacccaggaaaaccagaaaaacagaaacgcgacagccacatttatccttttgattacctcagtaatggaagttattggtgataccaattgcgaatctattaaaaatcagtctgaggtaatgaaagagattaaccatgtcagggaaaataaactcaatgaaacagcgcgtaaatatactaaatggacaaaagttgtaaaaatcgttaatgagtgtgtaactgtagctaccattgccatgagcgcaatcttaattgttgttggtcttcttgctgcagttccaagtggtggttcaagtattgcgggtgcattggcacttattggaggaatagcgggcgcagtagtattaggtgtagatatcacttgtcaaatcgctctgggcaccacggctaccggctggattttagggaaagttgtagaaggtctttcggctgctattaaaacagttgatcccactctgctcgcaatcaccgcgcttctggacgttattggtgtcgatcaagatacgattgaactggttaaaagtatttacgcaagtgcagccgcttctattgtcatggcgacagtaatgattggtgcagctgtaatatgttctgtagcaataggggccgttgtttctgcattatcaaaaacagccgcagaagaagtcaccaaagaaataacaagcactataaaatcaaccattgaatctattattaaatccgtttcaaaaaatattataaaggtattaaacagagtatgcagcatgatacaaacatcagtcgtagttttgaagttgattgccaagataagtaatgctctggagaaaataggcttagctatctgtgaaacagcaacatcgataatgaattattgtgttgctgaaaactctgccgacatggcaattttacaacaggacatgagtaatctatcaaaaacgcgtgaacaaatgctttcagtattgcaaagggtggataaaaccgtcgaacaagaggtaagtcagatggtaagagtattacaacaccgaactgaaaccttaaaatttgcttcccattctatcgtataa

SEQ ID NO: 15164 - DNA, 243 bp, Escherichia coli
gtgaagacggccgccctggacctcgcccgcgagcgccaggcgcacgaggccggcgcgcggacccgcgccacggcccacgagcggacgccgcagcaggagcgccagaaggccgccagagaggccgagcgcggccgtgaggcttggacgctagggcagggcatgaaaaagcccgtagcgggctgctacgggcgtctgacgcggtggaaagggggaggggatgttgtctacatggctctgctgtag

SEQ ID NO: 15165 - DNA, 477 bp, Escherichia coli
gtgagccggtgccggtactcgaccgccgtgacattctggattacgtcgaatgcatcagtaacggcagatggtatgagccaccggtcagctttaccggtctggcaaaaagcctgcgtgctgccgtgcatcacagctccccgatttacgtcaaacgcaatattctggcctcgacatttatcccgcatccgtggctttcccagcaggatttcagccgctttgtgctggattttctggtgttcggtaatgcgtttctggaaaagcgttacagcaccaccggtaaggtcatcagactggaaacctcaccggccaaatatacccgtcgtggcgtggaggaggatgtttactggtgggtgccgtccttcaacgagccgacagccttcacgcccggctccgtgtttcacctgctggagccggatattaatcaggagctgtacggcctgccggaatatctcagcgcccttaactctgcctggctga

SEQ ID NO: 15166 - DNA, 2508 bp, Escherichia coli
atgccacgtcgttccatcctgtccgccgccgagcgggaaagcctgctggcgttgccggactccaaggacgacctgatccgacattacacattcaacgataccgacctctcgatcatccgacagcggcgcgggccagccaatcggctgggcttcgcggtgcagctctgttacctgcgctttcccggcgtcatcctgggcgtcgatgaactaccgttcccgcccttgttgaagctggtcgccgaccagctcaaggtcggcgtcgaaagctggaacgagtacggccagcgggagcagacccggcgcgagcacctgagcgagctgcaaaccgtgttcggtttccggcccttcaccatgagccattaccggcaggccgtccagatgctgaccgagctggcgatgcaaaccgacaaaggcatcgtgctggccagcgccttgatcgggcacctgcggcggcagtcggtcattctgcccgccctcaacgccgtcgagcgggcgagtgccgaggcgatcacccgtgctaaccggcgcatctacgacgccttggccgaaccactggcggacgcgcatcgccgccgcctcgacgatctgctcaagcgccgggacaacggcaagacgacctggttggcttggttgcgccagtctccggccaagccaaattcgcggcatatgctggaacacatcgaacgcctcaaggcatggcaggcactcgatctgcctaccggcatcgagcggctggttcaccagaaccgcctgctcaagattgcccgcgagggcggccagatgacacccgccgacctggccaaattcgagccgcaacggcgctacgccactctcgtggcgctggccaccgagggcatggccaccgtcaccgacgaaatcatcgacctgcacgaccgcatcctgggtaagctgtttaacgctgccaagaataagcatcagcagcagttccaggcgtcaggcaaggccatcaacgccaaggtacgtctgtacgggcgcatcggtcaggcgctgatcgacgccaagcaatcaggccgcgatgcgtttgccgccatcgaggccgtcatgtcctgggattcctttgccgagagcgtcaccgaggcgcagaagctcgcgcaacccgatgacttcgatttcctgcatcgcatcggcgagagctacgccaccctgcgccgctatgcaccggaattccttgccgtgctcaagctgcgggccgcgcccgccgccaaaaacgtgcttgatgccattgaggtgctgcgcggcatgaacaccgacaacgcccgcaagctgccagccgatgcaccgaccggcttcatcaagccgcgctggcagaaactggtgatgaccgacgccggcatcgaccggcgctactacgaactgtgcgcgctgtccgagttgaagaactccctgcgctcgggcgacatctgggtgcagggttcacgccagttcaaggacttcgaggactacctggtaccgcccgagaagttcaccagcctcaagcagtccagcgaattgccgctggccgtggccaccgactgcgaacaatatctgcatgagcggctgacgctgctggaagcacaacttgccaccgtcaaccgcatggcggcagccaacgacctgccggatgccatcatcaccgagtcgggcttgaagatcacgccgctggatgcggcggtgcccgacaccgcgcaggcgctgatagaccagacagccatggtcctgccgcacgtcaagatcaccgaactgctgctcgaagtcgatgagtggacgggcttcacccggcacttcacgcacttgaaatcgggcgatctggccaaggacaagaacctgttgttgaccacgatcctggccgacgcgatcaacctgggcctgaccaagatggccgagtcctgccccggcacgacctacgcgaagctcgcttggctgcaagcctggcatacccgcgacgaaacgtactcgacagcgttggctgaactggtcaacgctcagtttcggcatccctttgccgggcactggggcgatggcaccacatcatcatcggacggacagaatttccgaaccgctagcaaggcaaagagcacggggcacatcaacccaaaatatggcagcagcccaggacggactttctacacccacatctccgaccaatacgcgccattccacaccaaggtggtcaatgtcggcctgcgcgactcaacctacgtgctcgacggcctgctgtaccacgaatccgacctgcggatcgaggagcactacaccgacacggcgggcttcaccgatcacgtcttcgccctgatgcacctcttgggcttccgcttcgcgccgcgcatccgcgacctgggcgacaccaagctctacatcccgaagggcgatgccgcctatgacgcgctcaagccgatgatcggcggcacgctcaacatcaagcacgtccgcgcccattgggacgaaatcctgcggctggccacctcgatcaaggggtctgacgctcagtggaacgaaaactcacgttaa

SEQ ID NO: 15167 - DNA, 327 bp, Escherichia coli; identical to SEQ ID NO: 10003

SEQ ID NO: 15168 - DNA, 735 bp, Escherichia coli
atgatggcggtcgccgtcactgcgggtgatggtaatctgcgggattgttttaccgctggccgtcaccccctgccccgctttgagaaacaacagttttcccatttttaccgacacctctccgccgttgcgttctgcaagacgggtcaggaatttcgcgtcggactcctgcgactggtcgatgtgcgggattttaattccggccagtggcggagcgacactggcttccagcctgttacgggaggctatcgcctcaacaatcgcaccgagcgtggtgtcatgccaggagccttcccggcgggaattgagcgtcccgcgaaaatctgcactccgggcgcggatggtgaccacatccggcgcgccccggtgttcgacctcatcaacggtaaatttccctttgcataccagggcaaaacctttccagccgatatacaccgtcaggacagcgccacgaaccggcagcccgacctgcccgtcggcatcattcagttcaatatcaagctggtcagcctcaaagccccagttatccgtcagggtcatgctcatcagacggtcgctgatattgccggtaatatccctgctgtcgagtatcagcatgtaatccggcgtcagcgtactgcctgcatcaaatgtcagtgcatccagcattatcccgcccccgtcatacccgtgaatctggtcgccatactgccagccttaccgatgagcgattccgcctgtttaccgatatcgccataa

SEQ ID NO: 15169 - DNA, 213 bp, Escherichia coli; identical to SEQ ID NO: 5358

SEQ ID NO: 15170 - DNA, 2760 bp, Escherichia coli
atgagcacgaaatttaaaaccgttatcactactgccggagccgcaaagctggctgccgccactgtccccggcgggaaaaaagtaaacctgtctgcaatggccgtgggtgacggtaatggcaaattaccggtgccggatgccggtcagacgaaactggtgcatgaggtctggcgtcacgctctgaataaagtcagtgtggataataagaataaaaactatattgtggctgaactggttgttccgccagaagtgggcggcttctggatgcgtgagcttggtctgtatgacgatgccggaacactgattgcggtatccaacatggcagaaagctataagccagaactggctgaaggctccggacgtgcgcagacctgccgcatggttattattctcagcaacgtggcgtccgttgagctgagtattgatgccagcacagtgatggctacgcaggattacgtcgatgacaaaatcgcagagcatgagcagtcccgccgccatcctgacgccacgctgacagaaaaaggttttactcagttaagcagtgcaacaaacagcaccagtgaaaagctggcggcaacgccaaaagcggtcaaggctgcgaatgacaacgcaaattcacgtctggcgaaaaatcagaacggtgcagatatccaggataaatcagcttttctggacaatgttggcgttaccagcctgacgtttatgaaaaacaatggcgaaatgccgcttgatgctgatctgaatacgtttggtcctgttaaggcttattcaggtatctggtctaaagcaacatccaccaacgcaacactggagaaaaatttcccggaagataatgctgtcggtgtgcttgaggtttttgctgccggcaattttgcaggtacgcaacgctttaccacgagagacggcaatgtatacatgcgtaaactcgccaataggtggaatggcactgatggtccgtggggcgtatggcgtcacactcaatctgctacccgccctttgagtacgactatagacctgaatacgcttggagccgccgagcatcttggtttatggcgtaacagtagctcagctatagcttcatatgaacgcaattatccagaggaaggcggctttgctcaggggatgcttgagatcctcgaaggcggaaattatggaagaacgcaacgttataccactcgccgtggaaatatgtatgtccgctgtcttgcggcaagctgggatgcatcaaatccgcagtgggaaccgtggttaagagtcggtcatcagtcagagagtcgttattacgaaggtgatttaaatgttctaaccgaccccggtatttacagtgttacaggaaaggcaacaaacggtccgatgctggacaccgttggcgcgacactacttgggatactggaagtaatcagacgttttgatggtgtgtctgtctggcagcgttacacaaccacagggaaatcagaaaccacacagggacgcacttttgagcgcgtctacgccgggagcaaatggaccgaatggcgagaagtatataactccttttcgttgcctctgaatctgggcatcggtggcgcagtggcaaaactatccagtctggactggcagacctacgattttgtgccgggcagtctgataaccgtgcggcttgataacatgaccaacattcccgacggtatggactggggcgtcattgatggcaacctgataaacatcgcagttggtccgagtgatgattccggtacggggcgctcaatgcatgtatggcgcagcactgtaagtaaagcgaactaccgcttttttatggtgcgtatttcaggaaatccgggaagccgcacgatcacgacaagacgtgtgccaattatcgacgaagctcagacatggggcgcgaaacagacattcagtgctggcctttctggtgaactgtccggcaatgcggcgacagcaacaaagctgaaaacagcccgtaaaattaataacgtttcgtttgatggaacatcagatattaacttgacgccgaaaaatattggtgcatttgcttcaggaaaaacaggagacaccgttgcgaatgataaagccgttgggtggaactggagtagcggagcctataacgcaactactggtggggcatcaacgttaattcttcattttaatatcggtgaaggaagttgtcccgccgcccagttccgcgttaattataagaacggcggtattttttatcgttctgctcgtgacggttacggattcgaggctgactggtctgagttttataccacaacgcgaaaacctacagcgggagatgtcggtgcactgccgttatctggtggtcaattgaatggtgctctgggtataggaacatccagtgctcttggcggtaattcgattgttttgggtgataatgacacgggctttaaacaaaatggtgatggtaatctggatgtttatgctaatagcgtccatattatgcgctttgtctcgggaagtattcaaagtaataaaaccataaatattacggggcgtgttaatccctcggattacggtaactttgattcccgctatgtccgggatatccggcttggtggtgctgccacatacaaacctgcgaacaatggcatgacatggacacatcaggcaccgtccgggtgtgtatattccggcattattgttcaggataccggctcaaactctgccgataacattggtggtgtatattacaggccggttcagaaatacattaacgggacatggtataacgtggcgcaggtataa

SEQ ID NO: 15171 - DNA, 528 bp, Escherichia coli
atgcagcatttaaaaaatattacggcgggtaatccaaaaacggttgaacaatatcaattgacaaagggttttgatgttgtctggtttttttcagaagatggtaagaactggtacgaagaacaaaagtattttgctgatgacacgataaaaatagcgtacgacaaagataatattatccgctatgtggaaaaggatgtgacagctatcagaccggatggattaagtgttgttgaagtggcggatattactgctaaccgacgggcggacatttcagggggctggatgtttaaggacggcaaagtgattaaacgcatttatacggcagaggaattgctgcagcaggcagaaaaccggaaagccagacttcttgcagatgctgaatccgtgattttgccgctggagcgcgcggtcagactgaacatggcaacagatgaggagcgtagccgactggatgcatgggagcgttacagcgttctggtcagtcgtgtggatcctgcaaatcctgaatggccggaaatgccgcaataa

SEQ ID NO: 15172 - DNA, 546 bp, Escherichia coli
gtgattcttgccatggttctctttgttggaaatatattttatacaaatcatcgtgatgatataagcatggaggctgagagggacagtatcagaacaatgtttgcatatgaaatcgctaataaccatcgcgctctcacttttcttgataaaacgagatatattggctttgacgaaaattcggagcattttgttggcgagccttttgccattaatgtcaaatcattaggggggcctcgcttacagattgcattaaaccagactgataaagtgtttaaatcctacttcagcgaattaagtaagcttgataaagaggatgttactcttcttatggactattaccatgagcaaagcatcctgctggagcgtgtaaaatctacgttacagaagatgaaaagtggtaatgatattaaagttgatattgatggttacttattagaagaacacttcatgaatgagcttaatctttctaatattttgcttaaacgctatagccatttgttgtcacaacacgccaaagaacataaaacaaaagatttacataattga

SEQ ID NO: 15173 - DNA, 453 bp, Escherichia coli
atggcaaaaattcacgaggtaaagctgcacgcaaaatattttgaccttgtgctggaaggaaagaaacgcgcagagtttcggaaaaatgaccgtaattatgagcgcggggacacgttgattttgcatgaatgggtgcagggtgtgtatacggggcgaaaggttgaagcccagataacagatgttactgacctgtcagactggctggaagattatgtcttgctaagtattgagcggcttaatacaggcgcatgtgagattgtgaactggaaagaacttagtgagcgtggtctggtattcagaattaatcatgaaattatgcatcagctcggccttgctgttatgtatgaaccagagacggggatgtctggcggggcaatggttgccacggatggagcatggaactattcagatgaacagattgagcgtgcacagcaaaacgggtggcttggataa

SEQ ID NO: 15174 - DNA, 447 bp, Escherichia coli
atgttagcaacaggaagcttacttttgaatatttgtaagttgttagctttagctctccgagctaactcctttcaaccgtcaaaaaccagcaccaacgcagtaaaaatattactgtcaactaacgcctcgcttcgctcgttgttcaaccccgccagccctgaaaacaagtttcacgactggcggcgttctctatcgtctgcgtggtggtggcataactctggattgaccgatatggttaaaccgcccgtaattatcccggactatttcggcacacccgaccagctcatcgggcgtcagattttcgttgaccataatctgctgcaaacgctgaacaatagccatcagcttgatatttttagttttatggtgcggtatctcacctggtattctgtgcattatccaagccacccgttttgctgtgcacgctcaatctgttcatctgaatag

SEQ ID NO: 15175 - DNA, 597 bp, Escherichia coli
atgaattcaaaaaaaagaaataaatatctcaagttaatgtttgagtgtagaaaaagaattgaaacgctacatgatttagcatccggacatacaggaggactttatcttcaagttttaatagaaatagaagcgttacaactcagaaagttattggagcttatcgcattttcatcgttaatttcatatgaggaatcctataagactgttgcgaagagtattgatggtgtatggaaagccaagcgtattataagtgagttagaaaaaataaatccaaatttttacccgttacctgtatcatcatttaccaatgacgggtggaagaaattgaaaggtggatatttaacaaaaaaacaatttattgcactgtatgatgaatgttcaactcatattcatgttagaaacccatacaggataagcgaaaactcgctggcttttcatagaaaagtaccttcatacttagagagaattgaatgtttattatctaaacatattgtttcacttgcagatgatagggagtttctttttgtagaggtacctcattttgaagattcggctacccctctaagaattagatgtttaattaaaaatagagggtaa

SEQ ID NO: 15176 - DNA, 1356 bp, Escherichia coli
atgtttaatctcattatcgggggtgagccctctgtgtttgatagatggccatctatggatcctaatattaaaaatggggaagatagtttctctctttcccgaatgctagaaggtacaccatccttactttataaaaaattaacaccagtaagccctataactttagacgctctatctaagctacctgttcttttcatgactgaaatatacgataaagacggtgacaaaaatagatatttaagagtaagacttggaaaagtcggcaacttacacatagataatgatgatgtttgttatcactttgaaatcgttcatgattttggcgaaatcaagaaccccgaaataaaaaaatataaagaaatattagacttaggtgcttatggtcttagcagaacccactgggcagttaaagataaaaaattaagagaaacactgctaaaacttgagctaaataaaaccaaaaacgatacaactgaaaaaattctctctaacacctccaaaattggaaacatcaaaagaacatcaaaaataagaaaaataaagagcttaaaggaatatatcagttttatagaaaaatccaacaattcaaactctgaaattttttatagaggacattcacgaaataaatatgaacttatcccatctcttttccggaaacatgataacgggactcataagcaccttgattcagaatcatctatggttcgtgaaattctgtcagcaaggcctaatgaatttatatctgataattttacgatcgataaattagttagaatgcagcattatggtttacctacaagattgctagatattacatccaacccgctaattgctttatattttgcatgctgtgaagatcctgaagacaccggacaagtcatctcgtttcctacagaaagaaaaaatatcaaatattttgactctgatactgttagctgtatagccaatctggcatttatgccacacaatatcttaagcactatatcaaaaagcttaattgaaaacgacaaatctcacgcaaaagaactactcaataaacttttagatcatattcaagctgaaaaaccatattttaaaaaaaatatagacctgcatgatcttcggaaaatactattcatccgcgccagaataaataatgaacgcattcaatcacagtctggcgcatttctattatttggtcacgaggcagtactcccagagacaacagaagactttcctcttgacagagttgacataattaataaaaaaataatcttgaaagaacttgcacaattgaacattactgagagcactgtttatccaagtatagaaaagacagcttctgaaatcgcaaagaaatatatgtctgacatttaa

SEQ ID NO: 15177 - DNA, 258 bp, Escherichia coli
gtggcgacgaaggacgatttttttaatatcaaaaaagccagcgccgctgacctgctggacgcgcaccgcatcccctttcagttgatggggggcaagccggagaacgtcgggtcgctgggtgatattgagaaagtggcaaaggtctttgtccgcaatgagcttatcccgttacaggacaggatccgcgagataaacggctggctcggtcaggaggtcatccgctttaaaaactactcactggacactgacaacggctga

SEQ ID NO: 15178 - DNA, 297 bp, Escherichia coli
atgattaagagcattgatgtcactccatttcttcactcgctttgcgcttttgcggctcaggtactggttggtatttttaccggaaactgggcttacggtgcgatagccggttgtacgttcttcattgcgcgtgaacacacccaggcagaatatcgctggatagaaaagtttgggaaagggaaacgtatcaacatgccgtggtggggaggttttgatccacgcgtgtgggatgtgggaagtctgttggattttgctgttcctgttgttttttgtttttgtgtttatttctctatttga

SEQ ID NO: 15179 - DNA, 1179 bp, Escherichia coli
atgacagtgaaatactacgccattctgactaatcagggcgcagcacggctggctaacgcgacgatgctcggcagtaagctgaatctgacgcaaatggccgttggtgatgcaaatggtgtcttgccgacaccagacccggcacagacaaaactgattaaccagaaacgcatcgcgccgctgaatcttctgagtgttgacccgaacaaccagagccagattattgcggagcaaatcatccctgagaacgagggcggattctggatccgtgagattgggctttatgatgatgaaggcgtactcattgcggtggcgaactgcccggaaacgtacaaaccgcagttgcaggaaggcagtggtcgtacccagactatccgcatgattctggttgtcacgaataccgaagctatcacgctgaaaatcgacccgtcggtggtactggcgacccgtaaatacgtggatgatgaagtcctggaattaaggctgtatgtggatgaccagatgagaaaccacattgccgcacaggatcctcatacccagtatgcgcagaaacataatccgacatttaccggagaaccaaaagcgccgacgcctgccgcaggaaataacaccacgcggattgcgaccactgagtttgttcaggccgctattaccgctctgattaacggtgcgcctgccacgctggatacactgaaagaaattgccgcagccattaacaatgacccgaaattcagcaccaccattaacaatgcgctgtcaggtaagcagccactggatgagacgctgactcatttgagtggaaaagatgtggctggtcttctcgcataccttggtttgggagaagcggctaaaaggaatgtagggacaggggcgaatcagatacctgatatgggtagcttcacgctttctgtttcaggtactggatatcaaaaattaccatcaggttttattcttcagtggggctcaatcggcgctccaggcattgcacaggatgtagtaacccatttcccaattgcatttccaaacagatgtctgcgtgttttggtctcacaagactatacaccagatagcggggctgttggttatattgcctgtgcaggttttagttccgacccggttaaatttatatccagagccagtactcctggcctcggcgcttcatttttagcgttaggctgttaa

SEQ ID NO: 15180 - DNA, 822 bp, Escherichia coli
atgatcgaccgcgagcacaagctatccgtcgtgcgccaggcgaagcttctcggcttcagccgtggcagcgtctactatctgcctcgtccggtgtctgacggcgatctggcccttatgcgccggattgacgaattgcatctcgactacccctttgccggaagtcggatgttgcaagggctcttgagaggagaaggtctggagaccgggcggcgacacgtcgccacgctgatgaagaagatgggcatcaaggcgatctaccgccgcccgaacacctcgaaaccagcgccagggcacatacgaaagctggcagtcacccggcccaatcaggtgtgggcaatggacctgacctacatccccatggcgcggggatttgtctatctgtgcgccgtcgtggactggttcagccggaaggtcttgtcatggcggttgtcgatcacgatggaagcagccttctgcatcgaggcggtggaggaggcacttgcccgtcatggcaggccggaaatcttcaataccgaccagggatcgcagttcacctccatcgacttcaccgccgtgctgaagaggtcacagattgccatctcgatggatggcaagggtgcgtggcgagacaatgtcttcgtcgagcggctctggcgttcgatcaaatacgaggaagtctacctccatgcctacaagactgtgtccgaggcacgcgctggcatcgcccgatatctgaacttctacaacaccagacgcccacattggcactgttgcaaagttagcgatgaggcagccttttgtcttattcaaaggccttacatttcaaggcactgttgcaaatag

SEQ ID NO: 15181 - DNA, 600 bp, Escherichia coli
atgcgtaaactttatgccgccattttgtccgcagccatttgtctggccgtatccggtgcgcctgcatgggcgtctgaacatcagtccacgctgagcgcggggtatcttcatgcccggacgaacgttcccggcagtgatgatctgaacgggattaacgtgaaataccgttatgagtttacggacacactggggctggtgacgtcattcagctatgcaggagacaagaatcgccagcttacccgttacagcgatacccgctggcatgaagattccgtgcgtaaccgctggttcagcgtgatggtggggccgtctgtgcgcgtgaatgaatggttcagcgcgtatgcgatggcgggtatggcttacagccgtgtgtcgactttctccggggattatctccgcgtaactgacaacaaggggaaaacgcacgacgtgctgaccggaagtgatgacggtcgccacagcaacacgtctctggcgtggggagctggcgtgcagtttaacccgaccgaatccgtggccattgatattgcttatgaaggctccggcagtggcgactggcgcactgacggtttcatcgtgggtgtcggttataagttctga

SEQ ID NO: 15182 - DNA, 489 bp, Escherichia coli
atggatggtttatgggaaaaaatatcgtcttataatatatttaacaatctctttcccggtgctttgtttatttatttgtttgagcgggcaaccaatgtgatattatccacagatgatgttgttaagaatgtggtactttactattttacggggataattatcggaaggattgggtctattgtttttgagcctgtgttgaaatttttggggctggtaaaatttgttccatatgaggaatatatctcagcatgtagaaaggataataaaatagagcttcttcaagaaactgcaaatatgtataggacgttattctctatgtccttggtttttttgttttctttgttttttgtttcgtttgtagttggtggtgattacatggcgtcgaaatggatttcattgtttttgatttttgtttttattgtgtcgtacgttaagcaaattaagtttattacattaagagtgagtaaggctaataataagctgccctaa

SEQ ID NO: 15183 - DNA, 1086 bp, Escherichia coli
atgggttacgaagttgatttcttagcagttggagaaaaaaaaagtggagatgctatctgcataagatggggcaacctccacggaacaagagcagagcaaaaagttgtcgtaattgatgcggggtacgcaagcactggtccacaaataattgaacatttacagaaatactatcatacaaatactattgacttactcatatccacgcatccagatagcgaccatgctggcggccttgagcatgtgattgagaatgcggaagtcaaagagttctggattcaccagccttgggagcataatgaaaatctcgcgcaggaatttgctgatggaaggataacagatgcaagtattgccagacgtatacaagataatctacaaaaagcctatgatgccgtcaaatcagcgaaaaaaaaaggaatagaaattaaggagccttttcaaggcaggacttgggacaattctaaactggttgttattggaccaacacaagcatactatgaaacattaatccccgattttgcaagaatgcctgaaaaagcagaaacaactgcaaccagtggtacagatgcatataactacttttttgagaaagccaaagaacaagtcgagtatattgctgattggttctctgatgagggaattgatgacaaggacacaactactgcacaaaacaattcaagcgttatattaaaaattgaaattgacaataaaacactagtatttacaggtgatgcaggaataactgcattagatatggctgctgatcatataaataataactcattatcatttattcaagtgccccaccatggaagcaggagaaacatcggtccagcggtgctaaataagctcgttggaaatattgtaagcgaaggaggaagaagtggtgtttgtgcatttatatcatgcgcaccggattccgataaacaccctcatcaagcggtcattaatgcttttacaaggcgtggagccaaagtagtcgccacagaaggcaccaataaacgccattctagtaatgcccccgccagagatggctggactgcagtcaccccacgctcatacgcaaggagttataagactgaagaataa

SEQ ID NO: 15184 - DNA, 258 bp, Escherichia coli
gtggcaacgaaggacgatttttttaatatcaaaaaagccagtgccgcagacctgctggacgcgcaccgcatcccctttcagttgatgggcggcaagccggagaacgtcgggtcactgggagatattgagaaagtggcaaaggtctttgtccgcaatgagcttatcccgctacaggacaggatccgcgagataaacggctggctcggtcaggaggtcatccgctttaaaaactactcactggacactgacaacggctga

SEQ ID NO: 15185 - DNA, 1089 bp, Escherichia coli
atggttgttgaatatggttttggatatagtgggacaagagaaatagcactaaataacgataaaaaataccattctgaatttttttgcggtgtggtgcttgctcgttttatattaatgctaattgcagctataatactcataatactctgttttttttatgtttttaacgacgttaagtctttgttatgtgttggttttctgtccgtaattgcaggtgttttcaatccaaattggtttttgcaaggtaaggaaatgatgagtgtgatggctgtgctgtcactattttcacgaggcatagcagtcgttgcagtttatctaattataaaacccgcaacgccgatgtacatcagtgccttattattgagcatgccatatattttgtattcattctgtggcgttgcctacttacttattatcaaggagatttttttatgtaggccaccgataaagaaaattcaagtaattttaaaaaatggatttcattttttttgttcaacacttgcgactagtgcatacacaatgttgacccctcttgtattgggtggcgtatctggaaagtttgatgtaggcatctttaactcagctaacatgatcaaacaaggtttggctggacttgcatcaccattagtccaagctttttatccaagaattaacattttgcaaagagagaatccatatattgcaaacttaaaatctagaatgattcttaaatacttgcttgttttttacatggctttagcaataccatttttactttttgccaaccaattatcattattaatattcggcatgaaaggtgaagtaattgcaggtgcaatgcaattaatgacattgcttcctatattcataggttttaatacagttgtcgggttacttgtattagtacctaatgggatgcaaaaacagtatttcaaatctattttcctaggaactattacttgtttaagcatagtttatccagcatgtaaatattatggagcaacgggtgcgattgtgagtcttattgtagctgaaattttcgttggcatgggaatgcttaaacaattcattaaagtaaataaaaccgtatgtaggcctcataaattatga

SEQ ID NO: 15186 - DNA, 555 bp, Escherichia coli
atggagacgaaagaggagctgcgcgaaaccgttttcaggcaaagcaccttaaccggggcggtgctgcgggatatatcgcgaaatacatttcaaaaaatatcgacggctatgcactggatggtcagctcgataacgataccggtaagccgcttaaagatactgccgcggctgttaccgcatgggcgtcaacgtggcgcatcccgcaatttaaaacggttggcctgccgacaatgggggcttaccgtgaactacgcaaattgcctcgcggcgtcagcattgctgatgagtttgacgagcgcgtcgaggctgcacgcgccgccgcagacagtggtgattttgcgttgtatatcagcgcgcagggtggggcaaatgtcccgcgcgattgtcagactgtcagggtcgcccgtagcccgtcggatgacgttaacgagtatgaggaagaagtcgagagagtggtcggcatttacgcgccgcatctcggcgcgcgtcatattcatatcaccagaacgacggactggcgcattgtgccgaaagttccggtcgttgagcccttga

SEQ ID NO: 15187 - DNA, 1149 bp, Escherichia coli
atgaggcgcttcgcaggcgcatgtcgtttcgttttcaatcgcgctctggcgcttcagaatgagaatcatgaggccggtaataaatacatcccttacgggaaaatggcttcctggctggttgagtggaaaaacgccactgaaacgcaatggcttaaagattcgccctcacagccattgcaacagtcactgaaagaccttgagcgggcttacaaaaacttcttccagaatcgggctgcttttccccgattcaaaaagcggggacagaatgatgcattccgctatccgcagggcgttaagctcgatcaggaaaacagccgtatttttctgccgaaactgggctggatgcgctaccggaacagccgtcaggtcacgggtgttgtaaaaaatgtcactgtcagccagtcctgcggtaagtggtacatcagtattcagactgaaaatgaagtatcaactccggttcacccttcagcatcaatggtcgggctggatgctggcgtggctaaactcgccacgctgtcagatggcacagtctttgagcctgtaaacagttttcagaaaaaccagaagaagctggcgagacttcagcgacagttaagccgcagggtcaaattcagcaacaactggcagaagcagaaacgcaaaatacagcgactgcattcccgtatcgcaaatatccgcagggactaccttcacaaagtcacaacgaccgtcagcaaaaaccacgcaatgatagtcattgaggatttgaaggtcagcaacatgtcaaagtcagcagcgggtacgctcagccagccggggcgcaatgtccgggcaaaatcaggtttaaaccgttcgatactggatcagggctggtatgaaatgcgccgccagcttgagtacaagcagctctggagtggcggtcagttgcttgctgttccgccagcgtacacaagccagcgttgcgcgtgctgtggtcatactgcgaaagaaaatcgcctgtcacaaagtcaattcagatgccaggtatgtggatatacagcgaacgccgatgtaaatggcgctcgtaacattttagcggcggggcacgccgttcttgcctgtggagagatggtgcagtcaggccgctcgttgaagcaggaacccaccgaaatgattcaggcgacagcctga

SEQ ID NO: 15188 - DNA, 735 bp, Escherichia coli
atgatggcggtcgccgtcactgcgggtgatggtaatctgcgggattgttttaccgctggccgtcaccccctgccccgctttgagaaacaacagttttcccatttttaccgacacctctccgccgttgcgttctgcaagacgggtcaggaatttcgcgtcggactcctgcgactggtcgatgtgcgggattttaattccggccagtggcggagcgacactggcttccagcctgttacgggaggctatcgcctcaacaatcgcaccgagcgtggtgtcatgccaggagccttcccggcgggaattgagcgtcccgcgaaaatctgcactccgggcgcggatggtgaccacatccggcgcgccccggtgttcgacctcatcaacggtaaatttccctttgcataccagggcaaaacctttccagccgatatacaccgtcaggacagcgccacgaaccggcagcccgacctgcccgtcggcatcattcagttcaatatcaagctggtcagcctcaaagccccagttatccgtcagggtcatgctcatcagacggtcgctgatattgccggtaatatccctgctgtcgagtatcagcatgtaatccggcgtcagcgtactgcctgcatcaaatgtcagcgcatccagcattatcccgcccccgtcatacccgtgaatctggtcgccatactgccagccttaccgatgagcgattccgcctgtttaccgatatcgccataa

SEQ ID NO: 15189 - DNA, 480 bp, Escherichia coli
atgatgctcgcgttaggtatgtttgtttttatgcgccagacgctgccacaccagaccatgcagcgtgaatcagattatcgctggccgtcaaattcccgtatcggtaaacgggatgcctaccagtttctcggtgtgggtgaggaaaacatgacgcttgccggtgtgctttatcctgaactgaccggcggaaagctgacggtgaccacgctcagactgatggcagaggaaggccgggcgtggccgttgctggatggcaccggcatgatttacggcatgtatgtcatcagcagggtgagtgaaacagggagtattttctttgcagacggcacaccccggaaaattgattttacgctgtcgctcacccgcgttgatgaatcactggccgcgctttatggcgatatcggtaaacaggcggaatcgctcatcggtaaggctggcagtatggcgaccagattcacgggtatgacgggggcgggataa

SEQ ID NO: 15190 - DNA, 1326 bp, Escherichia coli
atgaataaatatcaggcagttattattggttttggcaaggctggaaaaacattagccgtcacgctggcaaaagcaggttggcgtgtggctctcatcgaacaatcaaatgcaatgtatggcgggacctgtattaatatcggctgtatcccaaccaaaacattggttcatgacgcacagcagcacactgattttgtccgtgccatacagcgtaaaaatgaagtggttaattttttacgtaataagaattttcataatcttgcggatatgcccaatatcgacgtgatcgacggccaggcggagtttatcaataatcatagcctgcgtgttcatcggcctgagggaaatctggagattcatggcgagaaaatttttattaataccggtgcacaagccgtggttccgccaattcctggaattaccaccacacctggtgtatatgacagcaccggattacttaatctaaaagaattgcctgggcatttaggtattttgggcggcggatatattggcgttgagttcgcctctatgttcgctaattttggcagcaaagtaaccattttagagtcagcttcgctgtttttgcctcgggaagatcgggatattgctgataatatcgcgacgattttacgcgatcagggcgtcgatattatcctcaatgcccatgtggagcgaatcagtcaccatgaaaatcaagtgcaagtgcatagcgagcacgcccaactggcggtggatgcactgttaatagcttccggtcgtcaaccggctaccgcttcgttacatccagaaaatgccggtatcgcagtaaacgagcgcggggcaattgtcgttgacaagcgattacataccaccgcagacaatatttgggcgatgggagatgttaccggcgggctgcaatttacttacatatcactggatgattaccgcattgtacgtgatgagttactgggtgaaggcaaacgtagtactgatgatcggaaaaatgtgccttattccgtatttatgacaccgcccctgtccagggttggtatgacagaagaacaagccagagagagtggtgctgatattcaggtggtgacattgcctgtagctgcaattccgcgcgccagagtgatgaacgatacccgtggggtattaaaagcgattgttgataataaaacccaacgtatattaggggcatcactgctgtgtgttgactcccacgagatgatcaatatagtgaaaatggtgatggatgccgggctgccttatagcatattacgcgatcagatatttactcatccgtcgatgagcgaatcactcaatgatctattttcattagtcaaataa

SEQ ID NO: 15191 - DNA, 159 bp, Escherichia coli; identical to SEQ ID NO: 6188

SEQ ID NO: 15192 - DNA, 201 bp, Escherichia coli; identical to SEQ ID NO: 11564

SEQ ID NO: 15193 - DNA, 981 bp, Escherichia coli
atgagtcatcaacttaccttcgccgacagtgaattcagcagtaagcgccgtcagaccagaaaagagattttcttgtcccgcatggagcagattctgccatggcaaaacatggtggaagtcatcgagccgttttaccccaaggctggtaatggccggcgaccttatccgctggaaaccatgctacgcattcactgcatgcagcattggtacaacctgagcgatggcgcgatggaagatgctctgtacgaaatcgcctccatgcgtctgtttgcccggttatccctggatagcgccttgcctgaccgcaccaccatcatgaatttccgccacctgctggagcagcatcaactggcccgccaattgttcaagaccatcaatcgctggctggccgaagcaggcgtcatgatgactcaaggcaccttggtcgatgccaccatcattgaggcacccagctcgaccaagaacaaagagcagcaacgcgatccggagatgcatcagaccaagaaaggcaatcagtggcactttggcatgaaggcccacattggtgtcgatgccaagagtggcctgacccacagcctggtcaccaccgcggccaacgagcatgacctcaatcagctgggtaatctgctgcatggagaggagcaatttgtctcagccgatgccggctaccaaggggcgccacagcgcgaggagctggccgaggtggatgtggactggctgatcgccgagcgccccggcaaggtaagaaccttgaaacagcatccacgcaagaacaaaacggccatcaacatcgaatccatgaaagccagcatccgggccaaggtggagcacccatttcgcatcatcaagcgacagttcggcttcgtgaaagccagatacaaggggttgctgaaaaacgataaccaactggcgatgttattcacgctggccaacctgtttcgggcggaccaaatgatacgtcagtgggagagatctcactaa

SEQ ID NO: 15194 - DNA, 819 bp, Escherichia coli
gtgaataacgttgttcattaccacggaactcctgtgtggggtgatgcaggaaatgttcatcgtattgctgtgagtggtgcaggggcatttgtttcctatgcccggcctgaccaactcgttgcctcatttaaacatgctaagtccgtggcgattgataatggggctttttcagcatggaaaagtggccttgttatcgactggcagaagttttatcagtggattgcccctcattattatcatcccaaactggctttctttgtcatacctgatgtggtggacggggatgaagcggacaacgatgcgctgattaaagcgttgcctcgttgttttagagaaaaagctactccagtctggcatctgcatgaatccttgcaacgccttgtcgaactttgccgggaatggcctcgtgtttgttttggttcttctggcgattacgccactgtcagaactgcactctggcatagccggatgcaggatgcatttgaaaccatttatcttaaatatggttttagtacccgcattcatggtctgcgcatgcttgatgggcgcattctcggtaattatccgctgcatacagcagacagcactaaccttgcctgtaacgtaccaaaatatcttatcaaatatcccgaactgacaagggcaatcagtgaggcagactatacacaaaaactttctgagaaggagttgaaggcgttcatccttaaaggacggtgtgcaattctgaaaaattctgtggagtcggtttttcctccatcgattgctgaatgggcatcaaatagccttgctccatcacaaatggagttagctttcgcatga

SEQ ID NO: 15195 - DNA, 222 bp, Escherichia coli
atgcgaacctataatagtaatataggaaagattacagcagtaactttacctataattgtagagtggctagaaaaaaataatgtaccttatgatgaaatttatgtcggtaaaccatggtgcggtcatgagggattctatgtggatgataaggccattcgtcccaatgaatttgttaacttaagttataatgagataaaaaaattgacaggtattaaatcatga

SEQ ID NO: 15196 - DNA, 159 bp, Escherichia coli; identical to SEQ ID NO: 6188

SEQ ID NO: 15197 - DNA, 477 bp, Escherichia coli
atgcaacagctttcctttctgcccggagagatgacgcccggcgagcgcagccttattcaacgggccctgaaaaccctggaccgccatcttcatgaacccggcgtggccttcacctccacccgtgcggcacgagaatggctgattctgaacatggcgggactggaacgtgaagagttccgggtgctgtatctgaacaaccagaatcagctgattgccggtgaaaccctcttcaccggcaccatcaaccgcacggaagtccatccccgggaagtgattaaacgcgccctgtaccacaatgccgctgccgtggtactggcacacaatcacccgtccggtgaagtcacacccagtaaggcagaccggcttatcaccgaacgtctggtacaggcactgggcctggtggatatccgggtgccggaccatctgatagtcggtggcaaccaggttttctcctttgccgaatatggtctgctttaa

SEQ ID NO: 15198 - DNA, 384 bp, Escherichia coli
atgtacgcaaaatcttttctcgcacttgatggcaacggacgtctgaccggtgcccgtaccgcacagactgctccttatgcccactacacctgccacctttgcggcagtgcactcagataccacccgcaatacgacaccgaacggccctggtttgaacacactgacgacgggctgacggagcacgcgcagcaatgtccttatgtcaggccggaacgcagagaaatacggttgattaaacgtctgcagcaattcgtcccggatgccttacccgtggtacgtaaagccagctggtactgcaggcaatgtcaccacgattattatggggagcagtactgcacacactgccagaccgggcgtttcagtgatgagggggtagcagaatga

SEQ ID NO: 15199 - DNA, 210 bp, Escherichia coli; identical to SEQ ID NO: 9340

SEQ ID NO: 15200 - DNA, 366 bp, Escherichia coli; identical to SEQ ID NO: 6173

SEQ ID NO: 15201 - DNA, 327 bp, Escherichia coli; identical to SEQ ID NO: 13453

SEQ ID NO: 15202 - DNA, 489 bp, Escherichia coli
gtgggtgcctatcagtatcatggtcgcagtgccgacgggcgtgtcgcggatatctctgtcaccagtccatctccggcctgcgtcaccatctctgtgctgtcacgtgagaataatggtgtggcatccgaagacctgctggctgtggtacgtaacgcccttaatggcgaggatgtcaggccggtggccgaccgcgtgaccgtgcagtctgccgccatcgttgaatatcagataaacgccacgctttacctttaccctggtcccgaaagtgaacccatccgcgcggccgccgtgaaaaaactggaagcatacatcacggcacagcaccggctggggcgcgacatccgtctgtctgccatttatgccgctttgcatgtggaaggcgtgcagcgtgtcgaactgactgctccgctggccgacatcgtgctcaacagtacgcaggcgtctttctgtaccgaataccacgtcgtgaccggaggctcggatgagtga

SEQ ID NO: 15203 - DNA, 240 bp, Escherichia coli
atgagcaaccaaggcgaataccccgaagataatcgggttgggaagcacgagccgcacgattttagtttgacccgtcgcgatctgattaaagtcagcgccgcaacggcggcgaccgccgtggtttatcctcattctacgcttgcagcaagcgttccggcagctacacccgcgccagagataatgcccctgacacttaaggtgtgtagtggtcaagtaatactggccacggttttacagtaa

SEQ ID NO: 15204 - DNA, 363 bp, Escherichia coli
atggcacaacctgccgctattattcgtataaagaaccttcgtttacgtacgtttatcggaattaaggaagaagaaattaacaaccgtcaggatattgttatcaatgtgacgatccactcccccgccgataaagcgcgcactagcgaagatatcaacgatgcgctgaattatcgcaccgtaacgaaaaacattattcagcatgtagagaataaccgtttctctttgctggaaaaattaactcaggatgtgctcgatatcgcacgcgaacatcactgggtgacgtatgctgaagtggagatcgataaactgcacgcgctgcgctacaccgattcggtatccatgaccttaagctggcagcgttaa

SEQ ID NO: 15205 - DNA, 588 bp, Escherichia coli
atgacctgttcaacttcattaagcggtaaaaacaggattttccttatcgctggcattctgatgattgccacaacattacgcgtcacctttaccggcgcagcaccgttactggatacgattcgttccgcttactcgctaacgacggcgcaaaccggcttattgaccaccctgccattattagcctttgcgctgatctcaccgctggccgccccggtggcgcgacgttttggtatggaacgtagcctgtttgccgcgttacttttgatctgtgcaggtatcgcaattcgctctctcccttcgccttacttattatttggcggtacagcggtcattggcggtgggattgcattaggcaatgtcttactgccaggattaattaaacgcgatttccctcattccgtcgccagacttaccggcgcatattccctgacaatgggagctgcggcggcactgggatcggcgatggtagtgccgctggctttgaacggttttggctggcaaggcgcgttgctcatgctgatgtgttttcctctgctggctcttttttatggctgccacagtggcgaagtcaacaacatgcaaatttga

SEQ ID NO: 15206 - DNA, 504 bp, Escherichia coli
atgactgaaatggctaaaggaagcgtgacgcatcagcggttaatcgctttattatcacaagaaggtgctaacttccgcgtcgttacccatgaagcggtaggtaaatgtgaagcagtgtcagaaattcgtggcaccgctttaggccagggggctaaggcactggtatgtaaagtcaaaggcaatggcgtaaatcaacatgttctggcgatcctcgctgccgatcaacaggccgatctgagccaactcgccagccatataggcggattacgcgcttcgttggccagcccggcggaagtcgatgaactcacaggctgtgtcttcggcgcgatcccccctttcagcttccatccaaaactcaaactggttgccgaccccctactcttcgaacgatttgatgaaatcgccttcaatgcaggcatgctggataaatccgttattttgaaaaccgcggattatttgcgtattgcgcaaccagaactggtcaatttccgccgcactgcgtaa

SEQ ID NO: 15207 - DNA, 1725 bp, Escherichia coli
atggagatgttgtctggagccgagatggtcgtccgatcgcttatcgatcagggcgttaaacaagtattcggttatcctggaggcgcggtccttgatatttacgatgcattgcataccgtgggtggtatcgatcatgttttagttcgccatgagcaggcggcggtgcatatggccgatggtctggcgcgcgcgaccggggaagtcggcgtcgtgctggtaacgtcgggtccaggggcgaccaatgcgattactggcattgccaccgcttatatggattccattccattagttgtcctttccgggcaggtagcgacttcgttgataggttatgatgcctttcaggagtgcgacatggtggggatttctcgcccggtggttaaacacagttttctggttaagcaaacggaagacattccgcaggtgctgaaaaaggctttctggctagcggcaagtggtcgtcctggacccgtggtcgttgatttaccgaaagatattctaaatccggcgaacaaattaccctatgtctggccggagtcggtcagtatgcgttcttacaatcccacgacctccgggcataaagggcaaattaagcgcgctctgcaaacgctggtggcggcaaaaaaaccggttgtctacgtaggcggtggggcaatcacggcgggctgccatctgcagttgaaagaagcggtggaggcgttgaatctgcccgttgtttcctctttgatggggctgggggcgtttccggcaacgcatcgtcaggcactgggcatgttgggaatgcacggtacctacgaagccaatatgacgatgcataacgcggatgtgattttcgccgtcggggcacgttttgatgaccgaacgacgaacaatctggcaaaatactgcccaaatgccactgttctgcatatcgatattgatccaacctcaatttctaaaaccgtgactgctgatatcccgattgtgggggatgctcgccaggtcctagaacaaatgcttgaactcctgtcgcaagaatccgcccatcaaccgctggatgagatccgcgactggtggcagcagattgaacagtggcgcgctcgtcagtgcctgaaatatgacactcacagtgaaaagattaaaccgcaggcggtgatcgagactctttggcggttgactaatggggacgcttacgtgacgtccgatgtcgggcagcaccagatgtttgctgcgctttattatccattcgacaaaccgcgtcgctggatcaactctggcggcctcggcacgatgggttttggtttacctgcggcactgggcgtcaaaatggcgttgccagaagaaaccgtggtttgcgtcactggtgacggcagtattcagatgaacatccaggaactgtctaccgccttgcaatacgagttgcccgtactggtggtgaatctcaataatcgctatctggggatggtgaagcagtggcaggacatgatctattccggccgtcattcacaatcttatatgcagtccttaccagacttcgtccgtctggcggaagcctatggtcacgtcgggatccagatctctcatccgcaagaactggaaagcaaacttagcgaggcgctggaacaggtgcgcaataatcgcctggtgtttgttgatgttaccgtcgatggcagtgagcacgtctacccgatgcagattcgcgggggcggaatggatgaaatgtggttaagcaaaacggagagaacctga

SEQ ID NO: 15208 - DNA, 663 bp, Escherichia coli
atggaactgtatctggacaccgctaacgtcgcagaagtcgaacgtctggcacgcatattcccgattgccggggtgacaactaacccgagcattatcgctgccagcaaggagtccatctgggaagtgctgccgcgcctgcaaaaagcgatcggtgatgagggcattctgtttgctcagaccatgagccgcgacgcgcagggtatggtgaaagaagcgaaacgcctgcgcgacgctattccgggcattgtggtgaaaattccggtaacctctgaaggtctggcagcaattaaaatgctgaagaaagaaggcattactacgctgggaaccgcagtgtacagcgccgcgcaaggattactggcggcgctggctggagccaaatacgttgctccatacgttaaccgcgtagatgcccagggcggtgacggcattcgtactgtacaggagttgcaagcgttactggaaatgcatgcgccagaaagcatggtgctggctgccagctttaaaacaccacgtcaggcgctggattgtttgctggcaggatgtgaatccatcacactgcccttagatgtagcgcaacaaatgcttaacacccctgcggtagagtcagctatagagaagttcgagcacgactggaatgccgcatttggcactactcatctctaa

SEQ ID NO: 15209 - DNA, 2502 bp, Escherichia coli
atggccctgattgtggaatttatttgtgagctacctaacggcgtccatgcgcgtccggcaagccacgttgaaacgctgtgtaatactttttcatcacaaattgagtggcataacctgcgcactgaccgcaagggcaacgccaaaagcgcccttgcgctgattggcaccgatacgctggtgggcgataactgccagttactgatttccggggccgacgaacaggaagcgcaccagcgtttaagccaatggctgcgcgatgaattcccccactgcgacgcaccgctggcggaagtaaaatctgacgaactggaaccactgccggtttcactgaccaatctgaatccgcaaattatccgcgctcgcaccgtgtgcagcggtagcgcaggcggcattctgacgccgatctcttctttagatctcaatgcgctgggtaatcttcccgcagccaaaggcgttgacgccgaacaatccgcactggaaaacggtctgacgctggtactgaaaaacatagagtttcgtctgctggatagcgacggtgctaccagcgcgattctggaagcgcaccgatccctggctggcgatacttccctgcgcgaacatttactggcaggtgtcagcgccggattaagctgcgccgaagcgattgttgccagtgcgaatcacttttgcgaagagttcgcccgttccagcagcagttacctgcaagaacgtgccctggacgtacgcgacgtctgcttccagttactccagcaaatctacggtgagcaacgcttcccggcaccgggcaaactgacgcagcccgccatttgtatggctgatgaactgacccccagccagttcctcgaactggataaaaatcatctcaaaggtctgttactgaaaagtggcggcaccacatcacatacggtgatccttgcccgttcgttcaacattccgacgctggtaggtgtggatattgatgcccttactccgtggcagcatcagacgatttatatcgacggcaacgcaggggcgattgtggttgagccaggggaatccgtggcccgttattatcagcaagaagcccgcgtacaggacgctctgcgtgagcaacagcgtgtctggctgacccagcaagcgcgtaccgctgacggtatccgcattgaaattgccgctaacatcgctcactccgtggaagcgcaggccgcattcggcaatggtgcggaaggcgttggtttgttccgcactgaaatgctctatatggatcgcaccagtgcaccgggtgaaagcgagctgtacaacatcttttgtcaggcgctggagtctgccaacggacgcagcattattgtgcgcactatggacattggtggtgacaaacccgttgattatctgaacattcccgcagaagctaacccgttcctcggttatcgcgcggtgcgtatttatgaagaatacgcgtcgttgtttaccacacaactacgatcgatcctgcgcgcctctgctcacggcagcctgaaaatcatgatcccgatgatctcctcaatggaagagatcttatgggtgaaagaaaaactggcggaagccaaacagcaactgcgtaacgaacacattccgtttgatgagaagatccagctcggcatcatgctggaagtgccgtcggtgatgttcatcatcgatcaatgctgcgaagagattgatttctttagtattggtagtaatgacctgacgcaatatctactggcagtggatcgcgataacgctaaggtgactcgtcactacaacagcctgaatccggccttcttgcgggcgctcgattacgccgtgcaggcggtgcatcgccagggcaaatggattggtctgtgcggtgaactgggagcgaaaggttccgtgctgccgttgctggtcggtttagggctggatgaactcagcatgagcgcaccatcaattccggcggcgaaagcgcggatggcgcaacttgatagccgtgagtgccgccagttgctcaaccaggcaatggcctgccgtacttcgctggaagtggaacacctgctggcgcaattccgcatgacccaacaggacgcaccgctggtcaccgccgagtgcatcacactggaaagcgactggcgcagcaaagaagaagtgctcaaaggcatgaccgataacctgctgctggcgggccgctgccgctatccgcgtaaactggaagccgacttgtgggcgcgcgaggccgttttctctaccggactgggctttagtttcgccattccccacagtaaatcggaacacattgagcaatccaccatcagcgtagcgcgtctgcaagcgccagtgcgctggggcgatgatgaagcgcaattcatcattatgttaaccctgaacaaacacgccgcgggcgatcaacatatgcgcattttctcgcgcctcgctcgtcgcatcatgcacgaagaattccgtaatgcgctggttaacgccgcctctgccgacgctatcgccagcctgctgcaacatgaactggaactgtaa

SEQ ID NO: 15210 - DNA, 864 bp, Escherichia coli
atgacgaatcgtatctctcgcctcaaaactgcactgtttgccaatacccgtgaaatctcgctggagcgggcgttgctttataccgccagccatcggcaaaccgaaggggagccggtgataatgcgtcgggcgaaagcaacagcgtatatccttgaacacgttgaaatttcgattcgtgatgaagaactgattgccggtaaccgcaccgtaaaaccacgcgccgggattatgtcgccggaaatggacccttactggctgctgaaagaactggatcaattcccgacgcgtccgcaggaccgctttgctatcagcgaagaagataaacgtatctaccgcgaagagttgttcccgtactgggaaaaacgttcgatgaaagatttcatcaacgggcagatgacggatgaagtaaaagccgcgaccagcacgcagattttcagcatcaaccagacggataaaggccaggggcacattattattgattacccgcgcctgctgaatcacgggctgggggagctggtggcacagatgcagcaacattgtcagcaacagccggagaatcacttttatcaggcagcgctgttactgctggaagcctcgcagaaacatattttgcgttacgccgaactggcggaaacgatggcggcaagctgcactgatggcccgcgtcgcgaagaattgctgactattgcggagatctcccgccataacgccgaacataagccgcagacgttctggcaggcgtgccagttattctggtacatgaacatcattctgcaatacgaatccaacgccagttcgctatcgttggggcgcttcgaccagtatatgttgccgttctatcagacatcattaacccagggctaa

SEQ ID NO: 15211 - DNA, 1398 bp, Escherichia coli; identical to SEQ ID NO: 5679

SEQ ID NO: 15212 - DNA, 1017 bp, Escherichia coli
atgaaaacattaatttgtcagcagcctggcgttatggaatatgtggaaaaggatattcccacaccagcagataatgaagtgctgttaaaaatcaaagctgtgggtatttgtggtactgatattcacgcttttgccggcagacagcctttttttagctacccacgtgtattaggtcatgaaatatgcgccgaagcggtttcgcgaggcagccagtgccaaacagcacaatcaggccagcgctattccgtcatcccatgcattccatgtggcgagtgcgcagcctgtcgggaaaagaaaacgaactgctgcgaacgtgtttcgctgtatggcgtgcatcaggatgggggctttagtgagtaccttgcggtacgtgaagacaaccttgtgcctctccctgacgaggtcagcgacagtgccggagcattggttgaatgtttcgccattggtgcacatgccgttcgtcgggcagagatcaaggctgaacaaaacgtactggtgattggcgctgggccaatcggtctggctaccgcagccatcgccagggctaaaggggcgcatgttgttgttgctgatattgactgtcaacgtcgccagcacgttgtggatcatctggcaattaatgtcttcgacccaacacaggaaggttttattgccgcgcttagtgaagtatttggcggcgaactggcttgcgtagtcctggatgcgacgggaaataaagcttcaatgagtcatgatgtaaatcttattcgtcatggcggcaaaattgttttcatcggtttgtacattggtgaacttgttattgacgatccgaccttccataaaaaagagacaacgttactcagcagccgcaatgccacacgggaagattttgcgttggtgattgaactgatgcgcagcaataaaattcacgaaaatttaatgaaaaaccaggcgttcaatttctttagtgttggcgaagattaccagcgtaacgttgtagaaaataaaaatatggtcaagggtgtgatcactttttaa

SEQ ID NO: 15213 - DNA, 984 bp, Escherichia coli
atgaaagcacttcgtcctctgacggcatcgcttatgctgttaaccagttgtttattaatatctaataccacactggcaaaaacaacattaaaactgagtcataatcaggataaaagccatgctgtccataaagcattaagctatttagcggataaaaccaaagagtattctaatggtgaattagttattcgcatttacccaaatgcgacattaggcaatgagcgtgaatcactggaattaatgaactccggtgcattacagatggttaaggttaatgctgcatcactagaatcatttgccccggattacagccttttcagtctgccgttcttattccgcgaccgtgatcactattatcgtgttctgcaaagtgatttaggtaaaaaaatacttaagtcatcagaaagcaaaggttttgttggtattacgtactatgacggcggtgcgagaagtttttattccaataaaccgattacaaaacccgaagatttagcgggaatgaaaatcagggttcaacaaagccccagcgccattgcaatgatgaaagcactcggtggtgtcgctaccccgatggcgcaaggcgaactctacaccgcacttcagcaaggagtggttgatggcggagagaacaataccgttgtctattccgatatgcgtcacgccgaagtcgcaaaagtctattcacgtgatgaacacaccatggtacctgatgtgttaattatcagcaccgacgtgttgaataaacttggtgataaagagcgcacggcattattaaaagcagccgatgagtcaatgatgcagatgaaggacgtcatctggcctgcggctgaaaaagaagcctacgacaaaatgaaagggatgaacgcaacagttgttgatgttgataaatccgctttcaaagaacgcgtcaaaccgttatacgatgaattcaaggcgaaagatgcacaatcagccaaaaaccttgagctagtagaaagtatgtaa

SEQ ID NO: 15214 - DNA, 483 bp, Escherichia coli; identical to SEQ ID NO: 1260

SEQ ID NO: 15215 - DNA, 456 bp, Escherichia coli; identical to SEQ ID NO: 7975

SEQ ID NO: 15216 - DNA, 561 bp, Escherichia coli; identical to SEQ ID NO: 5114

SEQ ID NO: 15217 - DNA, 1509 bp, Escherichia coli
atgagttttaacgcaaaggatatgacccagggcggtcagattgcgtccatgcgtatccgcatgttcagccagatcgccaatatcatgctttactgcctgtttatttttttctggatcctcattggtctggtcttatgggtaaaaataagctggcagacgtttatcaacggctgtatttactggtggtgtacgtcactggaaggcatgcgggatttaataaaatcccagccggtctatgagatccagtattacggcaaaaccttccggatgaacgctgcccaggtactgcatgataaatatatgatctggtgcggagagcagctatggtctgcattcgttctggcgtctgtcgtggccctggttatttgcctgatcaccttctttgttgtctcctggattctggggcgtcagggtaaacaacagagcgaaaatgaagtcacaggtggtcgtcagctgacagacaatccgaaagacgttgcccggatgctgaaaaaagacggcaaggactccgatatccggattggcgacctgccgattatccgggattccgaaatccagaacttctgtctgcacggcacggtcggggccggtaagtcggaggttatccgtcgtctggccaactatgcccgtcagcgcggtgatatggtggtgatttatgaccgttcaggggaatttgttaaaagttactatgatccctccatcgataaaatcctgaatccgctggatgcccgctgtgccgcatgggatttgtggaaggagtgcctgacacagccggattttgataataccgcgaacacgctgatccctatgggtacaaaagaggacccgttctggcagggttcaggacgtaccatttttgcggaagcggcgtacctgatgcgtaatgaccccaaccgcagctacagcaaactggtggacacactgctttccatcaaaattgaaaaactgcgtaccttcctgcgtaattcaccggcggccaacctggtggaagagaaaattgagaaaacggcgatttccatccgtgctgtgctgaccaactacgtgaaagccatccgttacctgcaggggattgagcataacggtgatcccttcaccatccgtgactggatgcgtggtgtccgggaagatcagaaaaacggctggctgtttatttcgtcgaacgccgacacccatgcctccctgaagcctgtgatctccatgtggctgtccattgccattcgtggtctgctggcaatgggagaaaaccgtaaccgtcgtgtgtggtttttctgtgatgagttacccacgttacacaaactgccggacctggtggagatcctgccggaagcccgtaagttcggtggctgttatgtgtttggtatccagtcctatgcccagctggaagatatctacggtgagaaagcggcggccacgctgtttgacgtcatgaacacccgtgctttttccgttccccgagccataagattgcagagttcgctgccggtgagattggtgagaaagagcacctga

SEQ ID NO: 15218 - DNA, 927 bp, Escherichia coli
atgccaaactggtgctcgaatcgtatgtatttttctggtgaaccggcacagatcgctgagattaaacgactggccagcggtgcagtcacaccgctttatcgccgcgccacaaatgaaggtattcagctgtttctggccggaagtgccggacttctgcagatcactgaaaatatccgctctgagcagtgccccggagtgacggctgccggacgtggtgctgtatcactggaaaatatcgcgttcacccgctggctgacacacctgcagaacggtgtactgctggatgagcaaaactgcctgatgctgcatgaactctggctgcagagcggtactggacagcgtcgctgggaagggttaccggatgatgtcagggaaactatcactgtgcatttcaccgcaaaaagaggtgactggtgtgacatctggggtaacgaggatgtatcggtgtggtggaaccgtctgtgtgacaacgtactgccggaaaaaaccatgccgtttgacctgctgacggttttgccgacccgcctggatattgaagtgaatggctttaacggcggtgttctgaacggtgttccttctgcatatcactggtatacagaacggtatggcgtgaagtggccttgtgggtatgacctgaatatcagcagtcagggggaaaacttcattcaggtggatttcgacacgccgtggtgtcagccggaaagcgacgttgttgcagaattaagccgccgtttcggctgcacgctggagcactggtacgccgaacagggctgcaatttctgtggctggcagttgtatgagcgcggagagctcgttgatgtgctgtggggggaactggaatggtcttccccgacagatgacgatgagctgccggaagtcaccggacctgcgtggatagtcgacaatgtgacgcattatggcggatga

SEQ ID NO: 15219 - DNA, 5271 bp, Escherichia coli
atgttgagtttcagcgttgttaaatcggcaggcagtgccggaaactattacaccgacaaggataattactatgtgctgggcagcatgggagaacgctgggctggtcagggggctgaacagcttgggctgcagggcagcgtcgataaggatgtttttacccgtcttctggagggcaggctgccggacggggcggatttaagccgcatgcaggatggcagtaataagcatcgtcccggctacgacctgaccttctccgcccccaaaagtgtctccatgatggccatgctcgggggggataaacgtcttattgatgcacataaccaggccgtggattttgctgtccgtcaggtggaggcgctggcttccacacgggtgatgacggacggacagtcagaaacggtgctgaccggtaatctggtgatggcactgtttaaccatgacaccagtcgcgatcaggacccacagttacacacgcatgtggtggtggctaatgtcacgcagcataacggcgaatggaagacactgagcagtgacaaagtggggaaaaccggattttccgagaacgtgctcgcgaaccggattgcgttcgggaaaatatatcagagtgagttacgtcagcgcgttgaggcgctgggttatgaaaccgaagtggtcggtaagcacggtatgtgggagatgccgggcgtaccggtggaagccttctccggacgctcacaggctatccgggaggccgtcggtgaagacgcctcgctgaaatcccgggatgtggcggcactggatacgcgaaaatccaaacagcacgtcgatcctgaagtcagaatggctgaatggatgcagacgctgaaggaaaccgggttcgacatccgggcatatcgtgacgcggcggatcagcgtgcggagatccgcacgcaggcgcccgggcctgcttcacaggacgggccggatgtgcagcaggcggtgacacaggcgattgccggattaagtgaacgaaaagtgcagttcacgtatacggacgtgctggccaggacggtcggcatactgccgccggaaaatggtgtgattgaacgggcacgcgccggtatcgatgaggccatcagccgtgagcagcttatccccctcgatcgtgagaaggggctgttcacgtccgggattcatgtgctcgatgagctgtcagtccgggcactcagtcgtgacatcatgaaacagaaccgggtgaccgtacatccggagaaaagtgtcccccggacggctggttacagcgatgcggtcagtgttctggcacaggaccgtccgtcgctggccattgtgtccgggcagggcggtgcagccgggcagcgtgagcgggtggctgaactggtcatgatggcccgggagcaggggcgggaggtgcagattatcgctgctgaccgtcgctcgcagatgaacctgaagcaggatgaacggctgtccggtgagctgataaccggacgtcgtcagctgcaggagggcatggtcttcacgccgggcagtactgttatcgtcgaccagggcgaaaaactctccctgaaagagacgttaaccctgctggatggtgccgcacgtcataacgtacaggtcctgataaccgacagcgggcagcgaaccggtacaggcagtgcactgatggccatgaaggatgccggggtgaacacatatcgctggcaggggggagaacagcgaccggccaccatcatcagtgaaccggaccgtaatgtccgctatgcccggctggccggagattttgcggccagcgtgaaagccggagaagagagcgtggcacaggtcagcggggtacgggaacaggccatactgacagaggccattcgcagtgagctgaaaacgcagggcgtgctcggacaccctgaggtgaccatgactgcactgtcaccggtctggctggacagccggagccgttatctgcgggatatgtaccgaccggggatggtgatggagcagtggaacccggagacacgcagtcatgaccgctatgttatcgaccgggtgacggcgcagagtcacagcctgaccctgcgggatgcgcagggcgaaacgcaggtggtgcgtatttcctccctggacagcagctggtcgctgttccggccggaaaaaatgccggtggcagacggcgagcgactgagggtgacagggaaaattcccggactccgcgtctccggcggtgaccgcctgcaggtggcatccgtcagtgaagatgcgatgacggttgttgtgccggggcgggctgaaccggccaccctgcctgtggctgattcaccattcacggcactgaagctggagaacggctgggtggaaacgcccgggcattccgtcagcgacagtgcgacggtttttgcctccgtcacacagatggcgatggacaacgcgaccctgaacggtctggcccgcagtggtcgtgatgtccggctgtattcctcactggatgaaacccgtactgcggaaaaacttgcccgccatccctcctttacggtggtttctgagcagataaaggcgcgggccggtgagacatcgctggaaaccgctatcagtctgcagaaaaccgggctgcacacgccggcacagcaggccattcatctggcccttcctgtgctggaaagtaaaaacctggccttcagcatggtggacctgctgacagaggcgaagtcgtttgctgcagaaggaaccggttttactgaactgggaggggaaatcaatgcgcagataaaacgcggtgacttactgtatgtggatgtggcaaaaggctatggcacaggcctgctggtttcccgtgcgtcgtatgaggcagaaaaaagtattcttcgccatattctcgaaggtaaggaggcggtcacgccgttgatggagagagtacccggcgaactcatggagacgttaacgtcgggacagcgtgccgccacccgtatgatactggaaacgtccgaccgtttcacggtggtacagggttatgccggtgtgggtaagaccacacagttccgggcggtgatgtcagccgtgaacatgctgccggcgagtgagcgtccccgagttgtggggctggggcccacgcaccgtgcggtcggtgagatgcgcagcgccggcgtggatgcacagacgctggcgtcctttctgcatgacacgcagctgcagcagcgcagcggagaaacgccggatttcagcaacacgctgttcctgctcgatgagagctcaatggtgggcaataccgatatggcacgggcatacgccctgattgcggccggtggcggtcgtgccgtggccagtggtgacacggaccagctgcaggccatcgcgcccggtcagcctttccgtctccagcagacgcgcagtgctgccgatgtggtcatcatgaaggagattgtgcgtcagacgccggaactgcgggaggcggtatacagcctgattaaccgggatgtggaaagggcactgtccgggcttgagagtgtgaaaccgtctcaggttccccgtcaggagggcgcatgggcaccggagcactccgtgacggagttcagtcacagccaggaagcgaaactggcagaagcgcagcagaaggcgatgctgaaaggtgagacttttccggatgtccccatgacactgtatgaagccattgtccgcgactataccggcaggacaccggaagcacgggagcagacgctgattgtcacgcacctgaatgaggaccggcgcgtactgaacagcatgattcatgatgcacgggaaaaggccggtgagctggggaaagagcaggtcatggtgcctgtcctgaacacagcgaatatacgtgacggggagctgcgtcgtctctccacctgggagaataacccggatgcccttgccctggtggatagtgtgtatcaccggattgccggtatcagcagggatgacgggctgataaccctggaggatgcggaaggtaacacgcggctgatttcgccccgggaggcggtggctgaaggtgtcacactgtacaccccggacaccatccgggtggggaccggtgaccggatgcgcttcacgaagagtgaccgggaacgcggttatgtggccaacagcgtctggacggtgacagcggtttccggtgacagtgtcacgctgtcggacggacagcagacccgggtgattcgccccggtcaggagcgggcagagcaacatattgacctggcctatgccatcaccgcccacggtgcgcaggggacaagtgaaacctttgccattgcgcttgaaggcacggaaggtaaccggaaactgatggcaggctttgagtcagcctacgtggccctgtcgcgtatgaagcagcatgtgcaggtgtacaccgataaccgtcagggctggacggatgccattaacaatgccgtacagaaaggaactgcccacgatgtgctggagccgaaaccggaccgggaggtcatgaatgcgcagcggctgttcagtacggcacgggaactgcgggacgtggcggcaggccgtgccgttctccgtcaggcggggctggccgggggagacagccctgcacggtttattgcaccgggacgtaaatatccgcagccgtatgtggcactgccggcgtttgaccgtaacggcaggtccgccggtatctggctgaacccactgaccacggatgacggaaacgggctgcggggattcagcggtgaaggacgggtgaaaggccgcggggatgcgcagttcgtggccctgcagggcagccgtaacggagagagcctgctggctgataatatgcaggatggtgtccggattgcccgtgataatcccgacagcggtgtggtggtaagaattgccggtgaaggtcgtccgtggaatcccggtgccatcaccggtggccgcgtgtggggggatatcccggataacagcgtccagccgggggccggaaatggcgaaccggtcacggcagaggtactggcacagcggcaggctgaagaggccatccgccgtgaaacggaacgccgcgcagatgaaattgtcaggaaaatggcagagaacaaacctgacctgccggacggcaaaacagagctggctgtcagggatattgccggacaggagcgtgaccggtctgccatatctgaacgggaaaccgcactgccggagagtgtgctgcgtgaatcacaacgggaacgggaagcggtccgggaggttgcccgggaaaatctgctgcaggagcgtctgcagcagatggagcgggatatggttcgtgacctgcagaaagagaaaaccctgggcggagactga

SEQ ID NO: 15220 - DNA, 291 bp, Escherichia coli
atgtggtccagtaccatcagcaccagtgccaccgttttgatgatatcccgctgtccgggtgaccagaccagaaatgactgcaaccaggtatcggtccgtgcagccagtgaatcgttacgtgtcgtgttcgtgttatccgttgtcatcagtgtttgtcttcctgtatcagtctccgcccagggttttctctttctgcaggtcacgaaccatatcccgctccatctgctgcagacgctcctgcagcagattttcccgggcaacctcccggaccgcttcccgttcccgttgtga

SEQ ID NO: 15221 - DNA, 1206 bp, Escherichia coli; identical to SEQ ID NO: 6029

SEQ ID NO: 15222 - DNA, 177 bp, Escherichia coli; identical to SEQ ID NO: 5882

SEQ ID NO: 15223 - DNA, 474 bp, Escherichia coli
atgcataaatcagaagctgaaaaaatagattctattctggatgaacatcaacagatatatcgcagacataaccgaatagataacatcctggcgtattgtgcgtgtattgcatggattccctgtattattgctgcgttcggcgttgatggtatatatctgaaaatcctgtttgcggtccttgcctgctgtggtgcggtatgcttttttattttcttcttcaccctcctgccggaatcactcatggtcctcagccgtcagagcctgcttcagcttatgcgtctgactgaagacgtaccggatgcgagacaggaactgcttaaccgtctgctgtccggtaaaaaactgactggtcgggatgaaaaggatatccggcgtctctggcaggagaaagtggatgcaatgcaggagtctgccacccgtcagcgtgaacaggatactattcggaagtttactgaagggaataaatccgaatga

SEQ ID NO: 15224 - DNA, 414 bp, Escherichia coli
atgcataaatcagaaaatgaaaaaatagattttattctggatgagcatgagcggatattcagaaaacagggttctttgtgtatggcactgggtaagggctttttagttatagctattctttgtggtgttgccacattctgtgtttctggcctgtatctgaaatccctgtgcctgtccgttgcctgctgttgtggggtattcagtcgtatttttaattattacagcgtaccggaggaatcacgcatggtactcagtcgtcaggaattactccggcttatgcgtctgactgaagacgtaccagatgtgagacaggaactgcttaaccgtttgttgtccggtaaaaaactgactggtcgggatgaacaggatatccggcgtctctggcaggaaacgcagaggaaacactatgcataa

SEQ ID NO: 15225 - DNA, 252 bp, Escherichia coli
atgaataagctggtttctgatggcagcgtcaaaaaaataaattatccggtgctgtatgagtccggaataacacctccgttatgtgaagtcagtgcaccagaagctgatgcgggggaagaacgcattgtggcatatgtttataaatcatcacggaatacggtttttgaaaatcctgacattgtaaaaaactgtacggtcagggatttgaagaatgattttgtgaactgcgatgagaaaggtgagggacaatga

SEQ ID NO: 15226 - DNA, 321 bp, Escherichia coli
atgaacatgcgtaatattaatgttattactgcccgcgctgtgccggataaaaacgtatcagatgattttatgcatgctgttctcagtaactgcaccacaaggatagtgcttcctgcactgaagaaattcggttctgaatcattgccgcacaattttaatatggctgctgtcggtgtgatgaaggagggaatgtcgatgcgtttattttcttctccggggcatattgtggttgccggacaatccggtggcggaaaatctgttccggtgaaagaactaatcgacagaattattcagaaatataaggaacccttcgatgaataa

SEQ ID NO: 15227 - DNA, 786 bp, Escherichia coli
gtggcttttgatggttcctccgatatcacattaaaagcaagtcatgttggtgcgtttgccttagggaaaacaggaagcaccgttgcgaatgataaagcagttggatggaactggagtagcggagcctataacgcaactattagtggtgcatcaacgttaattattcatttttatatgggagaaggaagttgtcctgcagctcagtttcggattaattataaaaatggcggtattttttatcgttcagcccgtgatggttatggttttgaagccgactggtccgaattttacaccaccaccagaaagccttcagcaggagatgttggtgcactgccgttatctggtggtcaactgaatggtgcactgggtatcggaacatccagtgctcttggcggtaattcgattgtattgggtgataatgacacgggctttaaacaaaatggcgatggtaatctggatgtttatgctaataacgtccatgttatgcgctttgtctccggaagcattcaaagtaataaaaccataaatattacagggcgtgttaacccctcggattacggtaactttgattcccgttatgtgaaagatgttcgacttggttcacagcaatattatggagtgaacaactggcgaacatggaatttccagtgcccttcaggtcatgtattgtctggtattaatgttcaggatacagggtctaactctgccgataatatagcgggcgtttattacagacccgttcaaaagtatataaatggcacctggtataatgtagcgagcgtttaa

SEQ ID NO: 15228 - DNA, 165 bp, Escherichia coli
atgacacagggccggcgggaggataaatgcctgtctgcccgcgccgggaaaaaacgcgcgccggtggcgctgaaaggggccgcgctcacgcgccgcccctttcattacgcggacgttctgatgggggcttctgtcttttcagacctgtcatttgtctgttactga

SEQ ID NO: 15229 - DNA, 567 bp, Escherichia coli
atggcgggtgatgcactgacattccgtgtggcgtttgtcgttcgctggctgctgtgggtcgtcaggtttgtggttatctggccgctggccacaatggccctgatggctctgtttgttttatggaaggacaacaccacgccggggaaattactggttaaggagattaacttcgtaagacaaacagcacctgccggacagttcccggtcagtgaatgctggttttcttcctctgattcttcaggcagatcagaaatacaggatatctgccattaccgcgcggctgatgctgcagattatgtcagggagactgaccggtcactgatgcaactggtcaccgcattctgggcaacactggcactgatgtatgtctcgctggcagcgatcaccgggaaatatccggtgcgacccggaaaaatgaaatgtgtccgggtgggaaccgcagatgaacatctgaaggaagtttatacggaagatacttctctgtcggaaaaaatcaggaaatgccctgtttatttccatgatgacagaacaaacagaagcaacggagataaaaatgaacatgcgtaa

SEQ ID NO: 15230 - DNA, 1452 bp, Escherichia coli
atggccagtatcaacaccattgtgaaacgcaagcagtacctgtggctggggattgtggttgtcggtacagcctccgcgattggtggggcactgtatctgtctgatgtggacatgtccggtaacggggaaaccgtggctgaacaggagcctgtgccggatatgaccggtgtggtggatacgacctttgatgacaaggtgcgtcagcatgccaccacagagatgcaggtgacggcagcgcagatgcagaagcagtatgaggaaatccgtcgtgaactggatgtcctgaacaaacagcgcggtgatgaccagcgtcgtattgaaaaactgggacaggacaatgccgccctggcagagcaggtaaaagccctgggtgctaatcccgtcacggcgaccggtgagcctgtaccgcagacgccagcctcaccgcccgggccggaaggcgaaccacagccgggaaacacccccgtatccttcccgccgcagggcagcgttgctgttccaccgccgacggcgttttatcccgggaatggtgtcacgccaccaccacaggtgacgtaccagtctgtgccggtgcctaaccggatacagcgtaaggtgtttacccgtaatgagggaaaacagggaccatcgctgccgtacattccgtcaggaagttttgcgaaagccatgctgattgaaggggcggatgccaatgcctcagtcaccggtaatgaatccacggtgccgatgcagctgcgtatcaccggtctggtggaaatgccgaacagcaagacgtatgacgcaacgggatgttttgtggggctggaagcctggggggatgtctccagtgaacgtgctattgttcgcacccgtaatatcagctgcctgaagaatggcaaaaccattgatatgccgattaaggggcatgtcagcttccggggtaaaaacggtatcaagggcgaagtggtgatgcgtaacggcaaaatcctcggctgggcatggggcgcgggatttgttgacggtatcggtcagggaatggagcgcgcctcccagccggctgtcgggctgggtgccacagccgcttacggggccggcgatgtccttaaaatgggtatcggtggcggcgcatcgaaagccgcacagacgctcagtgactactacatcaaacgtgccgaacagtatcacccggtgataccgattggtgcgggcaacgaagtgaccgtggtgttccaggacggcttccagctgaaaaccgtggaggaaatggcgctggagcagtcacagagtacagcggaagagggtaacccggaaagccctgtgccgaatcctccctcggcagaaagccacctgaacggttttaacaccgaccagatgctgaagcagctgggcaatctgaatccgcagcagtttatgtccggagacaagaacccgcagggcggggatgccggcaaggagggcggaaatggcgggtga

SEQ ID NO: 15231 - DNA, 384 bp, Escherichia coli
atggcgaaagtgcaggcttatgtcagtgacgaaattgtctataaaataaataaaattgtggaaagaagacgtgcagaaggagctaaaagtacagatgtaagtttctcaagcatatccactatgcttctcgaattagggcttcgtgtatatgagactcagatggagcgtaaagagtctgcatttaatcagactgagtttaataaattgcttcttgaatgcgttgtaaaaacacaatcatcagtagcgaaaattttgggtattgagtctctcagtcctcatgtctccggaaatccaaagtttgaatatgcgaatatggtcgaagatatcagggagaaggtgtcatctgagatggagaggttctttccagaaaatgatgagggttaa

SEQ ID NO: 15232 - DNA, 222 bp, Escherichia coli
atggaatcagccagttcactgacggactctgcggaatacggcaccgtgcgcacattcagcggtgatttaatcagtgaggccagcggcacgctcacttcctccgtctgcgccagcagggcagacagggcggtttcctgttcttttgacgatttacggctggatttacgcaccgtttttaccttaaactctgtaactgacatgattattcctcttacggtttag

SEQ ID NO: 15233 - DNA, 234 bp, Escherichia coli
atgagcgaatatttcagaatacttcagggactgccggacggctcctttacccgcgaacaggcggaagccgttgccgcacagtaccggaacgtctttatcgaggatgatcagggaacgcattttcgcctggttgtccgtcaggatggcacgttgatctggcgctcctggaattttgaggacggtgccgggtactggatgaaccggtacatcagggatttcgggattcgtaagtaa

SEQ ID NO: 15234 - DNA, 273 bp, Escherichia coli; identical to SEQ ID NO: 13033

SEQ ID NO: 15235 - DNA, 1290 bp, Escherichia coli
atgactctgaaagatttcagtaaatttgtgaaagatgaaatcggctttagttacaacggctactaccgttctggttggggcacagcctcccatggttcacctaaatcatgggcaattggttctctgggccgctttggtaacgaatactccggctggtttgatttgcagttaaaacaacgtgtctacaacgaaaacggcaaacgggttgatgccatcgtgatgatggatggtaacgtgggtcagcagtactctactggctggtttggcgataacgccggtggcgagaactttatgcagttctctgatatgtacgttaccaccaaaggtttcctgccctttgcgccagaggctgatttctgggtgggtaaacacggtgcgccgaaaattgaaatccagatgcttgactggaaaacgcagcgtaccgatgctgccgcaggtgtaggtctggaaaactggaaagtcggtccgggtaaaattgatatcgcgctggttcgtgaagatgtcgatgattacgatcgcagcctgcaaaacaaacagcagattaataccaataccattgatttacgctataaagatatcccgttatgggataaagccaccttaatggtgagcggtcgttatgtctcagcaaatgaaagcgcatcggaaaaagataatcaggataataacgggtattatgactggaaagatacctggatgtttggtacatctttaacgcagaaatttgataagggtggcttcaacgaattctccttcctggttgcgaataactctatcgccagtaactttggtcgttatgctggtgcaagtccatttactacctttaatggtcgttattatggtgatcacacaggcggaactgcagttcgtctgacttcgcagggcgaagcttatatcggcgatcatttcattgtggctaacgcgattgtttactccttcggtaacgatatttatagctacgaaacaggcgcacattctgatttcgaatctattcgtgcggttgttcgcccggcctatatttgggaccaatataaccagacaggtgttgaactgggctatttcacccagcaaaacaaagatgcgaatagcaataaatataatgagtctggttataaaaccacgctcttccatacctttaaagtcaataccagtatgttgacctcgcgcccggaaattcgtttctacgctacatatatcaaagctctggaaaacgaactggatggcttcacctttgaagacaataaagacgaccagtttgctgtcggtgcccaggctgaaatctggtggtaa

SEQ ID NO: 15236 - DNA, 222 bp, Escherichia coli
gtgagtgatgaagccgatgaagcatattcagtgacagaacaactgaccatgacaggaataaaccggatacgccagaaaataaatgttcatggtattcctgtttatctctgtgaagcatgcggaaatcctattccggaagcccggcggaaaatatttcccggtgtgacgttgtgcgttgaatgtcaggcgtatcaggaaaagcagagaaaacattatgcataa

SEQ ID NO: 15237 - DNA, 516 bp, Escherichia coli
atgaaacagatttctttatttattcctctgctgggaacgttattactttccggctgtgccggaaccagtacggaatttgagtgtaacgccaccacatccgatacctgtatgacgatggagcaggccaatgagaaggccaaagaactggagcagtcctcagaagcaaagccggttgcggcatcactgccgcgcctggctgaagggaacttccggacaatgccggtgcagaccgtcaccgcgacccctccgtccggcagcagacctgcggtgacggcacttccggagcagaaactgctggcaccacgtccgttgtttacggctgcccgggaagtgaaaacgattgttccggtcagttcagttgcgccggtaacacctccccgcccgctaagaacgggtgagcagacggctgcattatggatagcgccttatattgataatcaggatgtttatcatcagccatccagtgtgttttttgttattaaaccgtctgcgtggggaaaaccacgtattaattaa

SEQ ID NO: 15238 - DNA, 393 bp, Escherichia coli
atgaaagaaaaaagaaatgatgcggaactaaaaaacagaaaaactaaacgggattatgattatgaacgcagggtttctgatatatattttgatctgttttttgtgttcgttgctgccggaacttttttatgggtgattatgcatagtatttttgatgcctgtattgattcgtggaaagctgacccggaattaaataattttcgttatatgtggaacatcctgatgtatgtcattccgtatacgttatgggcgtttgcaggtggatttcttatcgtatacgtcaggaaccctttaaatgaattaataaacggggggatcagaatattccggctgaaacgccgtatgcgccgggagaacaaattaagggagggtggcaataatgcttcgcattaa

SEQ ID NO: 15239 - DNA, 258 bp, Escherichia coli
atgaaagtcatattcacgtcgaaccgttttattgattttcttatccggcttttgattacagcgattgtcatttctccggtaattatctggtcgtgggatacggtaaaagaaactacggcagacgggatacttgctgctgctttcgttatcctttactccggtgtgcttctgtttattctgtatttttgtttttctgccctgactgacctgcagaaacctgatgaaagaaaaagtgatgaaaggaatgaagatgaataa

SEQ ID NO: 15240 - DNA, 846 bp, Escherichia coli
ttgtgttttcacatttttactgattattttggtgataatgatcgtaagtattttgatgccctggcgttacagtataaaaccagaattaaaatatatctgattaatggtgatcgactgcgctcattgcctagcacaaagaactggactcatgcaatatattttcgttttgttattgctgattactttattagtaaggtggctaaagtcctttatctggatgcagatatcatttgtcaggggactattgagccactaattaaattctcatttcctgacgataaagtcgcaatggttgttacagaagggcaagctgactggtgggaaaaacgcgcccattcgttaggtgttgcgggaatttctaaaggttactttaactccggttttttattgattaatactgccaaatgggcagctcagcaggtttctgcacgagccattgcaatgctaaatgagccagaagtaatcaaaaaaataacacatcctgatcaggatgtattaaatatgttgctggcagataaacttattttcgctgatattaaatataacacccagtttagcttaaattatcaactaaaagaaagctttataaacccagtaaccaacaatactatttttatccattatatcgggccaaccaagccctggcatgattgggcctgggattatcctgtatcacaagcctttatggaggcaaaaaatgcttcgccatggaagaatacagcgttgctgaaaccgaacaatagcaatcaattaagatatagcgcaaaacatatgcttaaaaaacatagatatctaaaaggatttagcaactatcttttttattttattgaaaagataaagcattaa

SEQ ID NO: 15241 - DNA, 168 bp, Escherichia coli
atgcacctgaaggtggatgatgaggttgtttttttgtatgtggtgctgattttttgtgcgctgtcgggcttcagacgtgcggaagcctccggcgcaggccggattattcagaggaggtcactttcagggggaagctgtggccagccggctgtaattacggttacgtga

SEQ ID NO: 15242 - DNA, 231 bp, Escherichia coli; identical to SEQ ID NO: 14050

SEQ ID NO: 15243 - DNA, 510 bp, Escherichia coli
atgatcactcactatgatataaaaacggagacacagaaactaaaggatgtactctctgtagagggggttaatatcccgccgttattacaggtcataaagcctggtgggtatgtgtttttatgggttttattatggccgacatttctccgtttgcaggcagataaagttgatatccgagatgccggatttgatatatgttttagtggcgtaatgggttttatcctttttgttgccattactaatggaatgatgttgtatcttgctatccctaaaaaattcagagatgagtcgaaaattatatcttttatgtatgataagaacaaaacttatatcttgtcatttttgattgctttttcaatggtttcatttgcccatacactcttatatgagtttttattaattgctttgtttataatctttttctttatttatgctatagacataaatcgttataatctctctgctatagcctcagtaataggactgttcaaaaaagagtctgttagttaa

SEQ ID NO: 15244 - DNA, 573 bp, Escherichia coli
atggaacacggtgcccgtttaagtaccagtcgtgtaatggccatcgcctttatatttatgtcagtgcttattgttctcagcctctctgttaacgtcattcagggggtgaataactaccgtcttcagaatgagcaacgcactgccgtgacgccaatggcatttaatgccccctttgccgtgtcacagaacagtgccgacgcctcttatttacagcagatggcgctgtcatttattgccctccgtctgaatgtttcatcagaaaccgtcgatgcctcacatcaggcgcttctgaaatatatccgcccgggcgcacagaaccagatgaaagttattctggctgaagaagcgaagcgtattaaaaacgataacgtgaactcagcctttttccagaccagtgttcgtgtctggcctcagtatggccgtgtggaaattcgtggtgtgcttaaaacctggattggtgattcaaaacctttcactgatatcaaacattacatccttattctgaagcgggaaaacggggtgcgtattttcatgaaaggagatcactcaataacttccatcgagatcgggtaa

SEQ ID NO: 15245 - DNA, 246 bp, Escherichia coli; identical to SEQ ID NO: 4533

SEQ ID NO: 15246 - DNA, 348 bp, Escherichia coli
atgctttttacactgaaaaaagtgattggcaatatgttgctgccacttccgctaatgttgttgattattggcgctggcctggcgctgctgtggtttagccgttttcaaaaaaccgggaagatttttattagcattgggtggctggcgctcttgttattgagtttgcaaccggtagccgaccgcctgctgcgtcccatcgaaagcacctatccgacatggaataattcgcaaaaagtggactatatcgtggtgctcggaggtggttatacctggaacccgcagtgggcgccgagctctaatttaatcaataacagtctgccacgcctgaatgaaggtattcgcttatga

SEQ ID NO: 15247 - DNA, 885 bp, Escherichia coli
atgaaaaaaacattactggcagccggtgcggtactggcgctctcttcgtcttttactgtcaacgcagctgaaaacgacaaaccgcagtatctttccgactggtggcaccagagcgttaacgttgtcggaagctatcacacccgtttcggaccgcagctccgcaacgatacctaccttgagtacgaagcattcgctaaaaaagactggttcgacttctatggttatgcggatgcgccggtattcttcggcggtaactccgatgcaaaaggtatctggaaccacggttctccgctgtttatggaaatcgaaccgcgtttctccattgacaagctgaccaatactgaccttagcttcggtccgttcaaagagtggtacttcgcgaacaactacatttacgacatgggtcgtaataaagatggccgccagagcacctggtacatgggtctgggtaccgacatcgatactggtctgccgatgagcctgtccatgaacgtctatgcgaaataccagtggcagaactacggcgcagcgaacgaaaacgagtgggacggttaccgtttcaaagtgaagtactttgtgccgattaccgatctgtggggcggccagctgagctacatcggcttcaccaacttcgactggggttccgacctgggcgatgacagcggttatgcgaacaacggtattaaaacacgtaccaataactctattgcgtccagccatattctggcgctgaattacgatcactggcactactctgtcgttgcccgttactggcataacggtggtcagtggaatgacgatgcagaactgaacttcggcaacggcaacttcaacgttcgctctaccggctggggtggttatctggtagtaggttacaacttctaa

SEQ ID NO: 15248 - DNA, 1350 bp, Escherichia coli
ttggcgggttttaacatcaaacattggtttgcagatggcgcgtttcgcaccattattcgcaatagcgcctggttaggctccagtaatgtcgtgagcgctttactgggtctgttggcgctctcgtgtgccggtaaagggatgacgcccgccatgtttggcgtactggtgattgtacaatcgtacgccaagtcgatcagcgattttattaagtttcagatatggcagctggtggttcagtacggaacaccagcattaaccaacaataatccgcagcaattccgcaatgtcgtctcattttccttctcgctggatatcgtcagcggcgcggtggcgattgtcggcggcattgccttactcccttttctttcccattcattaggtctggatgaccaaagcttttggctggcagcgctgtattgcacgctcattccttcaatggcttcctccacgccgaccggcattctgcgtgcggtagatcgcttcgatctaattgctgtacagcaagcgacgaaaccttttctgcgcgcagcggggagcgtcgtagcctggtattttgactttggttttgcgggttttgttattgcctggtacgtgtcgaatctggttggcggcaccatgtactggtggtttgccgcgcgcgaattacgccgcagaaatatccataacgccttcaaattgaatctgtttgagtctgcccgacacattaaaggcgcgtggagttttgtctggtcaaccaacattgcccactccatctggtcggcgcgtaactcgtgcagcacagtgctggtggggatcgtgttaggacccgctgccgccgggttatttaaaatcgccatgacattcttcgacgccgccggaacgccagcgggtttactgggcaaaagtttttacccagaggtgatgcgtttagatccgcgcaccaccagaccgtggttgttaggcgtgaagtcaggtttactggcgggcggaattggtattctggtggcgctcgcggtgttgatcgtcggcaagccgcttatttcgctggtgtttggcgttaagtatctcgaagcgtatgacctgattcaggtgatgctgggcgcaattgtgatttcgatgctgggcttcccacaggagtcattgctattgatggcgggaaaacagcgcgcttttctcgtggcgcaaaccatcgcctcaatcggctacatcgtattgctgttcatgttctgtcatctgtttggcgtgctgggagcagcgtttgcttatttcggtgggcaatgtctggatgtggtgctctcgttaattccgaccttaaaggcattttttcagcgccattccttgctttataacgcagccggagagaaatcctga

SEQ ID NO: 15249 - DNA, 774 bp, Escherichia coli
atggacgcactacaaacacaaactgttaatagtacaaccgcgccgcagcccaactacattccggggctgattgcggtggtcgggtgtgatggcaccggtaaatccacactgaccaccgacctcgtgaaatcgctgcaacaacactggcaaaccgagcggcgctatctggggctgctctcgggcgaagacggcgacaaaatcaaacgattgccgttggttggcgtctggctcgaaaggcgactggcggccaaatcatcgaaaacccaaagcatgaaaacccaaagcatgaaaaccaaatctccagcgctatgggcggcggtgattatgtactgcttctcgctgcgaagaatggcgaatctacgcaaggttcagcgactggcgcaaagtggcgttctggtggtcagcgatcgcttcccgcaggctgaaatttcgggcttttattatgacggaccggggatcggcgtcgaacgtgcgaccgggaaaatcagcatgtttctggcgcagcgcgaacggcgtttataccaaaaaatggcgcaataccgtcctgaattaatcattcgtttggggattgatattgatactgccatctcccgcaagcctgaccatgactatgccgagctgcaggacaaaatcggcgtcatgtcgacgattggctataacggcacaaaaattcttgagattgattccagagcgccctacagcgaagtgctggaacaggcacagaaggcggtttctctggttgccatcgtttctgaccgccgaagtttaacttaa

SEQ ID NO: 15250 - DNA, 3801 bp, Escherichia coli; identical to SEQ ID NO: 8004

SEQ ID NO: 15251 - DNA, 282 bp, Escherichia coli
atgagaattcatgatttgtgtgaagatcaagagcaatgggctatgcagacccttatgggatcaggagttcttgcaaggtgcagaatccataacgatgtaattttagacagcggaaatgatgcttcttctgcttataaattaggaacttacctatatcaaaaagataatagctgcaacttattcaatactcttactgaagcccgcgacgcaataaaggatgcatatgaatcgtattgtgggattgatgattgcccacaatgctcaaaatacattgacgattaa

SEQ ID NO: 15252 - DNA, 420 bp, Escherichia coli
atgaccaccattaccaaagaacgcgcggagattagatcattcatcactggcttcctgagcgacccggcgcacaataaccaatcctcagacagcctgcttgccaatgtgtttcgtatcgcactggcatcgctggaagcagagccggtggcgtggaaggtaacattcacgcaaattgaccgtgaatataacacgttcactggtatgtatcctgacaaagcagaagtcgaacggtgggtgcggctgcataaagcatgtaattttcgggcagatataacaccgctttataccgcagccagcgccggtatctgtgccggaagtagtcggctgggaagatgtgccagaggaaatcacggaagacgacattgctctggcatccgcatgggcgattggcttcaaccagtgccgcgcagcaatgcttaa

SEQ ID NO: 15253 - DNA, 210 bp, Escherichia coli
atggctattgccgcaagttacaccatgcatctctattgtgattgcctccagtgtacagatggcaaatataagtcgccagacttcggtgagtatatcggtacgtcatgggctggctgtgcaaaagaggcgcgcaaggatggttggcgaataagcaaagacaaaacgcgtgcttttgcacccgggcataaagttttgaggattaacaaatga

SEQ ID NO: 15254 - DNA, 177 bp, Escherichia coli
atgaaaaaccgtaaagcaaaattacttcttttatcgcgttcgacggggtacgagaagctaccaatcagcaatcacaaacgggcggtgatcggcatgtttggtagggtggtattcgcatttaactataaacccaccgcgtcgcggaacagacgagagaagggggacgcagtgcgatga

SEQ ID NO: 15255 - DNA, 672 bp, Escherichia coli
gtgagcaagattgactatcaggcattgcgtgctaaggcagaaaaagcaacgtgtggcgagtggtcgctcgaatatggagatggccgatttgatggtgatgatgcgctaattcatcgtgaagttgctggatatattcccatttgcagaattgaaggagcgcatcctgaaagcggtttcgatgaagatttccaaatagaacagcaggccaatgctgaattcatcgccgcagccaatccagctaccgtcttggcgctgctggatgagctggaaagaaaccagcaatacataaaacgccgcgaccaggagaacgaggaaattgcgcttacggtagggaagctgcgtgttgagctggaagccgcagagaagcgcatagcagaactggaagcacgggaaataaaaccagccaaaggcgaagttcttgtcgttgtatctggttttactggttgcggaaaaagcgccattgccggggaaatagaaatcgcgatgaaggctattggtgtaccggttcagtggactaatggcgatgcggaaaagcgcatgacaggagctgactggctgacagcgattgagatgtacaaaccaactgtgcgcatcgtggaagttaatgtgccacgcgcccctggcattcgcatcaaaggagacgcaggagaacaaaacgatgaaaaaccgtaa

SEQ ID NO: 15256 - DNA, 477 bp, Escherichia coli
atgaaacaaatgtcactaattgagatggatggttttctgaaaggtaaatgcatcccccgagatttaaaggttaacgaaacaaacgctgaatatctggtgcgtaaatttgctgaagcggaggccaagtgcgcggcgctggcagcggagaatgcggggctgaagtctggcgctatggacgaaatcaaggttatcaaccgtggaggtcaggcatattgcgtaaaagatggagtgcaagttaatcccatgtatgcaagagggtggaatgactatcgcgcaaagtctctgcaatcagacaccccagccaccgatgctttcctggctgaagtacgggcgcaggcgtttaatgacctttgctcggtgttcgttaaggacgcgacggttgccgggctggacgatggcgacatcgttacggtgaaagaagcgacggacgccctgctgcattgtgcggagcagcttcgcaaaggaggcaaccagtga

SEQ ID NO: 15257 - DNA, 369 bp, Escherichia coli
atgtcaaacatcaaaaaatacatcattgattacgactggaaagcatcaatagaaattgaaatcgaccatgacgtaatgacagaggaaaaacttcaccagattaataatttctggtcagactctgaataccgactcaataaacacggcgctgtattaaatgctgtattaatcatgctggcgcaacatgctctgcttatagcaatttcgaaagacttaaatgcatatggtgttgtttgtgagttcgactgggatgatggaaatggtcaggaaggatggcctccaatggatggtagtgaaggaataagaattaccgatatcgatacatcaggaatatttgattcagatgatatgactatcaaagccgcctga

SEQ ID NO: 15258 - DNA, 369 bp, Escherichia coli
atggttggaaccgctatagcaagcttttttgggatgttggcaatctcgacaatttacggcttagcgcatgcttttattgcgaaatctctatcagaaaaaataagccaggcttgggcgcatagatcagctcgtttcatgattctggtgatcatagcaatacaagggatatctgcatttatcctctatggatcaagcttatacctattgtatcaaggcgcgacatttacgccttacaccagtgattacggaactctatacgatggtagtgaagacatcactgtggcttggatcgtctttggtttatctatggccgtgtctgttgtagcagacatcattaaggtaattctcgtcttaaccttcgctgactaa

SEQ ID NO: 15259 - DNA, 717 bp, Escherichia coli
atggaaaataaaaaatcactgacgacagaacagctcgaagacgctaagcggcttaaggctttgtatgagtcaaaaaagaaagaattgggaataacccaatactcaatcgctgatgaactgggtatcacccaaggagcggtagggcattatcttaatggcagaaacgcgctaaacgttgagatcgcatctggttttgcacgtttgttgcaagtctcaattgctgattttagccagtcaattgctgccaaggttgcagaacaggcagaaagccttaagagcgatgccaacgtaaggtatgcaggggaatacagagcaggaaagaggtatccggtgttaagcagtatccaggctggctcgtggtgtgaagcatgcgaaccatacaccattaaagacatagatgtttggcttgagtctgacgcgcatattcaaggtaatgcgttctggcttaaagtggaaggtgattcaatgacggcaccggttgggttaagcattccagagggaacattcgttcttttcgataccggaagggaggcgatcaacggcagcttggtcatagcaaaactttctgactctaacgaagcaacattcaagaagctgataatcgacggcggaaataaatacctcaagggacttaatcctgcatggcctctcgtgccaatcaatggaaactgcaagattataggcgttgcaattgagacaaaactaaggctggtttga

SEQ ID NO: 15260 - DNA, 195 bp, Escherichia coli
atgattcgaatgacacttgccgattacgccaaaatccatggacaggctaaagcagccagtgactttggtgtaatccagtgcgctatcagcaaggccattctggcaggccgtaacatcatggttacggtaaagcctgatggcagtgtgattggagaggaagttcgtcctttcccaagcaacaagaaaaacaaatag

SEQ ID NO: 15261 - DNA, 441 bp, Escherichia coli
atgaaaaagctaacctttgaaattcgatctccagcacatcagcaaaacgctattcacgcagtacagcaaatccttccagacccaaccaaaccaatcgtagtaaccattcaggaacgcaaccgcagcttagaccaaaacaggaagctatgggcctgcttaggtgacgtctctcgtcaggttgaatggcatggtcgctggctggatgcagaaagctggaagtgtgtgtttaccgcagcattaaagcagcaggatgttgttcctaaccttgtcgggaatggctttgtggtaataggccagtcaaccagcaggatgcgtgtaagcgaatttgcggagctattagagcttatacaggcattcggtacagagcgtggcgttaagtggtcagacgaagcgcgactggctctggagtggaaagcgcgatggggagaccgggcagcatga

SEQ ID NO: 15262 - DNA, 612 bp, Escherichia coli
atggctaaaccagcgcgaagacgatgtaaaaacgaagaatgtcgggaatggtttcaccctgcattcgctaatcagtggtggtgctctccagagtgtggaaccaagatagcactcgaacgacgaagcaaagaacgcgaaaaagcggaaaaagcagcagagaagaaacgacgacgagaggagcagaaacagaaagataaacttaagattcgaaaactcgccttaaagccccgcagttgctggattaaacaagcccaacaagccgtaaacgccttcatcagagaaagagaccgcgacttaccatgtatctcgtgcggaacgctcacgtctgctcagtgggatgccggacattaccggacaactgctgcggcacctcaactccgatttgatgaacgcaatattcacaagcaatgcgtggtgtgcaaccagcacaaaagcggaaatctcgttccgtatcgcgtcgaactgattagccgtatcgggcaggaagcagtagacgaaatcgaatcaaaccataaccgccatcgctggactatcgaagagtgcaaggcgatcaaggcagagtaccaacagaaactcaaagacctgcgaaatagcagaagtgaggccgtatga

SEQ ID NO: 15263 - DNA, 585 bp, Escherichia coli
atgctttctgagaatgctaaagatatacctggatttgaaggtgtttatgccgtaacagaagatggcagggtatattctcactcacgtgttgttaaggctgcgcatggcagcacgcaactcagaaaggggcgctggttaaagcctaaaatcaatcagggaagggtgctttataatatcggagcaaaatggacttttgcccatcgaatcgttgcaatgacattcctgccaaatcctgaaaacaagcctcaggtaaatcatattgatggcaatccactcaataataacgtcaataatcttgagtggtgcactcaaagcgaaaacatcaaacatgcatacgccaccggattaaagaaaccaatcaagtttttcggaaccaagcacccaaaacacaagttgagtgatgacgatgttcttgcaatcaagtcatcaaaagaaagcttgtcagtaattgcggctaagtacgggatatctaagacctgggcaagtaggctaaagcgtgatgctaactgggttcatataaaggttgattccaatggcaatacaacaactaccactaatgaagggattggggaaaagtgcggttaa

SEQ ID NO: 15264 - DNA, 330 bp, Escherichia coli
gtgcttgaatggtttctgttggctgcattagtcgtttctggtttggtgtatgagtatcgaatgcactctctaacaaaaaaaataggaattctagaaaacgaatattgtgctctcaaatcctcactggaacgtgagcaaggggacttaaaaatctctctgtctagcattgagcgttctatagagagcttagaggataaggttgatcgtataaagaatgaggatattcatgatattaaggacgacatatccttcttaaaatcttggttgaaaaatgttgggaaaattgccacatcaacacgagataagctcaatccatccatggatgactaa

SEQ ID NO: 15265 - DNA, 177 bp, Escherichia coli
atgatgagcgatgttctttacagtggtcgtaaaagtcagagtttccagcttcgtttgccagcgcgaatgaaggaggagatcagacgcgtagctgaaatggatggaatttctatcaactctgcgattgtgcagcgactggctaaaagcctgagagaggaaagagttaatgcccagtaa

SEQ ID NO: 15266 - DNA, 723 bp, Escherichia coli
atgcccagtaaaaatagtgaagcccggcagtgcgcgaacacaaaccgggcctctatgtcagtaaccgtatgcaaggaaactaacatgagcattgtagcaaaatcagattataacttccaaggattcacctttaaccctgtaacagagggtgggtctatctggtttacctccaccgaactagctaaggctctcggctataaaaaaactgatgccatcagccaaatttatgcccgtaatgctgacgagttttccgactcaatgtcattgaccctcaatatgaaggtcaacggaataaacaatagcttacgtaacaaatcggtcagagtttactcgctccgaggcgctcacttggtggcgatgtttgcttctacgcccaaggccaaagagttccgccgctgggtgctggatattttggatcggcaggcagaatgctcaccgattgcaaaacagtttactgacgaagaactggttaatctctgctacttacaattgtggatggagaagagtcaacaaatgtgcaaacacatctacccaggaatgaagcaaattggttctgagctttcaggaaggatttacgatattgcatatgagactcgctacatgtcagaagaaaccaagaaatcacttcttcgtgaaatgaagaatcttgataccaacaattttgtcgtaaagaacgctcagccaatgctggcaaaactgcgcggcgaggaatggattcattga

SEQ ID NO: 15267 - DNA, 2175 bp, Escherichia coli
atgacagacattacagccaatgttgtagtgagtatgccttcgcaactcttcactatggcgcgttcttttaaagccgtagccaatggcaaaatttatatcggtaaaattgacactgacccggtaagtcaagaaaaccagattcaggtttatgttgagaacgaagatggttctcacgttcctgtttcgcaaccaatcatcattaatgcggctggatatccggtatataacggacagattgccaaattcgtaaccgtgcaaggccattctatggctgtttatgatgcgtatggtacacagcagttctattttccgaatgtgctgaagtatgacccggatcagtttaaattacttattggcggtacagatggtagtaaatatatcggtttcggcgcttcaacggtttacgatgcaatcaggaaaacacctcaatactatggagctaaagcagatggattgacatcagattctgatgccattaatgccgcagcattagctgcttttaataatggtggcggggaaatattttaccctccaggtgtttatttaatagattctcctatcattctttatacaggcgttcatcataaaggctctggaaagagagcaacatttctgtatgttaaaaaaggtagtaatacagatgtatttaaaacacatggctttggcgttgtggaaaatctgtctgatgcgccatatggatttagcataaaagatatgaccattgatggtaattatcttgacttgcaaagagatacaaactcatggagaacttgcgacactgttaacaatgactatggaactgccattaaaatattcggcagcatgtaccacattgacgttgagattaataatgttgcagaacatgctctctattcagaggggtatggatcatttcatgataatcaggaacacgcctctgaagtgaggataacgggaagaatttcagggagagagggggttgtgttcagggggccaggtgatattaacctagattatattgtttttggcctgtgtggacttcctccttacagcacaagattaacagcaacaagccaacaaagccttctttatcccggagaaccatgtcatggaattgttcttgataatcagtctccttatacaggacatgtcgatataaattacatccatgtatatgctgcgtattatggctatggatttaagacgctgggtgttaaccgattcaatgcgaggcatgtgtgtgttgataatagtttaggtggttactggtttaccaacggggcacatggtgttgttgccatcgcagaagccagggcgtgcggaagaatgccagataactacactggcgattcaatttctcctctccgcgacatgcttctggataacggtacaatctggacacttaacatcaatataaaagcacaaagatattcaccttcaattgatgatgatgggtatcagatagctatatcaggcaacaacaatgtagttacaataaaccaaattggtcagttacagagtgacaatgcccctattaaagcctcgcttctttctgttactggtgacaataataatgttacttttacatccaagaggataaaaggaaatttatgttacttatccggcggtggtaataatataagaggttcgtgtgataatttgttctcaggttctgctcttattcgcgacgcagtaaattcaacaacaatttgttttgcgaacagcgtagatataactgcgaaggggctttcttctgattgcactggatttaacagcattggcacatgtgcatcagagaatataagattaatcacttcaggcgcaaatggttataataggtttttaggtgatagaatggcagcccttaacaggacgtgtacgtggacgattatggcaacagttggaaactcaataaatgggaaatcaactgacgattatattgagtggaatatgccaaacccaacaggtagcgaatctaacgaggttgatattgagcataattttctgtatgccccaacaccaaaccagattgctgtgttggggtttagacaacctgctggttctgcagaaggtgcaactttaagtccaatagaaattatcggaactccaagtgagtcttctttcagaattagataccattggtcaggccctttatcttctggctctgctccaattgtaatgttcaggattagatag

SEQ ID NO: 15268 - DNA, 1644 bp, Escherichia coli
atggaacttcttgtacttgtctggcggcagtatcgctggccatttatcagtgtgatggcgctaagcctcgccagtgcggcattaggcattggcttaattgcttttatcaatcagcgccttatcgaaacggcggataccagtctgctggtattgccggagtttctggggttattgctgctgttgatggcagtcactctcggatcgcaactggcgctcaccactttggggcatcacttcgtttaccgactgcgtagtgaatttatcaagcggattctggatacccatgtcgagcgcattgaacaacttggtagcgcctcgttgctggcggggttaaccagcgatgtgcgcaatatcaccattgcttttgtgcgtctgccggaactggtgcaggggatcattctcactatcggttcagcggcgtatttgtggatgctgtcgggcaaaatgttgctggtaacggctatctggatggcagtcaccatctggggtggttttatactggtggcgcgggtgtacaaacatatggcgaccctgcgtgaaaccgaagataagctgtacacggattttcaaaccgtactcgaagggcgcaaagagctgactctgaaccgtgaacgcgccgagtatgtgtttaacaacctctacattcctgatgcgcaagagtatcgccatcatattatccgcgcagacaccttccatcttagtgccgtgaactggtcaaacatcatgatgctgggcgcaatcggcctggtgttctggatggcgaacagtctcggttgggctgataccaacgttgccgcgacctattcgttgacgttgttattcctgcgtacgccgctgctttcggcggttggcgcgttgccgacgctactgacggcgcaggtggcgtttaataagctgaacaaattcgcgctcgcgcctttcaaagcagagtttccgcgcccgcaggcgtttcccaactggcaaacgctggagctgcgtaacgtgacgtttagctatcaggataacgcgttttccgttggtccaattaatctcaccattaaacgtggcgagctgctgtttctgattggtggcaacggtagtggaaaatcgacgctggcgatgttgctgacgggcttgtaccagccacaaaatggcgaaatcttgctggatggcaaacctgtcagcggcgaacaaccggaagattatcgaaaactgttttcggcagtgtttaccgatgtctggctgtttgatcaactgctggggccggaggggcaacccgctaacccgcaactggttgagaagtggctggcgcagctgaaaatggctcataagcttgagttaagcaacgggcgtattgttaacctgaagttatcaaaagggcagaaaaaacgcgtggcgctgttgctggcgctggcagaagaacgcgatattatcctgctggatgaatgggcggcggatcaggatccacacttccgtcgtgagttttatcaggtgctgctgccgctgatgcaggagatgggtaaaactattttcgccatcagtcatgatgatcattactttatccacgccgaccgcctgctggaaatgcgcaacgggcaacttagcgagctgacaggcgaagagcgcgatgctgcttcgcgtgatgccgttgcccggacagcataa

SEQ ID NO: 15269 - DNA, 651 bp, Escherichia coli
atgttggatctgtttgccgatgctgaaccgtggcaagaaccactggcggctggagcggtgattttgcaccgttttgcttttaacgctgcggagcaactgatccgcgatattaatgacgttgccagccagtcgccgtttcgccagatggtcactccaggcggatataccatgtcggtggcgatgaccaactgtgggcatctgggctggacgacccatcggcaaggttatctctattcgcccattgatccgcaaacaaataaaccgtggcccgccatgccgcagagttttcatcatttatgtcaacgtgcggctacggcagcgggctatccagatttccagccagatgcctgtttgatcaaccgctacgttcctggcgcgaaactgtcgctgcatcaggataaagacgaaccggatctgcgcgcgccaattgtttctgtttctctgggcttacccgcgatttttcaatttggcggcctgaaacgaaatgatccgctcaaacgtttgttgttggaacatggcgatgtggtggtatggggtggtgagtcgcggctgttttatcatggcattcaaccgttgaaagtgggggggcatccactcaccaccgactgccgctacaacctgacattccgtcaggcaggtaaaaaagaataa

SEQ ID NO: 15270 - DNA, 783 bp, Escherichia coli
atgttggaatcaagcaaagttcccgccctgacacgggctattgatattctcaatttgattgcccggattggcccctgtagtgctgcgacgatcattgacacattggggatccctaaaagcacagcctatttgctgcttaatgaactcaggcgtcagcgttttcttagccttgatcaccaggaaaatttttgtttgtggaccaggctggtggagctttccggtcatgcgttaagcaagatggatctccgggaactggctcgaccgcgtttgacgcaactgatggataccaccgggctgttatgtcacctggggattattgataacggcagcgcttattacattttgaaagtggagtcatcagccactatcagcgtgcgttcccatgaaggaaaaagcctttcgctttatcgctccggaataggtaaatgcctgcttgcctggcaacctgcagctgtacagcaaagtattatcgaagggctggtctgggaacgggcgacacccacaacgattactcatccacaacggctctacgaagaactggcgcgtattcgccgccagggctggagctatgacaacggcgaagattacgccgatgtccgttgtgtcgctgcgccggtgtttaacgccaataacgagcttaccgctgcgatttcggtggtcggtacccgcttacaaatcaatgaagaataccgtgattatctggcgggcaaggccattgcctgtgccagggatatttcacgtttgttgggatggaaaagtccctttgacttacaggcctcataa

SEQ ID NO: 15271 - DNA, 363 bp, Escherichia coli
atggcacgaaaaaccaaacaagaagcgcaagaaacgcgccaacacatcctcgatgtggctctacgtcttttctcacagcagggggtatcatccacctcgctgggtgagattgcaaaagcagctggcgttacgcgcggtgcaatctactggcattttaaagacaagtcggatttgttcagtgagatctgggaactgtcagaatccaatattggtgaactcgagcttgagtatcaggcaaaattccctggcgatccactctcagtattaagagagatattaattcatgttcttgagtccacggtgacagaagaacggcgtcgattattgatggagattatattccacaaatgcgaatttgggtaa

SEQ ID NO: 15272 - DNA, 1182 bp, Escherichia coli
atgcataactcccccacagtcaccagcgcgaaatcgtttgacctgacctcgacggcgtttttaatcgttgcctttctcaccggtattgcgggcgctctgcaaaccccgacactcagtatttttcttactgatgaagtacatgcccgtccggcgatggtgggattcttctttaccggcagcgctgtcattgggattctggtgagtcagtttctcgccgggcgctctgataagcgcggcgatcgcaaatcgctgattgtcttttgctgcctgttaggcgtgctggcctgcaccctttttgcctggaatcgcaactactttgttttgctattcgttggcgtctttcttagcagctttggctcgaccgctaacccgcaaatgtttgcccttgcccgtgaacatgctgacaaaaccggacgtgaggcggtgatgttcagctcttttttacgcgctcaggtttcactggcatgggtcattggcccaccgctggcttatgccttagcgatgggtttcagctttacggtaatgtatctgagcgcagcggtagcgtttattgtttgcggcgtgatggtgtggctgtttttgccgtcgatgcaaaaagagcttccgctggcgaccggcacggttgaagcgccgcgccgtaaccgtcgcgatacgttgctgctgtttgtcatttgtacattgatgtggggctcgaacagcctgtacatcatcaacatgccgctatttattatcaacgaactgcatcttcccgagaaactggccggtgtgatgatggggaccgccgccgggctggaaatcccgaccatgttgatcgccggatattttgccaaacgtctgggtaagcgcttcttaatgcgcgttgctgccgtgggtggcgtctgtttttacgcaggaatgctgatggcgcattcacctgtcattctgttgggcttgcagctgctaaatgctatttttattggcattcttggcggcatcgggatgctctattttcaggatttgatgcccggtcaggcaggttcagccaccacgctctataccaacacttcgcgcgtgggctggatcatcgcaggatcagtggcgggcatcgtcgccgagatctggaattatcacgctgtgttctggtttgcgatggtgatgattatcgccactctgttttgcttactgcgaattaaagatgtttaa

SEQ ID NO: 15273 - DNA, 372 bp, Escherichia coli
atggccgagcagatcctgcacggttcgaatgtcgtaaccgctgcggagcaaggccgtcgcgaacgagtggcggagggtgtgcggtgtggcgggcttcgtgatgcctgcttgttctacggcacgtttgaaggcgcgctgaaaggtctggtcatacatgtgatggcgacgcacgacaccgctccgtggatcggtcgaatgcgtgtgctgcgcaaaaacccagaaccacggccaggaatgcccggcgcgcggatacttccgctcaagggcgtcgggaagcgcaacgccgctgcggccctcggcctggtccttcagccaccatgcccgtgcacgcgacagctgctcgcgcaggctgggtgccaagctctcgggtaa

SEQ ID NO: 15274 - DNA, 201 bp, Escherichia coli; identical to SEQ ID NO: 5005

SEQ ID NO: 15275 - DNA, 561 bp, Escherichia coli
atgactggacagcgcattgggtatatcagggtcagcaccttcgaccagaacccggaacggcaactggaaggcgtcaaggttgatcgcgcttttagcgacaaggcatccggcaaggatgtcaagcgtccgcaactggaagcgctgataagcttcgcccgcaccggcgacaccgtggtggtgcatagcatggatcgcctggcgcgcaatctcgatgatttgcgccggatcgtgcaaacgctgacacaacgcggcgtgcatatcgaattcgtcaaggaacacctcagttttactggcgaagactctccgatggcgaacctgatgctctcggtgatgggcgcgttcgccgagttcgagcgcgccctgatccgcgagcgtcagcgcgagggtattgcgctcgccaagcaacgcggggcttaccgtggcaggaagaaatccctgtcgtctgagcgtattgccgaactgcgccaacgtgtcgaggctggcgagcaaaagaccaagcttgctcgtgaattcggaatcagtcgcgaaaccctgtatcaatacttgagaacggatcagtaa

SEQ ID NO: 15276 - DNA, 2967 bp, Escherichia coli
atgccacgtcgttccatcctgtccgccgccgagcgggaaagcctgctggcgttgccggactccaaggacgacctgatccgacattacacattcaacgataccgacctctcgatcatccgacagcggcgcgggccagccaatcggctgggcttcgcggtgcagctctgttacctgcgctttcccggcgtcatcctgggcgtcgatgaactaccgttcccgcccttgttgaagctggtcgccgaccagctcaaggtcggcgtcgaaagctggaacgagtacggccagcgggagcagacccggcgcgagcacctgagcgagctgcaaaccgtgttcggtttccggcccttcaccatgagccattaccggcaggccgtccagatgctgaccgagctggcgatgcaaaccgacaaaggcatcgtgctggccagcgccttgatcgggcacctgcggcggcagtcggtcattctgcccgccctcaacgccgtcgagcgggcgagtgcagaggcgatcacccgtgctaaccggcgcatctacgacgccttggccgaaccactggcggacgcgcatcgccgccgcctcgacgatctgctcaagcgccgggacaacggcaagacgacctggttggcttggttgcgccagtctccggccaagccaaattcgcggcatatgctggaacacatcgaacgcctcaaggcatggcaggcactcgatctgcctaccggcatcgagcggctggttcaccagaaccgcctgctcaagattgcccgcgagggcggccagatgacacccgccgacctggccaaattcgagccgcaacggcgctacgccactctcgtggcgctggccaccgagggcatggccaccgtcaccgacgaaatcatcgacctgcacgaccgcatcctgggtaagctgtttaacgctgccaagaataagcatcagcagcagttccaggcgtcaggcaaggccatcaacgccaaggtacgtctgtacgggcgcatcggtcaggcgctgatcgacgccaagcaatcaggccgcgatgcgtttgccgccatcgaggccgtcatgtcctgggattcctttgccgagagcgtcaccgaggcgcagaagctcgcgcaacccgatgacttcgatttcctgcatcgcatcggcgagagctacgccaccctgcgccgctatgcaccggaattccttgccgtgctcaagctgcgggccgcgcccgccgccaaaaacgtgcttgatgccattgaggtgctgcgcggcatgaacaccgacaacgcccgcaagctgccagccgatgcaccgaccggcttcatcaagccgcgctggcagaaactggtgatgaccgacgccggcatcgaccggcgctactacgaactgtgcgcgctgtccgagttgaagaactccctgcgctcgggcgacatctgggtgcagggttcacgccagttcaaggacttcgaggactacctggtaccgcccgagaagttcaccagcctcaagcagtccagcgaattgccgctggccgtggccaccgactgcgaacaatatctgcatgagcggctgacgctgctggaagcacaacttgccaccgtcaaccgcatggcggcagccaacgacctgccggatgccatcatcaccgagtcgggcttgaagatcacgccgctggatgcggcggtgcccgacaccgcgcaggcgctgatagaccagacagccatggtcctgccgcacgtcaagatcaccgaactgctgctcgaagtcgatgagtggacgggcttcacccggcacttcacgcacttgaaatcgggcgatctggccaaggacaagaacctgttgttgaccacgatcctggccgacgcgatcaacctgggcctgaccaagatggccgagtcctgccccggcacgacctacgcgaagctcgcttggctgcaagcctggcatacccgcgacgaaacgtactcgacagcgttggctgaactggtcaacgctcagtttcggcatccctttgccgggcactggggcgatggcaccacatcatcatcggacggacagaatttccgaaccgctagcaaggcaaagagcacggggcacatcaacccaaaatatggcagcagcccaggacggactttctacacccacatctccgaccaatacgcgccattccacaccaaggtggtcaatgtcggcctgcgcgactcaacctacgtgctcgacggcctgctgtaccacgaatccgacctgcggatcgaggagcactacaccgacacggcgggcttcaccgatcacgtcttcgccctgatgcacctcttgggcttccgcttcgcgccgcgcatccgcgacctgggcgacaccaagctctacatcccgaagggcgatgccgcctatgacgcgctcaagccgatgatcggcggcacgctcaacatcaagcacgtccgcgcccattgggacgaaatcctgcggctggccacctcgatcaagcagggcacggtgacggcctcgctgatgctcaggaaactcggcagctacccgcgccagaacggcttggccgtcgcgctgcgcgagttgggccgcatcgagcgcacgctgttcatcctcgactggctgcaaagcgtcgagctacgccgccgcgtgcatgccgggctgaacaagggcgaggcgcgcaatgcgctggcccgtgccgtgttcttcaaccgccttggtgaaatccgtgaccgcagtttcgagcagcagcgctaccgggccagcggcctcaacctggtgacggcggccatcgtgctgtggaacacggtctacctggagcgtgcggcgcatgcgttgcgcggcaatggtcatgccgtcgatgactcgctattgcagtacctgtcgccactcggctgggagcacatcaacctgaccggtgattacctatggcgcagcagcgccaagatcggcgcggggaagttcaggccgctacggcctctgcaaccggcttag

SEQ ID NO: 15277 - DNA, 696 bp, Escherichia coli
atgattgagtccctgcgggtattaaaaacttgccgaaaaacagcaatatcagcccgcagagtcgctctccagattatccattcaaatattatctctgccccggatgaattacgtgaacagctcagaaatatgacgcgcatgcagctcatcaggaccctgggttcctggagacctgatgccagtgaataccgcaatgtaaccaacgtttatcgcatttcattaaagtcccttgcccgacgctatctcgagttacatgacgaaatcgctgatctggatgtcatgattgcggcaattgtcgacgagttggcacctgagctgattaaacgtaatgctatcggatacgaaagcgcttcacagttgctgatcactgccggagacaatcctcaacggttaagatcagaatcaggatttgcggcactgtgtggtgtcagcccggtccccgtttcttctggaaaaacgaaccgttaccgacttaatcgtggtggagatcgtgctgcaaatagtgcacttcacatcatcgccatcggacgcttacgaactgacgcaaaaacaaaggaatatgtcgccaggcgtgtagccgaaggacatacaaaaatggaagcgatacgctgtctaaagcgatatatctcccgcgaagtttacacgttactgcgcaatcaaaacaggcggatcaacagtatcccgataacagcttga

SEQ ID NO: 15278 - DNA, 408 bp, Escherichia coli
atgtcaaacactcttcagccccgcagggcgcgggcgtcctactcaatggactttaagctggctctcgtcgaaaagtcatatcagcctggagcctgtgttgcccggttggcgcgggataatggaattaatgacaatctgctgtttacctggcgccagcgttacagacatcttctgcccgatgaaatacaacggtcaatcagagagcaagactctgttatccccgttgtcctgcctgatatggccctgtcacaccatgctgagccgcactatgaacccgccgctccagcctgccgcgaggccatgacatgcgaggtgactgtcggcggtgccagcctgcgtctgtccggggatttatcacctgcacttctgaaaacgctgatccgcgagctgaccgggaggagccgatga

SEQ ID NO: 15279 - DNA, 297 bp, Escherichia coli
atggttgataaagttaccgaagctgccgttgtgggtggcgtggatacacataaagatttgcacgttgccgctgtcgtagatcagaacaataaagtccttgggactcagtatttctccacaacacgacaaggttaccggcagatgctggcatggatgacctcgtttgggacattaaagcgaattggtgttgagtgcacaggtacctatggttccggtttgcttcgttattttcagaacgccgggttagaagttcttgaggtgactgctccagaccggatggagcgacgcaaacggtaa

SEQ ID NO: 15280 - DNA, 588 bp, Escherichia coli
atgtgtcgggtccttaaggttgcccgtgccggattttatgtctggctccataaccctgtatctgccggagaaaaggataaccagcgactgctggaactcatccgcgactcctatacgctgagtggtggagtttacggttatcgcagggttcatggcgatcttcgcgaaattggcgaagtgtgcagcagaaaccgggttgccaaaatcatgaggaaaaacaggattcaggctatacatggttataaagtgccacgcgggagccggggacgaccgtcactgatagcgcctaatcacgtgcggcgtgaatttactgtagtgaagcccaatcaggtgtgggtcaccgacatcacctacatccgcacctggcagggctggctgtacctggcagtggttatcgatctttttgcccgtaatgtggtgggctggtcgatgaagccgacactgtcgcgcgagctggcactggatgcgctgctgatggcggtctggcgacgtaaacctgaagaaaacgtcattgtgcacagcgatagtaataatgccgatgtcagtctttaccaccacttagtttgccgtttaaccagattggtgtga

SEQ ID NO: 15281 - DNA, 285 bp, Escherichia coli
atgggcacatcacgttttacccctgaatttaaggaagaggccgtccgccagatcaccgagcggggctattctattgctgaagtatctgaacggctcggcgtgtcggcgcacagcctatataaatggctccgggctgttaagcctgacaacagtggacagcaggcacaggatttactggatgccagaacagaaattctcaggctgaaagcacagcttaaacgcactgaggaagagcgggatattctgaaaaaggcagcgcggtactttgcaagggagcccgactga

SEQ ID NO: 15282 - DNA, 351 bp, Escherichia coli
atgtttactgcattcaatgagagaaatgatttcagttatgcttttgaaaaaatccgtaatgcgatttccgcgccaggagaaaataatctttatgctgcaacagaattaggtcttggcattctgctccgtaaatacgagcagtttcgccaggaactggatgcggccggtgagctgggaaactgggaatatgatctcgatacctacaatcactgtattgcggtgctgcaacgttacttcaccggcaatccatccggactgacagaacgtgatgcccggatttacagccattacctgcagactgagcacaaaaggtttgtgaaactggctgaagagctggctgccggccgctga

SEQ ID NO: 15283 - DNA, 744 bp, Escherichia coli
atgactgatatacaggccgcaactgagagtatagttgctgcgacatcccatccggtttccgtacagctgattaatcaaggggcggggatctggggaaacgtggcaaccgggcttatcactggcctgcttactgggggtataacactcactggcatctggctgacacattatttcacgcttaagcgtgagagacaggcgtcagaagataaaatgaaaaaggaactgcattacattgccaccgagttggtattcatgcttgaacggtatgctgagggttgtttccgggttgtgacggatgacggccaggatgatgatgccccccagcctgagagaaaagctgtcacgaattaccctgaactgaatctgatcgatgtctccggtgactggcggactttagagccacgtcttatgtatcgcatccgtgaactgccggtgctccaggatgaggcccacagggcaattgcatatgccgccgaatactccgaccctccttggcataaggactatttcagggaacggcagtatcagttcacgcgcttgggcatcaacgctgtcattcttgccgtccgtctgcgcaaggcaaccgggatgcccgaaacacgtcttacaggtcatgatgaatggtctgcagtttccgtgtttcgtaaagtctggaggcgcgaaagagccctgcgcgctgctgaagctacccgcaacagggagtggaatcaattagtgatacctgatggaatgtcaaaccaatga

SEQ ID NO: 15284 - DNA, 258 bp, Escherichia coli
atgaaacttgaaactatacagatagataataccgtaaggagtggtcttaattctttcactgacggggtgattattcgtgatacaaaggtattgatcacgctcaatctcccggatggacagaaaaccactattgagggggaatggcggcatatgtcggacgccaacaggttgtcagaacgtattacgatgcttcagcatgcgatctatgagcagtatgaggaatacagagcagatattcccgtcagctggtccagataa

SEQ ID NO: 15285 - DNA, 867 bp, Escherichia coli
atgggaaagaggtcaagttcagttctcaattatccacttgtggataaagtgcagatttttccggtggataagtatcgcgatagcttgcaatttctgttttcactgtcattatgggtgggtaaaaatttacccataggcattgaaatggatactcaagcactcttgccagctactaaaacgtttaaaaaacgcgccagtataaagcaatctaacgaattgaccgaagctgcatattacctgcctcttcaggcaaaacgtgtgctgtggttatgcctcatgcaggcctattttaatgacagccaggaagatgactctgacgtattgccgctcttcaaaatcagcgtttccgattacgtcaaatacttcaatgtcgctacgtctgtcgccagtcgtgatgtgaaggctggggtaaatgctctgggcgaatcaacggttaccttttatccaaaagaaggtgagtttgaagaagttaaacgtccgtggctggctgaagcaggaatgaagcgaggccggggttcctggcagattgaatttaactacaaggtcatgccattcctggtcggcttaacctcccagttcactacctattctctctatgactgtggccagcttaatagtgttcgtgtcatccggctttatgaaagcctgtgtcagttccggagcactggtgtctggatcaccacacatgactggttatgtgaaaggtttatgctccctgcctcgcagaaaaacaatattgctgaaatgaagcgtaccttcctggaacctgctctgaagaaaattaatgagaagacgccattaaaggtaacatataccactgaagaagatggtcgcttgctgtttaattttcttgataaaaaacaatag

SEQ ID NO: 15286 - DNA, 270 bp, Escherichia coli
atggacgctccggactatgggaaacaggtcaacttcgcggacggcccggactatgggaaacaggtcaacttcacgggcggccgggagtgtggggaacaggtcaacttcgcggacggcccggattatgggaaacaggtcaacttcgcgggcggccgggactgtgggaaacaggtcaactttgcagacggcccggactgtgggaaacaggtcaacttcgcgggcggccgggagtgtggggaacaggtcaacttcgcggacggcccggactaa

SEQ ID NO: 15287 - DNA, 1206 bp, Escherichia coli
atggacaatattgagcagttacggaaagtcgctacacgtgcaggtaagcttctgacatctttgagcgaaagtatccgacagcaaaaagaggaattgaagcttaccgagttctatcaggaatacagcaaagccgctctgtataagctgcctaagctcagtaaaggcagtgttgagtatgctgtgtccgaaatggaagccggtggctacatttttaaaaagaaaccttctggtaatacgatgaaatacgcgatgacgattcagaatgtcatcgatctgtataaccatcgtaaagtaccgaagtacagggatcgcttcgataaagcctttacgatttttgtatgtaatcttaaaggtggtggttccaagacagtttctaccgcttcattatcacatgcttttcgagctcatcctcagcttctgttcgaagacctgcgtattctggccatcgatttcgatccgcaggcatctctgacaatgttcctgagccatgagaattcagtgggcttggttgaaaatacggctgctcaggccatgctccagaacgtgtctcgtgaagaattactttccgattttatagtaccgtctattatccctggtgttgatgtaatccccgcttccattgacgatgcatttcttgctgaaggctggaagggattgtgtgaagaacatctgccagggaaaaatattcatgcggtgcttaaagagaacattatcgacaagctccagcatgactacgactttattttccttgatagtggtcctcaccttgatgcgttcctgaaaaactgcattggggcggcagacctgatgttgacccctcttccaccggcgacggttgattttcattcttccctgaagtttgtggccagcctccctgccctcatagattccatcgaaatggatgggcacacctgcaatctcatcggtaatgtcggcttcatgtccaagatcctgaacaagtctgatcacaaaatttgccatagtcaggccaaagaggttttcggtgccgatatgctagacatggttctgccaagactggatggtttcgaacgttgtggggagacttttgacacagttatttcagcaaatccagcaacctatgatggaagtacagaggcactaaaaagcgcaaaatcagcagcggaagactttgcgaaggcagtctttgatcgcatcgagttcattcgtactaacggaggtatgtga

SEQ ID NO: 15288 - DNA, 975 bp, Escherichia coli
atgtcgaatgagaaaagaaaaaccatcggcagacagttaaatacccaggcgtcaattgcggaaatgacggacaccggtagaagccaggtatttaccttaaaaaccggcaggaaggtaacgttcaggtttgttcgggtgcctgcatctgaagttgaaagtaagaccttcgtaaaccaggaaaacaacggaagagatcaacttgcactgaccagggaatccctgaaatccattatccagacgattaagtttcagcagttctttccctgtattggtattaagcaaagtgaaaggattgagatactggatggttcaagacggcgagcctcagcaatttttgtccgtacaggccttgatgtaatggttaccgaagagcatttatcagctgatgaagctcgccaactggctaaagatatccagacagctaaagaacataatcttcgggagattggcctgagattgatcgctcttaaagagtccggatttaatcaaaaggaaattgctgaactggaggggttatctcaagctaaagttaccagggcgctgcaggcggcggccgtaccgcaagacttgatttctctgttcccggttcagtcggagctatcgtttagtgactataaacttcttttagaagttaatgaaaaactcagtgaaaagggattaacgcctgaagaactcattcagtctgtatcagctcagctcgatgcaattttgagtgaaggcgagcgaccagaagacgaacagaaagccagtatactgaagctgatttctcaggcatctcaggcattgatagatccatctcccaaggaaaagtcagtggtttccccactctggtcttttgaagaaaaggacaagttcgcgcgtaagcgtgtgaaagggcgtacgctgacttatgagtttagccgtatgtcaaaagtgattcaggatgaactggacaaggctatcaacgaggtccttgacagaaatttgagtcaataa

SEQ ID NO: 15289 - DNA, 1272 bp, Escherichia coli
atgtttgccctggccgatgtgaacagcttctatgccagctgtgaacgtgttttccgcccggatttgaaaggaaagccgatagtcgtcctgagcaacaacgacgggaatgtaatcgctcgcagtgccgaggcgaagccctggatcaaaatggaaactccgtggtttcagataaaaaacgaaagatacccggaaaaaatatatgcgttttcaagtaactatgaactttatgcctcgatgttggcgcgcgtgatgaacagcctggaggaactggcccccagagtggaacagtattcaattgatgagatgttcctcgatttgaccggcgtggagcactgtatggagcttgaggacttcggccggcagctgcgtcagcacgtgtatgactgtacccacctgaccattggcgtgggcgccggaccaacgaagaccctcgcaaaatcagcccagtgggcctcaaaagagtggaaacagtttcgtggcgtacttgctctgaccaggggaaatccgcagagaacgcggaaactgctttcactgcagccggttgaagaaatctggggggtgggtaaccgtattgcacgcaagctgaatgtactgggcattaagaccgcgctcgatctcgccctgacgaacccggccttcatccgcaaaaatttttctgtggtccttgagcgaacggtacgggaactgaacggggaaagctgcctttcgcttgaggaagcccctccgacgaaacagcaaattgtctgcagccgcagttttggcgtgaagatcacggagtacgagtcactccgtcaggctatctgtcagcacgcagagcgggcctctgaaaaactgcgtaaagagcaccagtattgccggcatatttccgttttcatcaaaacgtctccgttcgccattaaagagccttactacggcaacgtggctacggaaaaacttcttacacccactcaggacaccagggacatcattgcagccgctacaacggctctggagcgtatctggagggatgggcaccggtatgccaaagccggagttatgctgaatgacttcaccggctccggcgtttcgcagctgcagctgttcgacgaacgcccgccacgcccttacagtgctgagctgatgaaggttctggacgggatcaacaactcagggctgggtaaagtatggtttgcggggcggggtattgccccggaatggcagatgaaacgggagatgctttctcctgcttatacgacacgatggtcagatattccttcagcgaaactggcgtaa

SEQ ID NO: 15290 - DNA, 432 bp, Escherichia coli
atgaaactacaacttttcagcaccgggaaagaactcccgccacaggcccatccattgtttgccgatctggccagctgcggttttcccagccctgctgctgactatgtcgagtccgatctggatctccatgattactgcatacggcatccgagcgcgacgtactacctgcgtgccagcggagacagcatggccgacggcagtctgtacaatggcgatctgctggttgtggacagtgctgaaaagccgcggcacggcgatatcgttgtcgccagcatgcagggggagtttacggtgaaacggcttctgctgacgccgcgactgacgctgcagcccatgaatgcctcctggtcgccgatttatcctgatcccgacgagctggatatctttggcgtcgtcacgcatatcatccaccgcccgagggagatgtactga

SEQ ID NO: 15291 - DNA, 603 bp, Escherichia coli
atgtcaatacgatctctacgcgggaaccgggagatctcccctctgaccatctgccagtgtcggagacggcccgcaccgggaagacgaggagtcatagccggtgatgtacggagaggagaagtcggactcgctcatagtagcggcgaagcaggcgaacaacccgaaaggagcggagtcagtggagcgaaggagcggggccaaggggaacgcggaacagccacacatgcgccggacacagagccgggaaagcatgtcacagaggctgtcacgcgtgcgggaagctgcgaagcagcggaagaaagaacggtttacagcattgttccacctgctgacagtcgaagcactggaagccgcattcctctccctgagcaggaaagcggccgccggagtggatggcatcaggtggatggactacgccggaaacatgaagaacaacataacagatctgcaccggaggctacattagggcagctacagggcgcagcccggcaggcgtcactacatcccaaaagcggatggaaaacaacgcccgctcggcatcgcctcgctggaggacaagatcgtccagtatgcgctggtgaaaatcctgaacgcagtctatga

SEQ ID NO: 15292 - DNA, 417 bp, Escherichia coli
atgccagcgccttcgcagaccgtctttgatggctttcagagttgccgtcatccgatcccggcgggtctttcgtatcagcatgaacctgccgttgcgatctttcccgctgatgtgcgtgaacccgaggaagttgaacgtttctggtttgccttttcccctgatggcacggttttcggcagcgaagcggccgaactccatcagacgggttttctccgggtgaaccgtgagtccgaactccctcagtctgcgctgcatggctatacggaagcgccgggcatcgtatcgtttgtcgaacccgatgacgatgtcatcggcgtatctgaccattaccacattgcctgtggcatagcgacgtcgccactgatgcgcccacagatcgaagacgtagtggaggtatatgtttgccagcagcggtga

SEQ ID NO: 15293 - DNA, 294 bp, Escherichia coli
atggccccccgcctgctcatcattgatgaaataggctatctgccgttcagtcaggaagaagcaaagctgttcttccaggtcatcgctaaacgttacgaaaagagcgcaatgatcctgacatccaatctgccgttcgggcagtgggatcaaacgttcgccggtgatgcagcactgacctcagcgatgctggaccgtatcttacaccactcacatgtcgttcaaatcaaaggagaaagctatcgactcagacagaaacgaaaggccggggttatagcagaagctaatcctgagtaa

SEQ ID NO: 15294 - DNA, 348 bp, Escherichia coli; identical to SEQ ID NO: 6026

SEQ ID NO: 15295 - DNA, 840 bp, Escherichia coli; identical to SEQ ID NO: 6027

SEQ ID NO: 15296 - DNA, 387 bp, Escherichia coli
atgaataaaccagcagatctgaaaccccgcaacttatcggctgctgtcagattgcgcctaaatgaaatcgagaactggctggacagagggctaacgcggcatgaaattgctgaaatcctcgacagcgaatacagcttttcggtaacagccaaagggcttgagatggcactgtatagaacgcggcaaaaccgaaaaaatgtattgcacaatacgcatgataagagtagcgcgaagggtgcagcggaaagtgtattgcacaatacacaaccgtctgagcctgaagtgcaggaaagtaaaaaagcagagagtcccggcattattgataaagaattcttcaagaaaatcggtgagaatttcgaccctaagaagttcaacaaaaaattctga

SEQ ID NO: 15297 - DNA, 924 bp, Escherichia coli
gtggcaaagcaaaagttcaaaataaccaactggcccacctacaataaagccctcatcaaccgtggctccataactttctggctggatgatgaagctattcaggcctggtatgagtcggcaacgccttcatcacggggaagacctcagcgctattctgatctcgccatcaccaccgttctggtcattaaacgcgtgttcaggttgaccctgcgggctgcacagggttttattgattccatttttacactgatgaatgttccgttgcgctgcccggattacaccagtgtcagcaagcgcgcaaagtcggttaatgtcagtttcaaaacgttcacccggggtgaaatcgcgcatctggtgattgattccaccgggctgaaggtctttggtgaaggcgaatggaaagtcaaaaagcatggccaggaacgccgtcgtatatggcgaaagttgcatctggcagttgacagcaacacacatgaaatcatctgtgcaaacctgtcgctgaacaatgtgacggactcagaagccttcccgggtcttatccggcagactcacagaaaaatcagggcagcatcggcagacggcgcttacgacacccaactctgtcacgatgaactgcggcgtaagaaaatcagcgcgcttatcccgccccgaaaaggcgcgggttactggcccggtgaatatgcagaccgtaaccgtgctgttgcgaatcagcggctgaccgggagtaatgcgcggtggaaatggacaacagattacaaccgtcgctcgatagcggaaacggcgatgtaccgggtaaaacagctgttcggaggttcactgacactgcgtgactacgatggtcaggttgcagaggctatggccctggtacgagcgctgaacaaaatgacgaaagcaggtatgcctgaaagcgtgcgtattgcctga

SEQ ID NO: 15298 - DNA, 498 bp, Escherichia coli
atgaactcggaatcagtacgcatttatctcgttgctgcgatgggagccaatcgggttattggcaatggtcctaatatcccctggaaaattccgggtgagcagaagatttttcgcagactcactgagggaaaagtcgttgtcatggggcgaaagacctttgagtctatcggcaagcctctaccgaaccgtcacacattggtaatctcacgccaagctaactaccgcgccactggctgcgtagttgtttcaacgctgtcgcacgctatcgctttggcatccgaactcggcaatgaactctacgtcgcgggcggagctgagatatacactctggcactacctcacgcccacggcgtgtttctatctgaggtacatcaaaccttcgagggtgacgccttcttcccaatgctcaacgaaacagaattcgagcttgtctcaaccgaaaccattcaagctgtaattccgtacacccactccgtttatgcgcgtcgaaacggctaa

SEQ ID NO: 15299 - DNA, 780 bp, Escherichia coli
gtgaccatcgaaatttcgaaccaactatcagaggtgctaagcgtcattgagcgccatctggaatcaacgttgctggccgtgcatttgtacggctccgcagtggatggcggcctgaagccatacagcgatattgatttgttggttactgtggccgtaaagcttgatgaaacgacgcggcgagcattgctcaatgatcttatggaggcttcggctttccctggcgagagcgagacgctccgcgctatagaagtcacccttgtcgtgcatgacgacatcatcccgtggcgttatccggctaagcgcgagctgcaatttggagaatggcagcgcaatgacattcttgcgggtatcttcgagccagccatgatcgacattgatctagctatcctgcttacaaaagcaagagaacatagcgttgccttggtaggtccggcagcggaggaattctttgacccggttcctgaacaggatctattcgaggcgctgagggaaaccttgaagctatggaactcgcagcccgactgggccggcgatgagcgaaatgtagtgcttacgttgtcccgcatttggtacagcgcaataaccggcaaaatcgcgccgaaggatgtcgctgccgactgggcaataaaacgcctacctgcccagtatcagcccgtcttacttgaagctaagcaagcttatctgggacaaaaagaagatcacttggcctcacgcgcagatcacttggaagaatttattcgctttgtgaaaggcgagatcatcaagtcagttggtaaatga

SEQ ID NO: 15300 - DNA, 366 bp, Escherichia coli
atgtctgaattaactctgtcccctgaattattacaaatatccgctgaagtacaggatgctttaaaaaataaaaaaccggttgttgcgctggaatcgaccataatttctcacggaatgccattcccacaaaatgcccaaaccgcaattgaagtagaagaaacaattcgtaaacagggcgcagtaccagccactatcgccattattggcggtgtgatgaaagtgggcttaagtaaagaagaaatcgaattgctgggccgtgaaggacataacgtgacgaaagttagtcgtcgtgatttaccttttgtcgttgctgcagggaaaaatggcgcgactaccgttgcatcggtaatggtgccaacttactga

SEQ ID NO: 15301 - DNA, 753 bp, Escherichia coli
ttgtctagtatagattctcaatatcttagcattccggtatctcaaggtgttcatgccgttcatttgttaagaaagctgcaagagggatacccaacatggggtagtctggaaaaaaatggagagatatgggcaggaagagaaatagatgaaactggtagtagtgactggacacaaaaaagtggcggcggattattattcattaaaggaaaaatgattgggaggtataattttcataatgagaagagcttaagaataacgaaaaaaattgataaggttctatccaattctaatttcgtaaggattgcatggcgtgacatttcacgcccgagtcaaaaaaggcgaatgattgcaacgataatacctcctaactctttggcagggaattcattaggggtggtctattataaaagtggttcgcaagattcgctctttagtttgcttggtattataaactccctttgttttgaatttcaattaagaagctttttagctactggtcatgtatcattgtcagccttacgaaaaactgcaataccgtctgaaaaaatattattacaacattctgaattaaaacaacttgtgatttcttgcatagagggatgttgtgatgctgagttgaaaattgaggcttatgttgccaaaaatatttacaaattggatttgaatgaatttaataagcttctgtcttcatttgataagattgagttagctgaaaaagaaagtttattgaggatttttcaacattatgactaa

SEQ ID NO: 15302 - DNA, 357 bp, Escherichia coli
atgggggtaatgataccgatgaaacgcgagaggatgctcacgatacgggttactgatgatgaacatgcccggttactggaacgctgtgagggtaaacaactggcggtatggatgcggcgggtctgcctgggggagccggttgcccgttccgggaagctgccgacactggcaccgccgttactgcgtcagctggccgccatcgggaataaccttaaccagacagcgaggaaggtgaacagcgggcagtggtcttccggtgaccgggttcaggtggtggccgcactgatggccatcggggatgagctgcgccggctgcgtctggcggtcagggaacagggggcgcgggatgatagttaa

SEQ ID NO: 15303 - DNA, 648 bp, Escherichia coli
atgcccaatgcaatgagcctacaactggcttatagcggtgatcacttcagcgtacccgccaatgtcgatatcatcggagccatgaatacagcggaccgttctttagctctgatggacacggctttgcgccgtcgctttgactttgtcgaaatgatgcccgatctctctttactgagtggagctaaggtgaaaggcatagagctcgagtcgttgttagagaaactcaatagccgcatcgaggctctttacgatcgtgaacatacgctggggcatgcgttctttatgccggtaaaaaatgcactcgatgccggtgatgaagaagctgcgtttaaacaattgaagatcgcattccagaaaaagatcattccgcttttacaggaatactttttcgatgactggaacaagatccggttggtgctggcagacaatcaaaagcaagacgacaacctgcaattcgtgattgagaaaaccgacgatctcgatacgctttttggtaacaaccatggtttacgacaccatgatcagcaatcaacagcttacgaactcaaagatttcgatcaagagatctggaatattccacaggcttatcgttcaatttatcagccccagcagactccccttgatgagcaggctgtaaatcatgggtga

SEQ ID NO: 15304 - DNA, 504 bp, Escherichia coli
atgccgggcaacagcccgcattatgggcgttggcctcaacacgattttacgtcacttaaaaaactcaggccgcagtcggtaacctcgcgcatacagccgggcagtgacgtcatcgtctgcgcggaaatgggcgaacagtggggctatgtcggggctaaatcgcgccagcgctggctgttttacgcgtatgacaggctccggaagacggttgttgcgcacgtattcggtgaacgcacgatggcgacgctggggcgtcttatgagcctgctgtcaccctttgacgtggtgatatggatgacggatggctggccgctgtatgaatcccgcctgaagggaaagctgcacgtaatcagcaagcgatatacgcagcgaattgagcggcataacctgaatctgaggcagcacctggcacggctgggacggaagtcgctgtcgttctcaaaatcggtggagctgcatgacaaagtcatcgggcattatctgaacataaaacactatcaataa

SEQ ID NO: 15305 - DNA, 426 bp, Escherichia coli; identical to SEQ ID NO: 6184

SEQ ID NO: 15306 - DNA, 351 bp, Escherichia coli; identical to SEQ ID NO: 6245

SEQ ID NO: 15307 - DNA, 411 bp, Escherichia coli
atgttttcgcgcttttttgttcgccgcccggtctttgcctgggttatcgccattttgattatgttggcagggattctggctattcgcacattgcccgtcgcgcaatatcctgacgttgcaccgccgaccattaaaatttcagccacttatactggtgcttctgccgaaacgctggagaacagcgtgactcaggttatcgagcaacaactcactgggcttgataatttactctatttcagctcaaccagtagctctgatggttcggtcagtattaatgtgacctttgaacaaggtaccgatccagatactgcacaggttcaggtgcagaataaaattcagcaggcggagtcgcgcctacccagcgaagtgcagcaaacgggtgttacggtggagaaatcacaaagcaactag

SEQ ID NO: 15308 - DNA, 192 bp, Escherichia coli; identical to SEQ ID NO: 14879

SEQ ID NO: 15309 - DNA, 504 bp, Escherichia coli
ttgacgtttcgcgggaacctgctgctgtataccctgtggtatgaacttcacccgtttgagaaccttcgccgcaaggggcatcactgccacggcctgacgcacctgtcctgggcagaacgcaaaattttttaccgggttttgggtaaaaaattttgtgggctgttcatttaccctggacagtcagtgcggcaggttgtggctgtatcagccccaggcgacaggggcttaaacaggtgtatggcaccggacacaacaacgggcagggacccgccgcaacgacggagagcgcgtgcgcgaaacggcgttgccccttacatcccggcggccttttgccgggatgccgggagcgcaggccacggcgcgacaagggtggcgcgaccggaacggtcgctgcaagcccggggttttcacgcatcggaccgtagcgacagcccgaaaccgcgccagcgggttcggcggagactggcgggtgcgccagcagctgcctgtcggagtcgggcctga

SEQ ID NO: 15310 - DNA, 219 bp, Escherichia coli
atgcctgtctgcccgcgccgggaaaaaacgcgcgccggtggcgctgaaaggggccgcgctcacgcgccgcccctttcattacgcggacgttctgatgggggcttctgtttcttcatgcctgtcatttgtctgttactgatgttgttgttcctgctactgctactgctactgctactgctactgctactgctactgttcttctttttcctgctgctctga

SEQ ID NO: 15311 - DNA, 906 bp, Escherichia coli
gtggatagcgcacgcgcccttattgcccggggatggggagtaagcttagtcagccgttgtctccgggtgttgcgtgcgcagttgtacgtcattctcagacgaaccgatgactggatggatggccgccgcagtcgtcacactgatgatacggatgtgcttctccgtatacaccatgttatcggagagctgcccacgtatggttatcgtcgggtatgggcgctgcttcgcagacaggcagaacttgatggtatgcctgcgatcaatgccaaacgtgtttaccggatcatgcgccagaatgcgctgttgcttgagcgaaaacctgctgtaccgccatcgaaacgggcacatacaggcagagtggccgtgaaagaaagcaatcagcgatggtgctctgacgggttcgagttctgctgtgataacggagagagactgcgtgtcacgttcgcgctggactgctgtgatcgtgaggcactgcactgggcggtcactaccggcggcttcaacagtgaaacagtacaggacgtcatgctgggagcggtggaacgccgcttcggcaacgatcttccgtcgtctccagtggagtggctgacggataatggttcatgctaccgggctaatgaaacacgccagttcgcccggatgttgggacttgaaccgaagaacacggcggtgcggagtccggagagtaacggaatagcagagagcttcgtgaaaacgataaagcgtgactacatcagtatcatgcccaaaccagacgggttaacggcagcaaagaaccttgcagaggcgttcgagcattataacgaatggcatccgcatagtgcactgggttatcgctcgccacgggaatatctgcggcagcaggccagtaatgggttaagtgataacaggtgtctggaaatatag

SEQ ID NO: 15312 - DNA, 366 bp, Escherichia coli
atgattgatgtcttaggaccggagaaacgcagacggcgtactacacaggaaaagatcgcaattgttcagcagagttttgaaccgggaatgacggtctcccttgttgcccggcaacacggtgtggcagccagccagttatttctctggcgcaagcaataccaggagggaagtcttactgctgtggccgcaggagagcaggtcgttcctgcctctgaacttgctgctgccatgaagcagattaaagaactccagcgcctgctcggcaaaaaaacgatggaaaatgaactccttaaagaagccgttgaatacgggcgtgcaaaaaagtggatagcgcacgcgcccttattgcccggggatggggagtaa

SEQ ID NO: 15313 - DNA, 1011 bp, Escherichia coli
atgtcacttaaggcgattgccactgcactcggagtttctgtcaccactgtcagtcgggctcttggaggctatgcagatgtgtcagcttccacccgtgcacgggtggaagctgaagctcgtcgacgcggctaccgtcctaatactcaggcaagaagactcaaaaccggtaaaaccgatgctgtcggtctggtttatcctggacgtgatgtgccatttaacagtggtgtttttatggatatggtcagttgcatcagccgggaacttgctcaccatgatattgacttactactgatagctgatgatgagcatgccgattgccacagctatatgcggcttgttgaaagtcgcagggttgatgctctcatcattgcacacactctggatgacgatccccgtatcacacaccttcataaagcaggtattccatttctggctcttggtcgggtaccatctggtctgccctgtgcgtggtttgactttgataatcatgccgggactggacaggcaacccagaaactgattgctttgggacataaacgtattgcattgttgagtgaagacacttcacatacctatgttattgcaagacgtcagggatggcttgatgcactgaatgagcatgaactggaagatacatggctgcggctggtttctcccacacggcgagcaggatatcaggccgtgatggagttaatgtcactaccgataccaccaacagctattattactgacaatgatctgagtggagatggtgctgccatggcgctgcagttgagcggtcgtctttcaggaaaagctgcggtatctctggttgtatatgatggtttgccacaggacagtattattgagctggatgtagctgcagttattcagtcaacacgaagcctcgttggtcgccagatttccgagatgatatatcagataattactgattcatcatcaaaaccactacaggttgtctggaacccggtattttatccgggaaagacgattcattctccttgctcctga

SEQ ID NO: 15314 - DNA, 2127 bp, Escherichia coli
atggtttcaaagtactgcagactgagcagtcctcgctctgatttaattattaaaacccatccacatgcagaaattatctggtggggctctgcactgaaacatttctcaccggatgactgtgccagcctggaaagaccggttgcgaatggtcgtctggatattgatacgccactgacactgatggctgaaaatgccctgggactttttagctctccgggactggaaggacacaggaatgggctggattcatctcctgttttttatacagttgacgtggaacataccgaaaacactctgagacttaccagtgaagattcggtagccggcctgcgtctggtcagcgagctggtgatgacgccatcaggaattctgaaagttcgtcatgcactgaccaacctcagagagggggactggcagataaatcgtttcgccatcactttacctttagcggagcgtgcggaagaagtcatggcttttcacggacgctggactcgtgaatttcagccgcacagggtacgtctcactcatgatgcttttgttctggaaaatcgcagagggcggacatctcatgagcattttccggcgctgattgtcggcacgccaggcttctcggaacaacagggagaggtatgggctgtgcatctggggtggagtggaaatcaccgtatgagatgtgaggcaaaaactgacggcaggcgttacgttcaggctgaggctctgtggatgccgggtgagaaggctctcaggaagaatgaaaccctgtacaccccgtggctatatgcctgccactctgcggatggcctgaatggaatgagtcagcaataccatcgttttttgcgtgatgaaattatccgtttccctgagcaaaaaccccgccccgtacatctcaatacctgggaaggtatttatttcaatcacaatcctgattacatcatgcagatggctgagcgtgcagcagcactgggcgttgaacgtttcattattgatgatggctggtttaaaggacgtaacgatgaccgcgcggctctgggcgactggtataccgatgaacagaaatacccgaacgggctgatgccggttattaaacatgtgaaatctctcggtatggaatttggcatatgggttgagccggaaatgattaacccggattctgacctgtttcgtcttcatcctgactgggtattgtcaatgcctggatattcccagccaaccggaagatatcagtatgttcttaacctgaatattcctgaggcctttgcttacatttatgaacgtttctcatggttactgggagaacatccggttgattatgtgaaatgggacatgaatcgtgagcttgtacaggcagggcatgaaggccgtgcggcagcagatgcacagacccgtcagttctatcgattgcttgatctcctccgtgaacgttttccacatgttgagtttgagtcctgtgcttccggtggggggcgtattgacttcgaagtcctgaaacgcacacaccggttctgggcatctgacaataatgatgccctggagcgctgcaccatacaacgtggcatgagttactttttccctcctgaggtgatgggggcacatattggccatcgccgctgccatgcaactttccgacagcacagcatcgcttttcgtgggctgacagcattgttcggccatatggggctggagctggatccggtggccgcagatgcgaaggaatctgacggttatcgccggtatgccttgctctataaagaatggcgacaactgattcatacaggtgttctctggcgtgtggatatgccagatccttcgatacaggttcagggagtcgtcagccctgatcagtctcaggcactttttatgatcagccagcttgcaatgccggattacaccttaccaggcatacttcgttttcccggtctggcggcggaagtgcgttaccggcttcgggttattgatcacccggacctccaggtggtcggtgaaggcggtcataccatgcgcaaattacctgtctggatgaatcagagccttgaggccagtggtgaatggctggcacagggagggattcagctccccgtactggatccggagagtgcgattttgatagcacttgaaagagctgtgtga

SEQ ID NO: 15315 - DNA, 1278 bp, Escherichia coli
atgaattctgcaagtacgcataaaaatcccgatttctggattttcggtctgttcttctttctctactttttcatcatggcaacctgttttccgtttttgcctgtatggctgtccgatgtggtcgggctgagtaaaacggatacaggtatagtcttttcatgtctttctctgtttgccatcagtttccagccattgcttggggtcatatcagatcgcctgggactgaaaaaaaacctgatctggagtatcagcctgttactggtatttttcgcccccttttttttatatgtatttgcgcccctgctgcgcttcaatatctgggcaggcgcactgactggcggtgtttttattggttttgtgttttctgcaggtgccggagctattgaagcttatatagagcgggtcagtcgcagtcgtggatttgaatacggtaaagcgaggatgttcgggtgtctgggctgggcgttatgtgcgactatggctggaatgctttttaatgtcgatccttctctggttttctggatggggtcaggaggcgcattattgttgcttcttctgttgtttctggcgcgccccagtaccagccagacggcaatggttatgaatacactgggtgccaattcttccctgatttcgaccagaatggtcttcagcctgtttcgcatgcgtcagatgtggatgtttgttctctacacgattggtgtggcctgtgtctatgatgtatttgatcagcagtttgccacattttttcgttcattctttgacactcctcaggcaggaataaaagcattcggatttgctaccactgcgggggagatttgtaatgccattatcatgttctgtacaccatggataattcatcgcattggtgccaaaaataccctgcttgttgcggggggaattatgaccatccgcattaccggttctgcttttgccaccaccgcgacagaagtggtgattctgaaaatgcttcacgctcttgaagttccatttttgctggttggggcgttcaaatatattacggcagtgtttgacacccgactgtcagcgaccgtttatttaataggttttcagttttccaaacaacttgctgcaatacttctctctacctttgccggccacctgtatgatcgtatgggattccagaatacgtattttgtgctcgggatgattgctctgactgttaccgtgatatcagctttcacgctgagttcttcccgcgggagcgtacacccttctgtagaaaaagcccctgcagcgcattcggagattaactga

SEQ ID NO: 15316 - DNA, 1431 bp, Escherichia coli
atgaaacagcgtcttgctttggcacagtccgcccttgaaaaactttgcgcacgtcgtggtaatgcctggtacccgatttttcatctggctccacctgccggctggatgaatgatccaaatggccttatttacttcaatgggcgttaccatgcgttcttccagcatcatcctgcaagcgcatatcaggggccaatgcactgggggcatgccaccagtaccgacatgttgcactggcaacacgaacctgtcgcgctggcacccggagataaatatgatcgtgatggctgtttttcagggagtgccgtggatgatgatggcgtgctatcacttatttatactggtcatatttgtctcgaagatcgtggtaatgacagcattatccgtgaagtacagtgtctggctaccagtcatgatggtattcactttgagaagcagggctgtgtgctgacacctccggaaggtatcatgcatttccgtgatcccaaagtctggcacgaagaaggctcctggtggatggtcattggtgcccgggacgcttctgacaatgggcaagttctgttgtatcgcgggacatctttgcgggactggcatctggagcatgttctcgctcattccgcagccggagaaagttatatgtgggaatgccccgatttcttcaggtgtggtaattttcactggctgatgttctcaccacaggggatgaccccttccggttatcggttccgtaacctttttcagagcggtgtgttggcagggagctggaagcctggttctgtctttgcgctgaaagggggatttgaagagctggattatggtcatgacttttatgctccacagtccatgctggctgaggacggcaggcgtatcattatggcatggatgaatatgtgggattcacccgtgcccacccgcagtgaagcctgggcaggatgtctgacgctgcccagagaggtttttgagcgcgatggccggctgtgccagcgacctgtgcgtgaagtcgaatctctgcgcagaaaatgccagccattatcccctgtaaggttacagggtttgcaattactgaccgaaaatgtacaggccgcagaattattggtgacgtggcatacggttgacagtcatgcggagcactatggcgtccgccttggagacggtctgcgactttatgtggataatcaggccggacgactggtactgtggcgctattaccctgaggaagggctggatggttaccgcagtgttgaacttcctgatacagaatatctgactcttcgtattttcctggatcgttcatctgttgaagtgtttgttaacgatggtgaggcaaccttatcaagtcgtatttatccgcaagcggactcgagacaattatcgttatatgccgctcatggcgatgcgatattaactaatggcactttatggatgctgacctga

SEQ ID NO: 15317 - DNA, 1395 bp, Escherichia coli
atgaataagttactcttgggtttgtctgtttttttattactggaatacaatgcgtgtgcagcaaaaacaggggggctaacgcttgaacaaagaatggcattgctggaagaacgcctggaagctgcagaaaaaagggcggaaaaagcagaaagaatgttaaaaagttttgatacagaacaacattctgaaatacgtcaaattagttcagagcagaataaaaaagctgctaacagctatgcagtagttgagtcaacaaaagaaaaaacatcttctccaggttttctgctctctggttacaatgatttgaagttttatggtgatgtggagtttaatatagatgctgccagtaaacccggtcagttagtaatgataagttccggggcgaacagtgagtcagtgaatgaacggtgggaccttaatggccgtattctattaggttttgacggtacccgtaagcttgataatggttatttcgctggattttcagcacaaccactggcggatatgcacggttcagtgaatattgatgatgcattattcttttttggaaaagatgacgagtggaaagtgaaagtcggtcgttttgaagcttacgatatgttccctctaaatcaggatactttcattgagtattccggtaatacagctaacgatatttatgctgatggccgtggttatatctatatgatgaaagagggacgcggtcgttctgacgctggtggtaatttcctcatcagtaaacaactcgataactggtattttgagttaaacacgttacttgaagacggaacatctttatataataacggtaattatcatggacgatatatggagcagcagaaaaatgtcgcttatctgcgcccggtaattgcctggtcgccaacggaagaattcacagtctccgcagcgatggaagcaaacgtggtaaaaaatgcttatggctataccgataataaggggaattttgtcgatcagtccaatcgttccggttatggtattagcatgacatggaacgatctgaaaacagatccggaaaatggcatcgtggttactcttaataccgcctatttggatgccagtaatgagaaagatttcactgccagtattaatgctctgtggaaacgtttcgaactgggttatatctacgcacataataagattgatgaatttagtggtgtcgtgtgtaataatggttgctggattgatggtgaaggaatatacaacattcacaccattcatgcatcttatcagtttgctaatgtgatggatatggagaactttaatatttacctcggggcttattactcaattctggatagtaactgtagatatagtaattgtgacattaccgatgatcgttacggtgcccgattacgtttcaaatactttttttga

SEQ ID NO: 15318 - DNA, 180 bp, Escherichia coli
atgcatagtaacaaagtattgttccacacttacattaacgcgtttttcgggtacaccatcggtgagcatacgaataatcgctgtctgtcgatggttgatttaatttattgcgcaacgagccagctaccgggaactggctctgaagttgcgtcaggtcacgaagtactgcccggggaataa

SEQ ID NO: 15319 - DNA, 648 bp, Escherichia coli
atgtgttttcccgatttctcctttgaaaaaatccaggtaaccttccgcatcatcgctcgcccgaccgacagcctccacgaatgccgatttgccaacagtattcacactgcggatataaaaataataatcatggcccggtttgatattgatactggcagctatccagtacagcgccgagccaagatagcgggctgcggtttcaacctgcctgatatccgcaatccgcttttccgagaaccagaactcaaactgtaccgtcgggtcataaacggcaagatgtggcgttgcggttatctgaaaatagcccggcgtcagctcaatccgcgacggtgctgccggtgcggcaatccggaaggtggtggtggcaggttcaccctgctggccatagctgtttatcgcccgcaccgtcagggtgtattccccgagcggcaggccgctgaaacggtgctccgtgtctgcggtgatggcggtggtcaccagtctggcatccgttcccttaccactggtcaggcgcagactgaagcgcacacccttcaccacccgcggcgtgtcccatttcgcctgcgccagatactggccgtcagctgcgctcacctccaccgtcaggtgctgcactgccggtgggatgacgctgttcagggaacctga

SEQ ID NO: 15320 - DNA, 369 bp, Escherichia coli
atgacccactttgacgaactgggatataactgcaaaaccggtaaacaaaagctgcagatcatgcccaatatggttggatttcagttcgtattgcgcggtatctgttcccgcctgggagcaccaaatcgcaaagccgacatcgttgtggaccagcagtcacagttcaacaccacccagcgggagctgagggagttctattaccagatacgtgagatgccgtgggtacacggtcccggtttaccggtcatggatgtgacgaacatgccggctgaacgctggttttccagtcgggtacaaaaagtgcagggctggagctggttgatatatatctctggatcttcaaacgctttatggaagggaaggagttaa

SEQ ID NO: 15321 - DNA, 756 bp, Escherichia coli
atgaagattatgaagataaataatattgatgtaatgaaagaaaatgatattgttttttctaacactgcaggattctggtctgggccggttgaaattgaatgccccgctgagataaggcaaggagtttatcaagtggataaaataggtgcattttcttatatgggaggcaagtcaacgcatatgctccatattgagagtataggtagattttgcgctatagccggaaatgttgttgccggtgcgatggaacacccggcacattttttatctccccacccaattatgcaaggggtatttaaatggaaggctttggatgattttaaattaaaaaataaagatatgctatggaaaagcagaacgtttaataaccaaataaataaagatagattcggtaaaataaaaattggtaacgatgtttggattggtgaaggcgcatttattcgtcgcggagttaaaataggtgatggtgctataattgcctcacactcagtggtgtcaaaggatgtggctccatattctatagttggtggggttccggctaaacacataaaatttaggtttgaagataatattattgagcaattaattgaaattaaatggtgggattatggcttaagtgcacttgaaggagtagatttcactgatattaataaagccattaaaaaaattagagagaatatagactcaggtgttgcagaaaaattcactcctaatgtgattagaattaacaaagatggtgtagctgaaaagatttaa

SEQ ID NO: 15322 - DNA, 177 bp, Escherichia coli; identical to SEQ ID NO: 4925

SEQ ID NO: 15323 - DNA, 885 bp, Escherichia coli; identical to SEQ ID NO: 8055

SEQ ID NO: 15324 - DNA, 2898 bp, Escherichia coli; identical to SEQ ID NO: 7675

SEQ ID NO: 15325 - DNA, 822 bp, Escherichia coli
atgttcatactcttcgccgagcgaaaagttggggaacagcacgggccggccgcgcaaggcgtgctggcagccgtgcagaccctgcgtgagatgaacgccgacaacctgcgcaaggtgccggccgatgcacccacggccttcatcaagccgcgctggaagccgctggtgatcaccccggaaggcctcgaccggaaattctacgaaatctgcgccctgtccgagctgaagaacgccctgcgctccggcgacatctgggtcaagggctcgcggcagttccgcgacttcgacgactacctgctgccggccgagaagttcgccgcactcaagcgcgagcaggccctgcccctggcgatcaacccgaacagcgaccagtacctggaagagcgtttgcagctgctggacgagcagttggccaccgtcacccgcctggccaaggacaacgagctgcccgatgccatcctcaccgagtcagggctgaaaatcaccccgctggatgcggcggtgccggatcgggcgcaggcgctgatcgaccaaaccagccagttactgccgcgcatcaagatcaccgaactgctgatggacgtggacgactggacgggcttcagccgccacttcacccacttgaaggacggggccgaggccaaagacaggacgttgctgctgtccgcaatcctcggtgatgcgatcaacctcgggctgaccaagatggccgagtcgagccccggcctgacctacgccaagctgtcctggctgcaagcctggcacatccgcgacgaaacctattcggggtcggttccggctgagggcgaaatgacaccctaa

SEQ ID NO: 15326 - DNA, 1590 bp, Escherichia coli
atgggttcatgtgcagctccatcagcaaaaggggatgataagtttatcaccaccgactatttgcaacagtgccacttcgacgactacctgctgccggccgagaagttcgccgcactcaagcgcgagcaggccctgcccctggcgatcaacccgaacagcgaccagtacctggaagagcgtttgcagctgctggacgagcagttggccaccgtcacccgcctggccaaggacaacgagctgcccgatgccatcctcaccgagtcagggctgaaaatcaccccgctggatgcggcggtgccggatcgggcgcaggcgctgatcgaccaaaccagccagttactgccgcgcatcaagatcaccgaactgctgatggacgtggacgactggacgggcttcagccgccacttcacccacttgaaggacggggccgaggccaaagacaggacgttgctgctgtccgcaatcctcggtgatgcgatcaacctcgggctgaccaagatggccgagtcgagccccggcctgacctacgccaagctgtcctggctgcaagcctggcacatccgcgacgaaacctattcggcggccttggccgagctggtcaaccaccagtatcgccacgcctttgccgcccactggggcgacggcacgacctcatcctccgatggccagcgcttccgcgcgggtggccggggcgagagcaccgggcacgtcaacccgaagtacggtagcgagccgggacggctgttctatacccatatctccgaccagtacgcgccgttcagcacccgcgtggtgaatgtcggcgtccgcgattccacctatgtgctcgacggcctgctgtaccacgagtccgacctgcggatcgaggagcactacaccgacacggccggcttcaccgatcacgtctttgccctgatgcacctgctaggcttccgcttcgcgccgcgcatccgcgacctcggcgaaaccaagctgtacgtgccgcagggcgtgcaagcctacccgacgttgcgcccgctgatcggcggcaccctgaacatcaagcacgtgcgtgcccactgggacgacatcctgcgcctggccagctcgatcaagcagggcaccgtcaccgcctcgctgatgctgcgcaagctcggcagctacccgcgccagaacggactggccgtggccctgcgcgagctgggccggatcgagcgcacgctgttcatcctggactggctgcaaagtgttgaactgcgccgccgcgtgcatgccggcctgaacaaaggtgaggcgcgcaactcgctggccagggcggtgttcttcaaccgccttggggaaatcagggatcggagcttcgagcagcagcgctaccgggccagcggcctcaacctggtgacggcggctatcgtgctgtggaacacggtgtacctggaacgcgccacccaggggttggtcgaggccggcaagccggtggacggcgagctgctgcaattcctgtcgccgctgggctgggagcacatcaacctaaccggcgattacgtctggcggcagagccgcagactggaagacgggaagtttcggcccttacggatgcccggaaaaccttag

SEQ ID NO: 15327 - DNA, 1500 bp, Escherichia coli
atgaatatcagaaaactgttttgtccgggaaacaccccccggattttattgtttttattcttttttgttgtttctgcaataaccacaattgcatgcggatacactgagaagaatgcaacaggaaatgtgctgcttctgtttctccttctgctccttgcacacagaaataccctcacatccattacagcgctgttatttctgttctgttgtgcactgtatgcgcctgccggtatgacgtacggtaaaatcaacaacagttttattgtcgcgttgttgcagaccacaactgatgaggcagcggagtttaccgggatgattcctgtttatcattttctggtcagtgccgcgattctggtattcatggtgattttctggcgaacacaccaccgcggtcaccgtaactggctggcactgctgctgttcgtattatgctcagtaaacagctggccgttgcggatggttaaaggaattgttgtggggacaactgacacattgcgtgaaatgcagcgttataaacaactgaatcagcacggggctgacaactggaaaatcctgccgggtgtaccgttgtatgacacgattgttatcgtcactggtgagagtgtgcgcagggattatatgtcggtatatggctatcctgtgccaaccacaccgtggctgaatacggctcccggtttatttattgacggttatacatcggcagcagccagtactgtgccttccctgagccggacactgatttatgactatgagcagaaccctgattccggcaacaacgtggtggcgctggcagcaaaagcaggatacagcacatggtggatatccaatcagggaaaactgggggagcatgatacacgcatctctgttattgcttctgatgcggagcataccgttttcctcaagaaaggcagctttgcttcccgtaaaacggatgacatgttgttgttacaggaaacagaacgtgcactggcggataaatcctctccgaaggtgattttcctgcacatgatggggtctcatccaaacccgtgtgaccggcttcactcctggccgaatcattacctggagcagtatccccgaaaggttgcctgttacctcgccagcatcagtaaactggataactttctcggtcagcttgatggtatccttcgccggcattcccgtcattttgccatgctttacttttctgaccatggtctgtcggtcagcgacagtgctaatcctgttcatcatgatggtcatgtgcagggaggctacagcgttcccctgattattaccgccagtgacatcacgtctcatcagtccgtcagcagaaaaatcagtgcccgtcatttcgcaggtatttttcagtggctgaccggcattcgtactgaaaatataccgccattcaatccgctgacagacgaagataatgaacccgttatggtttttaacggggagaggaatgtaccggcagacagtctgaaaccgcagcctctgattcttccggacagaagataa

SEQ ID NO: 15328 - DNA, 222 bp, Escherichia coli
atgagtcagaaatacctcattcgcattgcagaactggaaagccagctccgtcagaaagaccagcaactgagtctggttgaagagacggaggccttcctgcgctctgcactggcacgtgccgaagaaaagatcgaagaagatgaacgggaaatagaacatctgcgggctcaggcacgctgtcgaaaaaatccaggctgggcgaagcgttcagctatgtactga

SEQ ID NO: 15329 - DNA, 582 bp, Escherichia coli
atgccagtaatccatgacgttccaaaaaatcatcgtgatgacttacctattgcaattctggctgccggaatggttaatgaaaatgatctgatcttctttgataatggccaggagataccactcgttataagcatgattccggatgcaatcaccttcaccggcatctgttactcacatcgcgtctttgttgcgttgaatgaaaagcctaatgtaacagcaatactttgtggtggtacgtatcgtgccagaagtgatgctttttacgatgccagtaactcttcgccattagactctctcaatccgcgaaaaatatttatttccgccagcggtgtgcataatcactttggcgtcagctggtttaaccctgaagatcttgccactaagcgtaaagcgatgaaccgtggactacggaaaattttgctcgcccgccacgcgttgttcgatgaagtggcctctgccagcctcgcaccgatctctgcatttgacgttctgattagcgatcgtccgttaccggcagattatgttacgcactgccagaatggttctgtaaagatcattacacctgattcagaagacgaatga

SEQ ID NO: 15330 - DNA, 624 bp, Escherichia coli
atgttaaagataataaaacaacacaaatttgcttttcttttcacagcactgctgagcaccttctttctcaatatgtttccaccgagcgctgcagggtacgagttgaataccgtgctgcagattgtggcgggcgttaatctgttgcagcgtcgctatcaggtcgtttcatttattgtgttgctgataatgtttgtcaccacacactggctgcatcccgtcaatgccatgatacagctgtactacgggagttatctggtctttttcatcattctgtcagtgattgtgttccgccaggtgattttctccgcccggataaacacagagtccatctgcgctgcactaagtggctttctgcttattggctatatagggtttttcatgttttctgcgatagaaaatcatatgcctggcgcgttccgtggactgtcaaatgatgagttgcagatgatgaatgaacttttttattattcttttatcagtattctgaccgtaggctatggcgatattgttgccgtcagctggccggctcgtaatgccactattctggttattctcacgggctatatttactcactggtctttattgcccgcatcgtcagtggattttcggtctcagaaaaataa

SEQ ID NO: 15331 - DNA, 213 bp, Escherichia coli; identical to SEQ ID NO: 6096

SEQ ID NO: 15332 - DNA, 384 bp, Escherichia coli; identical to SEQ ID NO: 8120

SEQ ID NO: 15333 - DNA, 354 bp, Escherichia coli
atgtcagaaacggtacagattgagtcgttcaacgcagaatttttgaccaaacagaaactacacgacctgattttttaccgcaaaagttttgatatcacgaatgttaacgacatcagtgaaaccgtcaaaatagtggagtatgtgattgagcatcagcagaagaaattaacctgccgcgtatacaccgaatacagaagcactgcggtggcaggctccctatggtcaccaacagcacttctgggagctgtgagcgctgccgcaatcggtgtccataatctggcgacatggaacccggactatgaaattggtaagaattacgtcaaaagaaccatatctgtaaggtataaaaagtaa

SEQ ID NO: 15334 - DNA, 1338 bp, Escherichia coli
atgcactctcaaatctgggttgtgagcacgctgcttatcagcatcgtgttaattgtactgaccatcgtgaagttcaaattccacccgtttctggcgctgttgctggccagcttcttcgtgggaacgatgatgggtatgggaccactggatatggtaaatgctattgaaagtggaattggcggaacgctggggttccttgctgcggttatcggcctgggcacgatactgggaaaaatgatggaagtatccggggccgcagaaagaattggtctgacacttcaacgctgccggtggctttcggctgatgtcattatggtgctggttggcctgatttgcggcatcacgctgtttgttgaagtgggcgtcgtgctattgattcctctggctttttcaattgccaaaaaaaccaatacctcattgttaaagctggccattccgctgtgtaccgcattgatggcagtgcactgcgtggttcccccacatccggctgctttatatgttgccaataagcttggcgcagatatcggttcggtgatcgtctacggtttgctggttgggctgatggcatcactgatcggtggcccacttttccttaaatttctgggtcaacgactgccctttaaacctgtacccacagagtttgccgatctcaaagttcgcgatgaaaaaacactaccttcattaggcgcaacgttattcaccatactgctacccattgcgctgatgttggttaaaacgattgccgaattgaatatggcgcgtgagagtggtttgtataccttgcttgagtttattggcaaccctatcactgccatgtttatcgccgtgtttgtcgcctattatgtgttgggtatacgtcagcatatgagcatggggacgatgctcacacatacggaaaatggtttcggttctattgctaatattttgctgattatcggggccggaggcgcattcaacgccattttaaaaagcagcagtctcgctgatacgctggcagttattctctccaatatgcatatgcacccgattcttctggcctggttggtggcacttattctgcatgctgcagtgggctccgctacggtggcaatgatgggggcaacggcaattgttgcacccatgctgccgctgtatcccgacatcagcccggaaattattgcgattgctatcggttcaggtgcgattggctgcacgatcgttacggactcgcttttctggctggtgaagcaatattgcggcgctacgctcaatgaaacatttaaatactatacgacagcgacatttatcgcttcagtcatcgctctggcgggcacattcctgctgtcatttatcatctaa

SEQ ID NO: 15335 - DNA, 570 bp, Escherichia coli; identical to SEQ ID NO: 5077

SEQ ID NO: 15336 - DNA, 1173 bp, Escherichia coli
gtgcagtttgagttctggttctcggaaaagcggattatcgatatcaggcaggttgaaaccagcgcgcgttatcttggtacggcgctgtactggatagccgccagtagcaatattaagccgggttatgattattacttttatatccgcagcgtgaacaccgttggtaaatcggcatttgtggaggccgttggtcgggcgagcgatgatgcggaaggttatctgaatttttataaagggttgatcaataaaacgcatctcggcaaggaactgctggaaaactttgagctgacggaagataacgccagcaaactggaggagttttcgaaagagtggaaggacgccaacgataaatggaatgccatgtggggcgtcaaaattgagcagaccaaagacggcaaacattatgtcgcggggcttggcctcagcatggaggatacggaggaaggcaaactgagccagttcctggttgccgctaaccgtatcgcgtttattgacccggcaaacgggaatgaaacgccgatgtttgtggcgcagggcaaccagatattcatgaacgacgtgttcctgaagcgcctgacggcccccaccattaccagcggcggtaatcctccggcattttccctgacaccggacgggcggctgacggcgaaaaatgccgatatcagcggtaacgtgaatgcgaactccgggacgctcaacaacgtcacgattaacgagaactgccgggttctgggaaaactgtccgcgaaccagattgaaggcgatctcgttaaaacagtgggcaaagctttcccccgtgactcccgggcaccggagcggtggccatcagggaccattaccgtcagggtttatgacgatcagccgtttgaccggcaaattgttattccggctgtggcattcagtggcgctaagcatgagagagagcatactgatatttactcctcatgccgtctgatagtgcggaaaaacggtgctgaaatttataaccgtaccgcgctggataatacgctgatttacagtggcgttattgatatgcctgccggtcacggtcacatgacgctggagttttcggtgtcagcatggctggtaaatggctggtatcccacagcaagtatcagcgatttgctggttgttgtgatgaagaaagccactgcaggcatcacgattagctga

SEQ ID NO: 15337 - DNA, 1269 bp, Escherichia coli
gtgctgcaccgctggcggcgtgacaccattcaccgtgccgctctggtcgccgtcaaagtgcgccccgttatccacgatggcttctttttccggtacatgctgcacggcggtgatggcatacgtgccgtcgtcgttctcacggatactcacacagcggaacaggcgctggcgcaacgtcggcaacttcagcccccacacgctgtattctgcaacgccgtcaggaacccggctcactttcaccttcacgccgtcggtgacggactggacctgcacgctgaccggattgccacttccgtcaaccaggcttatcagcgtggtgccggaggatggcagcgtgatttcacggtcgagcgtcagcgtccgggtctggctgctcaccgccagcacacgaccaccggtgctgataccggcatagtcatcatcgcagatttcaataacatcgcccggtacatggcgaagcccttctgcgcccacgctgaagtccacggtctgcgtttccagcagctccgttttaatcagccacagcccggcgcggtgtgcctgcccccggctggtacagccaaaggcatccatcttcgtgacattacgaccataacgggcaatggcctgcgtgtcctccacaagctctgttgccgtttcccagccgttatccgggtcagtccagttcacctcaacggcattatggcggtccttcagggcgctgaaactgtagcggaacggcgcgccatcatccggcatcaccacattactgcggttataggtccacacattatccgacggccggtcctgcacgaacgtcagcgtctgcccgttccataccggcatacagcgcatcgccgagcagaaatcactgagcacatcccacgccttacgctgtgtggtcaggtacgcattacaggtgatgcgcggctccgtgccgccaaagccgtccggcaccgactggtcgcagtactggccgatgacatacagcgcccatttatccacatccgccgcaccaagacgttttcccatgccgtagcgcggatgggtcagcatatcccacagacaccaggccatgttgttgctgtatgccggcttaaacgttccgtcccagataccgctgtattgccgcgtctgcgggttatagttcgacggcacctgcagaatgcgcccgcgaagatgataattacgactcacctgctggctgccgaactgctccgagtccacctgtacgccgaccagtgccgtgttcgggtagcactgtttcacatcgatgatttcggtgtatga

SEQ ID NO: 15338 - DNA, 192 bp, Escherichia coli; identical to SEQ ID NO: 8188

SEQ ID NO: 15339 - DNA, 141 bp, Escherichia coli; identical to SEQ ID NO: 6191

SEQ ID NO: 15340 - DNA, 339 bp, Escherichia coli
atggtcacacgtcctgctggtgggtgtgatttcgtgatgaccgttcaccttaattgggtgatctgccgtctcgccagtttcattatcgctattgtgatgctgattgccgccagtgttctccttgtgtggatgttcagcgccttccatttcctccggatcatcttcctgaacttcaacctgatactcttcatcgaatgtttcctggtatgttgcgtcgcccatcaccgcgccacaatcagggcagttgccgccgccggtctgaccgcaggcggtgcagactttttccggttcctgttgcgctactggttcggattgtttcgtttctggctcgttttgtaa

SEQ ID NO: 15341 - DNA, 744 bp, Escherichia coli
atgcaggaaaaccgctgggatgaggagtctgcttcctttgtcccggttgagactgaatccgatccgatgaacgtcacttttgacaagctggcccctgaagtacagaacgctgtcatggttaagttcgacacatgtgaaaacatcaccgttgatatggttattagcgcacaggaattgttgcaggaagacatggcaacattcgacggacatatcgttgaagcgttgatgaaaatgccagaagttaacgccatgtatccggagcttaagctgcacgccattgggtgggttaagcataaatgtaagcctggtgccaaatggcccgaaattcaggcagagatgcgcatctggaaaaaacgtcgtgaaggtgaacgcaaggaaaccggaaaatacacgtctgttgttgatctcgcccgcgccagagccaatcaacagtacactgaaaattcaacaggaaaaatcagcccggtcattgctgccattcatcgcgaatacaagcagacatggaaaacactggatgacgaactggcctacgctctctggcctggtgatgtggatgccggaaacattgacggcagcatccatcgctgggcaaaaaagaagttatcgacaacgaccgcgaagactggaagcgtatctcggcatcaatgcgcaaacagcctgatgcccttcgctacgaccgccagactatttttggccttgtccgtgaacgtccgatcgacattcacaaagaccctgtggcactga

SEQ ID NO: 15342 - DNA, 273 bp, Escherichia coli; identical to SEQ ID NO: 9286

SEQ ID NO: 15343 - DNA, 369 bp, Escherichia coli
gtgtcagacacactttccgggacaacgcatcccgatgacaatgacgaccatccctggtggggactaccctgcacagtgacgccctgtttcggcgcccgtctggtgcaggagggtaaccggttgcattaccttgccgaccgtgccggtatcagaggccggttcagagatgcggatgcgtaccatctggaccaggcctttccgctgctgatgaaacaactggaattaatgctcaccagtggtgaactgaatccccgccatcagcataccgtgacactgtatgcgaaggggctgacctgtgaagccgacaccctcggctcctgtggttacgtttatctggctgtttatccgacacctgaaacgaaaaagtaa

SEQ ID NO: 15344 - DNA, 216 bp, Escherichia coli; identical to SEQ ID NO: 7765

SEQ ID NO: 15345 - DNA, 249 bp, Escherichia coli
ttgcattaccttgccgaccgcgccggtatcagaggccggttcagcgacgcggatgcgtaccacctggaccaggcctttccgctgctgatgaaacaactggaactcatgctcaccagcggtgaactgaatccccgccatcagcataccgtgacactgtatgcgaaggggctgacctgtgaagccgacaccctcggctcctgtggttacgtttatctggctgtttatccgacacctgaaacgaaaaagtaa

SEQ ID NO: 15346 - DNA, 285 bp, Escherichia coli; identical to SEQ ID NO: 8133

SEQ ID NO: 15347 - DNA, 273 bp, Escherichia coli; identical to SEQ ID NO: 9286

SEQ ID NO: 15348 - DNA, 165 bp, Escherichia coli
atgaaccagctacctcgccgtgcgctttcgcgttatggtctgacttttcatggaaatatcctttcagtaaactgtcagtgccggatgctcacccgtgtccggcgcacgcactccacctcacccgtggagaactccttaattaccaaccttagcttcgttggttag

SEQ ID NO: 15349 - DNA, 252 bp, Escherichia coli
atgaagccccaggagatatttctatcaaccctggggctgccactccaaacccgaacaatttggatggtagtcccttcttcgcatggaggcaatataaacatgctgacgaaatatgcccttgtggcagtcatagtgctgtgtttaacggtgctgggatttacgcttctggtcggagactcgctgtgtgagtttaccgtaaaggaacgtaatattgagtttaaggctgttctcgcttacgaaccgaagaagtag

SEQ ID NO: 15350 - DNA, 750 bp, Escherichia coli
atgaaaaattggttcgcaaaacgctgtctcttcgttaatacaccagaagcattaagtgaaaataataaggttaatttggagttggcaaaaaaatgcttttcactgcttaatgctgaatataaattttctcgcgtagatgcgaaaaaatttgatgttttcgtatctactccaaatggagaaatttggtatgaatatttgtcatcaggatttaaatcatgtctgagtattttattcggcataataaaagagattgaactaagaatgcctgatgaggaatgtttagcacagcattttgatggcattgtattgattgatgagctggaaatgcatcttcatcctgaatggcagtccaaaattgtttctgttttgcgagacacatttcctgcaacacaatttatagttactactcatagtcctcacattatacaaaatgcggaacctaatcagataattgcattagggacagatagtaatggatatacatacgtcagagaacttccgagtaatgagtttggttatacaggatggacattagatgaggtactcaaagatgtaatgggaatggaagacacaagaagtcagaaattacaaagtatgcttgctgcatttgatcaagctattgatgaggaaaataaaattgaagcagagcgcatttataaagaattagatagggcacttcatccagcaaatgtgcttagaaaaatgcttagtattgatctatcctcaataatcgaggaggacaataaataa

SEQ ID NO: 15351 - DNA, 747 bp, Escherichia coli
atgattaagctggaaagaaattttacacctctattcttttctcctcagaatgttagtcgtttaactgaaaaatttaagagcagcggtactcatgtatggcatcatgatgatgtaaaaaattcgttgatggagttaagtgataaaaaatgtgcatactgtgaggttaagcttggtgaaaaaagcacatatcatgaggtggagcattttaaagataagaatgattaccctgatgatgtaatagagtggaataacctattaccttcatgtcgtcattgtaatggttctaaagggacacatgatgttgtcgaagaaccaatagttaatccttttgaggaactcccggcagagtttttctatattaaaaattttagaatgaaagggaggaatgagaaaggtattctgaccatagatgttttaaatcttaacgatagagaacatttggttaagccaagatgtgaaacaggatctataattgcggaaaaaatagaggattctttaactttatttgaggggtatcttttaaatccaacaagcaaaaataaaagaaaattaatcggtactgttagagggatactgaaagaatgtcaaagaagtgccatattttccgcagtatcggctactgtattacatacgagtgaggattatctgactttacgggataatatgatggtccataagttatgggatgaagatatggagaaccttcacataatgtcaagtaatatacaattaccaacaacagcttaa

SEQ ID NO: 15352 - DNA, 513 bp, Escherichia coli
atgaacaccctggatccggttttctggggatatgctcccggatggtgggataaaccgccgctgattaatgcccgcgtagaaactgccgcaaccagtcgcatgtttaaaccgctctggcaacatggtcgggtaatctgctttgccgatggctggtttgagtggaaaaaagaaggcgacaaaaaacagccttattttatctatcgcgcagatggacaacctgtttttatagccgcgataggtagcacaccgtttgagcgcggtgacgaagccgaaggatttttaattgtcactgcagcagcagaccagggtctggtagacattcatgaccgccgcccacgagtactgtcgccagaagctgcacgggaatggatgcggcaagaggttggcgataaagaagcctcagaaatcgcggccagtggctgtgttccagcaaaccagttcacctggcacccggtatcgtgcgcggtgggtaatgttaaaaaccagggcgcggagttaattcaacctgtttga

SEQ ID NO: 15353 - DNA, 237 bp, Escherichia coli
atgaaaataagatatgccgctatttttctggcattaccgctgttatgcacaacagcgcaggcaaacagttttcttcattatgctggggagtttaacttccggacgggagaaaagcagaacaatgtcacaatcgcggggctatcagccatcacatttgatgcaaaaaaaatattttctatgctattaacgatagcagaaacaataataaagaaggagatgccagtctttatacactaa

SEQ ID NO: 15354 - DNA, 750 bp, Escherichia coli
atgccggagccggatgaaccttcagcacgtcacgccttacccgccaacgaaccgcgcattgtgctgaacaatggcgtggtttcttataacgatcgccccattcttaataaccttagctggcaggtgaatccaggcgaacactggcaaattgtcgggccaaatggcgcgggaaaatcgacgttattaagcctgattactggcgatcatccgcaaggttacagcaacgatttgacgcttttcggacgacgtcgcggcagcggcgaaaccatctgggatatcaaaaagcatatcggttacgtcagcagtagtttgcatctggattaccgggtcagcactactgtgcgtaatgtgattctttctggctattttgattcgattggcatttatcaggccgtttcggatcgccagcaaaaactggtgcagcagtggctggatattctcggcattgataaacgcacggctgacgctcctttccatagtctttcctggggacagcagcgtctggcgctgatcgtccgtgcgctagtgaaacatccgacgttgcttattctcgatgaaccactacaggggcttgatccgctcaatcgccagcttatccgccgttttgttgatgtgctgattagcgaaggtgaaacgcaattgttgtttgtttcgcaccacgctgaagatgcgcctgcctgtattacccatcgtcttgagttcgtgccggacggtgacttttatcgctatgcgctgacaaaaataaactga

SEQ ID NO: 15355 - DNA, 219 bp, Escherichia coli
atgtttaaatttgatatgcaactcaaccaaaactatgcctctttttaccatccagaaactggtaaagctgttttcgttgactctttcgataatgaagaatttgatatcagaattgggaccctacgccaaagtaagcatgttgctactgtacgtgcatccaatgatgatgaattaaatcaaaaaataagtgaggcgacctcccgttatctatgtctataa

SEQ ID NO: 15356 - DNA, 378 bp, Escherichia coli
atgtctataacagaacaacaactcattgatcttgaggatgagattaacgagatcttgcaagaagatgcggcaagaattcacttttcatttcacgcagcatatgaacgcctgaacgacgagaggaacaaaccgccaattactcttgctgagcttgaagatgtgtttaaatcgtttatatctgcacatctgcagactgttttggattttgctgaaggtacaactttcaccataaagtgcaacaaaagcgcccttcattttccttgcgccattgtacacgaaagagagtttgggaaaacgtgggttatccaaaacgtcattacagccatgaggaaagtgggattcaagtctaaagattctattatcctcgaagttaattaa

SEQ ID NO: 15357 - DNA, 1179 bp, Escherichia coli
atgaccacttttaccgacaaagaactgattaaagaaatcaaagagcgcatcagcagcctggacgtgcgagacaatattgagcgccgtgcttatgaaattgctctggcatcgctggaagcagaaccggtggcgtgggaatgcggtgaaaacataattttgtttaaccctgacacagttgaagcatacgcaaaacgtgcggagataacacctaagccactattctccgcgccgccagcgccgatggctgcgccggagaaatgcccggcagaaattcgagagctgatgtcgtcgcattctgacgatctcttcaacgatgaagacgctcaggagatttggaacacctgccgcgccgctatgcttcagtccggaaactttcgggaaaacaagaattcgtcaaccaataattttcgagaaatcgcggaaacgtcaaccaactatccggcaattcctagtgaggtgttgtccgcaatcctgaaggttgccaggattcgtgccgatttcgatgattttgacggtgacaggcgaggtatcggtgattgtctggatgaggctgagcaagagcttatcgttaccattaacaaatatgccagtcagttggcagtagtacctgttgggcttgatgaacgtgcagctttcaatgcctggaataacgacgagaacctccccatagctggtgttggcgcaaaaaacgctgcctggttagcctggcaagcccgcgctgagttgggtcgctcgttagccgtaaactctccggtaattccggatggtttatccacggtatgcgctgaggcttatcaggttgtaggagttatggcagatgcgcttggtgtattcggtgatgcagcagtacagaaagttctggataacctgtcacagcaaaaacttgttcacagagatgtgctgccgttctcgcttccggtaactccggatggttgggttatagtgccgaagaaactaaccgctgagaacggcgctaagggtgtgctatccggtgaattttcagaaactacgtttataagctgcccggaatgctttggcgatgatgattgcgatacctgtgacgggagcggacgaattgaaattaaagtaccagtcacgtggacgaccataaaatccatctgggataaaggtattgcgcattttgcagcaaaaccgccgcaggaggttaaccgtggctaa

SEQ ID NO: 15358 - DNA, 582 bp, Escherichia coli
atgctgcgatggaaacgctgtattattctaacatttatctctggtgctgctttcgcggcgccagagataaatgttaagcaaaacgaatcgttacctgatttaggtagccaggcagcacaacaggatgaacaaaccaacaagggtaaatcgctgaaagagcgcggagccgattacgtcatcaactccgccacgcaagggtttgaaaacttgacccctgaggcgctggaatctcaggccagaagctatctgcaaagtcaaatcacctcaaccgcacaatcttatattgaagacacactctctccctacggtaaggtccgttcgaacctctccattggtcagggcggcgatctggatggcagttccatcgattattttgttccctggtacgataatcaaaccactgtttatttcagccaattttctgcgcaacgaaaagaagatcgtacgatcgggaatattggccttggggtaaggtataattttgataaatatctattgggtggaaatatattttatgattatgactttacccgtggacatcgccgtttaggtttaggcgccgaagctggacggattatttaa

SEQ ID NO: 15359 - DNA, 927 bp, Escherichia coli
atgttcttaacaaatacatcgcgttttttatttttatttttatttttatttcttatgtacaagaataaattatatgcatatgataatttctcattcaatgcggatgtacattatggttatggtaagctattatggcatgataaaaaaccagtcatatacccattggcatccttatctgattatacttattataacgaattcgacccatttgaaacgatttattatgtggggcaatactataaaattagcttaaatgagagtaagcgaattcaagaacaaaaggacatttacgcacaccttcaattaaaacataataaatcattaattacagcaaatgtaacgttacataataaaagtaatagttcatattatgttcatcggatgaatttaccagcaaacatccatgaatcaccttactctcctttgtgcagtggttcttttttaatcgtaacaaataacatacggttagattatataagaaaaattacatgccgatttgatttgtggatgaaaaaatctgactggatagaaatatcacccggagaaaaactctcatacacagtaaatttaaatgactattatgcttttctccctgcgaagcatcaatatgatataggaactgtagagttcacattggtaaatagtaattggttcttagagcagcatatttatgatcttttttttgctattgtggatgaaagacactataagcagtgtaaaaacacttctggcattgttaggaagtatatctataagtcgtggcagttatgtgagacttatcgtgggaggtggagccctttacaggaactcatgaatcgatttcattatgaaggagggggtgaaaatatatttcaaataagaacaaatcaagtaaatataaacattaatggagataaaattaaatctctttattcatcgatgcagtga

SEQ ID NO: 15360 - DNA, 1638 bp, Escherichia coli
atgcggaagaatatggggaagacgccgatgagtgaactgttgcaaaagctgacccgtagctgttttgccaaccgggacgcactggatgtggcgcgaacacaggcggcactgtggcagacgtggctgctgccggtgacggcagatacgccggtcggggaagaccccggctaccacgacgatttcctgcgtatccgcgacgaaatgaacaaactttccggcgcggataccggcctcatctgccagcttgccgaatccctgctgctgacgcaggcaaaagacgtgcgcatcgccacttactacatctgggcgcgactgcaccgcgacggtgagcgcggactggctgaggggctggcgctgttagccgggctggtggaacgcttcggtacgcaactgctgccctcgcgtccggcaagccgaaaaatggcgctggagtggctggcaggtgaaaaaatgctcgacagccttgcccgctacccggaagtggcaaaagaggattttgcgaacattgttgccgctcttaatcaactgacggtttccttcactgcatggcccgaagaccagcattccccctccctgatgccgctgattaacgcgctggaatcacgtctggcgcagtcgggtgggatgaacgcggtggtgccacaaaacagcagcagcgttcctgcaccgtcttccccggtggatgcgccacaggtacagaccatcacttccgggcgcgacctgctcgaccaggcgaaagtgctggcccgttatctgaacgaacagccgcagggctggctttcagcacaccggctgatgaaaaccctgcgctgggacactgtgcatgaactgccgccggatgtggatggcaaaacccggctggccccgccgcgcaccgaatcacgcaaccagcttaagcggctgtatgcccagcagaactggacggaactgctggagcaggccgacctgatgttcagcaccggtgtcagccatttctggctggatatccagtggtatctgcatcaggcgctggcgaaggcgggtgctccgtgggacagatggactgcggttatccgtcaggatctggcgctgctgctggaacgcctgccagggctggaaaatctggcatggaacgacggcacaccgttcgccgacgaggtgacgcgcaactggatagcgcagcaggtcatgatgcgggaagacggcgcatggcttgcggggaaagctgctgtgccgacagacgacgccacaaacgacgtactggcgctggagccggaagcgctggagatggcagacagtcagggcgtggaagcggcactgggctggatacagacccgtccaggcatcaccacggcacgacagcgcctgttattgcggctgctgatggcacgggtggcggaacagtacggtaaaaacgagatggcgctcctgctgctggaagaactggatactgccgcacagggaataacgctgacgcagtgggagccggaactgctgtttgaggtaaaagcccgacaactgaaactgctgcgtctgcgggcgcaccgctatgcggataaagccctgctgaaccgaaaaatggatgccctgctgggtacactggtggcaatcaatccggtgcgggcggcggtactgtgtgatacgcagcataaggagtga

SEQ ID NO: 15361 - DNA, 645 bp, Escherichia coli
gtgcactggcaaactcacaccgtttttaatcaacctataccattaaataacagcaacttatacctgtctgatggcgcgctttgcgaagcggtaacgcgtgaaggtgctagctgggatagcgattttctcgccagtattggtcagcagttaggaacggctgaatcccttgaactggggcggctggcgaatgtgaatccgcctgaattattgcgctacgatgcgcaaggacgccgtctggacgatgtgcattttcaccccgcctggcacctgctgatgcaggcgctatgtaccaatcgggtgcacaatcttgcctgggaagaagacgctcgctccggtacatttgtggcgcgcgcagcgcgttttatgttacatgcgcaggttgaggctgggtcgttatgtccgataacgatgacctttgccgccacgccactgttgttacagatgttacccgcgccgtttcaggactggaccacgccgctgttgagcgatcgctacgattctcacttattgccaggtgggcaaaaacgtggcttgttgatcggcatgggaatgacggaaaagcagggcggttccgatgtcatgagcaacaccacccgcgcagagcgtctggacgatggttcttatcggctggtggggcataaatga

SEQ ID NO: 15362 - DNA, 756 bp, Escherichia coli
atgactgaagcacaaagacatcaaatcctcctggaaatgctcgcacaattgggctttgtgaccgttgagaaagtcgttgagcgtctgggaatttcgcctgccactgcacgacgcgatatcaataaacttgacgaaagcggcaaactgaaaaaagtgcgcaatggcgcagaagctattacccaacagcgcccgcgctggacgccgatgaatctgcatcaggcgcagaatcacgatgaaaaagtacgtattgctaaagcggcctcgcagctggttaatccgggcgaaagcgtagtcatcaactgcggctccaccgcgtttctgcttgggcgggaaatgtgtggcaagccagtgcaaatcatcactaattatctaccgctggcaaactacctgatcgatcaggaacatgacagcgtgatcattatgggcggacagtacaacaaaagccagtccatcaccttaagcccgcagggcagcgaaaacagtctctatgccgggcactggatgtttaccagcggcaaaggactgacagcagaagggttgtataaaaccgatatgctgacggcaatggcagagcagaagatgctgagcgtggtagggaaactggtggtactggttgatagcagtaagattggcgaacgcgcgggaatgctttttagccgtgccgatcaaatcgatatgctgatcaccggcaaaaatgctaacccggaaatcctgcaacagctggaagcgcaaggggtcagcattatgcgtgtttaa

SEQ ID NO: 15363 - DNA, 507 bp, Escherichia coli
atgaatctaggaaatgagttccctaaaaagcagaatgtttataaaggcatatggtatttaatcactaacaccaaacgatttgtattatccgcagccgaaaactcaatggcatttgagcttgagaaagaagagtatcaacggaagctcgaacaaggaaattacagtcttgatccaaaaaaccatacctactctcatccccagaggctaaaagaattacgaactttgttactcaagacaacaatctatatttttagcattattattttaatagcaggcattggtttttatacgggagagttaaaaataacaccccatctatcatggaaaaatagtgtcagcgctttaggtattattttaatttcatggtctacattatttcaattaggctggggaaatggcacatggagtggaacgagcctggatgaattggtaagaaattctctttttcgtcatatttttagcattggtgtatttttgagtttattatatttcgtactgccagaatga

SEQ ID NO: 15364 - DNA, 1617 bp, Escherichia coli
atgtcaacgaaacaaaaactagaacttaactggattggtaagcataagcgtcctcgtctggagccgcgtattctattggaagataaggctttatcttatggcgatgttaacagtgagaatttacttatccaaggtgataatctgctagcattaaaagcgctggagcaacagtattctgggaaagtgaagtgtgtatttattgatcctccatataacactggaagcgcttttactcattatgatgatgggctagaacattcaatgtggctatctatgctcagagatcgccttgaattaatcagaacattgctaagcgaagatggctcactctggattactattgatgataatgaagttcattatttaaagatattatgcgatgagatttttggccgctcaaattttgtagcctcaataatttggcaaaaaattttcacagtcaaaaactcagcaaaatatttttctgatatgcatgattatgtattaatttatgcaaaaaataaaaataaatgggagaggaagctacttcccagacctgccgaattagataaatcatatggcaaccaagataatgatcctcgaggtgcatggacaacaaatgcgattcaggcgaggaattactatagtcaaggcatgtacgaaataaaatcaccatcaggtagagtatttactccgccaaaagggacttattggagaatatctgaagagaattttcacagattaaatgaagatggacgtatatggtggggtaaggatggcaatgccattcctagagtaaagaaatttctttcagaagctaaacaaggtgttgtgcctgcaactttatggttgcaccaggatgcaggtacaaatgcagaagcaaaaatcgaagttagaacgctatttgataacacagatgcagatatatttattacacctaaacctgaaaaattattagagagagttctttctatcgcgacggaagaaggtgaccttgtattagactccttcgctggctcaggtactacaggtgccgtcgctcacaaaatgaatcgtcggtggatcatggtagaattaggtgagcattgccacactcatattgtacctcgcctgaaaaaagtaattgatggagaggacttgggtggggtatccaaaagcgtaaattggaaaagtgggggcggttttcgctacctacgtttggctccctcactccttaagaaggaccaatggggcaattgggtgatcaacaaagagtataatgctgaaatgttgtccgaagccatgtgtaagcatatgaatttcacctatgcgccgagccaaactcaatattggaaccacggctacagcaccgaaactgacttcatctacgttacaaccggctctttggcttatgaacaactcaaagttataagtgaagaggtgggagatgaacgcacattattaatctgctgcaaagcctttatgaccgaagggacagagtttcctaatctgacattggtaaaaattcctcgcgctattctaagtaaatgcgaatgggatcatgacgactatagctttacgctaaacgtactttctgattcagaacaacctgacgatgttgactacgacgaagatactgaaggcgaaaaagaattatga

SEQ ID NO: 15365 - DNA, 273 bp, Escherichia coli
atgtttgctaaatcctttattgctctcgacggtaacggtcgcctgaccggagctcgtactgcgcagacagcgccttacgatagctatacctgccatctgtgcaacagcacaatgcaataccatcctgaatacgacaccgaacgcccgtggttcgaacacaccgaaacgggtctcaccagcaatggtcgacagcattgtccctatgccaatccggatgcgggtgaaatgcaccttgcaactcctccactgcaatgccgctcccagggccagtaa

SEQ ID NO: 15366 - DNA, 573 bp, Escherichia coli
atgcaaaacaaacaacgatgggagccagactggtttctacagtcactcctgaacaaccatgtcgacaaactggtagagcgctattcctgcctgcgggcattccgaacagatctgttttaccaggatcataccgctaagtatttcctgcaggatcaccagcagctcgaatgggatatccgtaagctgatgaaccatatgatgcaactcgaagcggtggtcggtttcttttgggttatcgaatggactgaagatcaccactaccacgctcacgttgtcttctggctggatggctgtaaaacccagaacacatatccctgggctcaacaagcaggtttgcactggagtgatatcactgagcgggaaggctggtatcaccgatgtgagtttaaagagcattacacggccaatatcaatattccggtgcgttacagcgatccgggcagtatcgccaatatccggcaggtgctggcgtatatggccaaagttcaacaaaagcaggggctgccgttgtttggttgcaatgaggtccctgagcgaccagcaaccggacgaccacgcaagactgacttctga

SEQ ID NO: 15367 - DNA, 594 bp, Escherichia coli
atgaaagattacaagcctcgttacgaagaactttataaatgttaccagacctggctgaccgattttacgaagctgacggtcagatcgggtatgtgccaccagaatatatatcatcaccataccctgacggttggtaaccttaagtttccgggagaggaagaggttattgctgttgttccccagtgtctgcaccggattatttatggcagagcagcagccccactgactgttaatgatgacctgatcgtcagtttatttacccaggagcatctgctggctcaccatcccatgctggaggggattttgctgtctgagtgcgtgcgtttaaaacaacgccctctggcaaataagctcatcagtttgttccgccagttcagcggtagtgagctgcgtctgaagctggtctggctttgctggtacgatttgatgctgggtaattgccttgatgactggaccgacaacctcaggttcaaaaaagacaaagagatggatatctggatcaataaccggcaggcggaaaaccctgcgctgaccagcctgatggacgagtacgtctgctttgcgtggcgaacgacagctgaaccactgcgttag

SEQ ID NO: 15368 - DNA, 207 bp, Escherichia coli
atgactacccgcccctcactgaccgaagaccagttcgttgacatggcatttatcaccagtctgctgcaaatgacagataagtggatttataagctcattaaggatggagtctttcccaaacccatcaagctgggccgaagctcccgatggttaaaaagcgaagtcgaaaactggctacaggaacgaatcgatcagtcccgtaaataa

SEQ ID NO: 15369 - DNA, 1113 bp, Escherichia coli
atgacaatgaaagagaaatcagaaaaagaaattgagaatgagaatcgatcaaatagaaaatataaaactctcaggggactggaaaaagaactgaggtggttaaaaaaagaacagagggcgtgtcacttttttctgttccatctgattacggaatatccactatggacagtgccgggtaataaaaaagcggacggcacaaatttaagcgaattatcagcatcagaaaaagaattcttgggcaaaataatatttcattctgataccccattaaagcaggtagaacctgaatttttacccttatcagcggatatactcgaagaattagaaaaacgcattgacgaacttcttggcattaaaaatgaagctaaagaagatatatttattgaagatagtcagaggggaaatactaatctctgtaccaaagaacgagttaataatgacagtaatgtcagtaaattaccgccagcagatatattgtttgcaaatggtatagctaacccgcactcagaggaaataataaaaaacagcctctacagtatcatttatattttatattttacatgtcaggatgataatcaaaggctaaagataatagacagaactaccctgttgtggggtgagtgtcggaaaagatatccatttccttttgcctggctcaatagtaataacaaagagcattgccagtggctctgggacgaaatgcataagcgatgtatcggtgttccattcctcgctcgtgaccatattcagcagtggcattttcttgtggcaacattcgataactggaaaggctggacaatgattcagagagattatttaacggaaaagaatccgaaacgtaatccaggaaaactcctttcgggcggtctcgatccggacagggtagaatttgaacacaaaactatcctgcttgatgagcttaaaagtgcatgggagcaaaaggaaagaagagtcagaagagcgaaggaaccagccgctgtgaagttgaccaaagcggctcaaaaaaaacttgagtatattgcgcacgtagagaaaaccataccgaaggaaattcttaacgagctgattaacaatgcttttaatgatgcgaagagtaaatcccggcaatcataa

SEQ ID NO: 15370 - DNA, 876 bp, Escherichia coli
atgactaaacctcacagccttcaggccctggaacaaccgctggcgtcgcttcccgatacgcttcgccagcttattcttgaacgtattcagaacctcacccactacgagccggtgattggcatcatgggaaagagtggtgccggtaagtcctcgctctgtaacgaactctttcggggagaggtctcccccgtcagtgatgtgaatgcctgtacccgtgacgtgttgcgcttccggctgcgcagcggtcgtcacagcctggtgattgttgatttaccgggtgtgggagaaaacggacaacgggatcaggaataccgcgccctgtaccggcgtatgctgccggagctggacctggtgctgtgggtcatcaaggccgacgaccgggcgctgtcggtggacgagcagttctggcgcggtgtgatgcagccttaccagcagcaggtgctgttcgtgctgaaccaggccgacaaaatcgaaccctgtcacgaatgggatacccgaaccagcacgccttcagcgcagcaacggacaaatcttcaggaaaagctgaccgccattaccgcaatgtttaagccgcatcacccggtctgcgtggtatccgcctgcagcggctggggcgtggaggagatggtggcaaccatgatgcgctgtctgcctgaccgcgccaccagcccgttggtgacacaactgcaagggagattctgcacagagccggtaaagtcgcaggcccgtgacagtttcggtgaagctgtgagccgggttttcgataccgcaggatcatcttcgttcctgtctgcatcgctgaaaacggtgattcgtagcgtgcgtgatgcggtggtgtcggccgctcgggccgtctgggactggatattcttctga

SEQ ID NO: 15371 - DNA, 717 bp, Escherichia coli
atgacgcttcaggagcggcggcatgaccggcttgccgtcaggttgtcgttgattatcagccgcctggtgtccggtgaaactctgtttattcgcaaactggcaactgaattcggggtgtcagagcgcacgctgcgtcgtgactttcgggagcgtctgatgtatctcgacctggattactaccaggggcagtgcagtctgcgctcagatattcacagtacgcggcaggaaatagatattctgacctttgctcaccgcacggggttggccggagttttcccgggctttgaccggcgactggtcagcagcctgctggactgtgatgatagaccctgtctggtatggcatcaggacagaccacatcccccggcaggaaagctctccttctacaggttggtcagagctatttcgggatgtcagcgcatcaccgttctgactgaaggggagcgtcatgaggccattgcaccttaccggctaatcgctcttgacggttactggtatcttgtcgctgaacataacaggcaattacgtgtcttccggctggatgagattcatctggtaaggccatcgcgggaaacatttattcgcagtgagcttctctatcagctgtcggaggacaaacattttatctctgccttacctcatttccgttttattcagcagtcgctgaattcattttctccatcagaaagtcgggggcaatccggacaaactgattag

SEQ ID NO: 15372 - DNA, 453 bp, Escherichia coli
atgaaaaaattgaaattattgtctttactgccagtcatgtttttccccttacttatcgcaggtaatgctcacgcagcacgtccttatagcgggttcctgcctgcggcagtgaataataaaagtgggaatatattctggtgtgatgcccatcgacaggtcagaaaactgtgtacagcgacggaagtggattcaatgggatggtttattgttgttcgctcgaaaccttccagagattgtccggggggaatatgggggtggatcactcccagtaaagacgatgtggcaacaggttataccattacgccaggtaaagaattcaatctcaccatgaaggatatgtgcagtcccgatatgaaagtaacgttccgcccgaataaaaaggaccctcgttatgacgatcttgtcgggatttatgccggaaaagaagcgtttcgctacaaacaaataaaataa

SEQ ID NO: 15373 - DNA, 474 bp, Escherichia coli
atgcgactgccttacgtaatagttacattagctatgctggcttctgtatcaacagcacaggctattcccaatatgtggacgagtggttttgggatgggggtgacggaatacattatcggtagccccgagaaggtcatttttaatctcaactgcaccggtaatccggatgagcaaaacattctgcagcatggcgtattagtaaccctgcccaatggtacgatgctggattctcacgatgacgggacagaaataacggtggtcatggataacagccagtatccgttaccttcatccctcggctggaggaatggcgataacgcctgggtgtcatttattgacgcgttgggtcagtcgtctaatttcgatgtttacgtcaacaataacaaagttggctccttcagtcctgggctgaagaatacgcagaaagaattgtctgacctcagtggctgcagaaccacccattacagcgattaa

SEQ ID NO: 15374 - DNA, 510 bp, Escherichia coli
atgcgattagccagccgctttggccgtataaaccagatacgccgtgaccggcctctgacccacgaagagctgatgagtcatgtacccagcgtgttcgggagtgacaagcatgaatctcgttcagacaggtacacctacatcccgaccatcaccatcctcgaaagcctgcagcgggaaggctttgagccgttctttgcctgccagacaaaagttcgcgaccagagcaagcgggagcacaccaagcacatgcttcgactgcgtcgctccgggcaactgaccgggcatcaggtgccggaaatcattctacttaacagccatgacggctcatcaagctaccagatgctgccgggcctgtttcgtggcgtctgtaccaacggcctggtctgcggccagtcattcggagaagtgcgggtaccgcataaagggaatgttgtcgagaaggtgattgaaggggcttacgaagtgctcggtgtgtttgaccgggtggaggagaagcgcgatgcaatgtag

SEQ ID NO: 15375 - DNA, 141 bp, Escherichia coli
atgaaaggaggtctgtcagggcgaaccgctcaggggaaaagcagccgcacccgtgctgttatcggcattgacggcgatgtgaaactcaatcgcgccctgtggattatggcagaaaacatgctcgaatttttcgggcgttaa

SEQ ID NO: 15376 - DNA, 441 bp, Escherichia coli
atggatacccacaaccctgagtttgctgagcaggcagcaattactgcctcggtagtccctgacgagttacgtatcggcttctggccaaagcgctttggatctatcccacaatggataacccttgagccccaaatatttggctggatggatcgtctgtgcgctgattacagcggcggcgtctggagcttttacacactcagcaacggcggcgcatttatggctccggagcccgacggtgagaagtggacgttgttcaacccgatgaatggaaacgatgcggagatgagcggagaggctgccggtatagcggcctgcctgatggcatacagccaccacgcttgtcgcaccgaatgtgacgcgatgactgagcactattatcgcttacgtgactacgcgctaaaccatccggaatgcagcgccattatgtatctaatcgactga

SEQ ID NO: 15377 - DNA, 543 bp, Escherichia coli
atgaatatcgcattatccccggtatcatcgcagcctgaactctttccgctggcggttatggcccagcatagttgcctgctccccgcgacctccggattgacaccttatgcccaacggaccattcgacgtgctatcaacctgctggataaatatctgcgccagcccggcatgtcctttacctcaagcacggctgcccgtgactggcttcggttacagctggcaggacaagaacgggaagtgtttatggtgctctatctcgataaccagcaccgtttactggagagtgaaacgctatttgccggttcggttaaccatgtccaggtccatccccgtgaggtggtgaagtcagcgcttcgcttcaatgctgctgctgttgtgctggcgcataaccatccatccggtgatccggagcccagccaatgtgaccgcaacattacgggcaggcttaaagaagcgctggcactggttgatgtgaacattctcgatcatctggttatcggttcagatggaattgtgtcgtttgcagagcgaggctggatatga

SEQ ID NO: 15378 - DNA, 342 bp, Escherichia coli
atgaaatctactgactcagagaacgattcatttctcaagtggggtctgaatcgtaatgtgacaccttgctttggcgctcgtctggtacaggagggaaaccggctgcactatctggctgaccgggccagtatcaccggtaagttcagcgaagcagaatgtcttaagctggatgtggcattcccgcattttattagccagatggaatcgatgctgactactggtgaaatgaatcctcgccatgcccactgtgtcaccctgtaccacaatggtttcacctgcgaagccgatacccttggcagttgcggctacgtatacatcgccgtttactccacccatcgttaa

SEQ ID NO: 15379 - DNA, 342 bp, Escherichia coli
atgaaaactctacctgcaacaaatccgcaggcggcgaagctatgtctgtcgcccgtggctgtctggcaaatgctgcttgcacgcctgctggaacaacattatggcctgacactcaacgacacgccattcagtgatgaaacggtaattcaggaacatatcgatgccggtatatctttggccgatgccgttaattttctggtggaaaagtacgggctggttcgtattgatcgcaggggattcgactggcaagaacagtccccatatctgcgggcagtcgatattctgcgggcgcgacaggcaacaggtttattgaaagcgcggcacggtgaacattgggaatag

SEQ ID NO: 15380 - DNA, 984 bp, Escherichia coli
atggcaatacgaattgaatttcacaagcacggtggcccggaagtacttcaagccgtagagttcactcctgccgatccggcggagaatgaaatccaggtcgaaaataaagccatcggcatcaattttatcgacacgtatatccgcagcggcctttacccgccaccatcgttacccagcggattaggcaccgaagcggcaggcatcgtgagtaaagtcggcagtggtgtaaagcatattaaggcaggcgatcgcgtagtctatgcacaatcggcattaggcgcttacagctctgtgcataacattaatgcggataaagcggcgattctgcctgcggcaatttcttttgagcaagctgcggcatccttcctgaaaggcttaacggtttattatctgctgcgcaaaacctatgaaattaaacccgatgaacaattcctgttccacgcagcggctggcggcgttggcttgattgcctgccagtgggcaaaagcccttggcgcgaaacttatcggcaccgtaggaacggcgcaaaaagcgcaaagcgccttaaaagccggagcatggcaggttattaactatcgcgaagaaaacctggtcgagcgattgaaagagatcaccggtggtaagaaagtgcgcgtggtgtacgattcagtgggcagagacacctgggaacggtcgctggattgcctgcaacgccgcggcttaatggtgagttttggcaactcatcaggtgcggttaccggtgtgaacttaggcattctcaatcagaaaggctcgttgtatgtgacacgcccttccctgcaaggctatatcaccacgcgggaggaattaaccgaggccagtaatgaactgttctctttgattgccagcggtgtgattaaggtcgatgtcgccgagcagcagaaatatccgctgaaggatgcgcggcgtgcgcatgagattctggaaagccgggcgacgcagggttccagcctgttgattccataa

SEQ ID NO: 15381 - DNA, 1338 bp, Escherichia coli
atgagtcattcaatacagcaacagtccctggatgcaaaaaatgatttagaaaaaatcattgtaacaaaaacaaccaagaaacttgttccactgatggtattgatgtacatcgtggcgtatatagatcgtcagaatatcagttttgctaaattacaaatggtagatagcctgggctggagtgaagcagcttttggcctcggcgcatcactttttttcatcggttatttggtttttagcgttcccggaaatttaattttatcgaaggtaggtgctaaacgctggttcactattagcctgttgtcatggggagttattactatggcgctggcgtggaccgaaaaaatgtcaacattttatactttgcgttttattcttggtgttgccgaagccagcttttaccctgggctaatttactattctaccaaatggttccctttaaagtatcgtccacgtattgtcggctttttagtcaccgccagcatggtggcaaatatgattggtgccccaattaacggctcactgcttagcatgcacggctttatggggctggaaggatggcagtggttattcctggcgacgggggtgcttgcacttctgctgattgcccctgtgctgctatggtttccgcaaggaccggaacaggctcgcttcttgaatgcggaagagaagagctggttgattaaaaaactggccgccgaacaggatgccaacaccgataaatcggtcaatagcctgggtaaatcgctgaccgactggcgtgttctggccctcgcgctggtatacgggttcatctgctttggtgcctacggtatcagctactggatgccaactattgttaaaacgttcggtgcctcggatatgatgaatggtctggtcaatatgatcccatgggcgatggttatcatcatgctgcgctggataaccagtaagccagaacgtaccgagaatccttatattaatgtcgcattacctatgttcaccgctgcaatatgtctgctgctctcggtctggacattcgcccagccggttattagcttcatctgtatttgcggcgttgtattatcagtatttgcaattcaaccctgcttctggaatttaacgaaatttctttcaggcgcaacggcggctgcaggcattgctattattaattcactggcaaatctggggggatttttcgcgcaaaacaccatccctctggtacgtgatttagaaaaaagcgactcggcaccgatgttatatttaagcgcggttatgctaatcggcgggatcgtcacaatattaattgtccgctggttaaagaatatagctatcgtggacgccaaacccgttactctgtga

SEQ ID NO: 15382 - DNA, 960 bp, Escherichia coli
atgaagaaaatagtagttattgaacctggatatttaaattattctgcagaagaaaatattttacaggattgggatccgcagtttgttgttgttccagcaaacgcttcactggaagaaaaactgcgccaggtaagcaatgctgacgccatcatggtccgcgaagcaaccgtcagtcgccctatgattgaagcgatgcagcaatgccgcgttatcgtgcgctatggcgtcggtgtagacaatatcgatagccaggccgccaaagaaaaaggtatttacgtcgctaacgtaccagactacggctcggaagatgttgctgagcacgctctggcgttactactggccgcaacacgccgtatcgccacccgcaaccgtgatgttcgcgatggtcagtggggaattggccagcgcgaacctatgttccgcttggcgggaaaaattctcggcgtcgtcggttttggccggatctcccgctgctttgtacaaaaagcatcagggttcggctttaagcgcatcctggtagttgatccgctacttaccgatgaacaggcttcacaagcaggcgtgacgcgagtcaatctcgatacgctgtgccgtgaagcggacttcatttctcttcacgccccgctaaccccggacacccatcatcttatcggtgaagccgaactggccaaaatgaagcccagcgccgtactggtcaatacctcacgcggcgggcttatcgatgagcaggcgctgatcaacgccctgctacaaaagcgcattttcgccgccggactcgacgtttttgaatccgaacccctcagtgcaaaaagtccattgctgcaaatggataacaccttatgtacggaccacaccgcctggtttaccgaagagtcggtggtcgagttgcaaagtaaagccgcgcatgaagtgcgtcgggcgtttgaaggcgagcatccgcttaattgggttaatccataa

SEQ ID NO: 15383 - DNA, 657 bp, Escherichia coli
atgtacagcaaaaatattatcgacggttttcgcactattttttcgaccgcttctgtcgctgacgcctgcgatcagatcctgggcaaaacgatgttcctgccttttgaaatcaaaaaccgcatcaacgacaaaaaaatcgttggcccggccgtcaccatttatgaagacgtcactgacgaaaaactgccaccgcagcatgcgctggacgccattgacgaatccgccagcggttcggtcatcgtcattaccggaaatccgtcgctggaaaccgttgccgtctggggcgggctaatgaccgccggggctgttgccaataaacatgaagctgcagtgttgaacggcggcgtacgtgacctggcggagatccgtcgcgattacgatttcccggtttacgccaaaacggtaaccccaggcactacgcttggtcgtttcaaaacaatttcagccaatcagcccgtcaccatcggcgatgtcacggtgaatccgggagatttgattgtcggggatatcgacggcgtggtgtgcgtaccgcaggcggtcgcagcagaagtattagcactggcacaatccattgatagccgcgagctggaacaggccaaactgattatacagtctggttctctgcgtgaaggcctggcgaaatacggccgaatctaa

SEQ ID NO: 15384 - DNA, 939 bp, Escherichia coli
atgaagcagttcgatattctttcatttggtgagccgctttttgaattcaatcagcttcccacagagcattctgagcagcattatctcagcggatttggcggtgatacatcgaatttcgccattagcgcggcgcgacaaggcgctaaagttgctatgttaacccgacttggcgacgacatatttgggcagaaattccgcgcattatgggatgaagaaaaggtcgatcatcaatgggtttgcacgcataaaatggccccgacggggatctattttatttctcacaatgaacaaggccaccactttaccttttatcgtaaaggctctgcggcctctacgatgacggtcgatgatatcaatgagtccgcgattgccgccgcgcgcttatttcacagttcggccatcacgcacgccattggcaataacgtcagtgatgcgctttttcacgctattgaactgtgccaaaagcaccaaacgctgatttccttcgacaccaatctgcggctcaaactgtggccgttagcccgcgcccgcgccatcatccatgaaacaatacgccacgtagattactgcatgcctagcctcgatgaggcccgtttgctaaccgggaagcatcatgcagatgaaattacggatttctatctccagctcggggcaaagaatgtggtgttaaaaatgggtgcggaaggcgcgatgttcgccaatgagaacaggcgaatcatctactctggccataaagtcgccaccgtcgacgcgaccggggctggggactgcttctcgggtgcttttctttaccgcattatcaaaggtgattcgccggaagaggcgctgtgctacgccaacgccgccgctgcgctgacaacaaccggttatggcgcagttgcccccattcctcgccagtcacaagttgaaatcttgatccagcaaactcaattacagtaa

SEQ ID NO: 15385 - DNA, 660 bp, Escherichia coli
atgccggaattttcaatcaatatgacaacggacttactcaaagacgttatttatcgtcgtatcagagatatgatcatcaacggcacattaccgatgggctgtaaaatatcggaatcagcgctggcaactcgtttatcttccactaaagcgccggtacgcgacgccttgagacgtctacaaagcgaggggctggtacatatccgcccgaaaagcggaacctttgtttttaacctgagcgatattgagtttaacgggctgctggagtttcgttattttgttgaggcaaaagcgctgaggctgtccctgcatcgcaatcagcgccaactggtacaagcattatcctcctatctcgatcacatgacgttttgtctggaaaataattccacacatgaatatattcgcctcgataatctgttccacgaggcattattcacctattgcggcaatgcctatttacagcaatcctacgtgcttatttctgcgcagatggcgacaatccgcaattatcttggcagtaatgacgaacatatgcatcgttctcatcaacagcatgtcgcgattattcaggctatccaggatgcggatgccgaaaaagcgctccaggcgctgcaagaacatattcttccggaaaaaggcgcttattggggacagttcggctaa

SEQ ID NO: 15386 - DNA, 1476 bp, Escherichia coli
atggctaactacttcaatacactgaatctgcgccagcagttggcacagctgggcaaatgtcgctttatggggcgcgatgaattcgccgatggcgcgagctaccttcagggtaaaaaagtagtcatcgtcggctgtggcgcacagggtctgaaccagggcctgaacatgcgtgattctggtctcgatatctcctacgctctgcgtaaagaagcgattgccgaaaagcgcgcatcctggcgtaaagcgaccgaaaacggttttaaagtgggtacttacgaagaactgatcccacaggcggatctggtggttaacctgacgccggacaagcagcactctgatgtagtgcacaccgtacagccgctgatgaaagacggcgcggcgctgggctactctcatggttttaatatcgtagaagtgggcgagcagatccgtaaagacatcaccgtagtaatggttgcgccgaaatgcccgggcaccgaagtgcgtgaagagtacaaacgtggattcggcgtaccgacgctgattgccgttcacccggaaaacgatccgaaaggcgaaggcatggcgatcgctaaagcatgggcggcagcaaccggcggtcaccgtgcaggcgtgctggaatcgtccttcgttgcggaagtgaaatctgacctgatgggcgagcaaaccatcctgtgcggtatgttgcaggctggctctctgctgtgcttcgacaggctggtggaagaaggcaccgacccggcatacgcagaaaaactgattcagttcggttgggaaaccatcaccgaagcgctgaaacagggcggcatcaccctgatgatggaccgtctttctaacccggcgaaactgcgtgcttacgcgctctctgagcaattgaaagagatcatggcgccgctgttccagaaacatatggacgacatcatctccggcgaattctcctccggcatgatggctgactgggccaacgacgataagaaactgctgacctggcgtgaagagactggcaaaaccgcattcgaaaccgcgccgcagtatgaaggcaaaatcggcgaacaggagtacttcgataaaggcgtactgatgatcgcgatggtaaaagcaggcgttgagttggcgtttgaaaccatggttgattccggcatcatcgaagaatctgcttactatgaatcactgcacgaactgccgctgattgccaacaccatcgcccgtaagcgtctgtacgaaatgaacgtggttatctccgatactgccgagtacggtaactatctgttctcttacgcttgtgtgccgctgctgaaaccgtttatggcagagctgcaaccgggcgacctgggtaaagctattccggaaggtgcggtagataacgcgcagctgcgtgatgtaaatgaagcgattcgcagccatgcgattgagcaggtaggtaagaaactgcgcggctatatgacggatatgaaacgtattgctgttgcgggctaa

SEQ ID NO: 15387 - DNA, 984 bp, Escherichia coli
atgaaaaatattattgattttataatttatctttcaggaaaacattttattactatagcaacaatgtttatagccatttttttagtgcttttgtttttgttttcaaatgttcaagcttcatcattagcactattagaagttataagcgagaaaaagaggttctttttatacttgtcagtttttgcgacattccttggcattttttttactgcgatgacctcttatctaaataaagggattggcggtagaagtattgaaagaacgagccatattcttcacaaggagatattgagattacatagaaggttgactgaggttgaagaaaagtcgtcttctggggtttcagttgaattaacggaaagcgaaagaaataaattaatatccgatgcaaaaaaaagaataattggaaacacaatactcttggcagatagtagcctaaagaccgatatatcaaattttaagaaaagctatagcttacacaaactccatactgatatggttctaagattagagtccgaaattgacaggctcaatcgacgaggtggggttaaccttgcaatcggaactacaattgcgttaacagggatattattccttgcttattttctttacagcgctccagccatagtagatggtttggacttttttattcatcaccttcctaaattgtcatttgtaattgttgttgagctgtttgcttatttctttctgcgtctctataaaaatgggtttgacgagattaaatattttcaaaatgaaattacaaatattgagatgaaagttatgtcattaaaatatgttcaagagttcaagagcgaagatatgataaaagagttggctatgcacttgatgaagacagaaagaaatttcatattagaaaagggacagactacagtttctattgagaaagatagactgcagaatctttcagattcaaagctaacaaacataatatcggaaattatcaagctaaaacaaaaatga

SEQ ID NO: 15388 - DNA, 933 bp, Escherichia coli
atggaaatcaacaaagaaaaattgtcaggtttacttaactacttcgagtctcgcaagaaatacgctgcaactcgaatatctagtttatccagtcagaatgagatctgtttcgctttgtcaggattgacgtttcgaaacgggccttatgttttccaagacgtaggtgaattaagggaggtacttcatccaccaggagagatagagttagccaaagcgcttaagagcaagtcgctactcagcgctgttgctcgtcatatgcccgcagttacgcatgagcttgcgttgcaaagcagtgagtcgaaattttctcaatcagacctgactatcggatggtggatcatatccgcgatccgatgccgcacactcaccgatatacttgttcctgcagtagcaagtgcatcttgggatgtattccctgctcttcaagccaactcgtgtgaagtccaacttcttgaggacgtgccggcagttcggagaataagcccaagtgtagagatatcagtagagtctctcgactgggttcaagagaatctcaagcgttggatagatttgctagagcaaccagcattccggctcgctattgattctttaacaactcataaccaacacgcgaatttgagaatggctgctgctgctttatgggcaggatttgaagcgctctttggaatcaattcagagcttcgttttcgtcttgctcttatggctgcagcatatcttgaggagcgagggcctgatcgtttagccacctatcgtagggttaagaagctgtatgactaccgttcgaaggcagtgcatgggggagctacgtcagataactttttagttgagcatataattgaggtacgagtgcttttatcccgattagtgtgtcgcatgacagagatcggaaaaatgcccacaaccgacgattacgaggaacggcttctaacttaa

SEQ ID NO: 15389 - DNA, 177 bp, Escherichia coli
gtggtcaaagcaccaactaaaaaagccaaagcaaagaaaagctctgaagaaacattatgtgataccgcaaaccaatttcgtggtagcgttgagtcctccgaatacaagcacgtggtgttaagcctcgtgctccagaaactcatcagcgataagtttgaagcacgccgcaaaaaatga

SEQ ID NO: 15390 - DNA, 1104 bp, Escherichia coli; identical to SEQ ID NO: 1012

SEQ ID NO: 15391 - DNA, 1164 bp, Escherichia coli
gtggaacagattaattcaaataaaaaacattctgacagaagaaaatattttgctttgttagcggtagttttatttattgcgttttcaggtgcctatgcctattggtcaatggaattaaaagacatgattagtacagatgacgcctatgtcacgggaaatgcagatccaatttctgcacaagtctcaggcagtgtcactgtcgttaatcataaagatacgaactacgttcgacaaggtgacattttagtttcactggataaaactgatgccactatcgcactcaataaagctaaaaataatctggcaaatattgttcggcaaacgaataaactatacttacaggataaacaatacagtgccgaagtcgcttcagcacgtattcagtatcaacaatctttagaagattataaccgtcgtgtgcctttagcgaagcaaggggttatttcaaaagaagcgctggagcataccaaagatacgttaataagtagcaaagcggcattgaatgctgctatccaggcttataaagcgaataaagctttagtaatgaacacaccattaaaccgtcagccacaagtcattgaagctgcagatgcaaccaaagaagcctggttggcgcttaaacgtacggatattaagagtccggttaccggttatattgcccaaagaagtgttcaggtcggcgaaacagtgagtcccggacaatcgttaatggctgtcgtaccggcgcgtcaaatgtgggttaatgccaactttaaagaaacacaactcacggatgtacggattggtcaatcggtcaatattatcagcgatctttatggtgaaaatgttgtgtttcatggtcgggtgacagggatcaatatgggaaccggcaatgcgttctccttattacctgcacaaaatgcgacagggaactggatcaaaatcgttcagcgtgtaccggttgaagtttctctggatccaaaagaactcatggaacaccctttgcgcattggtttatcgatgactgcaactattgatacgaagaatgaagacattgccgagatgcccggtctggcttcaaccgtgacgtccatgcctgcttataccagtaaggctttagttatcgataccagtccgatagaaaaagaaattagcaacattatttcgcataatggacaactttaa

SEQ ID NO: 15392 - DNA, 918 bp, Escherichia coli
atgccagccaaagtatgggttttaggggatgcggtcgtagatctcttgccagaatcagacgggcggctactgccttgtcctggcggtgcgccagctaacgttgcggtgggaatcgccagattaggcggaataagtgggtttataggtcgggtgggggatgatccttttggtacgttaatgcaaagaacgctgctaactgagggagtcgatatcacgtatctgaagcaagatgaatggcaccggacatccgcggtgcttgtcgatctgaacgatcaaggggaacgttcatttacgtttatggtccgccccagtgccgatctttttttagagacgacagacttgccctgctggcgacatggcgaatggttacatctctgttcaattgcgttgtccgctgagccttcgcgtaccagcgcatttacagcgatgacggcgatccggcatgccggaggttttgtcagcttcgatcccaatattcgtgaagatctatggcaagacgagcatttgctccgcttgtgtttgcggcaggcgctacaactggcggatgtcgtcaagctctcggaagaagaatggcgacttatcagtggaaaaacacagaacgatcgggagatatgcgcgctggcaaaagaatatgagatcgccatgctgttggtgactaaaggtgcagaaggggtggtggtctgttatcgaggacaagttcaccattttgctggaatgtctgtgaattgtgtcgatagcacgggggcgggagatgcgttcgttgccgggttactcacaggtctgtcctctacgggattatctacagatgaaagagaaatgcgacaaattatcgatctcgctcaacgttgcggagcgcttgcagtaacggcgaaaggggcgatgacagcgctgccatgtcgacaagaactggaatggtga

SEQ ID NO: 15393 - DNA, 300 bp, Escherichia coli
atggcttgttcaacattcaaccctttaacgttacagaaataccatccagaccctgaagatttatgctcactgtgtggcggaaatcatggtaaagccgccatgatcgaatgtaaggacaaaatccacatatgccttaattgcgttgatatcctcgttgatatcaaaaatgaaagagaagataaaaagcgtagcgaggctattcgcgccttagattcatggatgcgagatgggtatagtgctgcgcaaatttatgacttagcaatatcaaaaggcgaaataccaggtgtgcgaatcgaataa

SEQ ID NO: 15394 - DNA, 384 bp, Escherichia coli
atgacaactttaaccgacaaagaaatgattaaagaaatcaaagagcgcataggcagcctggacgtgcgagacaatattgagcgccgggcttatgaaattgcgctggcatcgctggaatccgaacctgtaagccaaacttacaagttgaacgagctgtcgggcaactctccggtaattccggatggttggataagctgtagtgagcggatgccggaagaaacgggtgacattattgttgtttcggatggcattgtaatgtccgggatttcttattctcgtcgtgacgggttctatatagccgcattggagtacgacgacgatgaaccaattggcggtgtaacccactggatgccactaccagaaccgccgcaggaggtgaagtga

SEQ ID NO: 15395 - DNA, 516 bp, Escherichia coli
atggcgttaacacaccgcgaactctgtcagattgcgtacaagttccttaagcgcaacgggttcaaggtttgctttcatgaccgctttatagctgtaaccagtaccggagaacagccagatgctatgggattcagaaattcagcatcatgcttgatagaggcgaagtgttctcgtgctgacttgttggcagatagaaaaaagcgtttccgtaaaaatccgtctcttggaatgggcgactggcgattctttattagtgagccgggaattatttcagttgaggatttacctcccggctggggattacttcacgttgttaacggaagagtacggaaagtacatggatggcccaaggggaattgctgttggggtaatcctgacgataagccatttactgggaataagcaggttgaatgcgattacatgttatctgcattaaggcgcatggagctaagaggacaccttaatgaaatatatgacggtgtaattgttaataagaaagaaggaaacgcggcatga

SEQ ID NO: 15396 - DNA, 525 bp, Escherichia coli
gtgagcaagattgattatcaaaagcttcgtgaaattgctgaaaaaacaaaaattgctggtgaagcacctgtaatgcctttcgatcagcgaattaatgcgcttaacgattttatgaagcacttttcgccagatatcgcgctggcattgttggatgaacgggaaaggaaccagcaatacatcaaatcccgcgaccaggagaacgaggatattgcgctaacggtagggaagctgcgcgttgagcttgaagcagaagagaaaacatcagcagctagacttgaggcgctcgaccgcacccacaaaatgttccaacgggaacaatgcagggcagaggccgcagagaagcgtattgctgaactggaagcgcgggaagttcaattaccgactcgctacgaccttcgatatggacacccgataaatgcagatgagcgacatgtcatgatacctaaagaaaatggcagttggctttacctgattgacctagaacacgcattacgcgtcgctggcattcgcatcaaaggagagtga

SEQ ID NO: 15397 - DNA, 549 bp, Escherichia coli
atgaatcacttaatggttgaccttgaaacaatgggcaacggaccatacgcgccagttatttctattggggcggtgttctttgacccgaataccggagaaacaggagaagagttctcggtaaatatctcgcttgagtcatcaatgcgatatcgggcgcgtcctgacgcttcaacgattttatggtggatggaacagagtgaagaagccagaaaatcgctaaccagcaacactcaggagctttcaacggctctttcatggttatctgaattcatcataaagaacgctaaccacaaattcgttcaggtttgggggaatggagcatcatttgactgcgttattctccgcaacagttattcgctgacagggcagccagttccgtggcagtggtggaatgaccgcgacgtaagaacaatcgtcgagcttggaaaggtaataggattcgaccctaagcgagatatgccattcaaaggaactcgccacaacgcgcttgatgatgccatccaccaagccaaatacgtttcagcaatctggaaaaaattagctaaataa

SEQ ID NO: 15398 - DNA, 624 bp, Escherichia coli
atgtcatcaatccgcttaactacgagaatgaaagagaaaatcgctcgtaacgctttaattaagtctggggttttcactgaacttgaagaagtaacaaagttaaagaaccagcttgcacttgacgccagagttattgcgtttggcggtaaaaagaaaactgaggaagtggatcagttatcatccaggttagtagctataagtgaagaacttgaaaagatgggatgttcattttactcatacgatgttcgttctacttcaatttatctgactgtatctggcagaagggttggatggcattcatatgggaaagacggcaacggcgaagatatattgctccctactccaaccaaagataaatgcatgtttgatgcagaacacgaaataacaaaaaggtttgatgaaatctgcgcattgcaacaaaaacttgaagccaagaaaaaggatatcgaatcaaatgtatgggctgctttgaactcagtcacaacagttaagcgacttattgaagtttggcctgaaagcaaagaattgctaccaaaagaagcagacaaagcaagtacagcacttcctgctttacgggtagaagatttgaataagatgattggacttccttccgagtccgcatag

SEQ ID NO: 15399 - DNA, 300 bp, Escherichia coli
atgacagtagtcattacatatctggctgacgataacgccagaaatcgccgcagagcacgcagacaggctcaacgtgaacaggcaatgcaagagcagcgactggcgcgaaagattgcgctaaagctctctggttgcgtcagagcagataaagcagcatcactcggaagccttcgctgcaagaaggcagaagaagtcgagcgtaaacagaatcgtatttactaccgcaagccacgcagtgaaatgggtgtgacttgtgttggtcgccagaaaatgaaattaggcagcaaaccacttatttga

SEQ ID NO: 15400 - DNA, 279 bp, Escherichia coli
atggaacttacaagtactcgcaagaaagcgaatgcaattacaagcaacatcctgaatcgaattgctgtacgtggtcagcgaaaggttgctgatgcattagggatcaatgaatcgcaaatttcgcgatggaaagacagctttatcccaaagatggccatgcttctggctgtactggagtggggtgttgaagacgaggagttggcggaactggctaagaaagtagccagaatgctgacaaaagaaaaagccccgaagaactgcgaattcttcgaggcctga

SEQ ID NO: 15401 - DNA, 861 bp, Escherichia coli
atgagtaatcttgcaaccgtaacacatttaaggccttcacaacggcctgtggagcgtcgtgtggcagaagttgaagatggttatacccgtcttgcaaatgccctgtatgaagagcttatcggcgcagatttaacgaaaaatcagagcaaggttgcccacgccatatgccgtaaaacatacggctacggtaaaaagatggatcgcatctctgatagtcagttagctcaaattaccaggctgccaagacagaaggtaaacaaggccaagaatgagcttatcgcgatgaaggttatccttcgcgaaggccagcaaatcggtcctaacaagaacatcgaggaatggcaaatagaagggtgtcactactctggtgataatgtcactacattggtgacaaaaagtgtcaccaaaacggtgacagcgctgtcaccaaaacagggacacacaaaagaaactattacaaaagaaaaaagaaataataaaaacactatgtccgaaagtgttcggacggagtgtgaaaaatcacatgaccgtcacgaagaaaccgacaaggcattcgaggaagtattctggtgtgcaggcatgcggaaagccgggaagaaaaacgcagcttcggcattcagaacacagttcagggaatggcgtaaaactaccaggggtacggcaagcgagtttgccacgatgctggcagaagacatcgcatgcaggaatggtaagcagttcggattcgacaggttgttaccatcgagctacctgaacggtcaacgctggaacgacgagaagccagaaactattcaaccacaatccaaaccatcatccgcaatcaccgtatcgaaaactggctacgtgtttttcgacaggtga

SEQ ID NO: 15402 - DNA, 276 bp, Escherichia coli
atgtttagaagcaaaaaatggcttcaggcagtcagggatattgaattttgcgttctttgcggaagatacggagttcaggccgctcacagaaatgaagggaagggggttgggattaaagtagatgattgccttactgctgcgctatgtgttgattgtcattcaagaattgataatgggagagatatgagcagggaagagcgaagggctgaaatggatcgggccattgtgcttaccctcaaaaaattggttaacaatgggagggtgtttgtccaatga

SEQ ID NO: 15403 - DNA, 180 bp, Escherichia coli
gtgagccgcgtaatcaatttgggtaaggagaagaaattcccaattactcaagagctatacgatcggctggaaagcgtcattcatgattacgatggtgaaatcagtttatgtgaggcgattggcacactcgaattgctaaagcagtcattgattgaaagcgcgaaagagtcctcagcctga

SEQ ID NO: 15404 - DNA, 537 bp, Escherichia coli
atgtcatttattaaaactttttccgggaagcatttttattatgacaggataaataaagacgacatcgttattaacgatatcgcggtttctctttcaaatatctgtcgctttgcagggcatctttcacatttctacagcgttgcccaacatgcggtgctttgcagccaactggtaccgcaggaatttgcttttgaagcgttaatgcatgatgcaacagaagcgtattgccaggacatcccggcgccactgaaacgccttcttcctgactataaacggatggaagaaaaaatagatgcagtaatccgtgagaaatacgagttgcccccggttatgagcacgcctgtgaaatatgccgatctaatcatgctggcaaccgaacgccgtgatctcgggcttgatgatggctctttatggcctgtactggaaggtatcccggcaacagagatgttcaaagttattccactggcaccgggccatgcctacgggatgtttatggaacgcttcaacgagttatcggaattacgcaaatgtgcataa

SEQ ID NO: 15405 - DNA, 879 bp, Escherichia coli
atgtgcataactcatgtagttagtttttctggcgggagaacatccgcatatcttgttcacctgatggaagaacaaagaaaggctggcaataacgtctgctacatctttatggataccggttgcgaacatccgctgacataccgctttatccgggaggttgtgaagttctgggacataccactaactgtgttacaggtcgatataaatcctgagcttgggcagccaaatggttatacagaatgggagccaaaggatattcagacacgaatgccggtgcttaaaccgtttatggacatggttaaaaagtacggcacgccatacatcggcggcgcgttctgtactgataggctaaaactcatccctttcacgaaatactgcgataaccatttcgggcgaggtaattacatcacatggctgggtattcgtgcagacgaaccccgtaggctgaaaccgaaatcgggcgtccggtatcttgccgagctgtcagattttgataagtcggatgttatccggtggtggcgaaaacaaccttttgatttgcaaatcccggagcatctcgggaactgtgttttctgcatcaaaaagtcaacgcaaaagctggggcttgcatgtaaagacgaaccaggtctgatgcgagtttttaatgagctggttacaggcaaacacgtcagggatagtcatcgcagaacaggtaaagacattatgtaccgtggtcacctgacgcttgacggaattgccagaatgtctgccaacagcgactacagaaatttgtatcaggcgatggtacaggccaggcgattcgataccggctcgtgttcagagtcatgtgaaatctggggtgatcaattggaattggaattcaaagaggtaggggtatga

SEQ ID NO: 15406 - DNA, 330 bp, Escherichia coli
atgttgcagcagctggtggcgatgaacgcgcgactgaagagcgccgcgccggatattattgcggcgcgaaaatccggcacgacaacgccagcacaggtatcgcgggtcatcagcgacagagcttccgcgcactcagtggtcattaagcgaatagccgagcgtggggagaatattcaggtctggatagatccggtggtgtttaatgacctgctgaactggttaaaagcactggatgaaaaatatgcgctgtgggtgacacaaattgatgtcagcgcaggtgagaagccagggatggtgaatgtgcagcgactggagtttgggcgggggtag

SEQ ID NO: 15407 - DNA, 168 bp, Escherichia coli
atgttacgcgataaatttattcactattttcagcaatggcgtgaatgccagttaagccgtggcgaacactggctgacacaacacctggcggggcgttctccgcgtgaaaaaggcacgttactggcagcggtagtgccggatattacgtcctcatctggcagccgttga

SEQ ID NO: 15408 - DNA, 504 bp, Escherichia coli
atggcttttaataaagatcaggattactgggcgaatatatttgttacaccagattttttgagtgttgaaacttattcaggattaggaatgacaggcagagatccattgttttcaccacgtttattacagcctgatgtagatgataaaagcctaggtgaggagatcctacaggcattgtctgacagccgtacactagatgttttggaagagcgagtagcttttttcgatcttgaaaaaagtaaagagcaatatgcagcttggatagctactctgatggagaagtatggttatagaactaaacgtgcattatttaaaaacatgaaaaaagttggtatccatctggtaaatgatgttatcacaacccggccttcattccatgaaaagctggaagcatggagtggtaacaggatcaatgaatctgactatgtggtgcttcctgcagacagttccccaaccgaaatcggctcaggtcttcgcctggccttgagtcgctgcaaaggttaa

SEQ ID NO: 15409 - DNA, 270 bp, Escherichia coli
atgcacaaaaataatgaattttatgtttgtcgggtatgtggtgctgaacagccagaagcaccatggggagatgatggtgagacaccaacatacgatatatgtaattgctgtggggttgaatttggttatgaggattcgaccgtgcaaagtataaaaaaatatagagcaaaatggttagacagtggtgcgaaatggatgaataaaaaatcggaaccacaaaactggtcggttgatgaacaacttgcacacatcccactgaaatatcgttga

SEQ ID NO: 15410 - DNA, 528 bp, Escherichia coli
atgactaatttattcaagaagctttttggcagaaagaataaagattccagtgctaacacagcaattctttcagagccagatctcacaattgcacgagcgaataacgaaatgcagttactcacacaagccgctatagaaatgtggggacttgatactgctgcgtgggatgttgatcttaatacaggtacaatcaccttcaccaatgatgaaaaagagatcatggtcacagcacctgttcaagtggttggcacttacgatactgaagacagcacctggttatgggggtgggaccatccgtcagtcagcgagtcacttggagaatatgcccggcgcgtgcacgactttggtgagcaatatggcaaagaaacactaaccacacgcaaaattgctgcgtctatggatgatgcctgggaatttactgctcttgcctgttatctcggcgatggacagggaggttataggggagtatctggttcaacttgtgtttttatggtctatggtccagtgacactcaacaaaaaggattaa

SEQ ID NO: 15411 - DNA, 780 bp, Escherichia coli
ttgtctccgaatattattgttccgactcttgccgacagaggggtttatatcgcgtcagaatcaactttttatcgcgtattaaatttagctaaccaactgataaggagaacccgtgaacaccaatataagcggcctgaagtactcaaagctgtagcccccaaccaggtgtggagctgggatattagttatatcccatcgtgggttaaggggcagcatttttatctctatatgatcgtcgatatttatagccgaaaaattatagctgccgaagtatttacgaaagaatctgggcagtatgcggcagaactgcttcaacgtgctatatggaatgaaaaatgttcatcccgcaatctcgtgcttcattctgataacggaggaccaatgcgcagttgtacgttactggcaaaaatgtacgctcttggcgtattaagttcttattcccgtccccgggtcagcaatgataacccttattccgaatcgctcttccggacgattaagtattgtccatggtggccagagaatggttttcgaaccatagatgaagccagaagttggttaagcaggttcatgcgatggtacaacctggaacacaagcacagcggtattaagtatgttactccggatgaacgccatcgcggaattgacgtacaaatactggaagccagaaaaaaagtttatcgcgaagctcgcaaacgtcatcctgagcgctggagcaaacagttgcgtgactgggaactcattcaggcagtttatctgaatccagaaaaagaagcggcataa

SEQ ID NO: 15412 - DNA, 144 bp, Escherichia coli
atgcaaactccggagaattgcatacatcaagtattcttaatctttctgtttctgacagtttattccccggggtacgccttgatgcacctggtctctgatctgcatgaaccacaccaccctgcatccaacgttgaagtgttctga

SEQ ID NO: 15413 - DNA, 513 bp, Escherichia coli
atgcccgcacatgcagtaccaattgatataaaagaacaaggtgttacctggttattaccaccttatagttggtccatacggcatattgctcgtaaactggacctgagcccttcagtaatagcaagatggagacttgaactggtgcaacaaggcctgttacctgaaaatgaaaaaatatcttctgtcgatggaaatgaatggacaccggagcgacgattttctgttgtaattgaaactgcaacattatctgaaatggaactggctgattattgtcggagaatggggttatttgttgagcaagttaaagaatggagagctatatccattcaggctcatgaaatgaaaatggcagaaagtcgccgtgctgataaagaattacgcgaagcaaagacccggttacgggaactggaaaaagaacttctccgtaaagataaagctctggcggaagcagctgctcttttgatgttaagggaaaagttcaatgccctctgggacaacagcgaggaaggctga

SEQ ID NO: 15414 - DNA, 138 bp, Escherichia coli
atgtggttacttggtgccggagcaaatgccgtgatgcagtatgcagatagtggtgaaataaactcggtcaactcagtggcagcaggttggataaatgcgataaccatggggcagggctggaaagggacaatagcctag

SEQ ID NO: 15415 - DNA, 255 bp, Escherichia coli
atgctctctggctttttccgtctggagccattcactgccacccagctggttattctcaacattcacctacaggtgaacagcctccaacggttcaacataacgcaaattatgtatagttcagaacaacgaaccaagcataatttgcgttatgtctggaacccaacagatgtttgcaactgtactgtctgcgttatatcaaaagtcactcagagtcaggcggtgttttccttgatttatatctggctatcagtttag

SEQ ID NO: 15416 - DNA, 255 bp, Escherichia coli
atgagaattttgtggaattatttaactctccttctgtactgctgcctgttttttacaatagcgttacttggagtcggtttggttgtatctctgtttttttctttcaaaaatgagttttttttatttccaatcaatcaaataaaaagggctgtttattttggtgttattaccgggttaactgcatgggttgggattgttttttctaaactgatagccagatataaatcaaggaaaacaccgcctgactctgagtga

SEQ ID NO: 15417 - DNA, 1293 bp, Escherichia coli
gtggggcttatcagtgacataggcagtcaggtggcggatattgccagaacggaaggacagatagccggtgagaaagcgaagcgggacccggcagctctgaatcaggcccgcgcagagcttgaggcagcaggaaagccgtttacggaacaggatgtggcacagcgggcctacaataacggcatggcggcctccggttttggaacgggaggcaaataccagcaggcgatacaggccgcaacggcagcagtacagggactggccggtggtaatctgagtgcagccctggcaggtggtgcagcaccgtatctggctgaagtggtgaaaaccatgaccacagacccggttacaggtgaggtgaataaggctgcaaatgtggctgctcatgccgtggtgaatgctgcactggcggtggcacagggtaataacgcccttgccagtgccgcaggtgcagccaccggtgaagtggttgggataatagccacacagatgtacggtaagccggtgagtgaactgagcgagacagagaaacagacggtctcaacactggcaacggttgctgccggtctggccggtggtctggtgggagactcaggtgcttcagcggtagccggcgcacagtcaggtaagacaacggttgagaataatgcgctcagcttcggtgatggttttgaaagcaatgcagctgcggctacatcatggaacaagtacgcggtggacaataatctgacaccggaacaaacacaggctgggctggataagatagcgaaaggtgatatgccggacagtaccaatatcacgaaagtgatcgtggatggatatcaggatggtgtaatgattgccggggcatggtatctggggcctgctgcgtcagcaggtaaagttcttggtggcgggcttcttggactggcggccaatagtggttatcaggtctatgatttgaaccagccgcagaatgcgaataagtcgtgggactatctgggaagcgcgacctcatttacaacaggcatgatggctcccggtcgtggtgtccttgcgaacacaggtatcgcaatgggtggggcattctttactgatggtccaaatacagcttcactggccggggctggtattggtgctggtctgggtggggcatttgggaagtatgcccccacagccgtggggaaaatcttagggaatgatcctgttccgggctttatttatgagcttggcggtggtgctgtctctgagtttaccaatggaattatcaaggatttcaataatcctcaagctcctgaaaaaaaggaaaataaatga

SEQ ID NO: 15418 - DNA, 294 bp, Escherichia coli; identical to SEQ ID NO: 13522

SEQ ID NO: 15419 - DNA, 867 bp, Escherichia coli; identical to SEQ ID NO: 8957

SEQ ID NO: 15420 - DNA, 651 bp, Escherichia coli
gtgataaccgcactcatcaccgcgataggtccaggtgcaggtattagccagcatgatgcgccccggaaaaacggcaccatccgtttccgtcggtgtggacagtacaaaggaggcactgaccgcactcagttcgctgcactgctcgatgcgccagcggctgatcacctcctgctccggatcggcgtcgctgtttccgttgacgaagttcaccgcatccagaaaacgggcgtaaaccttacgcctgaccaccgttccgccgaccagactctgcagatcttccaccatcccggtgaccataccgtacaggttagaaaccgtcagcgtggggcgcgtactggtgcctttgccattcagttcaaaactactcccctgaatgggatacggctgatactgtcgcccctgccaggtgaccggctcacctttttcgttctgctcattacagaaaaaataacgttctccaccgacctctgtcagatcgatttcccagagcaccacgctggccgactgctccgcacgggtgcattcattcaatgtttcctgccggatatcctgcatcagttcaccacctgttcaaactctgcgctgaactcaacacgcagcatactgacccgcgacgaccattttgcgcaggtcacctttatctgcctgtaa

SEQ ID NO: 15421 - DNA, 330 bp, Escherichia coli; identical to SEQ ID NO: 8750

SEQ ID NO: 15422 - DNA, 741 bp, Escherichia coli
atgccaacaccaaatcctctggcaccggtgaaaggggccgggaccacactgtgggtttataacgggagcggcgacccttatgcaaacccgctttcagacaatgactggtcgcgtctggcaaaaattaaagacctgacgcccggcgaactgaccgctgagtcctatgacgacagttatctcgatgatgaagatgcggactggaccgcgaccgggcaggggcagaaatccgccggagataccagcttcacgctggcgtggatgcccggagagcaggggcagcaggcgctgctggcgtggtttaatgaaggtgatacccgtgcctataaaatccgcttcccgaacggcacggtcgatgtgttccgtggctgggtcagcagtatcggtaaggcggtgacggcgaaggaagtgatcacccgtacggtgaaggtcaccaatgtgggccgtccgtcaatggcagaagatcgcagtacggtgacggcggcaaccggtatgaccgtgacgcctgccagctcctcggtggtgaaagggcagagcaccacgctgaccgtggccttccagccggagggcgcaactgacaagagcttccgtgcggtgtcagcggataaaacaaaagccaccgtgtcggtcagtggtatgaccatcaccgtgaacggcgttgctgcaggcaaggtcaacattccggttgtatccggtaatggtgaacttgctgcggttgcagaaatcactgtcaccgacagttaa

SEQ ID NO: 15423 - DNA, 1500 bp, Escherichia coli
atgaatatcagaaaactgttttgtccgggaaatacaccccggattttattgtttttattcttttttgtcgtttctgcaataaccacaattgcatgcggatacactgagaagaatgccaccgggaatgtgttgctgctgttccttcttctgctccttgcacacagaaataccctcacatccattacagctctgttatttctgttctgttgtgcactgtatgcgcctgccggtatgacgtacggtaaaatcaacaacagttttattgtcgcgttgctgcagaccacaactgatgaggcagcggagtttaccgggatgattcctgtttatcattttctggtcagtgccgcgattcaggtattcatggtgattttctggcgaacacaccgccgtggtcaccgtaactggctggcactgctgctgttcgtattatgctcagtaaacagctggccgttgcggatggttaaaggaactgttgtggggacaactgacacattgcgtgaaatgcagcgttataaacaactgagtcagcacggggctgacaactggaaaatcctgccgggtgtaccgttgtatgacacgattgttatcgtcactggtgagagtgtgcgcagggattatatgtcggtatatggctatcccgtgccaaccacaccgtggctgaatactgctcccggtttatttattgacggctatacatcggcagcagccagtaccgtaccttccctgagccggacactgatttatgactatgagcagaaccctgactccggcaacaacgtggtggcgctggcagcaaaagcaggatacagcacatggtggatatccaatcagggaaaactgggagagcatgacacacgcatctctgttattgcttctgatgcggagcataccgttttcctcaagaaaggcagcttcgcttcccgtaaaacggatgacatgttgttgttacaggaaacagaacgtgcactggcggataaatcctctccgaaggtgatattcctgcacatgatggggtctcatccgaacccgtgtgaccggcttcactcctggccgaataattaccaggagcagttcccccggaagattgcctgttacctcgccagcatcagtaaactggataactttctcgggcagcttgatggtatccttcgccggcattcccgtcattttgccatgctttacttttctgaccatggtctgtcggtcagcgacagtgctaatcctgttcatcatgatggtcatgtgcagggaggctacagcgttcccctgattattaccgccagtgacatcacgtctcatcagtccgtcagcagaaaaatcagtgcccgtcatttcgcaggtatttttcagtggctgaccggcattcgtactgaaaatataccgccattcaatccgctgacagacgaagataatgaactcattatggtttttaacggagacaggaatgtaccggcagacagtctgaaaccgcagcctctgattcttccggacagaagataa

SEQ ID NO: 15424 - DNA, 396 bp, Escherichia coli
atgaactatgccgttatagaaaatggtgttgttaccaatattgcggtatgggatggtgagagtgcctggcaaccaactaatgcgttagttatacctgtatccgataatgtaagaattggttggttctatgataagggaaagctttcgtcacctacgcagccgccaaaaacacatgatgaattacttcgtgaggcagagaatgaaagacagtgtctgctggatagtgctaatggtttaattatgaactggcagtcagatttgttactcggtattataagtgaaaataacaagaacaatcttttgttatggaaggaatatgttaataatttaatgtcagtggatttgtccttaattccagaaataacctggccagaaaggccagagataatacgttga

SEQ ID NO: 15425 - DNA, 1026 bp, Escherichia coli
atgacaagtaccgaaaacataacaagaaaaaaaatggatggagtaacaatattaagatttatagctgctttttatgtgtttatttttcacattaacatgagggtccctgttaattttggagaactgcttaataaaaccattagtaatggcgtcattggcatgagtattttcttcatgctttctggttttgttttgacttataattactatggttccttgtcaaagaattacttcaggaagcgaatagcaagaatatttccagcctatttattttgtgggcttttaacccttccatttttgttatccagcaatgcaagttttttaaaaatgattgcaagcatattcttgtttgttactggaatgcaatcatggatttatcagaccttcgatttttggaattttagcgggacctggtcaatatcagttgaattgtttttttatgccctgtttccatttttgataaaaagcatcaacaaaaataatgtaatttatgttttacttttttcatatttatcctcagcattattaatcccattgtctgatataatccagggacctgtagtttggtccgtatattatgcaactcccatatacagattaccagaatttgtggtgggcatctgtatagcaatactttttttaaatggctatcgtgttaaccattatacatggctattaagcattttattatttatgtatgctaccacccagcaaaacaataactccatgggggtaaactacctcacaattcctgcgatatcaattatgttattgcacctggcaaaaatcaacataaaaaataatattgcaaacagagcgatcatttactttggagatataagttattcgttttatttgatgcaattacctatattatattacctggatcataataaaaactcatttattcttaactatggtctttttagctggcttgtactttttgttattaatactgcaatggcatcattatcttatcactttctggagaagaacgataaaatcagaaaaataattacatcctga

SEQ ID NO: 15426 - DNA, 549 bp, Escherichia coli
atgaagttaaaattcatctccatggctgtattttcagctctgaccttgggtgttgcgacaagtgcgtctgccgcacctgctactgtcaatggtggtacagtccattttaagggggaagtggttaatgctgcatgtgcagtaaatgcaaattctttcgatcagacggttcagcttggtcaggttcgtacagaaaagctaaaagccgacggggataaaagtgctgctgttgggttcaatattgaacttagtgactgtgacacaaaagtctcaaatggtgcatcgattttattcagtggcacaactgttgcaactaagaataatgtattggctcttcaagggtccgcatcaggaactgcaacaaatgtgggagtgcaggttcttgaccatactggtagtgctgtaacgttcgacggaaatactccaacagctagctatacattatctgacggaacaaacaaaattccgttccaggctcgttatattgctactggtcaatcaacagctggtacagccaacgccgacgccacctttaaagttcagtaccagtaa

SEQ ID NO: 15427 - DNA, 507 bp, Escherichia coli
atgaaactgaaagctattatattggccaccggtcttattaactgtattgcgttttcagcacaggcagtggatagtactattaccatcactggtaatgttcgtgagcgtacatgtacagtaccgagtatctcggttaatttaggtgacatgtacacaagtgacttttcaggcagtaatgctgcatctgcatggcatgatgcagtattaaccttaactaactgtcagtatgtatcaagagttcaggcaacatttaatggaacccccgatgctacaaacgcaaattatttcaaaaatacagcaggtaactcacctgccaccggattggctattcagttagaggataaggattctccgggggccgtttataaatcgggagcacaaaaaacagttacagcatcaaatggttcggcgagtttcaatatgcaagtacgggccattaaaacagggaacagagtaacctcagggacgattcagtccgttattacggtcacatatacttattcataa

SEQ ID NO: 15428 - DNA, 549 bp, Escherichia coli
gtgcaaataaccgaagccttaatttcagagccgggagacatccggcgttttgttcagcaggcggtggaccactggccacatctgttggcattttactttacgctccattcggcagaaggaaacatcaacgggcaacagattcatgcattctgtacttccttttaccgacaggtgcacgaacgtattactgagcgtaatcacacggccagtccatcctcgccggtggtattacgctggttgcgggaacaacatgaaggagcaacaatacgatgcctgttgctgctcagccagacgagcatttgccatccgcgggccagtgccacggttgatgaagaatgttcgcaacgggtggatttattacaacagacctggaaggtgataagcgctggcggacaatgccaggttgaaaggtgttttcgggttgcccggggtgatacatccggtcagtatgtagcgttaaaaaccgtcgcattgtctctggggttaccggttgtgaccgccattacccatcgtccggtacagcgctgtacattgattacagctcagtga

SEQ ID NO: 15429 - DNA, 234 bp, Escherichia coli
atgagagaaatatcagataacatgcttgattctgtgaaaggagggatgaatattaatggattacccggttctactaatgtaatagatctacgtggaaaagatatgggaacatatattgatgccaatggagcatgctgggctccggatactccatccatcatcatgtatccgggcgaagatggaccttcttatagtataagtagttccacatccagtgcaaacagcggcagttaa

SEQ ID NO: 15430 - DNA, 1653 bp, Escherichia coli
gtgaggaacacgctgaaacaggccatcgtgctgtggggaatggtgttactgctggtgctgtggtgggtgtttgtcagtccgtctggcgtactgagatgggccggtgcagcagttatcgttctggcggttgccgcattgttgatttaccggcgcaggcagacgtggacggagatgaccggcgatgccgggttgttatcgctgccgccggaaacgtaccgacaaccggtagtgctggtctgtggcgatatgtcggcgcatctgttcactgacagcccggtccggcaggtttcagaagggctgtatctgcatgtttctgatgaagaacagcttgtggcgcaggtggagcgattactgacccttcgcccggcgtgggcatcgcagcttgccgtggcgtataccgtcatgcccggcatgtaccgggatgcggcggttctggccggacaactgcgccggttcgcccacagtatggcgacagtgcgtcgccgggcgggcgtaaacgtcccctggcttctctggagcgggctgtccggctcgcccttgccggagagagcgaattcaccgtggtttatctgtaccggagacgaagttcaggtagcaacatccacagagaacgcgatgcccgcgcagtggattgcacaatccggcgtacaggagcgcagtcagcgactctgttacctgctgaaagctgaaagcctgatgcagtggctgaatcttaatgtgctgacggcactgaacggcccggaggcgaaatgcccgccactggcgatggccgtggggctggtcacctcgttgcctgcggtggataacaacctgtggcaagtgtggatcaccgccagaaccggcctgacgacggatatcgcggacaccggcacagacgccacgctgccgtttccggatgccctgttacggcagttgccgcgtcagtcgggctttaccccgctgcggcgggcctgcgtgaccatgctgggcattaccaccgcggcgggtatcaccatgttgtgcctgtcagccacggcaaatcgccagttattacggcatatcggtgacgatctgcaccagttttatgccgttccggcggaggaatttatcaccaaagcccgtcacctgtcggtgctgaaagacgatgcggtcatgctcgatgggtattaccgggaaggagaaccgctgcgtctcggtctggggttataccccggtgaacaaatccgccagccggtattacgcgccattcgcgactggcgtccgcctgagcaaaaaatggaagtgacagcctcgcttcaggcgcagaccgtgcgtcttgacagtatgtcgctgtttgacgtcggacaggcccgcctgaaagacggctcgacaaaagtgctggtggacgcactggtgaacatccgggcaaaaccgggctggctgatcctcgtggccggatataccgacgccaccggcgacgaaaaaagcaatcagcagttatcgctgcgacgtgccgaagcggtgcgtaactggatgctgcagaccagcgacatcccggccacctgttttgccgtacagggactgggcgagagccagcctgcggcgaccaacgacacgccacagggccgggcagtcaaccggcgtgtcgaaatcagtcttgttccgcgttctgacgcctgtcaggacgtgaaataa

SEQ ID NO: 15431 - DNA, 138 bp, Escherichia coli
atgattcacctgttcaaaacctgcatgattaccgccttcattctggggttaacgtggtctgccccactccgggcacaggatcaacgttacatcagtatacgcaatacagatacgatatggctcccgggaaatatttga

SEQ ID NO: 15432 - DNA, 2535 bp, Escherichia coli
atgaacgctaataatctgtcatgcctgatttactgtcgttgttctcttctgctttttgctgcattagggttaacagtaacaaaccattcatttgctgctgaagaggctgagtttgattctgagtttttgcatttggataaagggataaatgttattgatatccgccgctttagtcatggtaaccctgtgcctgagggcaggtattattctgatatttatgttaataatgtatggaaggggaaggctgatttgcagtatttacgtactgccaataccggtgctccgacgttatgcctgacgcctgagctgctttcattgattgatttagtcaaagatactatgtcgggaaacacctcctgctttccggcatcaacaggactttcttcagccagtattaattttgacttatcgactttaaggttgaatatcgaaatccctcaggcactgctgaatacacgtccaagaggatatatttcccctgctcagtggcaaagtggtgttcctgcagcatttataaactatgatgctaactattaccagtataactcttccgggacgagtaacgaacagacttatctgggattaaaagctggattcaatttgtggggatgggctttgcgccaccgtggcagtgagagctggaataatagctatcctgccggatatcagaatatagaaacaagtataatgcatgaccttgccccattgagagcacaattcacattaggggatttttatacgaatggtgagctaatggatagcctcagtttgcggggagtcaggttagcatcggatgaacgaatgttacccggctctttacgtggctatgctcctgctgtccggggaatagctaacagtaatgctaaagtaaccatttatcaaaatgctcatatcctctatgaaacgacggtgccagccggaccatttgtcatcaatgatttatatcccagtggatatgctggtgaccttatcgttaagataacagagtctaatggccagacacgaatgttcacggttccttttgcggccgttgctcaactcattcgtcccggatttagtcgctggcaaatgtcagtgggaaagtatcgttatgcgaataaaacatataatgatttaatagcacaaggcacctatcaatacggcctgacgaatgatattactttaaacagtggtcttaccacagcttcaggatatacagcggggttagctggcctggcctttaatacccctctgggtgctatagcatctgacattacattgtccagaacagcattcaggtattccggtgtaacgcgtaaaggttatagtctgcactcaagttatagcatcaatattccagcctcaaacacaaatataactctggcggcttatcgttattcatcaaaagatttttatcatctgaaggatgcgctatcagctaatcacaacgcgtttattgatgatgtttctgtaaaaagtacagcgttttatcgtcccaggaatcaattccagatttcaatcaaccaggaattaggtgaaaaatggggtgggatgtatttaacaggaacaacctataattactggggacataaaggaagtcgtaatgaataccagatggggtacagcaacttctggaaacaactcggctatcaaattggattgtctcagtcaagagataatgagcaacaacgccgtgatgacagattttatattaattttactctccctctgggaggaagtgttcaaagcccggtgttttccactgttttaaattatagcaaagaagagaaaaatagtattcagacatcaattagtggtactggcggggaggataatcagttctcttatggtatttcaggaaacagccaggaaaacgggccttccggttatgcaatgaatggggggtatcgttcaccttatgtaaatataaccacaacagtcgggcatgatactcagaataataatcaaaggtcatttagtgcgtcgggagcggtggtcgcacacccctatggagtgacattgagtaatgacctgagtgatacttttgccattatccatgctgaaggagctcagggagctgtcatcaataatgcctctggtagtcgtctggatttttggggaaatggtattgttccttatgttacaccctatgagaaaaatcaaattagcatcgatccctccaatttagatttgaatgttgaattatcggcgacggagcaggaaatcattcctcgtgctaatagcgccacgttagtgaaatttgacactaaaacaggaagaagtctgttatttgatattcgtatgtctactggcaatccccctccaatggcttctgaagttctggatgaacatggacagttggccggatatgtcgctcaggccgggaaggtatttaccaggggactccctgaaaaaggtcatctcagcgttgtatggggaccagataataaagacagatgttcatttgtatatcatgttgcacacaataaagatgatatgcaatctcagctcgttcctgttctgtgtatacagcaccctaatcaggaaaaaacatga

SEQ ID NO: 15433 - DNA, 828 bp, Escherichia coli
atgatgcaatctgcaggcattgtcgttaatgatgttactgtcacctggcgtaacgggcacacagcactgcgcgatgcatccttcacagtaccaagtggatctattgccgctctggttggggtaaacggttccggaaaatcgacgttgtttaaagcgattatgggatttgtgcgtctgaccagcggaaagatatctgttctgggtattcccacgcgacaggcgttacagaaaaacctggttgcctacgtccctcagtcagaagaggttgactggtcatttcctgtactggtggaagatgtggtgatgatgggccgctatgggcatatgggtatgttgcgtatcgccaaaaagagggatcgtcaaattgtcaccgatgcgctggaacgtgtcgatatggtgaattttcgccatcgacaaatcggcgagctttccggtggacaaaagaaacgcgtctttctggcgagagcgattgcacagcagggtgatgtgatcctgctggatgaaccttttactggcgttgatgtgaaaaccgaagccaaaatcatcagcctgttgagggagttacgcgcggaaggcaaaacgatgcttgtctcaacgcacaatctcggatccgtcacgacattttgcgattatacggtcatggtcaaaggcaccgtcctggcaagcgggccgacagacaccacttttacagccgagaacctggagctggcttttagcggcgtactgcgccatgtcacacttaacggctcggaagaaagcattattactgacgatgaacgcccttttgtggctcatcgaccgtcagcggtgcagagggaagaaagatga

SEQ ID NO: 15434 - DNA, 1914 bp, Escherichia coli
gtgctggcaaccggtaaccttactgcttcggcaaccggtcagttgaccagtaccggcgatatcatgagccagggtgacaccacgctgaaagcagccaccacggacaaccggggcagtctgctttcggccggcacgctctcccttgatggaaattcactggataaccgcggcactgtccagggtaaccatgtcacgattcgccagaacagtgtcaccaacagtggcacgctcaccgggatcgccgcactgacgcttgccgcccgtatggcatcccctcaacctgcgctgatgaataacggaggttcattgctgaccagcggcgatctgacaatcaccgcaggcagtattaccagttccggacactggcagggcaaacgggtgctgatcaccgcagacagtctggcaaacagcggggcgatccaggcggctgacagcctgactgcacgtctgacgggtgagctcgtcagcacagcgggcagcaaagtcacctcgaacggtgaaatggcgctcagtgcactgaatttaagcaacagcggacaatggattgcaaaaaatctgaccctgaaggcgaactcactgaccagtgcgggtgacatcaccggtgtggatactctcacgctcacggtgaatcagacgctgaacaatcaggcgaacggaaaactgctcagtgcaggtgtgctgacgctgaaggcagacagtgtcacaaacgacgggcaattacagggaaatgtcaccaccatcacggcaggacaactcacaaacggcgggcatctgcagggcgaaacgctgacgctgacagcctccggtggcgtgaacaaccgttccggtggtgttctgatgagccggaatgcactgaatgtcagtactgcgaccctgagtaaccagagcacgatacagggtggaggcggggtttccctgaacgccacagaccgtctgcagaacgacggcaaaatcctctccggcagtaacctcacgctgacggcgcaggtgctggcgaacaccggcagcggactggtacaggctgccaccctgctgctggatgtggtgaatactgtcaacggcggacgcgtacttgccaccggcagtgccgacgttaaaggaaccacgctgaataataccggtacgcttcagggtgcggacctgctggtgaattaccacacattcagcaacagcggtaccctgctgggaacctccgggcttggcgtcaagggcagttcactgctgcaaaatggtacagggcggctgtacagtgcaggcaacctgctgcttgacgctcaggacttcagtggtcaggggcaggtggtggccaccggtgatgtcacactgaaactgattgctgccctcacgaatcatggtaccctggccgcagggaaaaccctttccgtcacgtcgcaaaatgccatcaccaacggcggtgtcatgcagggtgatgccatggtgctcggtgccggagaggcattcaccaacaatggaacgctgactgccggtaaaggcaacagtgttttcagcgcacagcgtcttttccttaacgcaccgggttcacttcagggcggtggcgatgtgagtctgaacagccggagtgatatcaccatcagtggttttaccggcacggcaggcagtctgacaatgaatgtggccggtaccctgctgaacagtgcgctgatttatgcggggaataacctgaagctgtttacagaccgtctgcataaccagcatggtgatatcctggccggcaacagtctgtgggtacagaaggatgcttccggcggtgcaaacacagagattatcaatacttccgggaatattgagacgcatcagggcgatattgttgtaagaaccgggcatcttctgaaccagcgggagggattttctgccacaacaacaacccggactaacccctcatccattcagtga

SEQ ID NO: 15435 - DNA, 528 bp, Escherichia coli
atgcactctcttaagacacttctacagttaccttgcggatggcgatgcagtcgacaaattattagctctgacggtataaccctccatctccacggaaaacgcaaaacagcacaatgtcctgaatgctttaagcgtagcgactctgttcatagttgtcgtcggcgccggatacagcatctaccctgctcagggcagacgctatggcttgtattttccgtccgccactggtactgccgtaacccggcttgttcacgtaaaatttttgccgggtcgcttgctcccttagccagttcacaccagcagtcttcacagtcgttacaaaatttacagcgtcagatgggattaatagccggaggtgaggctggaaaacgggcagcaacgacagtgggtctccgttgcagtgcagatactcttcttcgcaggcttataataccctggagacgaaactgtcaggctcgccccatgtcggtattgatgagtggcgtggcatcggggccactgctgcggtatgttaatagtcaatcttga

SEQ ID NO: 15436 - DNA, 225 bp, Escherichia coli
atgttagagaattatttcccttcaggaataggtgctcagcctgtaactcaagctcaaaaacagagggttatagctgttcaagctgcccttgaattagttaaggcctcactttcttctgcaggtggtcaggctacaagtgcaaaatttgaacaggaattaaaagcagctattggcttaattgaaccattagccgatgccattcagaaagcaatcagcaaagaataa

SEQ ID NO: 15437 - DNA, 462 bp, Escherichia coli
atgaagatgagttattgggcgctcattttaacgtttattgcttgtattgctggtggtcttgtctggtcagcgaatcattaccacaataaagccattgaatacaaaaaacagcgcgacgaaaacgctatggcattagattcggctatggcgactatctctgatatgcagaagcgtcaacgtgacgtagcagaacttgacgccagatacacaaaggagcttgctgatgctaacgcgactatcgaaagtctccgtgctgatgtttcttctgggcgtaagcgcctgcaagtcgccgccacctgtgcaaaatcaacgaccagagccagcggcatgggcgatggagaaagcccaggacttacagcagatgctgaactcaattattaccgtctccgaagtggaatcgacaggataaccgcacaggttaactacctgcaggagtacatcaggacgcaatgccttcgatga

SEQ ID NO: 15438 - DNA, 363 bp, Escherichia coli
atgcgtgatattcagatggttctggatcgttggggagcatgggcggcgagtgatagttctggagtagactattctcctatagctgctgggtttaaagggcttcttccctatacaagcaaaacacgtcaggcttgttcagatagtgatgcattaattattgaaggttgtcttgctcttcttaagaagagaaaaccatatgagcactctctgattgtggctcattacctgtatggcatctcgaaaaggaagatagcaaaagcatacaaaaaagatgagaaattgatacgtatagagatacagttggctgaagggtttatagatggttgtctctcgatgctggatattcgtttagaaatggagtaa

SEQ ID NO: 15439 - DNA, 747 bp, Escherichia coli
atgcgacataatttttctaaagacactataaaaaaattagcagagcgggcagcattcatttgttcaaacccttcatgccctagattgaccattggcccatcaattgatggcaataaatcaatcaagacaggagttgctgctcacatatgtgcagcatctcctgatggcccacgctatgacatgtcacaatcagaaacagaaaggaagtcaattaacaatggcatatggctgtgtgctacttgttctgtattaatagataagaatcaggggctagactatccggcacctgtattaagaaaatggaaaaaagatcatgaaagccttataagctcctgtcttgaaggttcgattaatattaccttcgatgctttgaaatatattcaacagcatgatgaaagaaatctggcaaaaaagattataaatgaattggatgataaaggggctttgttcgtagaatatcatcttgaaaacccctgttttgttgccgaatcactcaaagagttaagaacctgtttgacctctttgctttctcaaatcccagatgaatcacctctatttatcgtttgcaagtcaattcgagaagcatgccgttattatatgaacaacacttctaaagacgcagggattaaagagttagaattttcgttgggagctgtcagaaaaatcgtaggtatcaacgttaaaagaatatcagaaacctacggggttaaacctagcccacaattatctaccataatgccagattaa

SEQ ID NO: 15440 - DNA, 993 bp, Escherichia coli
atgagcctgttaatgacatcccagcccattgtgataaatcgtgatcttgcatgccgtattggtctgaatgaggcaattgtgttgcagcagcttcattactggctgaatgaaacgaattcaggcactgagcatggcggaattcgctgggtttataacacgacagaacagtggctggagcagtttccgttctggtcagagtccactctgaaacgcacatttgcaagcctgaaatcacttggggttttgcgtcgcgagcaactcaataaatcgaagcgtgacatgaccaacttctacacgatcaactatgaaagtgagcttttagaagaggtcaaagtgaacgaatccatcaggtcaaaatgcacttctccatcgggtcaaagtgacctgatggatgggcgcaaaatgacacgatccattggttcaaaacgacacgctgtcatcgggtcaaaatggcccaatgatcttacagagaatacaacagagattactacagagaataaaacctcttctcgtccggacgcttcgcaaccggacacgcaaacggctgaacaggagtttttaactcgccatcctgatgcggttgtattcagccctaaaaagcgccagtggggaacgcaggatgatttgacctgcgcacagtggctctggaaaaaaatcatcgccctgtacgagcaggccgccgaatgtgacggcgaggtggttcgtcccaaagaaccgaactggacagcctgggcaaacgaaattcgcctgatgtgtgtgcaggatggtcgtactcacaaacaaatctgcgagatgtacagccgcgtcagccgcgatccgttctggtgccgtaacgtgctcagcccgtcgaagttgcgggaaaaatgggatgagctttccctgcgcttatcgccgtccgtcagcacgcacacagaaaaacgtgaagacccgtacttcaaagccagttacgacaacgtggactacagccagatcccggcaggattcagggggtga

SEQ ID NO: 15441 - DNA, 1758 bp, Escherichia coli
atgaccacaggccagcatgacgccaccgggggcgataacaccacttacggcgaagcctaccactatgccgacaacttcctgcaacaaggcgataaagaggcagcggaaagcggcgcgttttatgcccgtatccgtcacgaacgctacctgaatgaacaggccattctcaaaggccagagcaccagttcactgctgatgccggggctggaaatcagggttcagggcgacgacgcgccagcggtgttccgcaagggcgtgctgattaccggcgtgacgaccagcgcggcgcgtgaccgcagctatgagctgacgttcacggcgataccgtactcagagcgctacggctaccgtccggcgcttatcccccgccccgtaatggccggaacgctcccggcgcgggtcaccagtacggtgaagaacgacatctacgcccatatcgacaaggacgggcgctaccgggtcaacctcgactttgaccgcgatacgtggaaaccgggctatgagagcctgtgggtgcgccagtcgcgcccgtatgcgggagacacctacggcctgcacctgccgctgctggcaggaacggaagtcagtatcgcctttgaggaaggcaacccggaccgaccttatattgcaggcgtaaaacacgactcggcacacactgaccatgtgaccattcagaactacaagcgcaacgtactgcgtaccccggcgaacaacaaaatccgcctcgacgatgagcgcgggaaagagcatatcaaggtcagcaccgaatatggcggcaagagccagttaaacctcggccatctggtggatgccgggaaacagcagcgcggggaaggttttgaactgcgtaccgatctgtggggcgcggtgcgggcgaagaaaggcatttttatcagcgccgatgcgcaggacaaggcgcagggtcaggtcagagagatggccgacattatcagcgaactgaacggtctgagcgataaaatccagaaactgtccgatgacgcgacgacggcgaacgccgacccggcggatatggccgcgcagatagcattgataaccagccggataaatgacctgaccgccccggtgattttgatgcacgcaccgaaaggcgtggcggtcgccagcggcgagcacctgcaactggccgcagtgaaaaacctccagataaatgcgggaaacaacgccgatatcggcgtggtgaagaatatgtttattggcgtggggcgggcgctgagcgtgtttgtgcgcaaggcgggtatcaaactgtttgccaataaaggggctgtctcggtacaggcacagaacgatctgatggaactgttggcacagaaatcgatagagatcaccagtacggaagatgagatcaagatcaccgcgaagaagaaaatcacccttaacggcggtggcagctacatccggctggatgcctgcgggatagaagcgggaacgccgggagaatataacgttaaggccggatattacgggcgtaaaccaaaggcgaagctgacgccggagctgatggcgtttccggtgattgagagcggggaatataatattcagttcaatttcaaggatgatgatgggataccttatgcaaatacgagatatattgcgtttatggccgatggaacaaggaaagaaggtattaccgatgagaatggaaagactgataattttaactgtgataaagagcaggaaatagaggtcaggttactacatcagagcattgatatggttgagggtggtgtaaatgagtga

SEQ ID NO: 15442 - DNA, 741 bp, Escherichia coli; identical to SEQ ID NO: 13608

SEQ ID NO: 15443 - DNA, 840 bp, Escherichia coli
atgaataatgttttttattttattcttttgttgtgctcttttttttccttcgctgatgaaagctatttttctataatatatggttatggcaaactcaatggggtagattatccacatatttattccttgtcgttagagaataagaaaagctattacgtgcttagttcgttcgataataataaagaacaaaatttgcataaaatttttgcctatttatcagtggaaaagaagaaatatcaggtattagcaaaagtgacatttaacaatttaagtaaagaatcttattttgttcatagaaatagaattacattggataatgacgatgcagaggtcggtattatttcttcgatgtgtggaaaaacatttgctattactacaaataatgtacttcttgattatctgtccagtaaatgtgagttcgatgaatataattttgatcatgattggattgaaattccggcaagacaatcacgcgtctttagtttcattcttaatgatgcgtatgtttttttaccaggagagcatcgttatgatattggttctttggagtattattttactgatgtcagatggattaggaagaaaaaaatatatagatcgttgtttgatataatgaagtttcgggttggcatatgcagtagtcgactaggcggagattatctttttcaaaaagataatggttattgtgcgtctgaagatgaggattcaattaatattgaatattttttgtggcgatttggtttgaatggagggattgagaaaatgtattttaacattagaactaatcaagttgtgattgatattgatgggagtgatgttcactcattgtacgataactaa

SEQ ID NO: 15444 - DNA, 1119 bp, Escherichia coli
atgcgaaaacgtattctttttattggccctccgctgtacggtttgttatacccattgatttctctggctcaggcctttcgtgtaatcggacatgatgtagtaattagtagcgctggcaaattcgcgaataaagcagcagaagctggactggttgtttttgatgcagttccaggtttagattcagaggctggatatcgccatcaggaagagttgaggaaaaaaagtaatattattggtcatttctctttttttagcgatgaaatggcagataacctcatcgattttgcaggaaaatggaggccagatttaatagtctatccccctcttggtccggcaggcccattggttgctgctaaatatagaattccttcagtgatgctggctgttggattcgcgcatacatctgcccatattcagatgttaaaccgttctttaagcaatgcttacaggcggcatggagtcagcggtccactatgtgatttagcatggattgatgttgctcccccaagtatgagcattcttaaaaatgctgaagaaccggttatctcaatgcgatatattccttataacggaggtgctgtaaaggaaacatggtgggacagggattctgatcggaaacgtttactcatcagccttggcactgtaaaaccaatggttgatggtctggagctgatttcatgggttatggattctgcaaatgaagttgatgctgatatcattttgcaacttgcaataaatgctcgtactggattacgaaaactaccatcaaatgtacgtctggttgactggatacctatgggtgtattccttaatggagctgatggatttattcatcatggtggcgcaggtaataccctgacagcgctgtatagtggaataccacagattgtgtttggcgaaggtgcagatcgctctgttaatgcagaaattgttgcgaagcgtgggtgtgggattattccggacaagcatggactgaccagtgatttggtaaatcgcctgctttatgatgattcactacgcttctgttcagatcaggtagccgctgaaatggctgaacaacccagtcctgcagagatcgcagaggttttgatgagaaaattaaaaaacaacgggaaataa

SEQ ID NO: 15445 - DNA, 315 bp, Escherichia coli
atgggagttgagcagaatgatttcagggacatgttctccggttatctctccgttacggcgcaggcgcagcatgtgttttgtgtatccccgacggcccgggtcgcgcacacgggtctggcaggcgaagaatggctggaagccttcccgctgcagactttccagtacggtgatggtggggatgtacgtatagttctggcttcgggacgtgtgtttatcttccccgaaaatccccggcacatggtgcatcagctcttcatgtgtcagtggacggtcacggcgtatctggttcgcagcataaccaaaacaactggctaa

SEQ ID NO: 15446 - DNA, 219 bp, Escherichia coli
atgaatccgatccgtttcttcagccattcgatgttgctgatgcgcatgttcgtggtgctccctggtgtttttttgcggtgtgttgtggtcgtgcagtatatcgcttgcggtcggcgggtgcagggggtatcttccgtgctaattcgtaaaattagaaggaagcgcacttatatgtttctctccttcgtcgagaaacagtgcgctcctgcggagggctga

SEQ ID NO: 15447 - DNA, 744 bp, Escherichia coli
atggctgatatagcaacaatgagaatgaaggctctgcacttctgggataaacacggtatttctgcggcttctgaagcctttggcgtgtcctgccgcacgctttactggtggcgtcagttactgaacaagggaggacctgaggggctaatcccgcacagtaaggcacctctggtgcgacgaaaaaagcactggcatcctgatgtgctgaaagagattcgacgcctcaggacagagctgccaaacctcggtaaagagcagatttttgttcgcctgaagccctggtgcgcacagcgccatctgacctgcccgagtgtttccaccatcggcagaatgatcgccaccgcacacgataaaatgcggatggtaccagtacgtctgagctcgcggggtaaggctctgcttgtcaaaaagcgaaccgccaaaccccgccggccaaagcactaccgtctggtaaagaccggtgagctcattgggatggacgccattgagctcagaatgggtgaaatgcgtcgctatatcattaccatgatcgacgaacgtgaatttggcaaaaaattacagacgagcaggaaaaacgattcaggagagtctaataaatacaggtatgagtataacggtcaaacaatgtactggaatgggcaaggacgtcggcctaatgttattgcagaagcaataaaagccggaggttctcttgatgattttcttatatctcaggatacatcatcttgttctgattatgagtga

SEQ ID NO: 15448 - DNA, 1224 bp, Escherichia coli
atggctaaaaacaaaggtatctgtcggaataaaaaatgcagtaatcctgtttcagaatttgatgaggcaaatgccttaaggttatgcgatgatcattataagctatggaagcgaaataaagagaatcgtcgggtcaggaatatttgtcgtataattagtagatatgacaaaagtctggactgggagatattttatagagtaagagatgctgcaaaaaataaaacgggaaagagaattattgaggacacaaaaatattacatcaatggcgtgcttcaaagcaagtaagaaaaagttctcacaagggtgtgcttcggtcacgggaatggcttaatacacaggagttactgagcagaaaacatatatctgttacaggtgaactatttaaattttacataaaagatattatcagattatattgctataagtttctctacagcagagaatatcttaatgaaaacgcatacaaaaaacgatatcagagagatattcaccccagaaaagttaatgttccgatactgcaacttgaagttgcatggataaataataattgccgctcaagtgattcaagcactgatattattatccttccgaggatgataagaagaatggttgtatttaattatacgaagataaataaacaattagagaaagtgttgggggggatagcacgaaaacaaacctcagaaaggaataaaggcggtctctataccagaataaaaaaagaaagtgactttctttctatggatagatttatggtggaaatagaaaatatcataagacctgaaaggtttccgacatcaatttatccagtcttttcacattcatttattgaacgagagcttccgctactgaatcttgcccgatcacagtatagaagagcaataagtaaaagagtggcgaattcaattttttatactttgcaaaaaactaacgtggcattatggctatatcttgaaatgtttgctctggtggcattcattaaactgtatacaggaaaaggttttgaattcataaagaacatgtgtgtatttatcgattatgagaaagggataataaaatccacacatgaagaactgctgggtgaaattaagcgtaacattcaagtgaatttgaaggtgaatcctgataattttccagagttaatagacatatacaattcatgctttagtgaaaatatattgtcatatgatattcaggatggtgattttaaatggcgctcatga

SEQ ID NO: 15449 - DNA, 267 bp, Escherichia coli
atgctcggtggccagtttattttgcgctccacctgccggacgtttcagctcaagcagctctttttcaaggtcgcttttgagattttccagctcgctgagtttcccgttcagggtttccacctgcccggcaagtttgcctttttcctgctcaatcgcatccacgcgcttgtcgttctttgccttgaagtcgtcaaacttctgctgcagctcctgcgcgacctgttcgacatctttaatatctaccgccatcgtatttctcctgattag

SEQ ID NO: 15450 - DNA, 252 bp, Escherichia coli
atgtattcggaaaatattgcggcttacgtcgggctggatgtgcataaagaaacgttggcggttgctattgctgcacctgaacggcttggcgaagttcgttattatggtacgattaacaacgaagcccagtctgtacgtcgattatttcagaaattgcagggactttacggaaacattctttcctgctatgaagctggcccttgtggttttgggctatatcatcaactcacagcgatgaatataaaatgctag

SEQ ID NO: 15451 - DNA, 237 bp, Escherichia coli; identical to SEQ ID NO: 10270

SEQ ID NO: 15452 - DNA, 681 bp, Escherichia coli
atgtctgataatcgttcccggcatgatcgcctggcggttcgcttatcactcattatcagccgactgatggccggagaatctctgtcactaaaaacactgtcagatgaatttggcgttacagaacgtactttacagcgcgattttcatcagcgtctggttcacctggatttagagtacagaaatggcaggtacagcctcagacgacagagcagcccgggtgcgatccctgaaatgctttcttttatacagaataccggtatcgcacggatacttccgctccggaacggacgactgataacctgtcttaccgacaaccaggagccctctccctgccttatctggctaccggcgccggatatcactgcaacgttccccgagtatttctcgcaactcatcctggcaataagacagtgtaaccacatctctctgatgactgagcgatggtatccgtcactggagccctgccggctcatttattacagcggtagctggtatctgatcgcgttacagaagggaaaactgcaggtctttcctctggcagatatcaaatcagtcagcctgacatcagaacggtttgaacggagaggccacatccacagtctggtcgctgaagagcgttttatctccgccctgccacatttctctttcatccataaacttatcaacacctttaacctgtga

SEQ ID NO: 15453 - DNA, 663 bp, Escherichia coli
atgccactggtgatcccgctatgggttgctggtgctacattagctgttgttattccaatgctgccatacgtcatgtggtttggtgtctgcgtgggctggatgattctgtgccttgaagcaatggtggcagcaccattatgggtaatcacacacttacatccagacggagatggtgttgtaggacgaggcggtgctggctatggtctggtgctgtcgttaactatgcgcccggcactgatggtaacgggactaatagccgcttatacgatgcttccgatacttggtggggtgattaatgaaacgttctccggcgcgttcggtatgatgtcagccaacgccgggattagcatcatagaatcactggccctgattgctgtttacattgcgctgatgtttacggttgtgaagaaatcactttccctgatccatgttattccagatgaaattatgaagtggcttggcgttcatagtggtcagagtatgtcgggttatgctcagtcggcatcaaaaggtgtggaatcggcagtactggcaaaaacagtattagatcagttatcacattcttcgaacgcgttaggtaatcagatcagaaacgggcaaatgaataaagaccgtgaacaacaacgtgagcttcaacagcagcaacaagtttgcagtaaatga

SEQ ID NO: 15454 - DNA, 1095 bp, Escherichia coli
atgcctgtgtttgaaatgacgtcggaaaaaggaaagtatttataccgatacaattacggtgctaataatgctggtaatgaaatgaataaaaacttactggtatccaaatcagcgtgtggaagcatcacattgacagatccggaagctaaagcgtcttacgatgaacaggttcaagctcacgctcaggctcaagctcaggcgactatcgcatcaggtggaatgtatatgagctacatgccgcaggaaatcaaaatcaatatatcagccgttgttgaagctcataatacagcttttattgccctgaataacaatatgatgacactggcaaaaaaatatgtcgctgataataacattgatattcagtctgatataaacagtgcaactgctacctacgtttctgttatcgatacggcggtcagaacagcattttctacaggcaaccagtgggatgacttcaaggataacgtccagaaagacggctggttcatggcgggggcatggagtatgaagttgatccgcattcaggatgcaataaatggtgcggctcacaatcttcctgtcgcgggacaacagagtatggaatatggcgatatttttaatagcctgaatgctgttatggcaaaggtgtctcacgacatggctagatcgacgacggcatcaagatacgcgaatggtattgatgcgcaaaaccgaacagaagccaataccactggtaaggggggacaggggtctaaaacagatgatgccagtaaaataatcacttcactcaagaatgaagcagataagagtatttctggcgcaatggctggtttcctaagttcaagcgtaatcaatggcagaaaacaaggacaactcgtcgcattttcaacagatacaacggcagcaaatttacaggctatcaaccccctgttagccgttaaaggtcttggcgatacactcagtaccgccgggtggagtttattaggtggttctgctgttgttggtgcaggtcttggaatatggacgtcatttactgcaaacttgttgctgctgttgaagctcacgttgttgttcacggtctttattcatttgcccgtttctgatctgattacctaa

SEQ ID NO: 15455 - DNA, 633 bp, Escherichia coli
gtgcaaaaaaatgaagacagcccgtcagctatagcggttgggcagcgtaaagacgaggaaatctacacagcggatctcaaaagtaaggcgcttgcatttgcgatggcacacgcacttaagctcggtgataaaatgatttcaatcaatctattacctatgaccctggttaacgagcctgacgcagtctcttttttacttgatgaaataaaggccaatgctctggtgcctgaacaaatcatcgttgaatttactgaaagtgaagtcatatctcggtttgatgagtttgccgaagcggttaaatcgctaaaggctgccggtatcagtgtagcaattgatcattttggcgcaggttttgctggtttgttactcctgtcacgcttccagcctgacagaattaaaatcagtcaggaattgattaccaatgttcataaaagcggaccacggcaggcaattattcaggcgatcatgaaatgctgtacatcacttgaaattcaagtctctgctatgggtgtggcaacaccagaagagtggatgtggcttgaatctgcaggaattgagatgtttcagggagatctgttttccaaagctaaattgaatggtatcccttcagttgcgtggccggagaaaaaataa

SEQ ID NO: 15456 - DNA, 981 bp, Escherichia coli
atgcgagagcaacttgctgcaggtgatgatcctctggagattaaaaaggctgaatctgagaaagtcgttatcccaacatttgccgatgcagccaggcgtgtacatgcagaactgtctcctggatgggaaaatccaaagcatgtaaggcagtggttatcgacgcttgagaattacgcgtttcctcaactgggagcaaaaacgctggattcgattacggctgcggacgtggcagaaacactgcgtccagtctggttaaccttgtcagaaacggcaagccgggttaaacagcgcattcatgttgttatgcagtggggatgggcgcacggtttttgtgtggcaaatcctgttgatgtggttgaccatttgcttcctcagcagacaagaggacgtgatgaacaccaacccgcaattccctggaggcagttaccgctttttgtggcgaccagtgtgtatagtgatgaaccttataatgttacccgcgcactgttattaatggtgatacttacagcaactcgctcgggcgaagccaggggaatgcgctgggctgaaattgattttcataagcgggtatggactatacctgcagaaagaatgaaagctaggctacagcatcgtgttcctttatcccggcaggctatttacattctggaaaatatacgtggcctgcatgatgaactggtgttcccttcacccagaaagcagcagatcctttccgatatggtgttgacaagttttctgcgtaaaaagaaagccgtcagtgacattccggggcgagttgccacagcacatggttttcgctcaacattcagggactggtgtagtgaacaggggtattcgcgggatctggcggaaagggcgctcgctcatacgctgaaaaataaggttgaggcggcatatcatcgtactgatctactggagcagcgtgtaccgatgatgcaggcatgggcggattatgtgatgtctcaaattgtgaataaataa

SEQ ID NO: 15457 - DNA, 162 bp, Escherichia coli
atgcgagacggttgtcatgagattattccttataaaaagcaaatgaatggaagaatgcccggggaaagggacagacgtgagtcagaactgcgctttcagggaaacagcatcagcgcaggctctccagcatcgtttctgccatcacccacaatgcgcgattaa

SEQ ID NO: 15458 - DNA, 330 bp, Escherichia coli
atggcacagcatgaagttattacccggggaggggatgcttttttactaaaattacgtgagagcgcgctgtcatccggctccatgtctgaagaacaattttttttactgataggtatttcctctattcacagtgacagagttattctcgctatgaaggattatctggtcagtggtcattcccgtaaagatgtctgcgagaaataccagatgaataatggatatttcagtacaacgcttgggcgccttaccaggttgaatgtcctcgttgccagacttgctccttattatactgatagtgtatcagctatagctgaagctgcttccctgtaa

SEQ ID NO: 15459 - DNA, 549 bp, Escherichia coli; identical to SEQ ID NO: 8963

SEQ ID NO: 15460 - DNA, 600 bp, Escherichia coli
atgtcgccggaggactgggtgcgggcagaaatgcagggtgagattgtggcgctggtgcacagccatcccggtgttctgccctggctgagtgaggccgaccggcgactgcaggtgcagagtgatttgccgtggtggctggtctgccggggggcgattcataagttccgctgtgtgccgcatctcaccgggcggcgctttgagcacggggtgacggactgttacacgctgttccgggatgcttaccatctggcggggattgagatgccggattttcatcgtgaggatgactggtggcgtaacggtcagaatctctatctggataatctggaggccacagggctgtatcaggtgccgttgtcagcggcgcagccgggcgatgtgctgctgtgctgttttggttcatctgtgccgaatcatgccgccatttactgtggtgacggcgagctgctgcaccatattcctgaacaactgagcaaacgagagaggtacaccgacaaatggcagcgacgcacacactccctctggcgtcaccgggcatggcacgcatctgcctttacggggatttacaacgatttggccgccgcatcgaccttcgagtga

SEQ ID NO: 15461 - DNA, 477 bp, Escherichia coli
atgcatcagtttttactgaatgaaggtgcagatccctcgcgttttctgtttgttctcagccatgccgatcgcgtgtttcctgccggcgagtggaacgacacagaaaaatgcccgtcccgtcagcaggcgctctcgctggcgacggtgacagcccgggtagcaaccctgttcccttcatcatttccggtactctccgttgccgcgcctgtcggctggaatattccggcactggtgtcactgatgatccacgcactgccaccacaggcaaccagcgcggtttattcacatatccggggggaaaaccgctctgaacaggcccggaaacacgcacaacagacttttggtgacgccatcgggaaaagctttgacgctgccgttgcccggttcagttttccggtctggatgttacagcttctgcgtaaagcccgggaccgcattatccgactgctggaaacactgtgggatcacctgttctga

SEQ ID NO: 15462 - DNA, 222 bp, Escherichia coli
atgcactttgtgacgcatggtggttctgttatgacatggggacaaatgaataggcttgatgatcctgaaccgggtgtagaatctctggcccgtcgtggattactgaatacgtccgtaacgatggatggtatgcgagaaacgtttgaactagatctgaccctctttaattatgcatataagtatcacccccatcaggagaagatgcttacttcagaagaataa

SEQ ID NO: 15463 - DNA, 276 bp, Escherichia coli
atgtatgaggtgtgtgtgacattttacatgagagtaaaacaggtgataacctcctttagtaaggggtattcacaggtattattacagaacaatgttgtttctggcttgttcttttttttggcgactggaatagccttttttaatatggggcaccccgaaatactgtatttctcagccatcagtgcagcactttctccgttctttgcctggtatttgcggtatcctgatgctgtctcttatacacatctgacgctgccgacgaatagagaggtgtag

SEQ ID NO: 15464 - DNA, 750 bp, Escherichia coli
atgtcaaaaaaatatcagccattgcttataactcattatatgtcaacatgggtcactataacggaagcagttgagatcactaccaaagccataaaacaaaaaattactcctagcgatatttatcgtcatgccttgagtggcaacatcctactatcggtctatttccagtctcctgtgatacttaagaagatacaaacttttaatggaaaaataaaattcaggcagtttgtgggagacctacttgataaactatgcatgcttgacagggacggttttatttatggtcaaaatttaagactctgtacagaagccagatatatttgtcctgtgcaacaaattatagatacccccctgttacgcaaactcaaccagtttcgtacgtttgttcgtaatgtccgcccgggtgatgaactggatgtccaggcacaagttagtgaaaaaaatttaaccccgccgccgggtaacagcagtggcaaccttgagcaacagatagccagtacttcacagctaattggatctctgctcgccgaagatatgaacagcgagcaagcggcaaacatagcacgtggatgggcctcttctcaggcttcaggggtaatgacagactggttaagccgcttcggtaccgcaagaatcacgctgggcgtggatgaagatttcagcctgaagaactcccgtgacggcaaccctcgaaaatggcgattcgatgcaacaaacagtgaactatgtgccgaacgtcacgaatgctga

SEQ ID NO: 15465 - DNA, 633 bp, Escherichia coli
atgaaaccaacgtcggtgatcattatggatactcatcctatcatcagaatgtctattgaagttctgttgcaaaaaaacagtgaattgcaaattgtcctgaaaacggatgattatcgcataaccatcgattatctccgaacccgtcctgttgatttaatcattatggatatagacttgcccggaacagacggttttaccttcctgaaaaggatcaaacaaatccagagcacagtgaaagtattatttttatcatcgaaatcagaatgcttttatgctggcagagcgatacaagctggtgctaacggttttgtcagtaaatgcaatgatcagaatgatatttttcatgccgttcagatgatcctctccggatacactttttttcccagcgaaacgctcaactatataaaaagcaataaatgtagcacgaatagttcaacgatcactgtgctatctaatcgtgaagtgacgatattacgttatctggtcagcggattatctaataaagaaattgccgataagttattacttagcaataaaacagttagtgcgcataaatctaatatttatggcaagctaggattgcattcaattgtagagcttatcgactacgccaaattatatgaattaatataa

SEQ ID NO: 15466 - DNA, 1164 bp, Escherichia coli; identical to SEQ ID NO: 10713

SEQ ID NO: 15467 - DNA, 2208 bp, Escherichia coli
atgaaattaaaactcaaaaacataacaagctatcataaagaatattttactgagttagatttgtccaaaaaaataaacatattgtatggacaaaatggttgtggaaaatctaccatatcaaattatttttacaatcctaaagacaccgcctataaggaatgtgtatgcgaacccatcgataattatcgaactctagtctacaactcaaaatatatagaagataatttttataatgcaaaagagcaaaaaggtatatttaccctcagtcaaaaaaatgcagaaattgaaaaaatactatctgaaaaagaagagctaaacaaatcactagcacatcagcataaagaaaaaaaagaatttatcgaaaaactccatgaagcgaaaaacaaaaaagagcaagagtgcataaattccatatggaataagaccaaagacataagaagctcagaattgaaacaattaatgaaaggtcaaataggaagcaaagccactttctattaccatctaaaaaagtatactccacaaactgatattgatataaaatcattaatacaatcttatagcaaacttctcgagtttaaaggaaaagaaatacctctgataactccttataagggatatattttatctgaagaaactcaaaaaacattatccacaccaattattgactctagcaacagctatttatctgaagcaataaaagagctacaaaatattgattggattaaacaaggcaaagagcaatatttaaatggagagatttgtccattttgccaaagggacacaatagatgataattttattaaagccattgaatctatctttgatgaaacatactcaagaaaagtagatcaaatacaacaaataaaactatcttatgataatgccattaaaaatcatcatgaagaaataaagagtaacattttatcatgtgaggtgataaaccaagacgaaaaagataaaagcctttcatatgttaaggcattagaaactattgcagaaaaaaacattaaattattggataataaaatagaaaatccatctataagcattgtgctggaatttgaaaagtcgatagaggaaaaactattagaagatatagaacaatacaacaataaaattaacgagttcaatgacaaagtaaaaagatttaataatagcgaaatagatattcgcgaaaagatgtgggcagcaatcagagacttatgtagcgcggaatttgaaatactatcagactgcgaaagaaactttcaagaaaaatatgaaaacgctgcatctttcatgcaggaaataaaaagaaaagaagagatcaacacaaatgaaatcaatgaactaagaaataaaacatcaagtgtagatgcaacaatagatgcaataaactcacgacttaaatttcttggcatctctggttttagcattgataaacacgccgaactcaaagataagtatataatatcccgcgatggaaacaatagaaaacaagatgtatatcggtcattaagcgaaggtgaaaaaacattaataacgtttctatattttttagaatgctgcaagggtaaaacaaatgaaaatgatactgatatgcgtgataaactcatagttatagatgatcctatatcaagtctatctcaaaactatgttttcgacatagcatccatgatccatcatgacataattgaaaaaggcatttcatcaaaaataataatcctcacccataatctttatttcttccatgagttaataaaactcgcctctaaaaaaggaataaactttaaacgggactactttcttggcagaataaacaaaaatgaatttagcaccattagtgctatagataaaaaaagtgtgcaaaatgaataccaatccctttggcaagtattaaaagatgcaaaagagaaaaaaatcaacaaaataataatccccaatattatgagaaatatacttgagtattactttgcatttgttcatagaactgacgcattagaggcaaagcttactgaattaacaaatgatgaaaataacagccatttccgtgccttttacagatatataaacagaggctctcactccgacgcaataaatataacagatatgggcgatattgaacctgagaaatacttagaactcttgcacaaaatattcagaatgacaggtgatgagaaacattacttaacaatgatgggtgaagaagaggtaaatgttaccgcttag

SEQ ID NO: 15468 - DNA, 528 bp, Escherichia coli
atgcagcatttaaaaaatattacggcgggtaatccaaaaacggttgaacaatatcaattgacaaagggttttgatgttgtctggtttttttcagaagatggtaagaactggtacgaagaacaaaagtattttgctgatgacacgataaaaatagcgtacgacaaagataatattatccgctatgtggaaaaggatgtgacagctatcagaccggatggattaagtgttgttgaagtggcggatattactgctaaccgacgggcggacatttcagggggttggatgtttaaggacggcaaagtgattaaacgcatttatacggcagaggaattgctgcagcaggcagaaaaccggaaagccagacttcttgcagatgctgaatccgtgattttgccgctggagcgcgcggtcagactgaacatggcaacagatgaggagcgtagccgactggatgcatgggagcgttacagcgttctggtcagtcgtgtggatcctgcaaatcctgaatggccggaaatgccgcaataa

SEQ ID NO: 15469 - DNA, 345 bp, Escherichia coli
atgttaaataaggggctggaaagccttgcagaaggagaaaaaccgctgctccacagtgatcaagggtggcattaccggataaaaagttatcagtctgccctggcagacaaagggttagtgcagagcatgtcgcgcaagggcaactgccttgataatgcggtaatggagaatttctttggtcacctgaaagaagaaatgtactatcgccgggactacagaagtgtagaagagctggaaaatgccgttaacgaatacataacttactggaatcaaaaaagaataaaactcagtcttgggggactcagcccggtagaataccggactgagtatcaaaaagccggttaa

SEQ ID NO: 15470 - DNA, 3057 bp, Escherichia coli
atgattccacagatttcccaggcacccggcgtcgttcaactggtgcttaattttttgcaagagctggagcaacaggggtttaccggcgatacggcgacaagttatgccgatcgtctgacaatgtcgaccgacaacagtatttaccaacttctccccgatgcggtggtatttccgcgttcaaccgcagatgtggcgctgatcgcccgtcttgccgcgcaggaacgctattcatcgctgatctttaccccccgcggcggcggcaccggcactaacggtcaggcgctcaaccaggggattattgttgatatgtcccgccatatgaaccgcatcatcgaaattaaccctgaagagggctgggtgcgcgttgaggccggggtgataaaagaccaactcaatcagtacctgaaaccgttcggctacttttttgcgccggagctttcgaccagcaaccgggcaacgctcggcgggatgatcaataccgatgcatccggtcagggatcgctggtctatggcaaaacgtcagatcacgtacttggcgtacgcgcggtgttgttggggggcgatattctcgatacgcaatctttacccgtcgaactggcagaaacgctgggtaaaaccaataccgcaatcgggcgaatttataacacggtttatcaacgttgccgtcagcaacgccagttaatcatcgacaacttccccaaacttaaccgctttcttaccggttacgatctgcgtcatgtctttaacgatgagatgaccgagttcgacctgacgcgcattctgacgggttcagaagggacgctggcctttattaccgaagcgcggctggatattacgcccttgcctaaagtgcgccgtctggtgaacgtcaaatatgactcttttgactccgcgctgcgtaacgcgccgtttatggttgaggcgcgggcgctttcggtagagacggtggactcaaaagtgctgaatctggcgcgggaagatattgtctggcattccgtcagcgagttgattaccgatgtgcctgacaaagaaatgctcgggctgaacattgtggaatttgctggtgatgatgagacgctgattgatgagcgagtaaatgcactctgtgcgcggctggatgaacttatcgccagtcagcaagcaggtgtgatcggctggcaggtatgcagtgagctggcaggtgttgagcgtatttatgcgatgcgcaaaaaagctgtcggcctgctcggtaatgccaaaggagcagccaagccaattccgtttgctgaggatacctgcgtaccgccggaacatctggcagattatattgctgaatttcgcgcgctgctcgacagccacggcttaagctacggtatgttcggtcacgtcgacgcaggtgtcttgcacgtccgtccggcactggatatgtgcgatccacaacaagagattttgatgaagcaaatctctgatgacgtggtggcgctgactgcgaaatacggtggcttgttgtggggcgagcacggcaaaggttttcgcgctgaatacagcccggcgtttttcggtgaggaactttttgcagaactgcgcaaagtgaaagcggcatttgacccgcataaccgactcaaccctgggaagatttgcccgccagaaggtctcgatgcgccgatgatgaaagtggacgcggtgaagcgcggtacattcgatcggcagatccccattgcggtacgccagcagtggcgcggtgcgatggagtgtaacggcaacggtttatgcttcaactttgatgtccgtagtccgatgtgtccgtcgatgaagatcacccagaaccggattcattcaccgaaagggcgcgcaacgctggtgcgtgaatggctgcgcttgttggcggatcgcggcgttgacccactcaaactggaacaagaactgcctgaatccggcgtcagtttgcggacgttaattgcccgcacgcgcaatagctggcatgcgaataaaggcgaatatgacttctcccacgaagtcaaagaggcgatgtcgggctgtctggcctgtaaagcttgttcgacccagtgccccatcaaaattgatgtgccggagtttcgctctcgttttctgcagctctatcacacccgttatttacgccctctgcgcgaccaccttgtcgctacggtcgagagctacgcaccgctgatggcacgcgcgccgaaaacctttaacttcttcattaaccagccgctggtgcgcaaactctcggaaaaacatattggcatggttgatttgccgctgctgtcggtcccctcgctgcaacaacaaatggtggggcatcgctcggcgaatatgacgctggaacagcttgaagctctcaatgcagagcagaaagcgcgcacggtgttggtggtgcaggacccctttaccagctattacgatgcgcaagtggtggcggattttgtccgtctggtcgaaaaattaggtttccagcctgtgttactgccattttcgccaaatggcaaagcccagcatatcaaaggctttcttaatcgttttgcgaagacggcgaaaaagacggcggatttcctcaaccgtatggcgaagctggggatgccaatggtgggcgtcgatccggcgctggtactttgttatcgcgatgaatataaactggcgctgggcgaggaacgtggcgagtttaacgtcttactggcgaatgaatggctggcaagcgcacttgactcacagccagtggctacagtcagcggtgaatcatggtatttctttggtcactgtaccgaagttaccgctttgccgggcgcgccagcacaatgggccgcgatatttgcccgttttggcgcgaaactggaaaatgtcagcgtgggttgctgcggcatggcagggacttacggacatgaagcgaaaaaccataaaaattcgctcgggatctatgagttatcctggcatcaggcgatgcagcgactgccgcgtaatcgctgtctggcgaccggatattcctgccgtagccaggtaaaacgggtcgaaggcacgggggtacgccatcctgtgcaggctttactggagattattaaatga

SEQ ID NO: 15471 - DNA, 5286 bp, Escherichia coli
atgctcccacgccgttcccagcttaacgcgctctatgatgctaacagtggtaacgccgttcaaacggtacacggttggccaacgcagcgtcagccctactggagcagttcgcccgcggatcaggtgccgcattactacaccatagccctcaacgatggcgcgcggaccgttggtggtagcacggcggtttatgtcagttgcctgacgacggctaacaatcctgccagcagcattacgctggaagtggtggacccggcgcagtggaacgcggcagcaaatgcggcgaagctgaaaaaaggcgaaacgctacaggtgaaggtgacggtaaaagatgctcagggcaatccattgggtgatatgccttttaccctgaagcgtggcgatggttatacccgctcaaatgaaaaacacattgccggtagcggtgatgcgctggttgcgccggttgtgatcaatagtggcctggcggatgaagcttcgctcaatgataccgccgcagcatacagcgcgatgaccggcagcgatggcactaaaattctcactattacccgcccggatacccatggcacaaaaacgtcgctgaccgccgcgctctattcagacacaacgaaaaaagcgaccctcgataccatttttaccgttgtcaccagcccggacagcaataaagcgaaaatgtgggggcatatgccggaaacggtgacggctgcggatggaacggtctttaaacgcccattattgttgaaagagttatccagtacgtcgggtcgaacagcgattgcagaagataatgaggactgggcgcaatttacccaaactcaggcgacaagcacatcctctaatggttgtggtagtgaatatgttccctctcaggccgggctggagtcattgtatgaagccaaccgcggcaatgcgatgaaaacggttcagggctggcccgtcgcctcaagttaccttaccagcacgacaggcagcagtagtctggaacagcgtgacttaaaggccgtcaatctcagttcaggcaccagttcgataattccatcggccacaaaagaactgcttacctgccagacgacgccgatcgtcaaggctagccaaatcgttcttgaggctgcggaccccacaaaatttgacagtacgaataatgttgtcaaagcgaaaaaaggggaagaagtcgtggttcgcgtgaccactaaagattcgcagggtaacccggtgggaaataccgcgtttacgcttaaacgtaaccttagcgtcaatcgggcaaatgcgtctacaacggtgacagcaggcgcgctcatcgtgacggatacctggggtaacacgcagagtaatttttcctcaacaacagcactgatttatggcgttaccggcgcagatggtacgacaacacttgcactgaaacaggacaataccacgggtttaaaaaccgaactgaccgccatgctggatacagataataacgtaaaatcaatgcttccggtggtctttacggtgataaccagccccgatacccctaaagcaaaattctgggggcatatggccgaaacgatgaccggtgcaggcgggcttatttataaaagaccgttattgcaagatgagctttccgttacaaccagtcgaagctcttttcaggaagatggagagagctggtcactgttctcgccggaccagtcgaacaacacatctgtaaatggttgcggtgcaggatatgtcccgattgaaagtgagctggagtcactgtatgccgatgaaggttacgtgccaatacatgacgttacgggatggcctgtatcacgcgcctatatctccagtacggttgttgcctattacactcaaacatttaattttaaagcggtttcgttaaaaacgggtgatggaacggaggtcatgtcaagcagtctaggactgctaagttgtcgggctaccccagtggcggtgaccagccacattattgttgaagcgaacgatgcgacacaatttgtcaaagttgacgaaaccctcagcgcactaaaacggaaaaaaggtgacgacgcggtgattcgcgtggtgacaaaagatgcgcagggaaatgtcgtaccaaatgttccgtttattctcaaacgtgaaggatcgacaaatcgccagaatgtacagttgtcgaacagaactatcactgtaatcaacgctgcgggaacgtcggcaagagtggatactccatcaatctccctttatgcggtgacaggtgcagacgggacagccacgtttacggtaaagcaggatgattctataggcctggtaaccaatgtgtacgctcaggcctatcagtcgagcctggaatccaacaaattacccgtgatgtttaccgtgataaccagcccggatacccccctggcaagttactgggggcatatggcggaaacgttcactacgcgttctggtactgccttcaaacgccccttactctctgctgaaagatcgtcgggccagtcgtttatagaagacaatgaagagtgggccgtgttgagatcggcaacaaagggggatatcgataaaagcgggtgcgatgtacattatcaaccactgttaagcgaactacaggcattgtacgacgaacacccaagtcgtgcgataaagaccgatctgggtattccggtaaatagctactggtgggcttacgacatggtggcatatgcgggtaactggtacgatcaatatatttatctgttaaatggatcaagtggaagagcgtcttcaaccacctcggcattaatgctgtgcctggtaaaccctcatccagaggcggcttctattgaaatgacctcaacggcggaggatgcaacgaaaacggccagcaatgatggcaggcccagcgcaacagcgaagaagggagaggttatcccgatgactgttacggtgcgagatagcgcaggcaatccactgccaggtgccagctttaaccttaaacgaggaactgcgctgaaccgcgctaaagctgcgtacgatgcctctgcagatgatcttaccatcatacctgtggaacctactggggtaacgtcaatcttgtatggggatgggacgcaggctcttctgaagacagggagcgatggtaaagctacgtttgaggtcagccagaatagcagttatgggctgtcaacgccgctcagcgcagaactcatgcgcgatacctcgaaaagcgtcacgctggatgtcattttcacggtgataaccagcccggattcgccaaaagcgaaatactggggccatatgccggaaacgtttaccagttcggcaggcgtgaccttcaagcgcccattactggcagcggaagcgactacggggagctcggtaaacggtaataatgagacatggtcatatatatatagtactcaaaaagcgacggcagattgttcgctggaatatcaaccgcgcctcagcgaattgcaggggttatatgacgatcacccaaacggggcgttaacgaaagatctggggttgccgatagcgtcaggaaactggtggatttatgaattacttaactccaatggtagctcctggtattaccaggtctttaacctaagcacgggacgagcatcatctgcactctctccggttgctctaatgctctgcctggcacagcctcactctaagccgtcaagcgttaccctgacttcagtagcatttgatgagacgaaaaccgccagtaacggcggcacaccttcggcatcggcgaaaaagggcgagacaatcccgttagtcgtgacagtaaaagaccaaaatggcaacctgctgagtggcgagagcgtgacgcttcagcgggcgcaggcgaaaagtcgttcaggaattaggccctcatcgtcggcagatgatcttattgtagatgtcgtcacaccgacagcaacccgtatttcctttgctcaggatacggcaaaatggcttggttttaccggcagtgatggcacagtgacgttcaatgttacgcaaaacgccaccaccggcctggcaacgccgtttacggtctcgcttgcacaagatccgcagatcacgtcaaacctggacctgatatttaccgtggtcaccagccctgacgcccaggatgccgactactggggtcatatgccagaaacggtgacagcggcaaatggaaccgtctttgaacgaccgaaattgtggaaggagctgccatcgacctccggggtaaataaaaccaataacaataatgaggactggccctatttttcgtcaaccactaaagcaaatgccagcctcagcccttgtgaggaagcccggcaaccgttgctcagcgatatgaagtcactgtatcaacgttatcccaataacacccttacgacggaaactggctggtcagtttattattactggtgggcgcaggatcagtcgacagatggtaaaaatcagtcgctcaatatgaaagatggcacaacgacattgaatggtaatgccgcttatcaggcgtgtctggtgtctgcgcgcgcaacggtttccagcgtcacactgacctcaacagcgtttgacgcagctattcaggcggcgaaagtgaaaaaaggcgaagccatgcccgttaccgtgacggtgaaagacagcgccgggaatacggtaccgaatgtggaatttactttgaaacgtggcgatgcatcgccgcgtaacgctggggcgacgttgtatggtgatgtggtggcgatggacgatctcatcgttcagccgttatctggttcggctgttacgctgagtgaaagcggtaataccattagtggcatgacaggcgcggatgggacggcaagttttacgctccgccaggataatacccctggttataaaacgccactgacggttactctggctaattacgcttccgcgacagacacgctggacgctatttttacggtaccaaccagcccgaatgtttcctcggcgcacttttggggacatatggcagacactgtagtggtgaatggtaaatcgctacatcgaccgttgttaacgacagaattgccgtccggggctaatcccgtatcctcaccgattattaactacgaaaactgggcttctgcacatatcattgatgccagtaaatgggatattgcaaggcagtgtggcagcatagaaaatgcaccgacatacaatgaattagagttgttgcacactgtttttaattcactgggatggccgtcttcaccaagttttccttatttgtcctctcaacagtgtgggatggacgaaggcactggagcacaggattgtagtatcacgctaatgaataaaccgggtctggtgacctgcttccagtaa

SEQ ID NO: 15472 - DNA, 564 bp, Escherichia coli
atgaaactcaaacatgtcggtatgattgtcgtttctgtgttggcgatgtcgtctgctgcggtaagcgcagccgagggtgatgaatcagtaacgaccactgttaatggcggtgttattcattttaaaggtgaagtggtaaatgccgcttgtgcgattgattcagaatcaatgaaccaaacggttgagctgggtcaggtccgttcttctcgtctggctaaagcgggtgacctcagctccgccgttggcttcaatatcaagctgaatgattgtgataccaatgtttccagtaatgcagctgttgcattcctgggtactactgtcaccagtaatgacgatacgttagcgctgcagagttcagcggcaggctctgcccaaaatgtcggtattcaaattttggaccgtacgggtgaggtattaatacttgatggtgccacttttagtgctaaaactgacttgattgatggcacgaatatattgccgttccaggctcgatatattgctctcgggcagtcagtagctggtactgcaaacgctgatgcgaccttcaaagttcaatatctataa

SEQ ID NO: 15473 - DNA, 531 bp, Escherichia coli
  misc_feature (424)..(433): n is a, c, g, or t
atgacagcctttcgtgccgcatttaaggcatatcgtatgcatcaggtgttactactgcctcgctttgcacggcttaccattgcccttggcttagcaactgcggtatttcccgttgacgcagagtattattttaatccacggtttttaagcaatgatcttgctgaatctgtcgatttatccgcctttactaagggacgcgaggcaccacctggtacatatcgggtcgacatttatttgaacgacgaatttattactagtcgggatattacttttattgcagatgataataacgcagatctcatcccatgcctgagtacagatcttctagtcagtcttggcataaaaaaatcagcgttattagacaataaagaacattcggcagaaaaacatgtgccggacaacagcgcatgcacaccacttcagnnnnnnnnnntgttggtcagcaacatctgtcactctccgttccgcaaatttatgttggcagaatggctcgcggctatgtttctcctgatctgtgggaagaaggaataa

SEQ ID NO: 15474 - DNA, 561 bp, Escherichia coli
atgacagagcagaagcgaccggtactgacactgaagcgaaaaacggaaggggagacgcctgtccgcaggcggaaaaccatcatcaatgtcaccacgccaccaaagtggaaggtgaaaaagcagaagctggccgagaaagcagcccgggaagcggagctggcggcaaaaaaagcgcaggccagacaggcgctgtccatttatctgaacctgccctcgctggatgaggccgtgaacaccctgaaaccctggtggccgggattatttgacggtgacacaccccggcttctggcctgcggtatccgggacgtgttactggaagacgtggcgcagcggaatatcccgctctcgcataaaaaactgcgcagggcgctgaaggccatcacccgttcagaaagctatctgtgtgccatgaaagccggtacctgccggtatgacacggaagggtatgtgacggagcatatttctcaggaggaggaggcgtatgcggcagcgcgtctggataaaatccgccgccagaaccggacaaaggcagaacttcaggccgtgcttgatgagaaataa

SEQ ID NO: 15475 - DNA, 1500 bp, Escherichia coli; identical to SEQ ID NO: 12982

SEQ ID NO: 15476 - DNA, 426 bp, Escherichia coli
atggacattgagttttcgcagattcatgaaatggtctatatgcatgatattgtaaattcggactcgaaaaagaaaccaaggattccgttaaaaaaattccttaatgctgagaaggttctcacgcaaacaacatcatgggcactaaattcaagatatgtgaatgttaattctgtcagtaaagtcaacgtaaagagtaaagttaaaaacagttatatctcacgatctgtcaatgatgagtttagtttaacagatgatgaaatcaattcttttaaagaaacgttagtcctttcctctattgattctctaagtaaactggttcttaataatcctctttctgtattgtttacatcgactgtacgaaggaataataatagagctaagatgaatgttgagttcgactcatggatttgcaccagatgttgttga

SEQ ID NO: 15477 - DNA, 867 bp, Escherichia coli
ttgatatctatttcaaagaatctattcaatccaactagcagcaaccccattactcagcgtgaatatcaacaattgctaaaattcagcgattttttatctaattccgaaaaagaagaagatcgaaacctagcgttaaaaataatatctgcaatatatgatctttataaagaagatcatagttgccaattactgacaaaatccatccttagcaaacttggactttttgccgctgaggaagtatttactgatagtgatataaaactaccattatcctatgaaatttctagcaaatacagaaaaataaaaaatcgtataaatggttctgagtacatattcactaatcgacaatgtgatgtgtacagtgagatcatgcagaatgattattttagtttttctggcccgacatccctcggcaaatcattcttgattaaacatgctgccgttgatcttattgaaaataataaactaattattttcatccttccaacaaaagctttattagaagaatatctaattgacttaaaatctatactcaatgaaaaaggcgtgaaagatataaatgtaagtaaatccgtatcacaagttgacaaagaaagtaaaaatatattggtgtttacacaagaaagatataactcatttttatatgaaaagtcttatgataatatggatgttgactttttatttattgatgaagctcataaagtacttgacaaaaagaataatagagctataaccctatataaagtaataaataactccatagaaaaatatggtaaattaaaagtcattttttcctgcccagtaatttccaatcctgatgtgtttttcaaaacatttaaggaaggtgcgaacaagtccctgatatga

SEQ ID NO: 15478 - DNA, 573 bp, Escherichia coli
  misc_feature (559)..(567): n is a, c, g, or t
atggttgctaaattaaaaccagatgttctttttaatactaatccttttttagaagcaatgaataaggagagacttaatcataaaggatattgtgataaaattgctgtaagtattaataataagaaatataatgtaaactctaaggatattgaaaatattcttgatggcaaaggggatttatttaaaaaacgtacgctgtgggagtttgtccgcgatctttttcccggctctcatattaaagaagtcaaaggcttaatttacgaatttgtcacgaaagttgataacaaagccgaggtgttcgataagattaaatctctggcaaaaaaagaacaacaatggcgatttagtactaagacagactttaccacaaatgaaaataatgaagttattgtgagtagatcctttaatctctacacgggggctacttcgaatgataacgaaaaaaaacaggtttcttcagagagattaacgcttgataattatattgatgatttacattttgataattctcccttgaagagatttatgcttgatgattatgctgtaaaacttacgacannnnnnnnngtctaa

SEQ ID NO: 15479 - DNA, 1008 bp, Escherichia coli; identical to SEQ ID NO: 13100

SEQ ID NO: 15480 - DNA, 429 bp, Escherichia coli
atgcgtaacttcgatttatccccactgatgcgtcaatggatcggttttgacaaactggccaacgcactgcaaaacgccggtgaaagccagagcttcccgccgtacaacattgagaaaagcgacgataaccactaccgcattacccttgcgctggcaggttttcgtcaggaagatttagagattcaactggaaggaacgcgcctgagcgtaaaaggcacgccggagcagccaaaagaagagaaaaaatggctgcatcaagggcttatgaatcagccatttagcctgagctttacgctggctgaaaatatggaagtctctggtgcaaccttcgtaaacggtttactgcatattgatttaattcgtaatgagcctgaacccatcgcagcgcagcgtatcgctatcagcgaacgtcccgcgttaaatagctaa

SEQ ID NO: 15481 - DNA, 717 bp, Escherichia coli
atgatctacaaaagcattgcggagcgattaagaattcgacttaattccgcagatttcacgctaaacagccttcttcccggtgaaaaaaagctggcggaagaatttgcggtatcgcggatgaccatccgtaaagccattgaccttctggtggcgtgggggctggtggtccgccgccacggcagcggtacttacctggtgcgtaaagatgtattgcatcaaaccgccagcctgaccgggctggtggaggtgttaaaacgccagggaaaaacggtcaccagccaggtgctgatttttgaaatcatgcctgcgcctccggccattgccagccagttacggattcaaatcaacgagcagatctacttctcccgtcgcgttcgttttgtggaagggaaaccgctgatgctggaagacagctatatgccggtaaaactgttccgcaacctatcgctgcaacatctggaagggtcgaagtttgaatatattgaacaagagtgcgggattctgattggcggtaattatgaaagcctgacgccggtgctcgccgatagactgctggcgcggcaaatgaaggtagcggaacacacgccactgctgcggatcacctcgttgtcatatagcgagagcggggagtttttgaattattcagtgatgttcagaaatgccagcgaataccaggtggagtaccatttacggcgactccacccggagaagagttaa

SEQ ID NO: 15482 - DNA, 1617 bp, Escherichia coli
atgctcagtcaaattcaacgctttggcggcgcgatgttcacgccagtgctgctgtttcccttcgccgggattgtggtgggtcttgccatcttgctgcaaaacccgatgtttgtcggggaatcactgaccgatccgaacagtttattcgcgcaaatcgtacatattattgaagagggcggttggacggtattccgtaatatgccgctgatttttgctgtcggtttacccattggccttgcgaagcaagcgcaggggcgtgcttgtctggcggtgatggtgagtttcctgacctggaactatttcatcaacgcgatgggaatgacctggggaagctacttcggcgtcgatttcactcaggacgcggtggcaggtagcgggctgacaatgatggcgggaattaaaaccctcgataccagcattatcggcgcaattatcatttccggcattgtgacggcgttgcataaccgtctgttcgataaaaaactgccggtgtttctcggcattttccaggggacatcttatgtggtgattatcgccttcctggtgatgatcccctgcgcctggctgacgttgctcggctggccaaaagtacaaatggggattgaatctctgcaagcgttcctgcgttcggcgggtgcccttggggtgtgggtttacaccttcctcgaacgtattctgatcccaaccggtttacaccacttcatctacggaccgtttatctttggtccggcagctgttgaaggcggcattcagatgtactgggcgcagcatctgcaagagttcagtttgagcgccgagccgctgaaatcgttgttcccggaaggcggttttgccctgcacggtaactcaaaaatctttggtgccgtgggcatttctttagcgatgtacttcactgccgcaccggaaaatcgggtaaaagtggcgggcttgctgatccccgcaaccttaaccgccatgctggtgggaattaccgaaccgctggaatttaccttcctgttcatttcaccgttgctgtttgcggtacacgccgtgctggcggcctcaatgtcgaccgtaatgtatctctttggtgtggtgggcaacatgggcggtggtttgattgaccaggttttaccgcaaaactggatcccgatgttcagcaaccacgcggatatgatgctgacccaaatcgccattgggttgtgctttaccctgctgtacttcgtggttttccgcaccctgattctgcaattcaacatgtgcacgccgggacgtgaagatgcggaagtgaaactctactcaaaagccgaatacaaagcctcgcgaggccaaaccaccgcggcagagccaaaaaaagagctggatcaggctgccggtatcctgcaagccctgggcggggtcggcaatatctccagcatcaacaattgcgcgacgcgtctacggattgcactgcatgacatgtcacaaacgctggatgacgaagtctttaaaaagctgggagcgcacggcgtcttccgtagtggcgatgccattcaggtgatcattggtctgcatgtatcccagctgcgtgaacagctcgatagcttaattaattctcatcaatcagcagaaaatgttgccattacggaggcagtataa

SEQ ID NO: 15483 - DNA, 1323 bp, Escherichia coli
atgaccaaattctcagtggttgtcgcaggcggtggaagcacctttacgccaggcatcgtgttgatgctcctggcgaatcaggaccgtttcccgcttcgtgcactgaaattttatgataacgatggcgcgcggcaggaagtgattgccgaagcctgtaaagtcatcctaaaagaaaaagcgccggacattgcgtttagttacaccaccgatcctgaagtggcattcagcgacgttgattttgtcatggcgcacatccgcgtcggcaaatacccgatgcgcgaactggatgaaaaaatcccgctgcgccacggcgttgttggtcaggaaacttgcggacccggcggaatagcgtacggcatgcgttccattggcggcgtcctggaactggtggattatatggaaaaatattcaccaaatgcctggatgctcaactactccaacccggcagctattgtcgcagaagccacgcgtcgtctgcgcccgaatgcgaaaatcctcaacatctgtgacatgccaatcggtattgaaagccggatggcgcaaattgttgggctgcaagatcgcaaacagatgcgcgtgcgctactacggcctgaaccactttggctggtggacatcaattgaagatttgcagggcaacgacctgatgccccagctgcggcaatatgtctctaagcacggttatgttccaccgcagcaagatacacatactgaagcgagctggaacgacacctatgcaaaagcgcgggatgtccaggcactggacccggatacattaccaaacacctatctgaaatattatctcttcccggattatgtcgttcagcattccaaccctgaacatacccgcgcgaatgaggtgatggaacatcgcgagaaacaggttttcgatgcttgccgcgccattacggcggcagaaaattcagcggcgggcaagctggaaattgacgaacatgcgtcatatatcgtcgatctggcggcggcaattgccttcaacactcaggagcggatgttgctgattgtgcctaacaacggggcaatccataactttgatgatgaagcgatggtcgagatcccgtgtctggtcgggcacaacggaccagaaccactggtggtcggcgatatcccgcagtttcagaaagggttaatgagtcagcaagtggcggtggaaaaactggtcgtggacgcctgggagcagcgttcatatcagcacctgtggcaggcgattacgttgtcgaaaacggtaccgagcgccgcggtcgccaaagctattctggatgagttgctggaggccaacaaagcgtactggccagagttacgttaa

SEQ ID NO: 15484 - DNA, 744 bp, Escherichia coli
atgagcaggttgcgcgttttcctgcagacaggatggtttatcgcgggcctgatggcgggcttacccgccagtgccgcgcccgcagaaacatcgtcaatggccggtgtggcggtagccgctgcaacagcgacaccttcggatgcggcagccacgttacagtccatgcggtcctgtcggcgggagcctgcggcgctggagcggcttgactgttatgaccgcattctttcgccagagcagccagcctttggtggggctgcactggtgaaagcccgttaccagggcgaagcctggacccgcgccacagagcaggaaaaacgccgccagggcaataccacagggctgctggtgacgcaggtgccgggtgaacgcccgacggtagtgataaccaccccggctatcggccatgttccgccgcgcccggtgctgatgttcagttgcgtggacaatatcacccggatgcaggtggcgctgatgcaccctctggatgtccatgatatcgccgtcaccctgaatgccgacagccgggcattacgcagccactggtttgtgcgcgagaacggcaccctgctggagtccagccgggggttatccggtatcgatgaaattaagcaactgttcggcgcaaaaacgctgacggtggataccggcacagacaacgccgccggaaagctgacctttaacattgacgggctggcacgggttattgcgccgctacgcgacgcctgccactgggcgggagaataa

SEQ ID NO: 15485 - DNA, 2733 bp, Escherichia coli
atgatccagattgatttagccacgctggtaaagcggcttaacccctttgcaaaacaggcgctggaaatggctgcctcggagtgtatgagccagcaggccagtgagatcaccgttgcccatatgctgttgcagatgctggttatcccgcgcagcgacgtaagggtgattgccgaacgcacaggcatcagtgcggaggatttacgccaggcgctgaccgtggagagttatcccggcggacgttccgccgaaggctatcccagcttctccccgatgctgatcgaatggctcaaggagtcatggctgctggcctcagcccagatgcagcacagcgaactgcgcagcggcgtcctgctgcttactctgctgcattcaccgctgcgctatattccacccgctgctgcccgtctgctgacggccataaaccgtgaccagttacagcaggatttcaccgcatggacaaaagaatccgccgaatccgtggatctggctggtgggcaagcgttccgtgcaacagaaaccggcgacaccctgcttgcccgctatgccaaaaatatgaccgaagacgcccgtaacggaaaactcgatccggtactgtgccgcgaccacgaaatcgatttgatgatcgacattctctgccgccgtcgtaaaaataacccggtggtagtgggcgaagcgggcgtgggcaaaagcgcactgattgaagggctggcgctgcgcatcgtggcaggccaggtgccggacaagctgaaaaacaccgatatcatgacccttgacctgggcgcattgcaggccggagcgtcggtgaagggcgaattcgaaaaacgtttcaaagggctgatggcggaggtcatttcctccccggtgccgatcattctgtttatcgacgaagcgcataccctgattggcgcgggcaaccagcagggcgggctggatatctccaacctgctcaaaccggcgctggcgcgtggcgaactgaaaaccatcgccgccacaacctggagcgaatacaaaaaatacttcgaaaaagacgctgccttatcgcgccgcttccagttagttaaggtcagcgaacctaacgctgccgaagcgacgattattctgcgtggcctgtcggcggtctatgaacagtctcacggtgtgctgattgacgatgaggccttacaagccgcagcaacactgagcgagcgttatctctccggacgtcagttgccggacaaagcgattgatgtgctggacaccgcctgcgcccgcgtggcaatcaacctttcttcgccgccgaaacagatttcggcgctggccacgttaagccagcagcaggagacggaaatccgccagcttgagcgcgaaaggcgtatcgggctgcgtaccgataccgcccggatgacggaagtgctggtgcagtacgatgaaacactgacggcgctggatgaactggaagccgcctggcaccagcaacaggcgctggtacaggagattattacgctacgccagcagttactgggcgttgcagaggacacagatgccgtagtggatacgccgccagagtcagaacaggataatactggtgccataccggctgatgaagctggcagcgtacagccggaagagaccgctgaaacagtttccccggtacagcggctggcacagcttactgccgaactggacgccctgcataacgatcggttgctggtctctccgcatgtcgataaaaaacagattgcggcggtaattgccgaatggactggtgttccgcttaaccgcctgtcgcagaatgaaatgtcggtcatcaccgacctgccgaagtggcttggtgacaccatcaaaggccaggacctggcgattgccagcctgcataaacacctgctgaccgcacgcgccgacctgcgccgtccgggacgcccgcttggcgcgtttctgctggctggtcccagtggcgtgggtaaaaccgaaaccgtcctgcaactggcagagctgctctacggcggtcgccagtacctgaccaccatcaatatgtccgagttccaggagaagcacaccgtctcgcggctgattggttcccctccgggctatgtcggctatggcgaaggcggcgtgctgactgaggccatccgccagaaaccctactcggtggtacttctcgatgaagtggaaaaagcgcacccggatgtgctcaacctgttctaccaggcgtttgacaagggcgagatggcggacggcgagggccgcctgattgactgtaaaaacatcgtcttcttcctcacctccaacctcggctatcaggtgattgtcgaacacgccgatgacccggaaaccatgcaggaagccctgtatccggtgctggcagacttctttaaacccgccctgctggcgcgtatggaagtggtgccatacctgccgctgtcgaaagcgacgctcgctaccattattgccgggaaactggcccgcctggataacgtgctgcgcagccgctttggtgcggacgtgattattgaaccggaagtgacggacgaaatcatgagccgcgtcacccgcgcggaaaacggcgcgaggatgctcgaatcggtcattgacggcgacatgctgccgccgctctcgctgctgctgttgcagaaaatggcggctaacacggcgattgcccggattcgcctgtcggtggcagacggtgcattcacagcagacgtggaagatgttctgaacgacgagtccgtcacagaggatgaaacggttttatga

SEQ ID NO: 15486 - DNA, 1281 bp, Escherichia coli
atggctgaggaaaaacagcaatcccgccaggcctcactgactttacaggtgatgaatggcaacgaactggaaagcggacgcgccgcaaaatgcctgttcagcgaaaacggcggtgatattggccatacgccggaatgtcactggcaggtacaggaccgggcgggaagcattgctgcgcgtgcctgtaccgttatccggcacgacggagcctattgcctgcggtgcctgacgccgggactgatgattaatctggccccggtctcttccgatgcgctcatccgcctgcgccagggggatgagatccagctcggcgcactggcgctgaaagtgtttctgcatgacggtgtagctgttacctatgacgagcggatggcgaccccggaaacgattgtaatgaaccgcgacagtctggcggacaccctgttgaccaccgagggacaaccggcgtatccgggaatgccgttccagcatcagcttgcccccacggttgcgcacggtttttccagcgatccgctccaggcactccagacggaaagcctgatggtggcagatgatccgatcgccccacgcgtttcccggcccgttgcccccgcctccgatctgacaggtgcaaacgggatcaacacgccgtttatggatctgccgcccggcaatgcccgtcatgaggacggcgatgaattttctgccatggcgcagtaccacctggccgtaaccccgctgctgcgcggtatggagtgtccgctgacgctgcacaattctcaggatgcggatgagtttctcgaagaggccggacgggcgttgcaggccgccattaagggattgctgagtctgcaacaacaacagaacagcctgtcggataaacacctgcgtccactggaagacaacccgttgcgccttgatatggactatcccaccgcgctgaacgtcatgttcgccgagggtaaaagcccggtacatctcgccgcacctgcggccatcgccgaaagcctgcgcaacatccggcatcatgaagaggccaaccgggcggcgattgtggaagcgttgcgtgtcatgctggacgccttctcgccgggcaacctgatgcgccgctttgcgcaataccgccgcagccatgagctgcgccagaaaatggacaacgcctgggcatggcagatgtacagcaactattacgatgaactggcctccagccgacagcagggatttgaaatgctgttcaatgaagtttatgcccaggtctatgaccgggtgctgcgcgaaaaacagcgggagccggaagcatga

SEQ ID NO: 15487 - DNA, 255 bp, Escherichia coli
atgcacaacagaaatctgctgaaatttctgccagggctgcttatctgtctgatagtgttaaccagttgcgtgccgaagcaaaaaaatatgccatacgccttgacgcagcgaagcataccgcagatcttgccgctgccgtcagaggcaaaacaaccaaaaccgccgaaggaatgctcaccaacatgctcggagatattgcagcagaagctcagctttatgctgaaattgctgacgaacgctacatcgcaggagtga

SEQ ID NO: 15488 - DNA, 600 bp, Escherichia coli
atgtcgccggaggactggctgagtgcagaaatgcagggagagattgtggcgctggtccacagccaccccggtggtctgccctggctgagtgaggccgaccggcggctgcaggtgcagagtgatttgccgtggtggctggtctgccggggggcgattcataaattccgctgtgtgccgcatctcaccgggcggcgctttgagcacggggtgacggactgttacacgctgttccgggacgcttaccatctggcgggaattgagatgccggatttttcgcgggaggatgactggtggcgtcacggccagaatctctatctggataatatggaggcaacggggttgtatcaggtgccgttgtcagcggcccagccgggcgatgtgctgctgtgctgttttggttcatcggtgccgaatcatgccgccatttactgtggcgacggcgagctgctgcaccatattcctgaacaactgagtaaacgagagaggtacaccgacaaatggcagcgacgcacacactccctctggcgtcaccgggcatggcacgcatctgcctttacggggatttgcaacgatttggtcgccgtatcgaccttcgtgtga

SEQ ID NO: 15489 - DNA, 390 bp, Escherichia coli
gtgtcacaaacaccgttaatcaaaaccggcttactgaaagagataatttgtaaagcacttcccctgcccgtagacgataaatcgttgagcgaagtactgcatcaggttggtctggggaaattggctgcgcgtattcatgaccacgatcgctggggagatattctttccagcggcgaaaaacaacgtatcgccgtggcacgattaattttacgacgtccgaaatggatatttcttgacgaaactacctctcatcttgaggaacaagaggctatccgcttactgcgtttagtgcgtgaaaaactaccctcaagcggcgtcattatggttacacatcaacccggtgtctggaacctggccgatgatatttgtgacattagcgcggttttataa

SEQ ID NO: 15490 - DNA, 1704 bp, Escherichia coli
gtggataacggggcgcactttgacggcgaccagagcggcacggtgaatggtgtcacgccgccagcggtgcagcacctgaccgccgaagtcaccacagacagcggggaatatcaggtgctggcgcgatgggacacgccgaaggtggtgaagggcgtgagcttcctgcttcgccttaccgtggcagcggacgacggcagtgagcggctggtcagcacggcccggacgatggaaaccacataccgcttcaggcaactggcgctggggaactacaggctgacagtccgggcggtaaatgcgtgggggcagcagggcgatccggcgtcggtatcgttccggattgccgcaccggcagcgccgtcgcggattgagctgacgccgggctattttcagataaccgccacgccgcatcttgcggtttatgatccgacggtacagtttgagttctggttctcggaaaagcggattgcggatatcaggcaggttgaaaccacagcacgctatcttggcacggcgctgtactggatagccgccagtatcaatatcaaaccgggccatgattattacttttatatccgcagtgtgaacaccgttggcaaatcggcattcgtggaggctgtcggtcagccgagtgatgatgcatcaggctatctggattttttcaaaggagaaatcgggaaaacacatctggcccaggagctgtggacgcagattgataacggtcagcttgcgcctgacctggctgaaatcaggacgtccattacggatgtcagcaatgaaatcacacagaccgtcaataagaaactggaagaccagagtgcagcgatccagcagatacagaaagttcaggttgatacaaataataacctgaacagcatgtgggctgtgaagctgcagcagatgcaggacggacgcctttatattgcgggtatcggtgccggtattgagaacacccctgacggcatgcagagtcaggtgctgctggcggcagacaggattgcgatgattaatcctgcgaatggcaacacaaaaccgatgtttgttggtcagggcgatcagatattcatgaacgacgtgttcctgaaacgcctgacggcccccaccattaccagcggtggaaatccaccggcattttccctgacaccggacggaaagctgaccgctaaaaatgcggatatcagtggcagtgtgaatgcgaacgccgggacgctcaacaatgtcacggtaaatgaaaactgtacgattaagggcatgctggaggcgactcaggtcagaggtgacttcgttaaagctgtatccaaatcattcccgaaacaggctggtacgtggggtaatacggaaacaccaaacgggacggttacagtcaccatcagcgatgatcataactttgaccgtcaaatcattattccgcccattatctttaacggaatagcgtatagcgatccgggaagtggtaataacccgggaggtacaagatacacgggttatggttttgaagttcgcaaaaacggtgtattaatcgcatccagagaaactaaaggggccattcccggtagctacagtgcggttattgatatgccgagtggcaggggaagcgtcactctggagtttaagattttccagaaaggcaatcagggcgcaggtaacatcacagactgtacggtgattgtgaccaaaaaagctgcttccggtatcagtatccgttga

SEQ ID NO: 15491 - DNA, 249 bp, Escherichia coli
atgttgacatactcaaaaatagattcttacattatcccggtaacggcgtctttcatcggcctgccagttaccatcaatggtattggtaccctcgttctttctgtctgtgatgttaataagggcaaaattaatcagcatgtctggcaggatctgggaattcataccaatatccatagaagtgaatctattacgaacgtggggaaccctggcaccattttttgtgctgcccatatttgttttcatgtataa

SEQ ID NO: 15492 - DNA, 564 bp, Escherichia coli
  misc_feature (522)..(531): n is a, c, g, or t
atggagtatattcataaagattttaacttagctcatgtattaaaatatggtatagcatttcaccatggttcactacctctatttataagaaaaagaatagaggacttatattccaaaaagaaaataaattttatcttttgcacatcaactttacttgaaggggtaaacttacccacaaagaatgtttttatttatccattccctaaaaagactgttaacgatgaaaaaaaatgccgattagatttttggaatctggcggggcgagctggaagatacagaagtgaattgactggtaacatagtatgcctgaataccgctgataataactggagcaatgcagatgctaaaattagcctaggtaataatgttattatagaggatgaaataaactcaacattactacgccatcaaaaaatattaaattattttgatggtaaagttaaatctccaactaatgacattattcaactcagctcacttattctatcagaaatattaacttatttagataaaggttatatnnnnnnnnnnaggttatatagggcgaattttaaatacctttaa

SEQ ID NO: 15493 - DNA, 1215 bp, Escherichia coli
atgaaatttgaacgccatcatgaaatattgaaacgactcagtaaattcggttctgtaaaagtatccgatctgtccaatagcctcaatgtaacgaaagaaactattcgttcagatcttaatgaacttgccaggcttggctatctgactcgatgtcatggcggtgcttttatcgtcctagactcgcttgatactattgcgaaaaatgaaatcgcttatgcgcttgaaaattatgatacagcccagggaataaaaaaaggccactcaactatgaaaagtcaagtatgcgttattggttcgtttaatgttgatatcatcagttatttgccgaggcttcccactatcggagaatcgcttctggcaagtaattttatattttcaccggggggaaaaggctgtaaccaggcgctggcagcaagctttgccgatactgatgtttatttcataacaaaagtaggtacagatcactttagtgattatgcgatcaactttatgaattcgtctaagatttataaaagtataatttatcaaacgaaagaaacgcaaaccggaactgccacgatccttgttaatgaaggtactggcgataatgttattgcgatctatcccggtgccaacatgacaatgtcgtccgatgaaataactattcagaaagaagcgattattaattctgatgtcatacttctgcagctcgaaacaaattataccgctctgcaacaagcgatcacattggcgcaaaaaaacagtatcccggtcattattaacccggcaccctataatgatatcgtcaacgaacttattcaggatgttgattatatcacccccaatgaaacagaagctggtttactgtccggcatagacgtacacgatcttgaatcagctaaacgagctgcagaagctatccacaataaaggggtaaaaaacacggttatcacgctcggtagcaagggctcgctcgcatttgatggcaaaaaattcattcattcgccagcgtttccagcggtcgttaaaaatacggcaggagccggggatgcgtttaacggctctctggcatcaggacttgcgaaaggaaaatcactggaatcagcactgtgttatgccagcgcctttgcatccctagcggtggagacaagcaatgcttccgacatgcctgaacatgaatctgtgatacatcgaattcagagtatacattatcagcaaactatttttacgcattaa

SEQ ID NO: 15494 - DNA, 321 bp, Escherichia coli
atgtccgaaaatcgcgtcagtacagtaaacgcgctggtggttgcgaatacgggtctttcagcttgccggctttttcgacaagagttattggtatgtcacgttaaccggaaaagggaaaaagacatgctaaaacagcaggatatgacagaagccgccagagtggtgtttaatgaattaagcgttaccgacccggcgacagtcagggagattgcacagaatacttacctttcacgcgaacgctgccagttaatactgacccagcttgttatggcgggtctggcagactatcagtttggttgttacagacaccttcagtcctga

SEQ ID NO: 15495 - DNA, 690 bp, Escherichia coli
atgaataaccagtatttacagtttgttcgtgagcaactcatgattgccactgcagatctcagtgggtcgacaaaatgccagctggaagcctggcaggaaaatgccctgttcgatacagggcgttacagacgcaaaaaaattcgttaccgcgatgaggtaaccggaaaaatgatcacgcgggataatcccccgatccagggtaaacaatcactggcgaaaggctcatcaattgcgctggtcagtcctgttgagtttgcaacatcatcgtggcggcgtgctgttctggaactggaagaacatcagaaggcgtggttgttgtggtgttatggcggaaacatttgctgggagcatcagatcgcgataacgcagtgggggtggagtgaatttaaaactcagtccggctccagaaaaattgcagtgaaaacgctggagcgtgtgaagaagttgatctggctggcggcacaggatgtcagaggatgggttaccgggtgtgaggtctaccagagacaggagcttgccagactgtgtggagttaagcctgataactggagccataattatgcgaactactggcgtgagatgtgcgatatttttaagcgcctcgatagagaatccttgatttgctccgtgaaaataagagcgcaacaaaaagcgaccttttcacgacgagatattgcaaaagtcaattaa

SEQ ID NO: 15496 - DNA, 1188 bp, Escherichia coli
atgtcccctgtttcatcaattggtaatgatattagtagtgatttagcccgtcgaaaaatgaatgatcttcctgaaagccccataggaaataacctcgaagcactagcaccaggaatagaaaaactaaaacggacctctattgaaatggtcactttacttaacgcgttacaaccaggtgggaaatgtgttatcactggtgattttcaaaaagaattagcgtacttacaaaatgtaattctttataatgattcgtctcttcgtatggatttttttggttataacgcccgaattattcaacgatcagacaatacctgtgaacttacaattaatgaaccgttaaaaaaccaggaaatatccacaggcaatatcaatgttaattgcccattgaaagacatttacaatgaaatcaggagattgaacgtaatctttagttgtgggactggaggtatagttgatctatcctctctggacttacggaatgtcgatttagaactttatgattttacagataaacatatggccaatacaattttaaatccttttaaattggatgacacagattttactaatgccaacatgtttcaggtaaatttcgttagctcaaaacaaaacgccacaatctcatgggattatttgctaaaaataacgcctgttataacaagcattaacgatatgtattctgaagaaaaaattaagcttgtcgaaagttgtttaaatgcgcttggagatattaccgaagaacaattaaaaattatgaggcttgcaattatagaatctataccaagagcaactctaacagatcaattagaaaatgaattaacaaaagaaatatataaaagctcatcgaaaattaacaattacttgagcagaattaaattgccagagatgaaagcattctcatcagaaaaaatagattattacatcgatataatcattaaagattatgaaagcgtcaaaggaaatgcttatctgatcgatccaaacattaattacaatacagatttaaacatagaggactctagctcagaggaattccttccagataatacactcgagaaagacgaaaattctccagacaatggctttgaggtcgtaaaatataacacatatgaagcttataactcagagaagcaatattttaccagagaggactatacgtatgattacgaccttttaaatgcaatatag

SEQ ID NO: 15497 - DNA, 753 bp, Escherichia coli
atgcaactgcaacatggaaaaaatactacacaacaatatatatttggcgactttgtattaaaaaacaatggaatattattattcaaaaacaaagaatatcatattccaccgaaagaacttggcgttatcattctattacttaatgctgacggtgaaattgttagcaaagaagagattatcgataaggtctggagcgcgagtgttgccagtgatgaatctctaacacgatgtatttatgcattgcgcaaacttttgcatgagaataaacagtgtaagtatatcgaaacggtctatggtcgtggataccgttttactgtacctattgtgattgtgaccgataatgaaccggtaaagtcgaccaccactcttgccgtttttccctttcgtaccgaaggttcgatcaatgttctaaaactccattacgaacttgtccagggcctttcaaaatatgctttttgtggtttagatattttacccgcttcggtaacaaatgaggccagtgatttctccactatccatcagtttatcaataaaacaggtccagaatattatattatgggtcaggtcgttcactatggtaaaaactggcgtttatttattgagttaattcatgccagaacacataaattgattgatcatcaaagcattgatttcaatcccgataatcctctttccgtattattatcacaagtaattttaaatctattaatacacaacaaatgccatctctggattctgctgttatgtatatga

SEQ ID NO: 15498 - DNA, 738 bp, Escherichia coli
gtggcactacctttcgctgctgacgcttgtctggtcgcctcatcttttgaagcagacgcagatgatgccgatgacgccgctgaactggctgacgatgcggctgccgccttagaggaagcagcattgtctgctgaagtctttgcatttgtttcagaggtttttgctgcagaagcagacctcgctgctgcagtggcttgctcagtggctttgccagccttcgttgtggctgttgaagcggatgatgcggcgctttctgccgattttccggcggcggtggcactggctgaggcctgcccggcacttgttgacgcggcactggcagataatgcagccgctgtttttgaacctgccgcagctgaggcgctctgtcccgctgctgtttcagaagacttagcgttcgtctcggacgtttttgccgccttcgcggaatttcctgccgccgttgccgaggaagctgcactactggcacttgatgatgcattcgtttctgaagatttcgctgcctcttttgaggtcgccgcaccccgtgccgaggtggcagcttctgacgccttcgtggtcgctgtggatgcagaagtggctgccgatttttgtgatgctgcggcattcgtttctgacgttttcgcggcactggcgctggtagctgccgcgctttttgatgactctgcagcagcagcactttttgctgcttcacgggcctttgtcgatgccgttcctgcgctggaagacgctgactga

SEQ ID NO: 15499 - DNA, 426 bp, Escherichia coli; identical to SEQ ID NO: 5761

SEQ ID NO: 15500 - DNA, 2415 bp, Escherichia coli
atgctgcttctactgacacttttgcctgcgtgttcagtggcgggtatgcgctttaaccctgcattcctgtcgggtgatacagaagctgttgctgatttatctcgttttgagaaagggatgacatatctacctggtagttatgaggttgaaatatgggtcaatgattcgcctttgacatcacgtaaggttactttcaaagctgatgagcagaatcagttgatcccctgtttttcgctcgatgagttagttactttaggaattaacaaaagtgcattgccggaacaggcgcaagcagagggaaataattgtctcgatttacgtatatggttcgcagaagttcaatacactcctgaactggatgcgcaacgactcaaactgacctttccgcaggcaatattaaagcatgaagcccgtggttatattccacctgaggaatgggataatggtatcccggccattcttattaattatgatttttctggcaacagtgatcgtggagactatgcgtctgatagttattatttaaatctccgttcaggtttaaatttaggggcgtggcgttttcgcgattattctacatggagtcgttcaggtaattcaccgggtaaaattgcacatgtgagtagtacgttacaacgagtaattattccttttaaaagtgaattaacactaggtgatacctggtcttcatcggatgttttcgacagtgtgagtattcgtggtgctaaacttgaatccgatgaaaacatgctacccgatagccaaagtggttttgcccccactgtgcgcggtattgctaaaagcaatgctcaggtaacgatcaaacaaaatggctatgttatttatcagacatatactccaccgggaccctttgaaatcaacgatctgaaccctacgtcttccgctggggatttggaagttacgatcaaagagtctgataattccgaaactatctataccattccttacgccgctgttcccattcttcaacgcgaagggcatattaaatattcggcaactgccggtaaatatcgtagcaatagctataatcaaaacagtccgaatgtctttcaaggagatttgatttgggggttaccctgggatattaccgcctacggagggatgcaatactcaaataattatcgggcaatagcactcgggcttgggttcaaccttggtatgtttggtgcgacgtcatttgatttaacgcaagccaatagcacgcttgccgatggcagtaaacatcaagggcaatcgtaccgtttcctatattcaaaatcgttagtgcagacaggtacggcttttcagattattggttatcgctattcgacggagggattttattcgttgagtgataccacatacaaacaaatgtcgggtacggttatcgatccagatacccttaatgaaaaagactatgtttataactggaatgatttttataatttacgttataacaaaagaggaaagtttcaggcaaatatatcgcaaccattgggcgaatatggctctatgtatttggcggcaagtcaacaaacttactggaatacgaataataaagataccttgtatcaggtcggctataatacgagtgtacatgggatttatttaaatattgcttataattatagtaagtcaccaggttcagatgcggacagaatcttatccgtaaatgtctcattgccgatcagcaattggttatcactagctgtcgatgggcgtactgcgacaaattctatgacagcaacttatggttatagtcaggataatagcggtcatgtaaatcagtatgccggagtatctggatcgctgatggaacaacataatctcaactataatattcaacaaaattttgccaaccagaataatggcgaaaatggctcggtagggataaattaccgtggtacatatggttcactaaattctggatacagctacgataataatggtaaccagcaatttaactatggtttaagtggtgccctggttattcacgaaaatggtctcacgttaagccagccgttaggagaaacaaatatactgataaaagcacctggggcaaacaatgtaaatgtggaacgcggaacgggggttaaaacagactggcgtggctatgctgtcgtaccttatgccacggaatatcggcgtaataatatctctttagaccctatgtctatgagtatgcatacagaattagatgctactactatggaagtgatacccagcaaaggtgctttagttcgtgctgagtttaatgcacatgtcggtattcgaggtttatttaatgttcactatcgtaataaaccagttccatttggtgcgacggtcagtgtacccactgaggggacaactcagattacaggaatagtgggtgacagtggacaggtttatctctccggtttgcctttacggtaa

SEQ ID NO: 15501 - DNA, 234 bp, Escherichia coli; identical to SEQ ID NO: 13415

SEQ ID NO: 15502 - DNA, 411 bp, Escherichia coli
atggctcaggttgccatttttaaacaaatattcgataaagtgcgaaataatttaaactatcactggttttattctgaactaaaacgtcacaatgtctcacattacatttactatttagccacagagaatattcatcttgttcttgaaaacgataatacggttttaataaaaggacagagtaaggttgtaaatgtaagattttcaaaaaataaatgccttatagaagccaccttaaaaggattcaaatcaggagagttatcattttacgaatacaggaaaaatcttgctacagcaggggttttcagatggattacaaatatccacgaaaacaaaaggtattactatacctttgataattcattactctttactgagaacattcagaacactacacaaatatttccgcactaa

SEQ ID NO: 15503 - DNA, 207 bp, Escherichia coli; identical to SEQ ID NO: 7030

SEQ ID NO: 15504 - DNA, 621 bp, Escherichia coli
atggggcggacgtaccatgaggacaaccgttcgccggggagtctgccggggacgaagacgcagatgacgatacggtcgaagacctataaaggaagcggctttaatgaactgcggttcgaggacgcgacggacaaggaagaaatttacctgcacgcacagaaaaatatgcaagtcgttgtgctgaacagcaaggataagcgggtcaactatgaccggacggtcagcatcgggcatgatgaatccctggtggtggcaaatgaccggaaagtgacggttgaaggtaaacaggaccataaaaccaccaaagaccatgtcagcctgacagagggcaatcaggggctggaggtgaaaggcgatctggcacagaaaataagcggcgcgctgggtatcagcgtacagggagatattgttttacagagcgacagcaaaatcagtctgcgggtgggcggttcatttgtggtgatccattccggcggcgtggatattaagggcgcgaaaatcaatcttaacggcggaggcagtccgggagacgtgatcctgccgatgcgcccggtgatcctgaaagccgcagccggaagcgggacaatgtttgtggcgcactgcccgaaggaggataagtga

SEQ ID NO: 15505 - DNA, 330 bp, Escherichia coli
atgaaaacatttcgctggaaagtgaagccggatatggaggtgaactcgcagccatcggtgcgtgaagtgcgttttggtgacgggtactcacagcgtatggcggcagggctgaatgctgacctgaaaacatacagggtgacgctttccgtgacccgggaggaggcccggcatctggaagcgttcctggcagagcacggtggctggaaggcatttttgtggaagccaccctatgcataccggcagataaaggtgatctgtgccgggtggtctgcgcgggtcgggatgttgcgcgttgagttcagcgcggagtttaagcaggtggtgaactga

SEQ ID NO: 15506 - DNA, 1149 bp, Escherichia coli
atgagatcattagagattttttcaggagccggcggcttggctaaaggtctagagttggcaggatttcagcatgtaggatttgttgagttaaacaagcatgcatgtgattctttgcgacttaattttgatgaggagaaggtatttcagggagatattaaaaattatgacctttcatctctagataaaatagatattgttgctggcgggcctccttgccaaccattttcattgggcggaaaacataaagctcatgatgactctagggatatgtttccatttgcaataaaagcaattgaagtattgcaaccaaaagcttttatttttgaaaatgttaaagggttgcttagaaaatcatttgcggactattttgaatacataattcttcgtttgacttatccttgtttatcgttaagtaatgtaagtgattggagaatacatctagatgtattaagaaaagctcgcaaggataaacactgtgggtgtacatatgatgtcagttttaaattaatcaatgcagctgattatggagttccacaaattagggaacgggtcataattgttggtgttcgaagtgatttgaataaaaaatggtcttttccaagtgtaacgcatactcaagaaaaattgctgtgggaacagcatgttactggtgactattggcgaaagcataatattgatgcggttatagataaaggtatttctgagcgtttaatgaaacgttttggtattttccccccatcggggaaaagctgggttactgttagggacgcattaaagaatgttcctcaaccgtatgagtcacatggtattggagatcatatctttaaagatggcgctcgagtttatcctggtcatactggaagttatatcgatttgccttcaaaaacacttaaggctggcgctcatggcgtacctggaggtgaaaatatgattaggtatgaggatgggactgttcgttattttacggtttatgaagggaagcttcttcagacttttcctcgagagtttctgattgcaggagcttggggggaggctatgaggcagattggtaatgcagttcctgtgttgctagctcagaagatagggcagcaattgtataacttattgaatgaagaggttgagccgttattgtgctctaacttcaattaa

SEQ ID NO: 15507 - DNA, 645 bp, Escherichia coli
atgcacaataagaaatttgatagatctgagcatgtttatagaaatgactctttcctagagttaataaaagatgccgttcgtttttttagtggtacgcctgttcattcattaccaccaccggaacggtttcaaggtgctggggtgtatgctctttactatacaggacattattcattatatgatgaatattctcgtataaataggttggcatataaccttcctatttatgttggcaaggctgttcctgctggttggcgtcagtctagaattagtgatcatgaaactagggctggttctgaactatctaatagaattagagaacatggccgaaatatagcaaaaacatcgaatctagatttgtgtgatttttcatgtcgctttgttatctttgaggctacggggtctgatatgattagtacagttgaggccgctcttattaaaatttataagcctttgtggaataccgttgttgatggctttggaaatcatacccctggtgccgggcgatttgcgcaagctaaatctgattgggatgtaatacatcctggcagggagtgggctgagaaatgtacaggtgttcattctgagccatactttattgaggagagaattaaacagtatttttctaagagtaattttacataa

SEQ ID NO: 15508 - DNA, 234 bp, Escherichia coli
atgagcgaatatttcagaatacttcagggactgccggacggctcctttacccgcgaacaggcggaagccgttgccgcacagtaccggaacgtctttatcgaggatgatcagggaacgcattttcgcctggttgtccgcaataacaatggcctggtctggcgtacctggaattttgaggacggtgccgggtactggatgaaccatgtcatccggaatttcggcattcttaagtaa

SEQ ID NO: 15509 - DNA, 528 bp, Escherichia coli
atgagtgcacgtggtatcaacaaggtcatcctcgtcgggcgtctgggcaatgatccggaagtccgttacatccccaacgggggcgcagtggcaaacctgcaggtggctacgtcagaaagctggcgcgacaaacagacgggggagatgcgggagcagacggaatggcaccgcgtggtgctgttcggcaagctcgcggaagtggctggtgaatatctgcgcaagggcgcgcaggtctacatcgaggggaaactccgtacccgtagctgggaagataacggtatcacccgttacgtcactgaaattcttgttaagaccacgggcaccatgcagatgctggggagtgcaccacagcagaacgctcaggcgcaaccgaagcctcagcagaatgggcagccacagagtgctgacgcgacgaaaaaaggtggcgcgaaaacgaaaggccgtggacgtaaggccgcgcagcccgagcctcagccgcaaacgccggagggggaggattacgggttttcagacgacatcccgttctga

SEQ ID NO: 15510 - DNA, 237 bp, Escherichia coli
atgactcatactatcgtttacgcaagccccgtgattgcggttatgctgggcggtgaagctgtcctgggattgctggcacgttatgcttcacaactaaatgcttttgccatctcactgactgtcaaaagtgcgctggcatttttaatattaattatttattttggcccaatactggctgaacgagttatgccgttatcctttttccaagaacaattgcaattatacattgataaatag

SEQ ID NO: 15511 - DNA, 1113 bp, Escherichia coli
atggcaaataaaactgaaaagccaacacaaaagaaactccaggatgcttctaaaaaaggtcaaattctaaaaagtagagacttaacagtctctgtaataatgcttgtgggtactttatatctcggatatgtatttgatgtgcatcacattatgtcgattcttgaatacatccttgatcataacgctaaaccggatatttgggactattttaaagctatggggataggttggttgaaaacgatcattccttttttgctggtttgtatgtttacaacaatacttgtttcatggtttcaaagtaaaatgcaattagcaactgaagctattaagtttaagtttgattcattaaatccagtaaatggcttaaaacgtatatttggcttaaaaaccgtaaaagaatttgttaaagcaatactttatattattttttttgcattggcgatcaaattattttggagtaaccataaatcactgctttttaaaactcttgatggagatatcatttctttattatcagattggggagagatgctattccttctcatactgtattgtctcggcagtatgataattgtcttaatttttgattttatcgctgaatattttttatttatgaaagatatgaaaatggataaacaagaagttaaaagagaatacaaggaacaagaaggaagtccagaaattaagtctaaacgcagagagcgccatcaagaaattctttctgagcaattgaaatctgatgtcagtaatagccgtttgatgattgccaaccctactcacattgccatagggatatactttaagccacatctgtcacctatcccattgatttctgtaagagaaactaatgaggtagcattagccgtaaggaaatatgcaaaggaaatcgggataccaattattacagataaaaaattagcacgaaaaatttatgctacccatcgtcgctacgattatgtgagcttcgaaaatatagatgaaatattacgtcttctgctgtggcttgaagatgtggagaatgccggacaacctgttccagatgaacagttctcttcagaagataaattcattgagggtgaagacacagaaatcgagaataaagataataattga

SEQ ID NO: 15512 - DNA, 477 bp, Escherichia coli
  misc_feature (433)..(442): n is a, c, g, or t
ttgaacaagagattagaaacagagttatttaaatcaatagttgaacatactccactaatctcgatagaccttattataagaaacgaagatggtaaggcgctgcttggtcagcgccttaatcgtccagcacaaaattattggtttgtgccggggggacggattcttaaagatgagtctttcgagaacgcattcaaaagagttacttttgaagaattgggtgttcaaattagcattaatgaagcaaaatttcttgggatttatgaacatttctacagcgacaatttttctgggacttgtttttcaactcattatgtcgtacacggatatgagattagtttgatgccacatcaaattaactatccaacacaaattctcaaggcgtgtaacatccataagtttacgaggcgaaccatctggttttgttatatcaaannnnnnnnnnactacaacatagtacttacaattggttcgatatag

SEQ ID NO: 15513 - DNA, 396 bp, Escherichia coli
atgaaacatactgaactccgtgcagccgtactggatgcactggagaagcatgacaccggggcgacgttttttgatggtcgccccgctgtttttgatgaggcggattttccggcagttgccgtttatctcaccggcgctgaatacacgggcgaagagctggacagcgatacctggcaggcggagctgcatattgaagttttcctgcctgctcaggtgccggattcagagctggattcgtggatggagtcccggatttatccggtgatgagcgatatcccggcactgtcagatttgatcaccagtatggtggccagtggctatgactaccggcgcgacgatgatgcgggcctgtggagttcagccgatctgacttatgtcattacctatgaaatgtga

SEQ ID NO: 15514 - DNA, 435 bp, Escherichia coli
gtgttcgacggtgagctgagttttgccctgaaactggcgcgtgagatggggcgacccgactggcgcgccatgcttgccgggatgtcatccacggagtatgccgactggcaccgcttttacagtacccattattttcatgatgttctgctggatatgcacttttccgggctgacgtacaccgtgctcagcctgtttttcagcgatccggatatgcatccgctggatttcagtctgctgaaccggcgcgaggctgacgaagagcctgaagatgatgtgctgatgcagaaagcggcagggcttgccggaggcgttcgttttggcctggacgggaatgaagttatccccgcttccccggatgtggcggacatgacggaggatgacgtaatgctgatgacagtatcagaagggatcgcaggaggagtccggtatggctga

SEQ ID NO: 15515 - DNA, 834 bp, Escherichia coli
  misc_feature (474)..(483): n is a, c, g, or t
atgagtcacgtagctgtttccttcgaatccccagaatatacagctgatgttgatgctataggtactttacgattattggaagctattcgttttttgggattagaaaaaaaaacccgattttatcaggcgtcaacctctgaattgtatggattagttcaggaagttccacaaaaagagacaacgccgttctatcctcgttcaccttatgccgtagctaaactgtatgcatattggatcactgtaaactatcgtgaatcttatggaatgtatgcatgtaacggtattttgttcaatcatgaatccccacgtcgtggggaaacgtttgtaacacgtaaaatcacacgtgctatagctaatatttcgcagggaatagaaaaatgcttatatcttggcaacatggattctttacgtgattgggggcatgcgaaagattatgttcgtatgcaatggatgatgcttcaacaagaccagccnnnnnnnnnntctgtacgtgaatttgtccgtatgtctgctaaagaagttggacttgaacttgagttttccggtactggtgttgatgagattgcatttgttgtaaataaaacatcagattgcgccgttggtgttaatattggtgatgttattgttcgcgttgaccctcgttattttcgaccagcagaagttgaaactcttcttggtgatccaacaaaagcaaaaaatgtcttgggttgggagccagagattacagttgaagaaatgtgtgcagaaatggtggctagtgatttagaaaaagctaaacagcatgcacttcttaaaagccatggttttgacgtggcagtctctttggagcgttaa

SEQ ID NO: 15516 - DNA, 411 bp, Escherichia coli
atgtcagcaggaagtcagtataacccttatctgaaaatttcgtatcaggcaacgccagatcttaatctggccttacgctatcgctatgactggaaagctttccgacagacggatttagatggcaacagggcgcgtaatgatcagcatcagtttgatggttatgtgacatacaaaattaatgattcatggttgtttgcatggcagaccacggtatatacgaaggttaataatttcaaatatgggaatcataaaaaaacagcaactgaaaatgcatttgttctgcaatataaaatgtcaccggtgttcaccccatatatagaatatgattacttggataaacaaggggtgtataaggggaaagataataaacatgaaaatagttaccgtgtcggtgttctgattaatttttaa

SEQ ID NO: 15517 - DNA, 288 bp, Escherichia coli
gtgctgggctggaaatattcaggcaatcgtcatcacccgactgaaaagcccgttaccagcctgcaaccgctcattgagagcttcacacacccgaacgcgattgtgctggacccgtttgcaggcagcggctcaacctgtgtggccgccctccagtccggacgccggtatatcggtgtcgagctgcttgaacagtatcaccgtgccggacagcaacgactggccgccgtgcaacgggccatgcagcagggggccgcgaatgataactggtttgaaccggaggctgcgtaa

SEQ ID NO: 15518 - DNA, 375 bp, Escherichia coli; identical to SEQ ID NO: 5335

SEQ ID NO: 15519 - DNA, 354 bp, Escherichia coli
atgcgtgattttcagaatgcctttgatgccgcccttgccggggtggacagtacgattgttgaagtgatggggatccgtgcgcagttcacctccggagcacaacgtggcggcgaagttcagggggtttttgacgatccggagtcgctgggttttgccggtggcggggtccgtattgaaggaagcagcccgtcattatttgtgcggacggatacggtgcgtgccgtgcggcgtggtgacacgctgaccattaacggcgagatgttctgggtggatcgtgtttctccggatgacgggggaagctgttatctctggctcaaccgtgggcaaccacccgctgttaaccggcgacgataa

SEQ ID NO: 15520 - DNA, 651 bp, Escherichia coli
atgaaaacgcataaaatgcggggattcactggctgcacgctcaatctgacaggcgcctctcactttgggcgtggagccacggatggactttggccagaccgagccttcaatacgcttgtcacccaggaacgtcggagagccttcctgttcaatatcatcatcaaaggcagcaagttcatcataacccgccacatccaccgacttttcacggtagttttttgccgctttaccgcccaggcaccagaagccacgcccattagtgaaacgcttcatggtgagcgtgttatcccggtgctttttgccataccacggagccagcgccagcagcgacggaatatcgcggatggtcggctcaacgtgggttttcataaagttctcggcatcaccatccgtcggcaaccagataagtgtgttgcgctgcttatgctctataaagtaggcataaacacccagcagcattttggaataaccgacacgggcagacttcaccacattcacctcacggatgtagtcgctgcccatcgcattcatgatggcccgctgaaagggcagtgtttcccagcgcccttcctggtatgcggattctttcgggagatagtaattagcatccgcccattcaacggcggtctgtggctccggcctgaacagtga

SEQ ID NO: 15521 - DNA, 225 bp, Escherichia coli
gtggtggaaaccgcattctgtactttcgtgttgtcgcggatcgcaggtgaaattgccagtattctcgacgggctccccctgtcggtgcagcggcgttttccggaactggaaaaccgacatgttgatttcctgaaacgggatatcatcaaagccatgaacaaagcagccgcgctggatgaactgataccggggttgctgagtgaatatatcgaacagtcaggttaa

SEQ ID NO: 15522 - DNA, 189 bp, Escherichia coli
atgaaaacgttattaccaaacgttaatacgtctgaaggttgttttgaaattggtgtcactatcagtaaccctgtatttactgaagatgccattaacaagagaaaacaagaacgggagctattaaataaaatatgcattgtttcaatgctggctcgtttacgtctgatgccaaaaggatgtgcacaatga

SEQ ID NO: 15523 - DNA, 342 bp, Escherichia coli
atggttgatcattttgagtacgaggaagattttgaaacagatgactttgatatcaaaaaaagcgaaatcgagattaatgatgaaaatgactatcagcagattaatagttttgaagacttgcctgtaaaaattgagtttgttcttggaaagaaaattatgaatctatatgaaatagatgatctctgtgcaaaaagaattatatctttgcttcctgaagcggagaaaaatatagagatacgtgtaaatggcgcgctaactggctatggcgaacttgttgaagtggatgataaattgggcgtagaaattcattcttggttatcagggaataataatgtcaaatag

SEQ ID NO: 15524 - DNA, 426 bp, Escherichia coli
atgcaatatgcgaaacctgtcactctgaatgttgaagagtgcgaccgtctgttttttctgccttacctgtttggccaggattttctgtatgtcgaagcgtctgtgtgcgcgctggcgaaaaaaatgatgccggaatatgaaggcggattctggcacttcatccgcctgccggacggtggcggttacatgatgccggatggcgaccgttttcatctggtcaacggtgaaaactggtttgaccgtaccgtgagtgctgatgccgcaggcatcatccttacctcccttgtgattaaccgccagttgtggctgtaccacgacagcggggatgcagggttgacacacctgtacaggatgcgcgatgcgcagttgtggagccacatcgaatttcaccccgaatgcaacgcgatttacgcggcacttgactga

SEQ ID NO: 15525 - DNA, 582 bp, Escherichia coli
atgaatcttgccctaagaaaaattatatatgatccaattagttatattcatccccaacgagtaagtttgaataatgcacgtattagcaatccggtacttagatctattaccaatgaaatgatactcctacagtacaatctttcagttgagcatttcagtctgaatagttcacttatttactacataaacaattggaaattatttccattgatctgtttactcagtggttgtcacttttatcgagaaaggtttgcagaacgcggatttttttacaaggttcctgatgtgctaaggaattatttatcagctataccggtggaaataaatgaaaaggcacgatataaacctggtatcgttaactatcagaatatcatcacatgtggtttttcaacgttgttgccctatctaaggcaacaaccgttggcaatgcagcaacgatttaatttattatttcctgattttgttgaccacatacaattgccgttaccacttgcgtctactcttttggagagaattacattttatgcgaaaaaaaatagagatgagcttgataaactctcctgcaaatggtgttgtgattaa

SEQ ID NO: 15526 - DNA, 282 bp, Escherichia coli
atggttcatccagtacccggcaccgtcctcaaaattccaggtacgccagaccattgttccgttattacggacaaccaggcgaaactgttcgccgtggtcatcctcgataaagacgttccggtactgtgcggcaacggcttcggcctgtttgcgggtaaaaggaccgtcagtcagtccctgaagtattctgaaatattcgctcatcctcatatctccggtgatgccccgcgcaggacggggcggttatcacagtcaggccagtcagaacgggatatcgtctga

SEQ ID NO: 15527 - DNA, 492 bp, Escherichia coli
atgtcttctgaggcggtggtggaagtctcatttggttttccttcattgattggttttacttttatgtccgggatgatcaacaagttcaaagaggtgttcccgaaagcgcaggtttctatgtatgaagcgcaactgtcttcgttcttaccggcaatccgcgacggtcgactggattttgcgattggtacgttaagcgcagaaatgaagcttcaggatttacatgttgagccgctgttcgagtccgagtttgtgctggtagccagtaagtcccgaacatgcaccggcaccaccacgctggagtcgttgaagaacgaacagtgggtgttgccacaaaccaatatggggtactacagcgagctgctcaccacgttacaaagaaatggcatcagtattgaaaacatcgttaaaaccgactcagtcgtgacaatttataatcttgttctcaatgctgatttcttaactgtaattccggtaatgactccaacttactga

SEQ ID NO: 15528 - DNA, 252 bp, Escherichia coli
atgatgaacatcgaagaactgcgtaaaattttttgtgaagatggcctctatgctgtgtgcgttgaaaatggaaatcttgttagtcattaccgcattatgtgtttgcgaaagaatggggctgcgttaattaattttgtggatgctcgggtcacggacggatttatcttgcgcgaaggtgagtttgtcacttcattacaggcattgaaagagatcggaataaaagctggcttttctgcttttgcagaagaataa

SEQ ID NO: 15529 - DNA, 327 bp, Escherichia coli; identical to SEQ ID NO: 13325

SEQ ID NO: 15530 - DNA, 312 bp, Escherichia coli; identical to SEQ ID NO: 6076

SEQ ID NO: 15531 - DNA, 363 bp, Escherichia coli
gtgaatacttaccacatcacactaccctggcctccgagcaataatcgctattatcgccataatcgcgggcgcacgcacgtcagcgcagaggggcaggcataccgcgataacgtcgcccgaatcattaaaaacgcaatgctggatatcggcctggctatgcctgtgaaaatccgcattgagtgccacatgccggatcgccgtcgccgtgacctggataatctgcaaaaagccgcttttgacgcactcactaaagcaggtttctggctggatgatgctcaggtcgttgattaccgcgttgtgaagatgcctgttaccaaaggtgggaggctggaactgaccatcaccgaaatggggaatgaatga

SEQ ID NO: 15532 - DNA, 219 bp, Escherichia coli
atggcagacatcattgattcagcatcagaaatcgaagaattacagcgcaatacagcaataaaaatgcgtcgtctgaactaccagactgtatctgccactcattgttgtgagtgtggcgatccgatagatgagcgaagacgcctggtcgttcagggttgtcggacttgtgcaagttgccaggaggagatcgaacttaagaacaaacaatggggactatga

SEQ ID NO: 15533 - DNA, 555 bp, Escherichia coli
atgctgaccggggaggtcgaacaaaaagttaccgcagacatgatgattgagtttatcggtcaggatggggctaaaacgtgtgaggaactggcgggtaagttcggcgtcagtactcgcaaggttgcctccacgctggcggtggtaaccgcaacggggcggctggcacgcgttaatcagaacggtaaatttcgttactgcatgccgggcgataatttaccagcagagccgaaagccgcgctggtaacggaaagtgatggtaaggcctttcctcagccagcaggtgctgcgttaccagtccgggaagccgcaacacaggaagaaattaaaacagaaactgtggcggacattgtgcagccgttgccatcgtttaccgaaacgcaagcagatgagctgatttttccgtcccttcgcagggcaaacctggcgctgcgcagggcgaaaagtgatgttcagaagtgggagcgagtctgcgccgcgctgcgggagctgaacaagcaccgggatattgttcgacagattagtgattcttcccgccgtgttgtatcggaaaagtga

SEQ ID NO: 15534 - DNA, 297 bp, Escherichia coli
atgaacgcttattacattcaggatcgtcttgaggctcagagctgggcgcgtcactaccagcagatcgcccgtgaagagaaagaggcagaactggcagacgacatggaaaaaggcctgccccagcacctgtttgaatcgctatgcatcgatcatttgcaacgccacggggccagcaaaaaagccattacccgtgcgtttgatgacgatgttgagtttcaggagcgcatggcagaacacatccggtacatggttgaaaccattgctcaccaccaggttgatattgattcagaggtataa

SEQ ID NO: 15535 - DNA, 216 bp, Escherichia coli; identical to SEQ ID NO: 5123

SEQ ID NO: 15536 - DNA, 270 bp, Escherichia coli
atgctgggccgtcgtccgaacagcatacttaaagccggtcagcatcggtatcagcgggcattcattcagcgattaaaaaacggtcgctggcatgtcatgcagcgtgtggccgggaaaaaccgttaccctattgatgtggtgaaaatcccgatggcggccccactgaaacaggcgtttgatgagaatgttgaccgtatccggcgtgaacgcctgcccggagaactggcatccgcgctgaaacaacaactgaggattgcgataaaacgatga

SEQ ID NO: 15537 - DNA, 231 bp, Escherichia coli
atgaccccgctgatgctggatggcactacccgtaagctggttgtgtgggatggcaccaccgacggtgcagccgttggcattctggcggttgctgctgaccagaccagcaccacgctgacgttctacaagtccggcacgttccgttatgaggatgtgctctggccggaggctgccagcgacgagacgaaaaaacggaccgcgtttgccggaacggcaatcagcatcgtttaa

SEQ ID NO: 15538 - DNA, 153 bp, Escherichia coli
atgagctacggtttcaccactattgtgcgtaaaactcgtggtgatgacattgatgctgcctgtggtcagttggcgggcgatgttatcgaccgtacgaaacgtaccctgcgtaaacggatgcagggtgaagccatcgacattaaagcggtctga

SEQ ID NO: 15539 - DNA, 1035 bp, Escherichia coli
atgtctgaacaattagtcacacctgaaaacgtcaccacgaaagatggaaaaatcaacctgctggatctcaaccgtcagcagatgcgggagttttttaaagatttaggtgaaaaacccttccgcgccgatcaggtgatgaagtggatgtatcactattgctgcgacaactttgatgagatgaccgacatcaataaagtgttgcgcggcaaactgaaagaggtggcggaaatccgtgcaccggaagtggttgaagaacagcgttcatctgacggcaccattaaatgggcgatcgccgttggcgatcagcgcgttgaaacggtgtatatcccggaagacgaccgtgccacgctctgcgtctcttcgcaggtggggtgtgcgctggagtgtaaattctgttccaccgcccagcagggctttaatcgcaacctgcgggtatcggaaattatcggccaggtgtggcgtgcggcgaaaattgtcggcgcagcaaaagtcaccggtcagcgcccaatcactaacgtagtgatgatgggtatgggcgagccgctgctcaacctgaacaacgtcgttccggcgatggaaatcatgcttgatgatttcggttttggcctgtcaaaacgtcgcgtcacgctttccacttccggtgtggttccggcgctggataaactcggcgatatgatcgacgttgcgctggcaatttccctgcacgcgccgaacgacgaaattcgtgacgaaattgtgccgatcaacaaaaagtacaatatcgaaacgttccttgcggcggtgcgccgttatctggagaaatccaacgccaatcagggccgagtcactattgaatacgtgatgcttgaccacgttaacgacggcactgaacacgcgcaccaactggcagaactgctgaaagatacgccgtgtaagatcaacctgatcccgtggaacccgttcccgggcgcgccgtatggacgcagttcgaacaagccgtatcgaccgtttctcaaaagtgctgatgagctacggtttcaccactattgtgcgtaa

SEQ ID NO: 15540 - DNA, 2277 bp, Escherichia coli
atgctgacagccgcgccttttatcatcattctggcagcatgggcagcagataaactctggcctctgccattgcaagaagtgaatcctgcacgcgtggtggtggcgcaggatggtacgccactctggcgtttcgccgatgctgacggcatctggcgttatccggtaacaatcgaagatgtttctccacgttaccttgaagcgctgatcaattatgaagatcgctggttctggaagcatccgggggtgaatccattctcggtggcgcgcgcagcatggcaagatctcgcttcgggacgggttatttccggcggcagcacgctcaccatgcaggtggcgcgcctgcttgatcctcatcccaaaacgtttggcggcaaaattcgccagctctggcgcgcgttgcaactggaatggcatctgtctaaacgtgaaattctgaccttgtatcttaaccgtgccccgtttggcggtacgttgcaggggattggtgcggcaagttgggcttatctcgggaaatcgcctgcgaatttaagctattccgaggcggcaatgctggcggtgttgccgcaagcgcccagccgtcttcgcccggatcgttggccggagcgtgccgaagccgcgcgtaataaagtgctcgaacggatggccgtgcaaggtgtgtggtcccgtgagcgggtaaaagagtcaagggaagaacccatctggctggcaccccgacaaatgccgcaactggcaccgctgttttcgcgcatgatgctcggtaaaagcaaaagcgacaaaatcgttactacgctggatgccggtcttcaacgacgtctggaagaactggcgcaaaactggaaaggacgattgccaccgcgcagctcactggcgatgatcgtggttgatcataccgatatgcgtgttcgcggctgggtgggatcggttgatctcaacgatgattcacgctttggtcatgttgatatggtcaatgcgatccgatcgccaggatcggtgctcaaaccgtttgcttatggtctggcgctggatgaaggcgtgatccacccggcatcgctgttgcaagacgtcccccgacgcaccggtgattaccgacctggcaactttgacagcggttttcatggcccgatcagcatgagtgaggcgctggtgcgatcgctgaacttacctgctgtgcaggtgctggaagcctatggaccgaaacggtttgcggcaaagttacgcaatgttggattgccgttgtatctgcccaacggtgctgcgccgaatctttcgctcattctcggcggcgctggcgcaaaactggaagatatggcagcagcgtataccgcgtttgctcgccacggcaaggcaggcaaattgcgcttacagcctgacgatccgctgcttgaacggcctttaatgtcgtcgggggctgcgtggatcattcgccggattatggctgatgaagcgcaacccttgccggatggtgccttgccgcgcgtcgccccactggcatggaaaacgggcaccagctatggctatcgtgatgcctgggcgattggggttaacgctcgctatgtcattgggatctggactggcagaccggacggcacgcccgttgttggtcagtttggctttgccagtgccgtaccgctgttgaatcaggttaataatatcttactgtcgcgcagtgtgaatttgccggaagacccacgtcctgactctgtaagtcgtggcgttatctgctggccgggcggacagtctttgccggaaggtgacggtaactgtcgccgccgcctggcaacctggctgctggacgggagccagccgccaactctattactgccggagcaggaaggcattaatggcattcgtttccccatctggctggatgaaaacggcaaacgtgttgccgctgattgccctcaggcgcgacaagaaatgataaatgtctggccgctaccgctggaaccctggctgcccgcatcagaacgtcgcgctgtgcgcttgcctccggcctcgacaatttgcccgccatacggtcacgatgcacaactcccgctgcagctaacaggtgtgcgcgatggcgcgattattaaacgtttaccgggcgcagcggaagcgactttgccgttgcaatcaagtggaggggcaggtgaacgctggtggtttctgaacggcgaaccgttaactgaacgtgggcgcaacgtgaccctgcatttgacggataaaggcgattatcaattgctggtgatggatgacgtggggcaaatagcgacagtgaaatttgtcatgcaatag

SEQ ID NO: 15541 - DNA, 459 bp, Escherichia coli
atgagtacagaaaacttacaaccagaacatcgtgatgacggattacccgctaaaatagcagcattagcaagtctgcaagccataattgcaaggatggcttcaaattcacaattaatgaaaacgtgggccatcactatcgttactggattcatagctatcaagtcgacttttggtggacttgggtatctatcttatctagtgccgattcttatttgcatttcattctcctttcttgactcttattatctttctcaagaaaagatatttagagatgtttataataaattagcggccattcccgttgggaacgaaatgatgtacctagatttcaaaggcgaaatatataaaacttcacaagaagaaaataattcattaatgatttgtttcaagtccccatcaattagtttattttatatcccaatggcaatcatttctacagtgatattaatcataggataa

SEQ ID NO: 15542 - DNA, 819 bp, Escherichia coli
atgcttgttaaattcagaatagatcgaaatacaattacaaataacagcacaattttaaacgctaatgacaaccatttaatttactcaaacctaaatgacacagatataaactcaaaaatatttgacgctgtaaatggtgaaatatcagcaaagaaactagccgacgaactatttcctgaaaacgaaccacacatttttatatctcatagtagcaaagacgtaaatgtagcaataagtctagcaaacactctttatgcaaaatataagataacatctttcattgactcccaactttggggacatattgaccacgcactaaaggaaatgcataatcgatactgcaagatccccggctcatcttattaccactatgataaatctaataacctactatctcatatgcacgccatactaagtatggctttaatgagagtaatggataacgctgacagcgttatatttatcgaatccggcaactcaatttaccaatatatgggagatactaccattgctccccaagaagcaattgaaaaaacatctgaaacattatctccatggatatcctctgaggtgaattttgcaaataccttaagattgaaaggccataaagatagagaacaaccattaatggaaagcacagattcatactctttaaacaagagtaatattaaagcagactccttacccaaaataatacatgaagtcaacttaagtaaattcatagagatagacaacaaaaaattcaaagagtctttatcattaaatgaaacaaatccaataaaaactttagatatgatttaccaaatatatgctcaatag

SEQ ID NO: 15543 - DNA, 390 bp, Escherichia coli
atgccatttgctcgttatttctgcattttcataaacgttggtttgggagaagcggctaaaaggaatgtagggacaggggcgaatcagatacctgatatgggtagcttcacgctttctgtttcaggtactggatatcaaaaattaccatcaggttttattcttcagtggggttcaatcggcgtaccaggcattgcacaggatgtggtaacccattttccgattgcatttccaaaccgatgtctgcgtgttttggtctcacaagactacacaccagatagcggggctgttggttatattgcctgcgcaggttttagttccgacccggttaaatttatatccagagccggtactccaggtctcggcgcttcatttttagcgttaggctgttaa

SEQ ID NO: 15544 - DNA, 348 bp, Escherichia coli
atgaagcgtatgaagttagttctgacaatttcgttactgttttcctgctcatcggctttcgctgatttgcaatgcggaggataccgacttcatgcatctgataacgggtggacgaaaatcaacggcgaacaggtaacatctcagaaaattaagtttcttggccagaaagatgactgggacaacgttaaaaccgacatgggcctgatgccttcccgcgatggcaacaattacggctttgagtttgtgaagcgtaacggaaaagcttttctgaacgtccagcttctgcagaacagcatggatgcgcctagaatcatcggatcattcccttgtaaaaaggcgttacgctaa

SEQ ID NO: 15545 - DNA, 435 bp, Escherichia coli
atgcgtaatattcaacaggttttagagcgctggggtggatgggctgccgatagcaacaccacagtgagctgggctccaatagcggcgggatttaaagggctggtagtcagcagctcgcctggcaggctgagttgctgtgacgacgatggcctgattatcgatgcttgcgtctgtcggctgcagcaggtccgtaagcctgaggaactggacgtcattatgctgtactacgtctacgggttaagcaaacgtgagatagggcggcggcgtcgctgttctgaaggatttatccgccagcagttgcaggtagcagagggattcattgaggggtgtctctgcatgctgggtgtgagccttcagatggatcctgaggtcgaaattcaaagggatgaaaaaagtattagtgcgctacgcaaaaactgcgctacgctggtatga

SEQ ID NO: 15546 - DNA, 630 bp, Escherichia coli
atgcatatgatccaatacttgattgaccatacagagcatctggagaaaatagctggatatattttttcatgtttgattgttatgggagtctggataagaaagatcatttttaattataagtataaagagcctaaatatgtcaagaagttaattttatatttagttaagtatgaacgttatctggataaggaggataagagtgccatagaaaaaagaataaatgataaaattattcgtgatgcgctgaaattgcaatcttcttataaccgaagtgatgttatttacatttgcaatagattagaaaaaagacagtatataaatcaggtgattaagcttcagaattatatagagaaagataacggagtgtttttcatcaatgttaatttttcaggttttttatttattattagtcgtctgttttcctttctgtgttttgtgctgtttatccttttttctattatctgcattatttccatagggcaaaatgaaggccttttaaattatcttgtgtatatggttatgacaatagttttagagactgttggtttttggatgtatgatactttcccgtctaagaagaagatctgtgaactaaataaagaattgaggaagattaagattcctgagtga

SEQ ID NO: 15547 - DNA, 570 bp, Escherichia coli
atgccattcgtgctggaagatcagtcaaaggagggacgtttgagtagcgcttctaaacctgatagctacgaaaaagtccctctgatttctaatgttgctgctggtggcatcactggttttttaacattactggtgtcctcgtgggacggtcgttttccgtatattggttctgatttaaatacaataaagccatttcttttattaatgcttcccagttgcgctatgtttctggcgcattggataaagtcgattgggtttaaatggtccttaggtagcgttaatcgacagttattaagcattaataagaagaaagaaaaagaacttcgccgtgatattgaaaagtacaaaaatgttatttctaatgaaaagatagaggactttaaaagtcaacttgaacaagtattacaagatcgtcatgatattatttctaataattacgcacagaaactaagagaaagaaattatacgcaagaaaaatatcatgagcataaacaaaccgctgcaaatgataatattgagctgcaaagcatactggagaatcagaagttcaatcaaaaaggcattgactaa

SEQ ID NO: 15548 - DNA, 249 bp, Escherichia coli
atgattgcttttgctttttggctggctttttttagcctgcttcccgtactatattgggttcttaagatggggtttgaccggttacgctttgcgcttatgcctaaacatcatcttgttcttgaatgtgttgactcagaaggagttgtccgtcgcgatgtcgttgatgtctcttctgatgatgaattttacaaaattgcaatgaatgccattcgtgctggaagatcagtcaaaggagggacgtttgagtag

SEQ ID NO: 15549 - DNA, 879 bp, Escherichia coli
atgacctcagcttatacagatgtccagcaagaagaaaatattactgataaattagttgttaaatatgatggtcccgcactagcagatcataaaatagatttggatgttttaactgagtcattgaatggactaaacaacttgcttaaagaagttaatttggttgtcaatggcactagtgagtgtattaatgttgaggttgagccttttaaggaaggctcatttgagtatttgattgatgttattcaaaatccacttgaccatttgaatatattaagcattattgggcttggaggtacaactgcactcgcagcaggaaatactctcattgacttaattcgtcagatcaatggtaggcaaataaaacggttgactttaacagcggaaggagactgtaaaatagttatggatgatggtgaggaaattatagccccgtcatatttccggcctttacttgcctcaccaagcatacgcaaatccttatcgaagttaattcataatcctttgcaaaaggaaggatacgaatcgcttaaaatttcaactcaacagggggttgagctgattaaggtgcacgaagataatattgaaccgttcagatataggcgcgttcctgtagtgcagtccttgtctgaaagggtgattgaagaggctctaatcacatttttgactattcataaggataaaaacacaggctggcgagtcaactatggcgatgacacaatcagcgtgtctatagaagatactgagttcttacaacgtgttagtacgggaagagaacctggtgtttttagtgatgcttactgcgttgatttgctcgtccgtgagaacttgaattcgctggacaaaacgtacatagttgttaaagtacacggcatcttatag

SEQ ID NO: 15550 - DNA, 201 bp, Escherichia coli
atgaaccgccaacgactggattcgcccttggtttatattggtgcgcataatgtatattatgttaaattgactatgaaggtcctttacttcaccattcacatccacacacagataaatcaatacgttgtgatttctgacttccctcccgtttcggtagaaaaattcaacctctgttcagtgatggcacaccatagaccatga

SEQ ID NO: 15551 - DNA, 582 bp, Escherichia coli
atggccgtcattggttatatccgcgtatcaacaatcgaccagaacagcgatttacagcgtaatgcactcacaagcgcaaactgtgaccgcatttttgaagaccgtatgagcggaaaagttgccagtcgccccggtctgaaacgcgctttaaagtgcgttaatagcggagacaccctggtcgtgtggaaactggacaggctgggacgcagcgttaagaacctgatcgcactgatatcagagttacatgaacgcggtgcccacttccgctctttaacagacagcattgataccagtactgccatggggcgcttctttttccatgtgatgtcggcactggcggagatggaacgcgagctaatcgtcgaacggacactggccgggttggcagcagccagagcacagggacgcgtaggaggaaggcccaacgcattaaaagcgcatgagcgagagcagattgggcgactattggataaagggcatacccgccagcagttggccattatttacggtgtagggttatcgactctctaccggtattttccggtagatggccagagaaaggttgacgcggtaggattgtaa

SEQ ID NO: 15552 - DNA, 504 bp, Escherichia coli
atgtgtaactgcttttccaaaaaccttggtttaggggaagggtctgctttgccggttggcgtccccattccgtggccgtcagcaacgccaccaacagggtggctcaaatgcaatggagctgcgtttaccgcctcccagtatcctaagctggcactggcttatccggcgctcagactgcctgatctacgcggggagtttatccggggatgggatgatgggcgtggggtggactccgggcgttcgctactgagttcacagacgggaatgctggaaaaacaccgtcacattattgttgcgaatgaaggctacgacgcagcagaggaatgggatatcggcgtaattgttaaatcatcatatgcacaaggcagaggaatcgatgctgctgcaccaggcacgttaattgcctccccaacattacatacaaaggggcgtatcggaaataccggcggtgctgagacacgtccgcgcaacattgcatttaactacatcgtgagggctgcatga

SEQ ID NO: 15553 - DNA, 603 bp, Escherichia coli
atgatggctaaagcagaattaaaccaggacatgatcgccacggtagccggtgatattaccgtgtttaactatgacggtgatacgcgcgaatacctgttcacatccgtagagtatctggctgtgggggtgggtattcctgctaattccagcattgacgcgccgggagagagtaaaaccggctttgccatttgccgtgctattgacctttcatcatgggaatacatcaccgaccacagaggtcaaattgtttataacatagagacaatgcaacaagttgtagtgacggcactgggggattatcccgaaggtacaacccccacagcccctgcatcaccgtatgataaatgggacggggagaaatgggtcatggatacagccgcaaaacatcagggtgatattgctgatgcagaacaacaccgacaaacgctcctcgctcaagttgatgaactaacctcggactggcgggtggaactgatgctcggtgatatcagcgaagaaaacaaaaagaaactatcgtcgtggatggcttataaaacggcggttaaagccgtcgatgtttcgacggctcctgatattaactggcctgttcaaccggaggcgtag

SEQ ID NO: 15554 - DNA, 609 bp, Escherichia coli
atgacgaatgctgagctgaataacgaccaaatcgcaactatagccggtaatgttactgtctataactacgatggtgaaacgcgtgaatatctgtcttcatccgttgagtatctcgccgtgggggtcggtattccagccaactcttgtattgatgcaccaggggaagataaggatggttttgccatttgccgtacagcagattttaccgcgtgggcatatgttccagatcaccgtggtgaaacgatctatagcaccaaaactggtgaagcgcttgttgtctctttacctggtaactacccaaaagaaaccacgacgctggcacctgccacgccatacgatacgtggaacggtagcgggtgggttacgaataccgacgaacaacacactgcagacgtagaggctgcagaacagcaaaaatcagcttttttagccgaagcgcaggaaactatcagcctgtggcaaacagagctgcagttaggcatcatcagtgataaagataaggccagcctgatactctggctgacctacataaaggaattgcaggcggtcgttcctgaggctgcaccaggtatcaaatggcctacgcctccggttgaacaggccagttaa

SEQ ID NO: 15555 - DNA, 1005 bp, Escherichia coli
atggcaaacctacccgaaaccccgcagtgggaagacggcatctaccagattgaggtctctgaccccgttctgggcgggcctgacgggatttctaaccgtcagggtaaacagctggccagccgcacgctgtacctgaaacaacaggttgagaaaggcggtacagaccttgcgaaacacatcgcggcagcagacccgcatacccagtacgcgccgaaggccagcccgatattcaccggcacgccaacagcgcccacgcctgcaaatagcgataacagcaagaagctggcgacaacggagttcgtggccaaagcacttgcggcgcttgcaggcagcgccccggagacgctggatacgcttaaagagctggcggatgccctcggtaacgatccgaattttgcgaccacggtgcttaacaaactggcggagaagctggccaaagaccagaacggcgctgatattcctgacccggcgctgtttgtcaaaaaccttggtttaggggaagggtctgctttgccggttggcgtccccattccgtggccgtcagcaacgccaccaacagggtggctcaaatgcaatggagctgcgtttaccgcctcccagtatcctaagctggcactggcttatccggcgctcagactgcctgatctacgcggggagtttatccggggatgggatgatgggcgtggggtggactccgggcgagttttgatgtcagcacaaaatgccacatcccttaggacggcagcaatggaattagcaggtactgatgtcgccggaagtggctttgctgttggtacagcattcgcatcctctgattcgattacatcaaatgagccaagcggtgcaaaagctccaaataatggaactccatcagcatcatcacgtgataatgcgatgattgcatcgcaaaacatttctttcgaggggttgagtggtgttggtgcctattggattactatcagaccgcgtaacgttgcatttaactatattgtgagggctgcataa

SEQ ID NO: 15556 - DNA, 579 bp, Escherichia coli
atggctgagccgctacaacttccgccgccgcttgagggtgatatcagcctcagaacgctgggaagactggccgggcggctggataacatcgacctgagcgtactgatggtctatctcgtcgatatcgtcgacagttccgcgctgccatggctgggcgagcagttctcactgttcggcgatggctgggagcttgcggagtcggacgatgtacgccgcatgcttatcaaatccgctatcgagctgcaccgctacaaagggacgccgtggtcaatccgggaaattatccgccgtttcggcttcggcgaagtggatctgattgaaggcactggccagatcggctacgacggcaaacacacttacaacgggctttttgtccatggcgatgctgaagcctgggcggtctatcgcgtcatccttcaacagcccatcactaacgaccaggcggcgctgttacgtcagacgctcgcagcctttgctccggcccgctgccatctggcgagcctggagtatcagtctgtcgccattcgctacaacaacaccgtcaactatgacggcagctataaccacgggagcagttaa

SEQ ID NO: 15557 - DNA, 1104 bp, Escherichia coli
atggcgctgacagaacccgattttattgaacgtgatgctgacaaaatcacggctgaaatgattgcacagtacgaaactgcaaccggcaaaacgctgtaccccgctcaggctgagcgcctgttgattgacctgtgggcctaccgcgaaatgctggtcagggtcgcggcgcaggaagcggccaaacagaatctggtcgcctttgcccgtgagccgatgattgattatctcggtgaactggtcggtgtatatcgactggccgcgcagcctgccaccaccacgctccagttctccgtggatgaggcgctggccattgatgtgctgattccggcaggcacccgcgtcagcgcttccgacagcattattttcgccaccgatacggacgtggtgctgaaagccggattgcttctggtcaatgccacggccacctgtaccgaaccgggagccgctggcaacggctggcaacctgcgcaggtcagtcagttgcttgatgagattgataacgtcgacctgcaggtgaccaatctggcggccagttctggcggttctgagcaggaagacaatgacaggcttcgcgagcgtatcaaactggccccggagtcattcaccaacgccggaagccgtatggcataccgctttcatgccatgcaggcccatcccaacatcgtcgatgttgccgtgctttccccggttcccggcaccgtagagctgtatccgctgctcagcaccggcctgccggacgacagcatcctcacgctggtagagagtttctgttcggatgaaaaagtcagaccgctcactgataccgtgcgggttaaaacgcctctgcaggtggattacgccattgaagccaatatcacgatctaccgcgaccaggatgccaactcggtaaaggacaacgctaacagtgccattcagaactgggtggcatcccgtaccgccacactggggcgcgatattgttcccagccagattatcagcgtgctgtccgtctccggggtatatcaggtcgaactggtgacaccggcactgcgggtggtggcagaaaacgaatgggcaaactgcaccgcaattactctcaacatgaccggagtatccgatggctga

SEQ ID NO: 15558 - DNA, 348 bp, Escherichia coli
atgaaaacaacttccgtattctggcaaccggctctgcaggcccctggcgaaatcgtccgggggctggatgatatctggcaggccattcaaatcatcctgcgtactcctcgcggtagcgacccgcatcgcccggagttcggcagcaatctgcatctttatatcgactggcctattgaccgggctattccgcatgtggtgcgcgaatccgtcgatgccatccgccgctgggagcctcgctgccagcttatgtcggttaaacccgccgtcgatggcgaacatcttacgctccgggtgagctggaaaggctctgacggacagccccggactcaggagttgctatggcgctga

SEQ ID NO: 15559 - DNA, 513 bp, Escherichia coli
atgtccgttgtcacccgtcaggttggtacggtcagcgccgttgatgccgacaaggttcaggcccgcgttcgtctgcctgagtgcgataacctgcgcactaactggcttaatgtactccagcgcaacacccagaataacaaggattactggctccctgacgtgggtgagcaggttgaggtgctgcttgatgccaatggcgaggatggtgtcattctgggcgcggtgtactcagaagtcgataaaccgccgttcagcgacaaaaacgtccggggcacgaagtacgcggatggcgcagagttcagttataaccgcgcgacccatactctgacggtcaaaggcggtattgagcatgtggtgatcgaagttgcggtgggtatcagtctgaaggggaaaaccattgatttgaccgctgacaccaccacggtgaacggcaaccttgaaatcaacggcaatgcccactcgacaggcagcatgctctctgacggccagaactccaatcatcactcccactga

SEQ ID NO: 15560 - DNA, 1170 bp, Escherichia coli
atggctgagataaacagcactgcacaggccgcatcagcattaaccggcgtcagcgatgttctgagtccggtgttcacgctgtggtatctgcagaagaacatcaccaccgatatcgccccctatgtcacccgcgtaacctacagcgataacatcaaaagcgagtccgataccattgaggtggagctggacgacaccgatggtcggtggctggataagtggtatccgggcaagggtgacacgctgacgctgaagatgggctatcagggcgagaaactgctgtcctgcggtacgttctctatagacgagatcgaagtgagttcgcccgcgtccgttgtcgctatccggggcgtagccacatcggttaacaacgccctacggactaaatccagtcgcggctttgagagcaccacgctggcagctattgccggacgtatcgccaaaaagcatcagttgaagctggttggcagcattgaatccatcaaaattgaccgggtgacgcagtatgccgaaacggacgtcagtttcctgcgtcgactggccagcgagtatggctatgcggtgaaggtcgttagcgaccagctgattttctcccatcttgccacgcttcgtggacaggagccggttaagcaactgaaaccgcaggatgtcgcccgcttttccctgcgcgacaccatcaaccgggtctacaagtccgcaaaggtgaaacaccaaaagagcagcagtaaaaagctgatcgtctacgaggctgacggtggcaccagcgaaagcgagaaacaggccaaaggtggcaaggtcaccagcgccgactcactgaaggtcaacagccgcgtcagcgaccctgacagcgcaaaaatcaaggcggactccgcgctggccagccataacgaataccagcagagcggctcactgacgttaatgggcacgccacagctgacagcgggcaacaaaattgaactggtgggctttggtcagttatctgggccatggctgataaccactgcccgccatgcgtttgaccgcaacagcggctacatcacagaactggaggtggctcgagggccagtcacacagggcaaggcgaagaaaggtaaaaagaacggcaagagccagacactgaccgtctacaaatacgatggcaccacatccacggtaataaagggagagaagtaa

SEQ ID NO: 15561 - DNA, 213 bp, Escherichia coli
atgtttcttgagcatgtcacccgtgacggagagcgctgggactctctcgcatggcagtactatggcgacccgctgggctatccccggataattgccgccaatccgcacgtggccatcacgccggtgttgccctccgggctgttgttactgattccggttatcgaggctgaagaagccaccacagaagaggatattgccccatggctgagataa

SEQ ID NO: 15562 - DNA, 885 bp, Escherichia coli
atgtttgcagtactgggtgatattgaatttgaactgattacctactgggacggcttcgaagccacgttcggcgtcgattatgtcgaacatgcccgcatcgaaggaaagcccggcctgcagttcgtcggcgataagctggatgaaatccagataagcctggttttccatcagcattattgtgtgcccgacgtggagctggcacgcctgcgaacggcgatgaaagcccatcaggcgctggcgctggtcttcgggaatggtgactatcgtggttggttcgtcattaccgacgtgaccgcgaccagcgaacagacggacagcacaggcaatgtgctggccgtcaacgccactgcatctctgcgggagtatatcggcgatccgaagaacccgctgaagccaccagcaatacgcacgcaggttcctggcgtcggtgcgatttcgggcgccgttccttcaccttccggggtggcgcagtacgtccgcgacggcgtcaattatgccaaacaggcgcagtccgttctccagaccaccatcagtgccgttcgggtggcgcagaaaatgaaggataaccccgccgtcgcactgacccgcgtgccggggctgatgagtggactgggcaacgtgtccggcgcgttaggtcaaagcgttccggcatttaatgcgctctcagaatccatgcatgatgccatcagtctggccagagccaccagtgatgcggccacgtatgtacaacaggcacagtcttcgctgagcggagtggacggcagcaatatcgcggcggcgctggatgccgtttccgggcagcttaactccgccagcaccaccttcacccgtatgtcgccggggttaagcgctatggcagccaaaattctggcgaggagcgtgtga

SEQ ID NO: 15563 - DNA, 2853 bp, Escherichia coli
gtggccagtgaattttcagtcggcgtcattattggcggcattgtcgggagcagcttccgctcagccgtcagtggcacccgacgcgcccttgattccctcggcgatacatcgcgtcgcctgcaggaacgccagaatgctttaacccgtgcaactgaacgttatggccagttaggctcttcccggatgcagcgccttaacagtgagctgctgcgggtaagccgcacaatggagcagattgaacgccagcagcgtcgtctgtctgcggtatcagccaccagtgatgcactaaaaaccaaccgtatggcgttgtatggtcagggtgttgaagcgtatgccatggcgcagaccgtttatcatacggtctccccggctgttcagcagtctatgtcttttaaagacaaaatgattgatatgtcgatcaccgcaaaatatgacgataaaacacgagacacccttgccgaacagataaaaggctgggcacttaaatacaatcagtatcaggatgacatgcaggacgcagtcggttcactcatcagcgacaacattgataatgtatctgatattgggtatttaatgccggacattgctcgtgcggcaacagcgacacgtacagccggacaggactgggctaaggttgcagcggtctggcaaaactcactgaaaggtgctgccaaagattttggtgccgtccagaatattatggcttatgccggtgaccagggatcatttgaaatcccggatcaggtcaaatggatgcagtccctggcaccaatgatggcgggagttgccagcgggaaagaggctgtggctgaaatcggtgccagcctccagatagcaaaaattggtgcgggttccaccgatgaagctgccaataactttaaaaacttcctcaccaaaatttttgcccgcgatactcagaaacaatttgccgatttgggtgttgacctgcagggttcaatcgaaagttataaggctgctggaatctctccgattgaaggcatgatgagcgtcatagagcgctacctcaatgctaaaagccctgaagctctggccgggttcaaatccgccatgaaaataaagaacgatacggcgagggatgaggctcttcaggcactggcaaaaaatttcggcctgggcgagatgttcgctgatatgcaggtcatggcgtttgtccgcccgatgctttccaacatggacaggtaccgtgaaatacgtgccggtgctctcaaagcagcggataacgatcttcttggaaactcttacgaccagcggctgaaatcccctcttgaagcgaccaaagctctggtggtcaacagtcgcgatctggctattacgttgggcgatcaattagctccatcttttatttccctggcgcaggagcttctccctctgattcagggggcaaaacattgggtagcggctcatccacaatttgtcagtggtacttttaaagttattaccgcgctcattgcttttaaaattgcggttattggtctcaagctggggataaaccttcttatttccccctttgtcaacgtctggaaaagtatcgtactgctgcaatccagttggcttcgccttacgctcgctctgggtgaaggcggcaaacttcgctggctggtgaccggcttcagcgccgtcgccagaggagccagaacactgggtggtgtgctctcaggggggctggttcgcggcattatgatcgccgggcgtgccgttctctggattggccgggcgctgctgatgaatcccatcggtctggccatcaccgccgtcgctgcggcggcttaccttatttatcgcaactggggggctgtcagcaactggttcaaacagcgctgggctgacattaaaacggcatttaacgggggcatcgttgggataggcaaactgttactcaactggtcgccggttgggctgctgtataaagcctttgccggggcgctgaaatacctgggcattgatttgcctgcgcagttcaccgacttcggtggtcatcttattgacgggctggtcaacggcattaaaaacaagtgggaaagcgttaaatccaccgttagcgatctgggtgacaacgtcggtggctggtttaaagaaaaactgggcatccattcaccgagccgcgtgtttatgggctttggtgacaacattgcccaaggtgcctctattggcattaagcgcaccacgccagccgcggcactggccggacagcaaatggctaatcagttgttcccaaatactccgccaagtatccaggggccaaaaattattgataacacgtcaggcttccgtctcggtatgccatcgctcgatactgacgggttattgtcatctgctagagataaactcgggggtgtgattaatagtctgtcttccatgccagctattagactctccactgccgcaaccgctttacctgaacagcgcagggcgggcgagataaaccagaatgcttacagtctcccgtcacctgatatcagcgggttattgtcgtttgccagaaatgcattcggggagctgattaacagcctgtcgcccatgccagctatgcggatacccgctgcggctcccactttaaccgggcaacgtatcgcgaacgaaatgacgccggatgttccccgtatcccgtcgccggaaatcatggctgcgggatattcagggcatggcgcagcttcaactggcggcggaacatctggcggtatccaggtcagctttaatcctcagtttttccttaatggcaaagaaactgcagcgcctgacgggttgaccggcgcactgaatatgagcctgcatgaactggagaaaatgctggagcgtctgctggctcagcaacaacgcaggaggtacagctga

SEQ ID NO: 15564 - DNA, 213 bp, Escherichia coli
atgcagaacagccgcgagtggcggctgttaagtggtgagtcgttactgattgtcgccgaactcgcttttgatttgctcttcagcctgctccagccacatctccagatcgtcagtatcgagggcatcaatctcccccggctgaaatctaaaccacctcgccagcagcccctgcgcctgcatcagcgttttcgtcgctcttgcccagcccagtga

SEQ ID NO: 15565 - DNA, 315 bp, Escherichia coli
atgtcacagacccaatccgatacttttaagctgtcttaccccttcaccaccgcagcaggcaccagagttgagcaggttgaactgaaacgcctgacggtcaaagacctgaagcaagtgcgcaaaatcagtaaagacccggctgactgggacgaaccgctgattgcccgtagcaccggtattctccccgaagacctcgataacatggatcttgccgattacatggaactgcagaaacgatttcagcaagtcactgggctgggcaagagcgacgaaaacgctgatgcaggcgcaggggctgctggcgaggtggtttag

SEQ ID NO: 15566 - DNA, 282 bp, Escherichia coli
gtgaccgtcgagattgaagataaaggcgggaactgtggttcgattggcatgggaaatggtacgtggtttaccatccttgatattccgggggtggaaaacctttttaatacccagaaaaccaatgacccgattgactgcacacgctctaaagcacgaaagctcgctgacctgattgaggcatgggagccacctgaccactggttcaccggcctcggcaaatctgaaggaaaggcacttcttatcgccttcctgcgtaactgcaaaggctttcgcactcactga

SEQ ID NO: 15567 - DNA, 522 bp, Escherichia coli
atggcaaagattgagatcaaccgcatcacgaatgccaacatctacctggatggcgctaacctgctgggccgggccgaggaggtcaaactcccggacgtctccatgaccatgcaggagcataaggcgctggggatggtgggcaaagtggaactccctgcaggcttcgacaagctggagggtgagatcaagtggaacagcttttaccgcgacgcgatgctgtctgctgcgaacccgtataagtcgctggcgctgcagtgccgttccagcgtccagcgctacagttcgcaggggctgattgacgaaatcccgctggtcacattcctgacgatcatgttcaagaagaacccgctggggacgttcaaacagcacgagaacgccgagttctccagcagcttcacctgcacgtacatcaagcaggtactggatggtgaagagctgctggagctggactatctggccaacatcttccgcgtcggcggcgttgaccagttgaccgactaccgcatcaatatcgggggctga

SEQ ID NO: 15568 - DNA, 1428 bp, Escherichia coli
atgccagctaactatctgcacggcgtcgaaaccattgaggtggaaaacggtgcccgcccggtaaaaacggtgaaatccgccgtcattggcctgattggtaccgcccccatgggggacgtcaatacgctggtgcagtgcctgtctgagaaagatgcagcggcgtttggcagccagctcaccggctttaccattccacaggcactggatgcgatctacgaccatggcgcaggcaccgttctggtcattaacgtgcttgatccggctgtgcataaaaccgctgtggccgatgaggatgtaacgttcgacaaggcgacgggcaaggcacagctggctaatccggtagtcgcgcagctggtactgaaaccggacagcgatggtcagccttatgtggaaggtcaggactactcgcttgatgcgcagaccggggtgattaccaaccttggtaagagcattgccgcagatgcaacggtgaaggccagctataactatgctgatccaactaaagtcaccccggctgatatcatcggtgccgttaacgcggcgggcaaccgtaccggcatgaagctgcttaacgacagcttcaacctgtttggctacttcgcaaaaatcctgattgccccggtcttctgcacccagaacagcgtctcggttgagcttatcgccatggctgagaagctgggcgcggtgacctacatcgacgcgccgattggtaccacttttgctcaggctctggcggggcgtggcccggaaggcaccattaacttcaacaccagctccgaccgcgtccgtctgtgctacccgcacgtcaaggtgtacgacgcggccaccaacagcgaacggctggagccgctgagccagcgtgctgcaggtctgcgtgctaaggtcgacctggacaagggctactggtggtcgtcctccaaccaggaaattctgggtatcaccggcgtggagcgccagctgtcggcaatgattgacgacccgcagagcgaggtgaacctgctcaacgaacagggcatcaccacggtcttcagcagctacggcagcagcctgcgtctgtggggcaaccgtatggcggcatgtccaacggtcacccatatgcgcaactttgagaacgttcgccgtaccggtgatgtgatcaacgagtccctgcgttacttcagccagcagtacatcgacatgccgattacccaggcgctgattgatgcgctgacggagtcggtcaacgcctacggtcgcaagctgattggcgacggtgcgttgctgggcttcagctgctggtttgatccggcccgtaacgaagagacggagcttgccgccggtcacctgttgctgagctacaaatacacgccgccgccaccgctggagcgactgacgtttgagaccgagatcacctcggaatatctgttaaccctgaaggggaatagctga

SEQ ID NO: 15569 - DNA, 252 bp, Escherichia coli
atgaaagaataccgctattccggcccggccagcggcgtcacgctgtcggacggaactgaaatcctgctctggccggggaagaatgtttccctgcctgaggagcatgactatgtgaaggtactggtggcgctgaagcacctgacgccggtatcagaagaaaccaaacccgccagcacacccgcgcctcagttaccaaagcgcaggaacggtggcgacagcgaagtgaaagcggaggacacccatgccagctaa

SEQ ID NO: 15570 - DNA, 465 bp, Escherichia coli
atgaacgttctgcccgtccttgatgcggtactggcccggttacgcgagaagctgccgcagctgcaggtggagtacttcccggagaaaccggctgaatatcgcctgaatcatccggttggggcgctgctggtgagctatgccgggtcgcgcttcgacaggccgaatgatatcggtgcggtgatccagcctcagactatccagctctgcgtcacggtggtcttccgccagctcaacggtaaaagaggcgcgattgacgttctggatgctgtccgccgcatcctcggcggctacaccccgccgaactgccgccgtcgtatctggctgacccgcgaggtgtttatcggtgaggtcaaggggttgtggcagtacgccctcgactttgccactgaaagcgtctttatcgaagacagcgatttaccgtccggcccgctgttaaccgaagtgaactatgaggaaagcgagtga

SEQ ID NO: 15571 - DNA, 498 bp, Escherichia coli
atgaggctctggccgaaggcgacgttatccgcatcctgcgcggggtgtgatatgtactgcaccctcgcggatttgcttgaacaggttcctgagcggacgctaattcagctcaccaatgaggagctggacttcgactcgcccgcgacggtgaaaactgaggtggtggacagctgtattcgctatgcagatgagctgattgatgcccatctgcgcggacgctataccctgccgctggcggagataccgaccgttctgcgggacattgccatcacgctggtgcgttaccggctctacacccgccgcccggaaggggctgtcccggacaccgtgaaggatgaccacaaagaggcccggcgacagctggaggggttgcgtgacaacaagctgacgctggggctgcagtccactcagaaagacgtacctgagtccggtgaaatccgggcacgggcacgccgccccacctttggcgggcgcgacggcttactggagaaatactga

SEQ ID NO: 15572 - DNA, 357 bp, Escherichia coli
atgggtacaactcaacaggtcattctgaccaccaccgtgacggccagcgcggcgctgacgcaacagcgctttgtcggggccgataacgcgccctgtcaggccggagccgtcgcgctcggcgtggcagaggtggatgccgctgccggtgatgtaacgccggtcaacgtactgggtattgttgccgtcgaggctggtgctgcgattgctaaagggcagaacgtccagtcggatgagaatgcctgcgccgttccccagacagccgcatcaggcgagaccccggcgggtatttctgccgggattgcgctggatgaggctctggccgaaggcgacgttatccgcatcctgcgcggggtgtga

SEQ ID NO: 15573 - DNA, 954 bp, Escherichia coli
atgtctgactatttaaagggtaagcgcgtcgttgacccggtgctgaccagcatcgcacgcggttataaaaatgccgctttcatcggcgaacgcatcttccccattgtccttaccgataaggaaggtgtgaccgtgccgaccttcggtaaatccgcttttgtggagtacgacaccgagcgtgccgtgggggctgacagtaacgttctggtgcgcgagaaaaccggcaaactggacctggttctcaatgagcacgatctggccgcgccagtggactatcgcgagcaggctgagtcgatgttcaacgaagaggccaaagccattcgccgtgtgaccagcggcgtcaacctgaagcgcgaactgtatgcggcccgtctggctcaggacaaaaacgtctatcgcgcggctaacgtcaaagcgctggctgctgctgaacgctgggccggtggtcagggtgatccgattggcatcattgaaggcgggatcgaagcggtacgtaaagccaccggcctgcgtccgaacctgatgaccatgggggcaagcgtcatgtcgctgctgaagttccacccggcgattcaggccgcaattggagccaacgagcgcaagcgtatcaccatcgaaattctgaaagaccttttccagctggaagatgtcgctatcggcgagccggtctccatggcctccatgaaagacgcgcagaacaaggacaaagtcccgaccgatatctggggcgacaacctgatgctgcattacgtcggcaaaccccagccgggcaccgacagcgccgacgaaaacgagccgtcattcggttacaccctgcgccgtaaagggatgccggtggctgataaatacgacggcgtcggcggcaaggtgaagtactgccgttataccgatatctacaaagtcgccgtggtcggtggcgatgccgggtatctcgtcaccaacatcgtgaaataa

SEQ ID NO: 15574 - DNA, 1098 bp, Escherichia coli
atgccagccattcacatttttaaagccggtactcataccgatatgcacggcacgaaactgccgttcacgcaaagcgatcttgccgcctgcgtcaaagcctatgacccgtccgtccatgaagcgcctctcgttattggccaccccaaaacggaagacccggcgtggggctgggtgaaatccctgtcgctcaatggcggcgacctgctggctgagcctgaccagctcgacccgcagtttgccgaactggtcggtaacggacgcttcaagaaggtctccgcctcgttctatctcccggactcaccgagcaacccgaaacccggcacgctgtatctgcgtcatgtcggttttctgggcgcgcagcctccttccattaaggggctgaagcaggtttcgtttggtgagaaggaagaaggcgtcgtcgagttttccgactggagcgatatcaccaacacctcgctgtggagccgcctgcgtgacttcctgatcgctcagttcgggattgatgagaccgacaaaatcatccctccgtggcaactggattcactgcgtgatgaggcttaccgcgacaccgggaagtctgaaccggacttcagtgaacacaatcccaaccctcaacaagagaacagcaccatgactgaagaagaaatcaaagcgcttcaggcggaaaacacacgtctgaaagcagaagctacccagcgggcagaacaggaagcgaagaacaggcaggacaaactgcacgcagacaacgtctcctttgccgagaagctggtcggcgcgggtcgcctgaccccggcagccaaaccggttgttgttgccattcttgatgcggtagccggtggcgataagcctgtcgagttcgccgaaggcgatacccgcaccccgctggccacggcgtttaagacgctgctggatggcactgccccggtactgaatttcagtgaacacgcgaccaaagaccgcgtgagcacggatatcaaaacgacgtcagcggagtttgctgaagccgatccggaacgtctggcgctgcatcagaaagcgctggaactgtcgaaaaaagaaggcatcagctacgacgctgctgtctcccgctgcctgtaa

SEQ ID NO: 15575 - DNA, 459 bp, Escherichia coli
atggcttccgataacctggtcaatatcaccattaacgatgaatccctgcgccggagcctccgtgcgctggacctggctgccacagacctggaacccgcgatgcgcaaaatcgccggaaccctgctggcggaaacgcagtttaactttctcgatgaggggcgtccggggtggactccctcgctggcagcgcaggagcgcgacgggcaaacactgcaggataccgggcgtctgatggggtcagtatcaaccgaccatgacgaccggcaggcagcggttggcactaatgtcgtttatgggccgattcaccagttcggtggtaaaacggggcgtaatgagtccgttgaacttccggcccgtccgttcctgccgctgacaggggacggtgagctgcagcctgatgtggttgtccccatcctcgatacgattgtccgccatcttgaagcagcggcccgtcgctga

SEQ ID NO: 15576 - DNA, 822 bp, Escherichia coli
atgagcgtgacaacggctgaactggcgtactgcatgacgctgcccccaaaacgggctgtcagctacctgaagtccaaagggtatagcttcacgtgggactgggaggagatgtggcaggatgcccatgcccgcgcctttaccgtcgccaaagtgacccgccttgatatcctggaagatatcaggagcgccctgcagcaggcactggatgagggcaagactgaccgctggttccgccagcagctggagccggagctgcagcgcaagggatggtgggggccacgtgacaccacagacccggtaacgggcgagccggtcaccatccagcagggcagcccgtggcggctcgacaccatctttcgtaccaatatgtcagtgctctacagcgccgggcgctgggccgaacagatggagaacgtcgacgacaggccgtactggatgtataccggcatcaacgacagccatacccgcaagagccatctggcactgcatggtctggtgcttcgttatgatgacccgttctggcaggcgttctacccgccgaacggctggcgctgccgctgtggcgtcattgccctgagcgcagccgatgtgcgtgcccgtggcctgaaggtgtcaggttctggctcagccatgggctgggagctgaagctggtctcagagaaaacaggcgagatgcagaacgtcgccaccttcaataccggtaccacgaaggtggccaccgacgtcggctggtcttacgcgccgggggctgcataccgtcccgaccttgcccgctatcagggtacgcttcaaccgctggcacagcaggaactgagaggataa

SEQ ID NO: 15577 - DNA, 1497 bp, Escherichia coli
atggcccgtggactctgggtttcacccaatgagtttgtctcttttgccgaacccaataaaacgctgacggagcagatcgcctcgcgcagccgctccatcgacttcttcgggctgggaatgtacctgcctaaccctgaccctattctgaaatctcagggccgggatatccgcatctatcgcgagttgcgtaccgacccgctggtcggcgggtgcatccgcaggcgtaaggcggcggtcaagtcgctggagcgtggtcttgagcgcggtcatgccccggcgcgggtattcagcttcatccgggatatgctcgacgatctggatttgtcccgcatcatcggcgagatgaccgacgccgttctctacgggtatcagccctgtgagatcatgtgggggcgttctgttaaatcctggggcatcgccgatatcgtgggtaagccgccagagtggttccagttcgacaatgacaacctgctgcgctttcgggcaaaagaagccgggctggaaggcgagccggtaccgctgaacaagttcgtggtaccgcgtcaggacgcgacctacgacaacccgtatggcttccctgacctgtcgatgtgcttctggcccgtgacattcaaaaaaggcggcatgaaattctgggtgcgctttgcagagaagtacggctcaccgtgggttatcggcaagcatccgcgcgggacggcccagggtgagattgacctactgctggactccatggaggccatggtggaagacgcggtggccgctatccctgacgattcctccattgaaattaaggaggccgcaggcaaggccgacagcagcgatatttatcagaacctgatcacgcttgcccgcagtgaaatctctattgctctgctggggcagaaccagaccaccgaggccaacagtaaccgcgcctccgcgcaggccgggctggaagtcaccgatgatatccgtgacgctgactctgatatcgtggaaagcgcggtgaatcaggccatcaggatggcggtatcgatgaactttggcgatgtggccagccccgtctggaagatgtgggaacagggaacggtcgacgatactcaggcaacccgcgacgagaaactcagccgcgccggtgtggtcttcaccccgcaatacttcaagcgtgagtatcagctgcaggacggcgatattgacgagacaccaccgtcagagcgccagaagaacacgctgccgctgtcgttcgccgaggccatagatgccgatattcaggcccagcaggacctcgatgatgcgctggatattctgatgaacggtggcaccttaaatggcgtacttgcgccggtgctggagccgctctttaaccaggtgaacgacggcgttaacccgtctgagctgctgggggcgctggctgagctgtacccgcagatgaatgcggatgacctgcaggaacggctggcccgtatcatgtttgttgcaactgtctgggggcgtctgcatgagcgtgacaacggctga

SEQ ID NO: 15578 - DNA, 1524 bp, Escherichia coli
atgagtcagcttgctcccgttttgcctgatacctcggcgctggatatccccgccgttctgatgccctaccagcagcgctgggtggctgacacctctccgctcaaggtgattgaaaagagccgccgaaccggtatcacctgggctgaggcgtccgatgatgtgctgaccgcagcctcttcagcgcctgcgggcgggatgaacgtgtattacatcgcctataaccaggacatgaccgtcgaatatattcaggcgtgtgcgatgtgggcgcgtgcattcaactatgccgccagtgaaatcgaagagggtttctgggaagaagacgaagacgacaaacacatcaagacctacaccatcaaattccctgactcaggctttcgcgttgttgcgctctccagtcgtccgtctaacctgcgtggccgtcagggcatcattgttatcgacgaagcggcgttccatgagcaactggacgagctgctgaaggcggcgctggcgatgcttatctggggtggcaaggtgcgcgttatctccacccatgacggtgacgataacccgttcaatacgcttatcggtgatatccgggccggacgtcaggggggcagcgtacatcgtattactttccaggaggccgtggcggagggactgttccaccgcgtctgcctgcgtaccgggaaagaatggtcgcaagcgtccgagcaggcgtggatggcatcggtgtacaaattctacggtgccggtgcatcggaggagcttgactgtgtcccggccaacggaggcggcgcctggctgtcccgcgccctgattgagtcccgcatgtcggctggcacgccggtgctgcgcctgacctgcccggagggctacgagctgaagcccgacgacgtccgctggagcgagacgcaggactggctggacgaacacctcaaaccattgctggaagcactacccgctgatgctcgctcgtttttagggcgtgactttgggcgcagtggtgacctgtcggtggactatcccctgctgcaggagaagaacctggtacgtcgcgtaccgttcgtgctggagctgcgcaacgtgccgttcaaacagcaggagcaaattgcgtggtatctgatggacggcctgccaaacctgatgggcgcggcgctcgatgcccgtggtaacggctcttacctcgccgaatacgccatgcagcgctacggctccagccgggtcaagcaggtgatgcctaccgaaaactggtatcgcgaacatatgccgccggtcaaggctgcgctggaagatggcaaccttgtggatttaccgaaggatgaagacacgctggacgatttgcgggccgttcaggtggtcaacggcgttccccgtgtgccggaacagcgctcaaaagcgaagtctgacagtggcaaacgtcacggggattcagccatcgcgctggcgctggcgtacttcgccagccgtgaaattaacaaagggccggtgaaggcaagctcacgccgtcgtcgtcaggcggcccgtatgctggaggattactga

SEQ ID NO: 15579 - DNA, 651 bp, Escherichia coli
gtgtggaacctggttaaaagattaccgtggcgcggcatggtgctgatgcttgttctggtggctgttctttatggactgaaccgctggggctatcacgacggttctgaggacgcaaaacgtgacggtgacgcagcgctcagtcggctgcagtcagcgtttgatacctacaaaaccgaacagacaacgcttgagaacgcagcgctgcgggcctgggcaaagcgttatcaggaacaggttgccgccgggcatcaggccgagaccagttaccttgagcagattgctcagctagagagccagaacaaacaactacaggggcaaattaacgatgtcacacagcgctggattgatgaaaaaggtaagagccatcccattgagtgcgtgtttactcgcggtttcgtgcgccagtacaacgccgcgctcggatatgacaacgcatccgtcgacgccggtcattcagacgcaactgccgccgctggcaccggcactcgcgcagcgtccgggcaacctgcagccgctgacgcctggctacgcgactcaggcgtctcccagcgtgacgtcctcgccaacatcatcgacaacgcgaagcagtgccgcatctggcgcagccagataaaccagctgctggacgaacgggaaggattacagaaatga

SEQ ID NO: 15580 - DNA, 735 bp, Escherichia coli
gtgaccatgaactggcctcaaatcaccctcatcatcctgctcgcctttggtctgggcgtgaccgccatcaagcatggcgagccacgcaacgataaatacagcttctggtggcagctcgctggcaacctggttattgcctggctgctctggtgtggcggcttcttcagtcaggcccgcgcagcccagccaccgcaggccgcgctgcagtatcgcgacgatgtgatccgtaatgcccggcttgaatggggaatgtcagcgccggtggccgacttcgccgcacagctgcatcaggaaagcggctggcgacctgatgcggtctcgccggttggcgctcaggggctggcgcagtttatgcccgccaccgccgactggataagccagctgatgccggggctgaacagccgtgagccgtttaatccggcatgggccatccgggcgctggtcagctatgaccgctggctgtggcagcgcgtcagcgccgccaacaactgtgagcgtatggccatgacgctgtccggctataacggcggtctgggctgggtacagcgggacaaacggctggccttacagcaggggctggacagtacccgctggtttggacatgtcgccacggtgaatgccgggcgaagcgctgccaactggcgggagaaccgctactatccgcagcgcatcctgcgggagctggctccgcgctatctcacatggggaggcagcagctgtgtggaacctggttaa

SEQ ID NO: 15581 - DNA, 351 bp, Escherichia coli
atgaaaaacctgaaaaaattcatcccccctgttaaaaagccccgtcttagcggctggctgctgacctcagtgctgctgctcggcaccatcggtcttgtatcgccccagcagttgccggtggttgtctacaagctgtcactcatcacgctggcggcagtattgggctactggcttgaccgttcgcttttccccaaagcccgtcccggtcagtacctgaagcatgatgacaggctgatggctgatggtcgcttccccgtccagactggccttcacctggtcttttccgctgcgctaatccgccgtgcactgattgttgcagcggtctgtctggccgtggcgacggggctgtga

SEQ ID NO: 15582 - DNA, 765 bp, Escherichia coli
atgaaagaacaatctttacccatcgtcccatggattggcggtaaacgtcgtctggcgaagcatattttaccgttgtttccggcccatacctgctatgtggagccgttttgcggggcagctgcgctctattttctcaagactcccagcaagaccgaagtcattaacgatatcaacggggaactggtgaacctctatcgggtggtcaagcatcatctggaagaatttgttcgccagttcaaatgggcgctggtcagccgtcagatttacaaatggttgcaggatacgccggaagaaacgctcaccgacattcagcgggcggcccggttctactacctgcagaaacaggcgtttggcggcaaggtggccgatcactcgttcggaacctccaccacaagtgcgccgcgctttaacctcctgcgcatcgaagaagaactgtcgatggcacacctgcgcctgtccagaacgctgatagagcatctggactggcaccaatgcatagagcgttatgatcgcccgcatacgcttttctactgtgatccaccgtactggggaacagagggctatggcgtggattttccaatagggaactatatccacatgtcggaactggcgcggagtatcaaagggaaaatgattatatcggtgaacgatatcccagagatgaggcaggctttcaaaggcctcaacatccagaccgtttgcatcaactacagcctgtcgggtaagtcatcaccgcgccaggaacttgtgatatgcaatttctga

SEQ ID NO: 15583 - DNA, 258 bp, Escherichia coli
atgagttcagcaactaataaacccaaacactcatacttaatgggaataacctgcgatgagtatgaaactgcagcaaaaatctacacacttagcgtcaatgccgacaatctggcagaggcaataaaagagatgcaaaccgcgcttgagcaggtggagaaaacgccacgaatgctccctgaaaataagctgaaaggaatactcattggagagataagactgaccatcagcgccaacccccaaagcagaaagccttgctaa

SEQ ID NO: 15584 - DNA, 939 bp, Escherichia coli
atgcgtaagatgtttttggtcttagctctgtcattgctggtcggttgtgatagtggatcagatggtgtatcggattctccttctactccgtccgtagaattcaatgtaaaaacggacgatttgactgtaaacaagctgttgcctgctatcaaaaatctactgccagggttaaatcggtacgcagatcagttcgaaaatattcacgttgagcaaaatcattggctcactatcgtgtttcatgttcccgaaaatgcaaacatacccgcagattatctctctcaggggaataattgcttcatcgagatcaataaagaaggtacagctataaaagtgcctaaaaaagcctgtaaatccgttgccctagatagagttgtgcaggatttagatagcgactattggttctatttcaatgccgacgaattaacctatatgccgtatgattttgcaaagttaaacgacaaacaacgtgtagatattggtgtcgcatatctaaaaaaaatgtgggatatcgtgcagatggttaagcaaaaaacagactggcaaccagatgattttcctaactacgccagattgttcaggcaactggagagtgagggtaagcagtttgtaatggagggggatatgttcccagcttatgactcttgcaggatggcgggagctaacgctcagcaatggtggtctacacaaattagctcacttaaagatttatcttcaaatgaccctcaacgagcgggttccgctttaaaacaaattaaacgtcaatatgactcatatcatgaaagcgctgtgagttgtgcaaaagaaatcaggcaagctccaccagtagagaaaaaaatggaggtgttaccccctacgtcagacaataaacctccaagagcgggctgtctgatgatatttacacctgatgacaagactagttggagctgcccgataaactga

SEQ ID NO: 15585 - DNA, 189 bp, Escherichia coli
atgactgcagaacaagtcaaatctctcttccgccagcgcggggtcactttcacccgctgggctgaagaaaacggctacagccgcaatgaggtctaccgtgttcttaacggcttcaccaaagctcgttacggcaaatcacacgaaattgcagtgaagctgggtctgaaaccagattcgaatgcggcgtaa

SEQ ID NO: 15586 - DNA, 306 bp, Escherichia coli
atgagtaaggcaaatgtatccagttctggctcccgcattctgcgcgttcttaaagcactgcgtggccacgccctgaacggtgtttctaacggtgaactggcatcggctctgggcgagtcacctgcgaatatcaatcgtgcgctaaatacccttatcgaagaaggactggccctgaaactggataacgggcgttttgcccctggagtccagctcttacaaatcgccatggcgcacagtaccgaaatggcgcgggcgcaggatcgtattaatgaaatcaaccagcgtgttatggctggcagtcgctaa

SEQ ID NO: 15587 - DNA, 909 bp, Escherichia coli
atgggacgcacaaaatcacaaccagttgaactaatggaagatgcaccgctgagtgatggcctcaacgttaatcttaatgccatgaccgaacatcgcctcgaaatcatgcagcagttcggtgatggtctgccgtatgaacgtgatcgtatcgttcacgaaacacggttttatatggcgcagagtgctgaggccatgctggaagcaggtaaacgccttgtaattcttaaagaaaatgaacctcacggggaatttattaacattcttgaaaatgagttgggcttaccataccgaacttctgtacggatgatgcaagcatcgactaaatacttatcccccgtactgaaatcaaatgtgccaacgttggcacatttgggtaaatccaaactttttgaattgatgactgaagatgatgaatctctcgctgaattggctgatggtggcactgtagctggtctgaagctagatgatgtcgaccgcatgagctgtagagaattgcgtcaagccctgcgtgaagcccgcgaaaccagcgcagcacaacagcgcgtgctcgccgacaaaaatgaaaaaatcgactctctctccaccaaactggagaagaaatcccgtatccagccacccaagcctgacgaagaggtgaagaagctgcgtgcggaagttacagcgttagcggttgaggcggaatctgccatcgccgttcgactgtccagcgcctttgagaccctgtgcgcatactgtgctgaaaatatgattgatacccccagagactttatggccggtctggtctgccagttggaaagcaccgcgcgtagcctgcgctccacatttgacctgccggacgagccgacaggcaacgtcgccccttcatggctgactgacccgacgccagagattaacgggcaggaggcataa

SEQ ID NO: 15588 - DNA, 1770 bp, Escherichia coli
atgagtgccgccctgactgaacgactggtttatgttgcccgcgcggcacgtgacgcggggcatggtaagcgtggtgcgatatatgatgccgcctgcgccgaactgggcatttcccgcgccaccctgctgcgcaagctgaaggaggtatcagtgactgacaaacgtaaaaaacgcgccgatgccgggcgcagtgccctgagccgcgacgaagccgcgctgatatctgccacgctgcgcgaggccacccgtaagaacggtaagcgcctgtattccatcgcggatgcggtagagaccctgcggtcaaacggctttatcactgctggcagaacggacgaggccacaggcgagtttttcccgctgtccgaggacaccatcagccgcgccctgcggaactatggtctgcacccggaacagcttgacgcaccggccccgtcgtccgagatggccagcctgcatcccaatcacgtctgggagattgatgcctcactttgtacgctttactacctgagcaacggccataaagggttgcaggtgatggacagcgcgaagttctacaagaacaagcctgccaacatcgcccgcatcgccagtgaccgcgtgtggagttacgagattaccgaccataccagcggctggatttacgttgagtacgtgatgggtgcggaatctggtgagaacctctgttctgtgcttatcaacgccatgcaggagcgcggcggcgcggacgtgctgcacggcgtgccgaaaatactctaccttgatcccggttcggcgaacaccgctggcatgacgaaaaacatgtgccgctcgctgggcatcaatctgatagcgcacaagccgcataacgcccgcgccaccgggcaggtggaaaaggcccgtgacattatcgaacgtaaactggagccgggtctcaaattccagccggttcatagcttggacgaactgaacgcactggcggtgaaatggcgcagccactttaacgccacggcggtccacagccgccacggtaaaacccgcacggatatctggctgaagattactgctgaccagctgaaaaaagcgccatccgttgaggtttgccgcgaactggcggtggccgcaccggaactccgtaaggtcacaccaaaactgcgcgtctcgttccggggcaatgagtttgacgtttcgacggtaccgggcgtactggtcggcgaaaaactgatgattacccgtaacccgtggcgcagcgatgtggcgcaggtggtgctgaccggtgaggacggtcacgagacgttcttcctggtcgaggaggtcagaaagaacgagttcggctttgccgaaagcgcggcggtatttggcgaaaactacaaagccctgccggagaccccggcgcagacggcggcaaaagaaatcgaagagctggttacgggcaccgataacgccaccgatgcagctgctgcacgcaaggcgaaggcgctgccgttcggcgggcgacttgacccgtacaaacatatcgacgacaccacgcttccggcctatatgccgaagcgcggtcaggcttcagacgtgcgcgggccgcgtattgagcagcgtccgctgacccatgtggaggcggcgaaagccctgcgcgagaagtttggcgctaacggccatatctggacgccggaacattaccgccagttaacggcgcagtacccggatggcgtacctgaagccgcgctggatgaggtgatggtcaccctgaccactccggcccgcaacagcgttatcagcatcgttaacggtaactga

SEQ ID NO: 15589 - DNA, 1167 bp, Escherichia coli
atgctggtactgaagcaacaactgaaagaggcccgcatcccgcaggcggcggtggcaagagccgtcgccgtttccgaggccacgctggcccagattgtgaaccataacgagtggccccgcaccagccccgaagaggtacgccagcgtctggcgttgtatctggaaagtaaggggattgatacagcgaaaagttttgatgctgcacagggcgctgtcacaccccgtacagcgggtactaccgataaaaccaacctcagtgaggaagagaacatgttactcaaaaagcaggtgttatttccagcaaccaaaaaagcgtttggtcttttccgtgacccgttcgccgatgaagccatgcagggcgcggacgatgtgttcaccacgccggatatccgctacgtgcgtgaggcgctgttccagaccgcccgccacggtggctttctggcggttatcggcgagtccggtgcgggtaaatccacgctgcgccgcgacctgattgaacgcgtcaaccgcgagaacgcgccggtgattgttatcgagccatacatcatcgccatggaagacaacgacgtgaagggcaaaaccctgaaggcggcagctatcgccgaggccatcatcagcaccatcgcgccgctggagagtatcaaacgcagccaggacgcccgtttccgccagttgcaccgcgtcctgaaggacagcagtcaggcgggttttagccacgttctggtgattgaggaggcccacagtctgcccattccgacgctgaagcacctcaaacgcttctttgagctggaatccggcttcaaaaaactgctgtccatcgtgctgattggccagcctgagctggcggacaaactgtccgaacgcaacatggaagtccgtgaggtcgtccagcgctgcgaggtggttgaactgctgccgctggacaacagcctcgaagagtttctgacgttcaaactgcaacgcgccggtaagcagctgtctgacatcatggacgccagcgcagtggaagccatccgcgcccgtctgagcaatctgggcagcaaccgtaaaagcatggtcagcctgctgtatccgctggccgtcagtaacctggtgatagccgccatgaatctggctgctgaaatcggggttccgcaggtcaacgccgacgtcgtcaaaggagtttaa

SEQ ID NO: 15590 - DNA, 270 bp, Escherichia coli
atgaaatccatcgccgatatcaaccagcagatgaacaaggtgcagtccgccattatggcgctcaacgccatgaacactaccgtgcagagcgtcatgattgctggcagtaagccggttatccgtatcgcccgcaacgggcactgtgcccgcctgctggagcagggcaaagcgagttatacccatgttggccatgacggctcagggcgcttccgtcagggcgtctttgagttgcatggctgccgtattacctggtcagattcgttacattaa

SEQ ID NO: 15591 - DNA, 612 bp, Escherichia coli
atgagcgaagtaaataaagaaaactacatgaaagaccgcaaggggcgtctggtgccggttgaccaggtgtctgactatgaccttgcgatggactctttcgttaaagaacaggttgccgccgcgaaggttaaacgcgatgaactcagcgacttcaagcgtcgtgcctttgacgagtgctatgcctggcttgaccttgtggccgagaagtacggcagaacacgcggcggtgccaaaggcaacgtgaccttcagcagcttcgacggtgctcagcagatcaccatccgcgtgcaggaaaccctgaccttcgggccagagctgcagattgccaaagacctgatagacgagtgcgtcaccgagtggtcggaaggcgcgaacgccaacctgcgggccatcatcagcgatgcttttcaggtggacaaagagggccagcttaataccggacgtattctttccctgcgccgcgtcaagattcaggacgagcgctggaaccgggcaatggaggctatatcggaatcactgcaagtggcaatgtccaaaacctatattaatttccgggagaaagataaacacgggaagctaattaatatcccgttagatatcgctgccatttaa

SEQ ID NO: 15592 - DNA, 189 bp, Escherichia coli
atgtccatcaaatgtaccaactgccagaaaggtatcaccaccctgaagttcagcgacgccagcgtcattacctccggtaagtaccgtgtgccagccgtcctcatcacgctggtatgccctcactgcagccagcattactacgtggaagtccctgccatggagttcatcccctgcgaggcgaaaaaatga

SEQ ID NO: 15593 - DNA, 297 bp, Escherichia coli
atgaaaggcatgaaattatataaccgctccactatttatagcctggccctgaaaaccttcggccctgaagcacaggcgctgaagctgatggaagaagccgccgaactggccgctgctgccgcccgcaacatgaatggcctgggcagtgaagttgacctggctggcgaactggccgacgttgaaatcatgattgaacagttccgcctcaacgggatgggcctgatgattgactatcataagcagcaaaagctggaacgcctcgccgaacgtctgggggtgacttatgccacagaataa

SEQ ID NO: 15594 - DNA, 480 bp, Escherichia coli
atgccacagaataataagctaactgaagaacgtctgctctttatctatcaaagcctgaagcgctgggccgatcatgatgccgtattaaacagctatatcagcggtcaaaagatagacccaatatttcatgactgcgttgtagcactggctgagttgttagatcaccgcaaatcaggtacgtctgaacctgtttcattcgatgcgctcaacgcagcagtagcagaggttactggcggcaaccagcacgcctggaatggtaatatttacaagggccatcaggaagttccatttatcaattacaactcactatcgcgcattgttgagaaattcagggctgcacagccgccagtgccggaagagattatgccagaccacgataacacctatgactatgtaaacggctggaacaactgtcgtgctgcaatgcttcgtcaccagccagtgaacgaacaggaacagtggaagctgggggctaaatga

SEQ ID NO: 15595 - DNA, 231 bp, Escherichia coli
atgatgaagttcttacgcaagaagaaagcatcaaaaccatgccgtactactgctaaatatctttttgctcgcgccttttttaagaacgtaaggcctgggattcaaattggtgttattgcaggacgcgagcaagttaaaaattacatgtcaggtgcatggtggaataacaacccgattattacggcccgtaatattcatatcaactggggcgggattcattatgatcgctga

SEQ ID NO: 15596 - DNA, 216 bp, Escherichia coli
atgatcgctgaaactattgtttgtgccctgttctggtatggttttgtgggctggtgtactgctgaattgcaccggcgctctgggttttattcacgttacaccggagccagtcattggatcagttgggccgttatgttcctgtgctggcctgtagcgcttcctttatatgtcgattatatcggtggcgcaggtaaaaggagcgacgatgatgactaa

SEQ ID NO: 15597 - DNA, 426 bp, Escherichia coli
atgactaagcagcgtcttattcaactcatccatattgcccgcaatgacctccagatggatgaggacacctaccgccagatgctacaggggctgaccggcaaagcctcaaccaaagggatggataccccacagctaaaccgcgtgctggaatccatgaaaaataaaggctttcgcattaagcctgccgggaaagccaagtccggcttaccgctggatagtcatccgcagtcaaagaaaatccgtgcgctatggcttgaaatggctgccgcaggcatcgtccgagacagttcagagcaggcgctggcgctgtgggttaaacgggaaacaggcatcagcgcgttacgctggctcagcaatgagcaggcaagtagcgtgattgagaaactgaagaagtggcagcgcagagctgcgggagtgaagcaatga

SEQ ID NO: 15598 - DNA, 390 bp, Escherichia coli
atgagcgacctgaatcagtttcgtagtaaagggccggaactgttggtagaactggcacagcatacctctgagaccgtccgcgagattattgatatcgaacccgcagttgccgaccagattggtcaggccgtcgcgaaccgcatgatgcaggtctggggtgggcaaaacgtctattttccgatgggcatggtctggaaggtcagtcagcgcgaccgggaaatcttcctggagtttgacggacgcaaccatcacgaactggcccgcaaattcggtgtttcactacagtgggtttacagcgtggtgaagcgggtcagaaaagaagaattggatcggatgcagggcaaactgtttgatggtgactctgattcagagaaggtggaaaatagctaa

SEQ ID NO: 15599 - DNA, 330 bp, Escherichia coli
atggccagaccaagcaatattgataaactgccagaggatgttcgtgccgagcttcatagcgaattatcgcgcacaaacttcaccggttatgaatggctctcgctctggttagccgataaaggttacagcgtatcgaagtcagccattcagcgttatgctgtcgcgaataaaaatgaaattctgggcctacagcaagagagtcgattccatcaggcacagcttcgacttaatgcgcttggtgtagcggcaacaatttcaccaggaaaagaccttggaagtttgaagaatgatgcagatgcactactaaaatgggcgttgtttggttactga

SEQ ID NO: 15600 - DNA, 942 bp, Escherichia coli
atgggaaatcatttgttatcagcaaaagcgacgctccctgtttatgatcgtaataacctggccccaagaattgttcatttaggctttggtgcatttcaccgtgcgcatcagggcgtgtatgccgatattcttgctacggaacatttcagtgactggggatattatgaggtcaacttaatcggcggcgaacagcaaattgccgatttacaacagcaagataatctttataccgttgcggaaatgtcggctgatgcgtggacggctcgcgtcgttggcgtcgttaaaaaagccttacacgtacaaatagacggcttagaaaccgtgttggctgcgatgtgtgaaccgcaaatcgcgattgtctctctgacaatcaccgaaaaagggtatttccactctccggcgaccggacagttaatgctcgatcacccgatggtcgttgccgacgtgcaaaatccccaccagccgaaaactgcaacaggggtgattgttgaggcgctggctcgccgtaaagcggcaggacttcccgcatttaccgtcatgtcatgtgacaacatgccagaaaacggtcatgttatgcgtgacgttgtcacttcctatgcgcaagccattgatgtaaaactggcacaatggatcgaagataacgtgactttcccatcaacaatggtggaccgtattgtgcccgcagtgacagaggatacgctggcgaaaatcgaacaacttaccggtgtgcgcgatccggcaggcgttgcctgtgaacctttccgccagtgggtaatagaagataactttgttgccggacgtccggaatgggaaaaagcgggagccgaactggttagtgatgtgctgccttatgaagaaatgaaactgcgtatgcttaacggcagtcattcattcctggcgttgattagacgtgagataaatatagggggtaccgtaagataa

SEQ ID NO: 15601 - DNA, 1335 bp, Escherichia coli
atggttagttccgtcgatataaaaaatgaaatcaagaatacatccgtcgttcggcgtgttgcgtcggcctcagcgattggtactgctgctgaatactacgatttttttgcttacggcacagcggcagtattattttttggtcatttatttttccctagtgatgatcctttaattagtacactagctgcgtttgccacatatgctgttggctttctggctcgaccactggggggaattgtatttgggcatataggtgataaagtcggaaggaaaaaagcgttagttataacgatcttaattgttggattaggtactttttgtatcgggttactaccaacttatgaagagatcggtatatgggctccagcattattaatatttatacgagtcttacaaggttttggggttggaggtgaacaggccggtgctgtgttgatgacggctgaatatgctgaacccaaacgccgtggtttttttgccagttgggttcagattggagctcctgtaggctttttacttccgatggcattattcgcaatactcaatgcgacgttaacccctgaagcgatgatggactatggttggcgtattccatttttattgagtctgttacttgtaatcgtaggtttgtttattcgtttaaaaattgatgaatctcctgtatttgctcaaattagggaaacaaaagcagaggaatctcgccctctaattgaagttgtacgtgattatccaggtattgtagcaaaaggtgtttgtgcaaaactgattgaagcctgtacattcgcgatgtttaccgtaattgtattagcttatgggaaagctaataatctggatgctaatattttaatggagacaatgattgtcgctgtcattatagaagtgttcgcaattcctttaatgggggcgttatgcgacaagattggtcgtaaacctgtttatattataggtgctggattacaagttatcatgattattcctttctttttggcaatcaatcaagataacttctggctaacgcagttggtaatgattattgttattagttttggccatagcatgtgttatgcaccacaggcatcattttttcctgaattattcccaacccatattcgctgtagcggcattgctttaatatggcaattaggttcattaataggtagcggagtattgggattggttgcagtgaaaatccttcaggttactggtggtcattattatggtatggctatttatgtaattgttcttggcattatctctatcggcggtttgattctgatgccagaaacagcgcctcagaaattaaaatcagaatatcaggagtgggcaaaacattaa

SEQ ID NO: 15602 - DNA, 270 bp, Escherichia coli
gtgcgggctaaaacaggtatttgcaagaaccctcatcgttataatccaacatttctgtctctccctgaatatcaaggacaagaaggtcggcacaaatgcgctgcctgtgcttttgagctaggcataaaagatgcgcttgaaggacgcgctatggctcagaatgatttagttttagctaacattccgtttagccaggctggaactgtaaggcacagagatgcctatgaagcatatgttcgtggttggcgattaatacacagcaacaattga

SEQ ID NO: 15603 - DNA, 636 bp, Escherichia coli
atgaaaaagtttaattttgctgctctacttccgggatttttggctctcaacaattctgtatgggcaagcgattcatctacaggagcgagtgatttacctggtatgactcttaatgagcatgatttagtgatagctccacttaacacggaagtcccattttatatcgcagggcatcgaagccatagctctcataggagccatagctctcatagatcctcatcaggtggtggatactatggtggaagtaccccctattatccaaaaacatacagctcaccacgttcatctggttcttcaagttcaggtgcaagttcctcatcgtcctcttcctcggtgcgtgcacttcgttctaacgataataatagaaccactaacacgagttctgttggaacttcagaggttaaccgtacgagtaatgggcttgcttctgatgcagagaaacgtaagcgattgattatgcgagttcagttcgcattgctggacaggggattttataacggaaatattgacggcataatggggccatccacaaggctgtctgtgaaaaattaccgcattgcgaatggattaccgattcctgcaactgaaacactcgacactcaattgttaaattctttgaatatattagctcgctaa

SEQ ID NO: 15604 - DNA, 1113 bp, Escherichia coli
atgtctgaggttatcaggaacgatatctttcattttgcttctacagagaacgtgcccacggggttctatcggttatgcaaacaaaaaccagtgaaccctttattctttttgcccaatttgctagtagttgctgaaggcaataatgatgccattccaccatgctttgatttctctgttattagcactgaattatttgagtcaattgaagatggagatattgggataatcaacaatggcaatatgatacgcgttattctgtcacgcaaagccaatcataatactgtcttagttacggaacgctgcaataacttgtgtctgttttgttcgcagccaccaaagaaaataaatgatgactggctacttacccaatcagctcttgctatagcttcatttggcttgaacggagttgttggggtcagcggtggtgaacctttgctatatggggatgacttccttcacttcattgattttatcatcgagaattcaccagatactgctttacatgttttaacaaacggacgcaaatttgctgatatcaactttacacaggaaatggcaaagcgaagcaaaaagatcaaaatcacctttggtatcccgctctactcatcaagaccacttgtgcatgatcatctggtagggagtgatggcgcatttaatgaaacggttaaagggttaatcaatgcaggaaacttggggattaatatcgaacttagagttattcctacactggctaactataccgaattggatgatattgtagaattcgctggccgtgtgttctccaacatcaatcagatttcccttatggggttggagcctatcggttgggcacgaaaaaactggtccaccatcttcattgatcacagtagttatagtgagaaaataatctctgccatagacgctgcatacaggtcaggcatacctctgacaatttttaattatcctttgtgttatcttcctgaaagggctagggagcttgctgttcagtcgatctctgattggaaaaattactatccaaaagaatgtgatgaatgtactcagaagccttcctgtgctggctatttcagttcctcaaaaggccgttttcatcaatcaccgagaccaattttatga

SEQ ID NO: 15605 - DNA, 1389 bp, Escherichia coli
atggaattgatgccatttaattttgacagattgcctaatggacaggtgtttataagcaaccttgcaggttttcatcatttcattggtgagcaagaccttattgatctttctgatgagcgaattagttcggagcaatcaaacgtgctagaaagtaagcttttcataaccagtgaaagctcatctgctataactccctatgctttaagttctgcttttgcaaaacgattgatgaatgaactggctgtcaggccaattttcatgattgtacccacattacgttgtgaccatacatgcaagtattgccaggttagtagagcttctgttaatgcctcaggttacgacctaaatcctgagctcatccccgatattatttcggctattaaaaaactatcaacgccaccttacaaaatagagatacagggtggggagcctctcttgcggtttgatttaattcagagcatctatgatcaatgtgctgaaacgctgggaagaaccaattttgagatggtggtggcatcaagtctgtccgtcttgaatgaggatatgattgaatggtcgagagaccggaacataacgttctctgtgtcgcttgatggtgaggaagttgttcacaacagtaatcgaattcttggtcgtgggcttgcgtacagtagaacagtgtcaggggtagaggctatcaaacactctttaggtgctggccgcgttgcaacggttactacagttactaaagagcttatcaaacgtcctgaatcgattgttcaggctcacttgtctcttggtctcaaggacatgtttatccgacctgttagtccctatgggtttgcacaaaaagcttctttcaccttttctatggacgaatacttcagcttctatgcctcgttgatagatgaaatccttaagattaataatgaagggataagggttgtggaacattcggcctccattcatctgaaaaggatcttcaatcccggttttagtggttatgcggatttaaagtctccaagtggagtcgtgcttaacagtattcttttcaattatgacggtcgagtatatggtagcgatgagagccgtatgttgcagaaggtgaatcctgaaacggagttcagtgcgggtgaagttaagacgctatcattttctgatagtccttactataacgcagtattgagttcatcgttcaattttgctctgccaggttgtgatacatgtgcatatcaaccattttgtggttcagatccatgccagaacataagtgtacagggtgagcctgtcggtgataggagtcgttcaacgttttgtcaatatcacaaggggatgttcaggtatctgatgaactgcatctcagagggtggttcgaaggctgagatgctaaaaggatgggcatatgtctga

SEQ ID NO: 15606 - DNA, 273 bp, Escherichia coli
atgagcgaaagagtgtttgagaaagaactatattctgaatgggttatacgcaatagtctatattggatgactccgcttactcgatggaaactccatgaagacgtttcccactggataatctcttttgaaaacgataatcccaaattcctttatgaattcgataggctgcttaatgattactctttgcgagaaaagctacagcataaaacaggggcgttgagagactctattgtccataaagtgcttcgcagtgttgatgagaggctttcataa

SEQ ID NO: 15607 - DNA, 447 bp, Escherichia coli
atgagtaaactggactggttcaataacgtagaaaatcgcccacatccttgggaaggtatggggctgacatggttgacaacagcactaaatgtccctgatgtaaaagcagctattaatttttacactgaagtaatgaagatggtggtaatttctgaacttgagggtgatggtggtgatgtattatttgctcgtatccgttaccgtggcacaaacttcaccataaataaggaaggatgggattccgacctgaaaagcccaaatacttcgggagctatgcctccctttattttttatatgtatgtagatgatatgatcactctggtaaatgaaatggttgaagctggctcgactgttctaaatgaacctgctgaaatgttctggggtgatttaaaagcccgtgtgaaagacccatttggttttatctgggatatagcacagaaactgtaa

SEQ ID NO: 15608 - DNA, 4131 bp, Escherichia coli
atgaataaaatatacgctctaaaatattgttatattactaacacagtaaaggttgtctctgaactagcccgaagggtatgtaaagggagtacccgcagaggaaaaagactttcagtacttacctctctggcactatctgcattactcccaaccgttgctggtgcatcaacggttggtggcaacaatccttaccagacataccgcgactttgcagaaaacaaagggcagtttcaggctggcgcaacaaacattcctatttttaataataaaggggaattagtaggacatcttgataaagcgcccatggttgattttagcagtgtgaatgtaagctcaaatcccggcgttgcaacattaattaacccgcaatatatagccagtgtaaaacataataaaggatatcagagcgtcagcttcggtgatggtcagaacagttaccatattgtggatcgtaatgaacacagttcatctgatctccacacaccaagacttgataagctcgtaactgaggttgctccggctaccgtaaccagctcatcaacagctgatatattgaacccttcaaaatactcggcattctacagggctggttcgggaagtcagtatattcaggatagtcagggtaagcgacattgggtaacaggtgggtatggttatctgacaggaggaatactcccgacatcattcttttatcacggctcagacggcattcagctgtatatggggggcaacatacatgatcatagcatcctgccctcttttggagaggccggcgacagtggttctccattatttggctggaatacggccaaagggcagtgggaactggtcggtgtttactcgggagtaggaggggggaccaatttgatatattctcttattcctcagagttttctctcacagatctattcagaggataatgacgctcccgtcttttttaatgcctcatccggcgcccccctgcaatggaaatttgacagcagcaccggcactggctctctgaaacagggttccgatgaatatgccatgcacgggcaaaaaggttctgacctgaacgcaggtaaaaatctgacattcctgggacataatggtcagattgacctggaaaactctgtcacgcagggtgccggttcactgacatttactgatgactacactgtcaccacttcaaacggaagtacctggaccggggccggtattattgtggacaaggatgcctccgtaaactggcaggttaatggtgtgaaaggtgacaacctgcataaaatcggcgaaggaaccctggttgtacagggaaccggtgttaatgagggcggcctgaaagtcggggatgggaccgttgtcctcaatcagcaggctgacagttcaggacacgttcaggcattcagtagcgtgaatattgccagcggccgcccgacagtcgtgctggcagacaaccagcaggttaatccggacaatatatcctggggctaccgggggggtgttctggatgttaacgggaatgacctgacatttcataagctgaatgccgccgattatggcgcaactctcggtaacagcagtgataaaacggctaatatcactctggattatcagacgcatccggcagacgtaaaagttaatgaatggtcatcatcaaacaggggaacagtaggttcattatatatttataataatccctatactcataccgtcgattattttatcctgaaaacaagtagttatggctggttccctaccggtcaggtcagtaacgagcactgggaatatgtcggacatgaccagaacagtgcacaggcgctgcttgcaaacagaattaataataaagggtatctgtatcatggcaagttgctgggaaatattaatttctcaaataaagcaaccccgggtacaaccggcgcattggttatggacggctcagcgaatatgtccggtacatttactcaggaaaacggtcgtctgaccattcagggccacccggttatccatgcttcaacgtctcagagtattgcaaatacagtctcgtctctgggcgacaattccgttctgacacagcccacctcatttacacaggatgactgggagaacaggacgttcagctttggttcgctcgtgttaaaagatacagactttggtctgggccgcaatgccacactgaacacaaccatccaggcagataactccagcgtcacgctgggcgacagtcgggtatttatcgacaaaaaagatggccagggaacagcctttacccttgaagaaggcacatctgttgcaactaaagatgcagataaaagtgtcttcaacggcaccgtcaacctggataatcagtcagtgctgaatatcaatgatatattcaatggcggaatacaggcgaacaacagtaccgtgaatatctcctcagacagtgccgttctggggaactcaacgctgaccagtaccgccctgaatctgaacaagggagcaaatgctctggccagtcagagttttgtttctgacggtccagtgaatatttctgatgccaccctgagtctgaacagccgtcctgatgaggtatctcacacacttttacctgtatacgattatgccggttcatggaacctgaagggagacgatgcccgcctgaacgtggggccgtacagtatgttgtcaggtaatatcaatgttcaggataaagggactgtcaccctcggaggggaaggggaactgagtcctgacctgactcttcagaatcagatgttgtacagcctgtttaacgggtaccgcaatacctggagcgggagtctgaatgcaccggatgccaccgtcagcatgacagacacccagtggtcgatgaacggaaactccacggcaggaaatatgaaacttaaccggacaatagtcggttttaacgggggaacatcaccgttcacgacactgacaacagataatctggacgcggttcagtcagcatttgtcatgcgtacagaccttaacaaggcagacaaactggtgataaacaagtcggcaacaggtcatgacaacagcatctgggttaacttcctgaaaaaaccctctgacaaggacacgcttgatattccactggtcagcgcacctgaagcgacagctgataatctgttcagggcatcaacacgggttgtgggattcagtgatgtcacccccacccttagtgtcagaaaagaggacgggaaaaaagagtgggtcctcgatggttaccaggttgcacgtaacgacggccagggtaaggctgccgccacattcatgcacatcagctataacaacttcatcactgaagttaacaacctgaacaaacgcatgggcgatttgagggatattaacggcgaagccggtacgtgggtgcgtctgctgaacggttccggctctgctgatggcggtttcactgaccactataccctgctgcagatgggggctgaccgtaagcacgaactgggaagtatggacctgtttaccggcgtgatggccacctacactgacacagatgcgtcagcaggcctgtacagcggtaaaacaaaatcatggggtggtggtttctatgccagtggtctgttccggtccggcgcttactttgatttgattgccaaatatattcacaatgaaaacaaatatgacctgaactttgccggagctggtaaacagaacttccgcagccattcactgtatgcaggtgcagaagtcggataccgttatcatctgacagatacgacgtttgttgaacctcaggcggaactggtctggggaagactgcagggccaaacatttaactggaacgacagtggaatggatgtctcaatgcgtcgtaacagcgttaatcctctggtaggcagaaccggcgttgtttccggtaaaaccttcagtggtaaggactggagtctgacagcccgtgccggcctgcattatgagttcgatctgacggacagtgctgacgttcacctgaaggatgcagcgggagaacatcagattaatggcagaaaagacggtcgtatgctttacggtgtggggttaaatgcccgttttggcgacaatacgcgtctggggctggaagttgaacgctctgcattcggtaaatacaacacagatgatgcgataaacgctaatattcgttattcattctga

SEQ ID NO: 15609 - DNA, 309 bp, Escherichia coli
gtgaagctgcaacttgtcgccgtgggaacgaaaatgccggactgggtacaaaccggttttaccgagtacctgcgtcgttttccgaaagatatgcccttcgagctgattgaaattccggccggaaaacgcggcaagaatgcggacatcaagcgcatactcgacaaagagggtgagcagatgttggcggccgcaggcaaaaaccgcattgtcaccctcgatattccaggcaagccctgggatacgccgcagttagccgctgagctggaagctggatggtcgcgacgtcagtctactgattggcgggcctga

SEQ ID NO: 15610 - DNA, 2400 bp, Escherichia coli
atggcagtacagatttcaggtgtgctgaaagacggtgcaggaaaaccgatacagaactgcaccattcagctcaaagcaaaacgtaacagcaccacggttgtggtaaacacggtggcctcagaaaatccggatgaagccgggcgttacagtatggatgttgagtatggccagtacagcgttatcctgctggttgaaggttttccgccttcacatgccgggaccatcaccgtgtatgaagattctaagccggggacgctgaatgattttctcggtgccatgacggaagatgatgtcatgccggaggcattgcgtcgttttgaggaaatggtggaagaagcggcacgcaacgctgaagccgcctctcagagcgcagcggcggcaaagaaatccgaaacagcagcggcatcatcgaagaacgcggcgaaaacctcagaaacgaacgcagctaacagcgcacaggcggcagcggcctcacagactgcatcggcaaactccgcgactgcagccaaaaaatcagaaaccaacgcgaaaaacagtgagacagccgcaaagacgagcgaaaccaacgcgaagtccagccagacggcagcgaaaaccagcgaaacgaatgccaaagccagtgaaactgcggcgaaaagcagtcaggatgcagcagctgaaagcgagagtgcggcggccggttctgcgacttcagcagccggatcagcaactgctgcggctaacagccagaaagctgcgaagacgagtgaaactaacgcaaagtccagccagacagcagcgaagaccagcgaaacgaatgccaaagccagcgaaactgcggcgaaaagtagtcaggctgcagcagccgaaagcgagagtgctgcagctggttctgcaagtgcggcggctgcttctgccactgcatcagctaacagtcaaaaagcagcaaaaaccagtgaaaccaacgcaaaggcgagcgaaacagcggctgcgaactcagcgaaagcatcggcagcaagccagacggcagctaaagcaagcgaagatgcagccagagagtacgcaagccaggctgcggagccgtataaatatgtcttacagccgttacctgatgtgtggataccgtttaacgattcactggatatgattaccgggtttgctcctggatataagagcatcacagttggtgacgatgttattgcattgccgtctgaaaaggttgtttcatttaccagggcgtcaactgcaacgtatatagataagtctgggtgttttgctgaatcagcgataaatgaaccacgttttgaaaaagatggtctgctcattgaaggtcagagaacgaatactttttcttatacgaatacaccagtatcgtggaactatgacactgctaacttaactattaccacgggagttgatgagtatggtttcagttatggtttgtttggcgttaaagaaacatccacaactgaaagggcgacattaatttctactggatataccagggttatttcagtttcggcaaatgaatcagttactttatcctgcagagttaaaaaagtaagtggggatggtattatcacgttgcgtccaagaatatcatatgttaacgacgatggctcaagtaacacactgaccgctggcgcatatattgattgcgagactggcgatatgttgagttattctggaggtgaggcggcaacttataacatattcagagagtctaatggatggattcgtgttgagtttacctacaaatcaccagaagcaaaaaatatgtatgggcgttttgagtttggagcacatcaacgatcaatcaagtctggcgataaattaatgttaacaacccctcaattcgaaaagggactaaacgcgtcatcttttatcatcacaacagaggtcggtgccacgagagcaagtgaccaggtaatcatacctatacctttcaattgggcaactccaccagttagtgttctcatggaagttaatgttaattgggattctgaaatgcctaatttagaaggctctgcgcgtttgcttaatatctcaattacaggggcgacgactgaagtttctgatgaaagttatatgtattttggttttaccactcgtggtaaaaggctaattatcaccaatggcaaaggaacaaaaacagaatataaagcatatgggaatagagagaaaaggaaatttgttactggctttaagtttacagaagataaacagttgcaggttgttgttgatggaattttaggtggcagctccccgtctctgcatacattgcaacgttatactgccggtaatattaatatcggtggacaatcatccagtggcaacagacacctgttcggtcatgtgaaaaatttacgcatttggcataaagaattaactgaggcacaaatgggggagagtattaaatga

SEQ ID NO: 15611 - DNA, 1107 bp, Escherichia coli
gtgaaggcgctgaatgttgaagagcaatctgttcaggaaaccgaacaggaagaacgtgtacgtccggttcagccgcgtcgtaaacagcgtcagctcaatcagaaagtgcgttacgagcaaagcgtagccgaagaagcggtagtcgcaccagtggttgaagaaactgtcgctgccgaaccaattgttcaggaagcggcagccccacgcacagaattggtgaaagttccgctgccagtcgtagcgcaaactgcaccagaacagcaagaagagaacaatgctgataaccgtgacaacggtggcatgccgcgtcgttctcgccgctcgcctcgtcacctgcgcgtaagtggtcagcgtcgtcgtcgctatcgtgacgagcgttatccaacccagtcgccaatgccgttgaccgtagcgtgcgcgtctccggaactggcctctggcaaagtctggatccgctatccaattgtacgtccgcaagatgtacaggttgaagagcagcgcgaacaggaagaagtacaagtgcagccgatggtgactgaggtccctgtcgccgccgctgccgaacctgttgttagcgcgccagttgttgaagaagtggctgaagtcgtagaagcccccgttcaggttgccgaaccgcaaccggaagtggttgaaacgacgcatcctgaagtgattgctgccgcggtaactgaacagccgcaggtgattaccgagtctgatgttgccgtagcccaggaagttgcagaacacgcagaaccggtggttgaaccgcaggaagagacggcagatattgaagcagttgccgaaactgctgaggttgtggttgctgaacctgaagttgttgctcaacctgccgcgccagtcgtcgctgaagtcgcagcagaagttgaaacggtagctgcggttgaacctgaggtcaccgttgagcataaccacgctaccgcgccgatgacacgcgctccggcaccggaatatgttccggaagcaccgcgtcacagtgactggcagcgccctactttcgccttcgaaggtaaaggtgccgcaggtggtcatacggcaacgcatcatgcatctgccgctcctgcgcgtccgcaacctgttgagtaa

SEQ ID NO: 15612 - DNA, 213 bp, Escherichia coli
ttgtcccgtaaaatgacaggaattgtcaaaacctttgatcgcaaaagcggcaaaggattcattatcccctccgacggtcgtaaagaagtccaggtccatatttccgcattcactccccgcgacgcagaagtgcttataccaggattacgcgtggaattttgccgcgtaaatggcctgcgtggaccaacagcggcaaatgtttatttgtcttga

SEQ ID NO: 15613 - DNA, 807 bp, Escherichia coli
atgctggcgttgtcgcaatcagcagtgagcgcagccttgaccgacctggaagggcagcttggcgttcaactgtttgatcgcgtggggaaaagactggttgttaatgaacacgggcggctgctctatccgcgagcgttggcactgcttgaacaggcggttgaaatcgaacaactgtttcgcgaagacaacggcgcgattcgtatctatgccagtagtaccatcggtaactacattctgcctgcagttatcgcccgttatcgccatgattatccgcagttgccgattgaacttagcgttgggaatagccaggacgtgatgcaagcggtgctggatttccgcgttgatattggctttattgaaggaccgtgccacagcactgaaatcatttctgaaccgtggctggaagacgagctggtggttttcgccgcgccgacttcgccgttggctcgtggtccggtcaccttagaacagctggccgctgcgccgtggatcctgcgtgaacgcggttccggcacgcgggagattgtcgattatctgttgctgtcacatttgccgaagtttgagatggcgatggaattaggtaactccgaagcaatcaaacatgcggtgcgtcatgggttgggaattagttgcctgtcgcgacgggtgattgaagatcaattgcaggcaggcacattaagtgaagttgcggtccctctgccgcgcctgatgcgtacgttgtggcgtatacatcatcggcaaaaacacctttccaacgcgctacggcgctttctggactattgcgatcccgcgaatgtaccgcgttaa

SEQ ID NO: 15614 - DNA, 855 bp, Escherichia coli
atggataatataattgagtcaggatactcagaatcctcccctattacgaaaagagacgttcagattgtttggctaaaatggcacgcgttctctgaaacatcattgaactttgaacgtttacaagcactggcattttgcaatgcaatgacaggcgtattggcgaagctatacccagatgaaaaagatctcgccaaagccttacagcgccatttaaccatgttcaacacacaggctaactggggctcggttatcgctggtattagtattgcactggaggaaaaagccgcccaggaatcagaagaacaacgtgaatcaacaacacaacttgttacgggtttaaaaaccggtcttatggggcctgtatcgggtattggtgacacgttagactttggtacattgcgtcccattgttattggtgtctgtatcccgtttgttattcagggatatgttattgctgcacttctccccctgatttaccaggttagttatatgttcttcgccagtcgatttgctcttaatatcggctataaaaaagggaaagagtcaattctggaaattttgcattccgggagcatacatcgaattatcgaaggcgctggaatgttcgggctgttgatgatgggggcgctttcagcaacgtatgtaaaaattaagacgccattgcatattacaaccggcggtggcaataccattgtcttacaggatatgctagataaaattgtccctaacatgttgccacttattgccgtgttgggtatttatttttacatacaaaaatgtggccctcatttcttacgtattctggtcactattcttgttttgagtcttgcattttctttctttggccttttataa

SEQ ID NO: 15615 - DNA, 552 bp, Escherichia coli
atgcgcattatgttaatattactttgttttttttctttcccctgtttttcaggcgataagattaaaatcgtgaaaacctgtcaattgaaaaaaaatgaaagtgtgcagttgctttcccttagaaccattgacggtgatacattatatctaaaattcagaaatgttatcaccggggcctttttagatactccaactaaaagttatgatttttttggagatgtggttctttctcagtgcataaatggttctcttatctttgcgctggaatatggttctccatatataaaaggttgtctggtaactggttgggaaaatgggtttaaaggtaagaactctcctgaaggcttttgtttcgcagagagaaatattcccgaagcggtatggtttggaaaaaacaatattttaattatcatccgaaaccaaatggatgttgggacatggaaagggaaatatattatctatgataatgcgaaaaagtcaggagaaagagcatactcatcagataatctaccatcaaaagatggttacataatttttgcattaaataaataa

SEQ ID NO: 15616 - DNA, 171 bp, Escherichia coli
atgttcaggctatgtgatatttacaacactaatatacattcaatggacttcggtaaagttccatggaagtttgtctttttacttgtgatgagcaagcagaaatttacccgacatgaacattctccagactatattacaggagaattcaccagttccctaagtgttggttag

SEQ ID NO: 15617 - DNA, 714 bp, Escherichia coli
atgttaatttttatggacgttagatttatagtggagccgatttattccttgcataataataaacttattgcaatggaagttttaagcaggtttaaatttaataatggtatgcaagctcctgccataaagatactaaaaatgcttagtcaagatgtaaagaacaagcttttaaacaagcagttagagtggattactgcaaataaaaaattctttatcgaaaataatattatatgctcagtaaatgttgatgatggattgtgtacatttatttacgaagacgagcgcatacagaaaatcataaaggagaataattttctcgcttttgaaatatcagaaagtcatcctaaccttgatatggatgatcgtgtgatagattttttgttcagtttgtctggatatatctggcttgatgattttggaagtagtaatgcaacaatgtctgcagttatcaagagaccttatcatgctataaaaatagataaatgcttcctgcagcataacatagaaaatcacaccatatcagaaacaataaaacgaataaaagaattcgtccctcatgttatagcagagggaattgaaaatgacgtgtatcataagatgtctgttgaactggatttgtggggagggcagggatattattttttaaatacaaacatgagcccccattgtgaaatggtttccaattctttatcttttgattttttaaaagtgtaa

SEQ ID NO: 15618 - DNA, 3909 bp, Escherichia coli
atgaacttaatatattctcttcgttacagtagtgctgctggctgtttaatcgccgtttctgaactcacaaaaaagaagaataaaaagaaggttaaggtacttcttctttcttctttaacatctattcttttatatacagggcatagttttgcaggaacggtaaacagcgaaatatcatatcagttatttcgagatttcgctgaaaataaaggcctctttaaaccaggttccaccaacattccagttcataacaagagtggtgagttggtgggaaaattagataaagccccgatgccagattttagttctgtagattcaggtattggtgtagcaacattaattgaccctcaatatgttgtgagtgttaagcataatgggggctatcaaggagttagttttggtgatggcgataactattatagtattgtagatcgtaataacgcacctgaccttgactttcatataccaagactaaataaactcgttactgaagttactccaacttctataacttctcagggagctgttagtggcgcgtacttagataaagtacgataccctgttttttatcgcctgggctccggtaatcagtacattaaagaccgtaataacgcccttgatcacctttccagtgcctataactggcttactggcggtacagtgggtaatccttcttcgtatcagaacggagagatgttatcaagttcctctggattagtttttaactacacgaggaatgacgtattaccgatctatggtgaggctggtgatagcggttctccgctctttgcctgggacaccaccctacaaaaatgggttttagttggcgttctcacagcaggcaatggtccgggcggtagagcaaacaactgggctgttacaccactgaattttgttcatcaaaaaatgactgaagatgatggtccgttcgttcttttcgactcttctgatgatgcgcctttgacatggaatttcgacccgcaaactgggactggtaatcttacacagggcaatgtcacctataaaatgcaaggtaaacaaggctccgatcttaatgcaggaaaaaatattcatttctccggaaaaggaggggaagtaaagcttgttgatgatgtgttccagggggctggttatttaagattcttagacaactatacagtcacagccataaacaatagcgtttggactggtgctggcatcatcgttgacaagctttcaacggtaaactggcagctcaacggattaaaaggagataatcttcataagatcggcgaaggtacgctcatcgttgagggtactggaatcaacgaggggggattaaaagtcggtgccggtactgttgttcttaatcaagagtccaatgaagaagggtcaacgcaagcctttagtagcgttaacatcgcagggggcacatcgtctgttattctcggtaatgaaagacaaattaacccagatagtgtctcatggggatataggggcggtaaacttgacctcaatggtacaagtgcgactttccataagttaaaggccgccgattacggtgcagtgcttgctaacgatgataatgaaaatatttcaaccatcacacttgactatcagcttaagccgaaagatatcactacccatgaatgggattcctctaatagagggacagtaggcgatctatacgaatacaataacacctacacaagaacaaccgactacttcattctcaaaaagagcaagtatgggtattttcctacttctcaaatcagtgatgataattgggaatacttaggccatgaactcgatgcagctcaaaaactaatagctaagagaacgaatgataagagttacgtatttcacgggaggttggaaggcaacatgaacgtggagaaccgagtttcctcagaatatgggggcgctttggttctcgatgggtccgcgaatatcaaagggactttcacccaagacaacgggcacctggttttacagggacatcctgtcatccatgcatttaattcccagcaaacagctgaacatttatcagcgaaaggcgacgattctgtacacacacagccaacgtctttcgagcagaaagattgggaaaacagagactttacgtttggtcaactcgttttgaacaacgcgtacctccggcttgcccgcaatgctaccttgagcactaatctcgatgccaacaactctgttattgcgcttggagataacaaagtattcattgatacaaaagatggtaaaggtactgcattctcactggaagaaggtagttctgtggccgaaaaagaatctgacaagagcgtcttcaatggccatgcaatgcttaaagacgatactgagttaaatattcttaatgctgtattcaatggcactatcactggcgacgactcttcaagtgtgcaattagatcggcgcggcaaatggaacatagccggtgattcctcattaggtaagtttgtgagtcatggcggatctctgtcaatgctaggctcagactggagtcctaagacattacgcatcagtgaaatggacgccaccgatatgcatatttctttaggcgcagatgtaagcaaagggattggcgacagaattgaaattattgaacgtgcgcaagggcaaaataacatcctggatgtttcgctgttctttgatgagaatgcgcgcctcaaaaatgatctgacagtcgtttctgcgccagcagatacagcacataacatgttctcttttggcagctttactcgcggtttttcagatttcacacctgaaacccaagtacaagaagctgacggaaaagtaatgtggcagcttgctaaagtcgtgtccagcagtgaagaggaaaacacgccagaaccagagaaagtggttactgacgacggttcggaatctacggccccccctgtggagaaagaaaccgagagtggaaaggaagatgcgaaaccagattcgcagaatgagaaactgacattttcgggatctgacagttctactaaaaaaaatagtgagaaaactcaagaaactacggtagatagtgctttaacaagacactcgaatacggccctgttaaataaggccagagatacctttatctctcatgagtacatcctgagtgatagagcagaccgttggcaacaggttgtggatgggactgcagcaaacggagcgtgggcgttgacggagcaaagctacggcaaacatggcgacttcacgcttagtcagagcggcctgaacatcggcttcaagaagtcgaatgattccggttcatggtggggcgttggcgcagatcttaatcgtggacaagccaaagccgattattaccgaaacggctataacctgtggggtgtgaacgtctacgtcaggcagcaactcatggaaggcttgtttgttgatggggccgcaggctttggccagttaaccgaggactttaaagttcatggcgaattgcgcgatctgtcaggaaaggtgaaaagtcatgtgttcacaggtagtctgcgagctggctacaaattcaattttgaaaacgcagacttctcaatcacgcctactgtctcgcttaatggcgtcaaggtgagtgacagccgtttaaaaggcaaaggccgcagtgcagagcttcgcgggggtaatgccctttggcttaaaaccggagttgaggctgagaagaaaattaaggacgttaagcttaaagcaggtgtgtggagtaataacaaccttaacgagatgtccggaatttctctgagcgataactggtcacagcaccaatacaagtcgaagaacctggagcgaatcacatcttctgtagaagtcgaaggtaaagcaactgaaaatttacacattaaagcaggtgttaatgcgaaatttgacggttacttcaaaaacaattatgaaggtattgtcggtattcgatatgagttctga

SEQ ID NO: 15619 - DNA, 246 bp, Escherichia coli
atgcagacctcacgagttaatggattaacgagtggggtcttcgcatttctggtacctgcgtcttgcctgaaccagaaaggctcaaacacccgccgcgataataccacattccctgttgctgactattacccccatttgcctgtttttgttacaaaaacgccgggagcgggggaaaacttactttttcccgtttccggggggggacaactgagcattgcgaacgcgtcagctacgatgttccggtga

SEQ ID NO: 15620 - DNA, 5271 bp, Escherichia coli
atgatgagtattgcgcaggtcagatcggccggaagtgccgggaactattataccgacaaggataattactatgtgctgggcagcatgggagaacgctgggccggccagggggctgaacaactggggctgcagggcagtgtcgataaggatgtctttacccgccttctggagggcaggttgccagacggggcggatttaagccgcatgcaggatggccgtaacaggcatcgtcccggctacgacctgaccttttccgctcccaaaagtgtctccatgatggccatgctcgggggggacaaacgtcttattgaagcacataaccaggccgtggattttgctgtccgtcaggtggaggcgctggcctccacacgggtgatgacggacggacagtcagaaacggtgctgaccggtaatctggtgatggcactgtttaaccacgacaccagtcgcgatcaggaaccacagttacacacgcatgcggtggtggctaatgtcacgcagcataacggcgaatggaagacactgagcagtgacaaagtggggaaaacggggttcattgagaatgtgtacgctaatcagattgcctttggcaggctctaccgggaaaaactgaaagagcaggttgaggcgctgggctatgaaactgaagtggtcggtaagcacggtatgtgggaaatgccgggcgtaccggtggaggccttttccggacgctcgcagactatccgggaggccgtcggggaggacgcctcgttgaaatcccgggatgtggcggcactggatacgcgaaaatccaaacagcacgtcgatcctgaagtcagaatggctgaatggatgcagacgctgaaggaaaccgggttcgacatccgggcatatcgtaacgcggcggatcagcgtgcggagacccgcacgcaggcgcccggggctgtttcaccggaggggccggatgtgcagcaggcggtgacacaggcgattgccggattaagtgaacgaaaagtgcagtttacgtacacggacgtgctggccagaacggtcggtatactgccgccggaaaatggtgtgattgaacgggcacgcgccggtatcgatgaggccatcagtcgtgagcagcttatccccctcgaccgtgagaaggggctgttcacatcaggaattcatgtgctcgatgagctgtccgtccgggcactcagtcgtgacatcatgaaacagaaccgggtgaccgtacatccggagaaaagtgtcccccggacggctggttacagcgatgcggtcagtgttctggcacaggaccgtccgtcgctggccattgtgtccgggcagggcggtgcagccgggcagcgtgagcgggtggctgaactggtcatgatggcccgggagcaggggcgggaagtggagattatcgctgctgaccgtcgctcgcagatgaacctgaagcaggatgaacggctgtccggtgagctgataaccgggcggcgtcagctgctggagggcatggccttcacaccgggcagtaccgttatcgttgaccagggtgaaaaactctccctgaaagagacgttaaccctgctggacggtgccgcacgtcataacgtacaggtcctgataaccgacagcgggcagcgaaccggtacaggcagtgcactgatggccatgaaagatgccggggtgaacacatatcgctggcaggggggagagcagcgaccggcaaccatcatcagtgagccggaccgtaatgtccgctatgcccggctggccggagattttgtggccagcgtgaaagccggagaagagagcgtggcacaggtcagcgggatacgggaacaggccatactgacacaggccattcgcagtgagctgaaaacacagggtgtgctcggacacccggaggtgaccatgactgccctgtcaccggtctggctggacagccggagccgttatctgcgggatatgtaccgcccggggatggtgatggagcagtggaacccggagacacgcagtcatgaccgctatgtgatagaccgggtgacggcgcagagtcacagcctgaccctgcgggatgcgcagggcgaaacgcaggtggtgcgtatttcctccctggacagcagctggtcgctgttccggccggaaaaaatgccggtggcagacggcgagcgtctgagggtgacagggaaaattcccggacttcgcgtctccggtggtgaccgtctgcaggtgacatccgtcagtgaggatgcgatgacggttgttgtgccgggacgtgctgaaccggtcaccctgcctgtgagtgattcaccattcacggcactgaagctggagaacggctgggtggaaacgcccgggcattccgtcagcgacagtgcgaaggtttttgcctccgtcacacagatggcaatggacaacgccacactgaacggtctggcccgcagcggtcgtgatgtccggctgtattcctcactggatgaaacccgtactgcggaaaaacttgcccgccatccctcctttacggtggtttctgagcagataaaggcgcgtgccggtgagacattgctggaaaccgctatcagtctgcagaaagcagggcttcaaacgccggcacagcaggccattcatctggcccttcctgtgctggaaagtaaaaacctggccttcagcatggtggacctgctgacagaggcgaagtcgtttgctgcagaaggaaccagttttactgacctgggaggggaaatcaatgcgcagataaaacgcggtgatttactgtatgtggatgtggcaaaaggctatggcacaggcctgctggtttcccgtgcgtcgtatgaggctgaaaaaagcattcttcgccatattctcgaaggtaaggaggcggtcacgccgctgatggagagagtacctggcgaactcatggagaaactgacatcaggacagcgcgccgccacccgcatgatactggaaacgtccgaccgtttcacggtggtgcagggctatgccggtgtggggaagaccacacagttccgggcggtgatgtcagccgtgaacatgctgccggagagtgggcgtccccgtgtcgtggggctgggtcccacgcaccgcgcggtcggggagatgcgcagcgccggcgtggatgcacagacactggcgtcatttctgcatgacacgcagctgcagcagcgcagcggagaaacaccggatttcagcaacacgctgttcctgctcgatgagagctcaatggtgggcaatacctacatggcacgggcatacgccctgattgcggccggtggtggtcgtgccgtggccagcggtgacacggaccagctgcaggccatcgcgcccggtcagcctttccgtctccagcagacgcgcagtgctgccgatgtggctatcatgaaagagattgtgcgtcagacgccggaactgcgggaggcagtatacagcctgattaaccgggatgtggaaagggcattgtccgggcttgagagtgtgaaaccgtctcaggtgccacgtcaggagggcgcatgggcaccggagcactctgtgacggagttcagtcacagccaggaagcgaaactggcagaagcgcagcagaaggcgatgctgaaaggcgaggctttcccggatgtccccatgacactgtatgaagccattgtccgcgactataccggcagaacaccggaagcacgggagcagacgctgattgtcacgcacctgaatgaggaccggcgcgtactgaacagcatgattcatgatgcacgggaaaaggccggtgagctggggaaagagcaggtcatggtgcctgtcctgaacacagcgaatatacgcgacggagagctgcgtcgtctctccacctgggagacacatcgggacgcacttgtcctggtggataatgtgtatcaccggattgccggtatcagtaaggatgacgggctgataaccctgcaggatgcggaaggtaacacgcggctgatttcgccccgggaggcggtggctgaaggcgtcacactgtacaccccggacaccatccgggtagggaccggtgaccggatgcgcttcacgaagagtgaccgggagcgtggttatgtggccaacagcgtctggacggtgacagcggtttccggtgacagtgtcactctgtcgggcggacagcagacccgggtgattcgccccgcccaggagcgggcagagcaacatattgacctggcctatgccatcaccgctcacggtgcgcagggggcaagtgaaacctttgccatcgcgcttgaaggtacggaaggcagccggaaactgatggcaggctttgagtcagcctacgtggccctgtcgcgtatgaagcagcatgtgcaggtgtacaccgataaccgtcagggctggacggatgccattaacaatggcgtacagaaaggaacagcccacgatgtgtttgaaccgaaaccggaccgggaggtcatgaatgcagagcggctgttcagtacggcgcgggagctgcgggacgtggcggcagggcgtgccattcttcgtcaggcggggcttgccgggggagacagtcctgcacggtttattgctccgggacgtaaatatccacagccgtatgtggcactgccggcgtttgaccgtaacggcaagtctgccggtatctggctgaacccgctgaccacggatgacggaaacgggctgcggggattcagtggtgaaggccgtgtgaaaggcagcggggatgcgcagttcgtggccctgcagggcagccgtaacggcgagagcctgctggctgataatatgcaggatggtgtccggattgcccgtgataaccccgacagcggtgtggtggtgagaatcgccggtgaaggtcgtccgtggaatcccggtgccatcaccggtggccgcgtgtggggggatatcccggacaacaacgtccagccgggagccggaaatggcgagccggtcacggcagaggtactggcacagcggcaggctgaagaggccatccgccgtgaaacggaacgccgcgcagatgaaattgtccgtaaaatggcagagaacaaacctgacctgccggacagcaaaacagagcaggctggcagggagattgccgggcaggagcgtgaccggtctgccatatctgaacgggaagccgcgctgccggagagtgtgctgcgtgaatcacaacgggagcgggaagcggtccgggaggttgcccgggaaaatctgctgcaggaacgacttcagcagatggagcgggatatggttcgtgacctgcagaaagagaaaaccctgggcggagactga

SEQ ID NO: 15621 - DNA, 789 bp, Escherichia coli
atggatatcaagaagaatgtaataattatttttgctacaactttattgggtggatgtggcagtattggaaatataaaagatgtggaaccatctaagtacgtacatgttactgactacttaaatgatatatttgaaaaatcaaattgtattggtacagttttctccccgcagggacggatatcaactgatgctgatggattgaagtatcagttgaatggggaaaatatcaggtgttactctgactctattgagaatgctgtagagaaatattgtgtttataaggggggagaaatagtacagggagggcgttggtgtaaggtaaacggtgaaccattattttatattaattatggctatgatgggaaacattatggcgttactaaagagaattttatggttgtagaacaagggagttctcagggaaggcagcaatggttaagtgctgctgaacgacttggttttttgagtaggcgtgtcctgttgcaacaaaagttagaaaatgaaattaatgtaaaaaaagaagccgcagaattacaattgaaaataaaagaaaaaaacacccccgtgaaagcagatgttggggatttgatttgtaaagaagattatgaagctaagccatatcaatatcctgggacagcttactataaagcatatgttgaaaaaaaagaaaaaaataagcttcaacttaggttagtctggcatggcggaaatggcttcgttattaatgatataacgtcttcaaataacattatatggtcatcgccaaatggctggaggcattgtaattaa

SEQ ID NO: 15622 - DNA, 312 bp, Escherichia coli
atgggattatttaaccataaaaccaatatcactctaagtgctcatagcaatgttttcacttccacaccatctcaaatgagaattattaaaaattttggccttgttaaggctaccacatccgaaatctctgcaaaatatcataatgaagatgatgaacttctttccatattgttatctgaagcttccaagatgggggccaacgcaattgtaaatttccactacacctctggctcataccaaagaaacggcgccgcttttgttacgagttatctgatcgctataggtgacgctgtactcttagaggaaatataa

SEQ ID NO: 15623 - DNA, 531 bp, Escherichia coli
atggtttgtcagcagataagaaaataccattttaaacaaagcgtaagttgtatttctctactgagtgttattgtttttggagggtatcttctctgggctgaatggccagcaataaaatatcacctggacagtacagagattctttcattcaggaatgccggatttctttttttgtttattattataatgctggttgtcactgttttttccgccactgtgggagtatcaggaaatcatgaaatacactctcagatagttattcctggcgttattatttctgtccttctgcagtgttctgcgattatgatgatgcgggcatggctctggcccccttatgtaatagctggaacgttcctcatcgttcagttctggaatggctatctgaccggatgggttcagagggatctaaatgaggggcgggtgaaagctggattttggaatattgtgtcagagttctggttgcttattcctctggtgttaagtggatgggggctctcgtggggatattacacaacattatttacttcatga

SEQ ID NO: 15624 - DNA, 1542 bp, Escherichia coli; identical to SEQ ID NO: 14933

SEQ ID NO: 15625 - DNA, 213 bp, Escherichia coli
atgagtaattcacataaggtcatgaaagacgggaagttattgcacggcaacgcggcaacgcttcacctggcaaaaaaagcgggtgggatggatcagttccttgaccagatcgtggagatttcagctgtggctgccgcacgggatgcagttaaatcccacattgcgcaggcatcacgtccggcattgcgtgtagtcaacggtggtaaaaaataa

SEQ ID NO: 15626 - DNA, 258 bp, Escherichia coli
atgggaaataaacacatcagcgccagtgaagctaaaaagattagttcttcagtgatacctgatgcagacaaaacacttgatatgatatttggagaaataaagctccaagcaagattgggccagacatcctttatttatcctgtccatgaaaacattcttgagcaagtggtcaaagttctaagggaatctggttataggattaactcatcgaaggctaatgagaataacaaatttattattgaaattagctggcagtga

SEQ ID NO: 15627 - DNA, 447 bp, Escherichia coli
atgattcagtcactaggtacaattatgagttcgtctgctgccgtaactgttctgaccggcgtaaccgtttttgttgttggtcaactcatcgcaaaaagattcattgagccttatatatcattcagagaacaattagggaggattacagcgcttttattacgtgagcaagcgacgatcacaaatttcagagctaatcatgaaaccatccacgatttgaaagatgctgcttctcagttaatggcaaagtatgcagccttgcctggtagcctaaaaagaagctatttaggtatgaagtttgtaccatcaaagggtgaagttcttggtgcagcacaaaaccttaatgagatcacctcaatacttgctggcaacagtaaggaaaatacctacaatctcataaaggagattggactcaagctcaatataccaactacctattcgtctcattaa

SEQ ID NO: 15628 - DNA, 528 bp, Escherichia coli
atgatgaaatcggttcttggcatagctgttgcaattgctttatgttcagtagcaaatgcggcggatcagggacaaggtaaagtaaattttaaaggaaccgtaattgatgctccctgcgggattgctccggaatctgccgatcagtccattgattttggccagatttccaaagctcatctggaggctaatggtatttctgtgaaaaaggatctggatattaaactggttaattgtgtgatcggccaagataaattgacagtaaaagtagccttttctggaaacagtgtgaatggggttacaaaagagttaggtactgctggtgataccggtacagcaattgttatttccagtgaggatggctctcttgtgacttttgatggcaagactcctactggagcaatgaattataaagctggtgacaacactctgcactacagtgcttgggtcaaaaaatccagtgctgcaggcgcagttcttaaagaaggtgagtttacttctgttgctaacttcaatctgacctacgaataa

SEQ ID NO: 15629 - DNA, 2460 bp, Escherichia coli
atgcttgctttatcaggtattccagtctatgccgtcgattttaatacagatgttctggatgccgaagacagacagaatattgatatttcccggttctcccgggccggctatattatgcccggtcagtaccagatggaaatcaaagtaaatgatcagagcatttctccgtcggcatttcagataacgtttcttgaaccaccttattcagattcggataacgagaaaccgttaccgcagccctgtctgacaccggagatggttggtcatatgggactgactgaggcgtcacaggaaaaaatcacatactggaataacgggcagtgtgcggatttccgacagttatccggagtggagatacgcccgaatccggcagagggaatgctgtacatcaatatgccgcaggcctggctggagtattccgacgcctcctggctgccgccgtcccgctgggataacggtattccggggctgttgtttgactacaacatcaacgggacggtgaataagccgcatcaggggaaacagtcccagtcgctgaactataacggaactgcgggggctaacttcggtgcatggcgtctgcgtgcggactatcagggcaacctgaatcacaccaccggcagtgcgcaggggacggacagccagttcacctggagccgtttctacatgtaccgcgccatcccgcgctggcgcgcaaatctcacactgggtgagaactacatcaattctgagattttcagctcctggcgctacaccggtgccagtctggaaagtgatgaccgcatgctgccgccaaaactgcgcggttatgcaccgcaggtctcagggattgcggatacgaatgcgcgtgtcgtgatttcgcagcagggacgcatcctttatgacgccaccgtgccggcaggtccgttcaccattcaggacctggacagctccgtgcgtggccgcctggatgttgaggttatcgagcaggacgggcggaaaaaaacgttccaggtggacacggcatatgtgccgtatctgacccgtccgggccaggttcgttacaggctggtttccggtcgttcgcgtaattatgaacacaccatggagggaccggtctttgctgccggtgaggcatcctggggtatcagtaacaagtggtcactttacggtggcggtatcgttgccggggattacaacgccctggcagtgggtctgggtcgtgacctgaatgagttcggtacggtatctgctgacgtgacccagtccgtggcccgcattccgggagaagatacaaagcagggtaaatcctggcgtctgagctactccaaacgttttgatgacgtgaatgcggatatcacctttgcgggctaccgcttctctgaacgcaattacatgacgatggatcagtacctcaatgcccgttaccggaatgacttcacgggacgtgagaaggagctgtacaccgtcacgctcaacaagaacttcgaggactggaagacctcggtcaacctgcagtacagccatcagacctactgggaccgccggacatctgactattacacgctgtcggtgaaccgttacttcgatgccttcgggtttaagaacatttccctggggctgtccgcatcccgttcgaaataccagaaccgggataacgattcggcatttgtacgtctgtccgtgccgtggggaaccggtacggccagctacagcggcagcatgagcaatgaccgttacaccaacaccgtggggtacagcgacacgctgaacaaagggctgagcagttacagcctgaacgccggtgtgagcagtggcggtggtcagccatcgcagagtcagatgagcgcgtactacaaccacagcagtccgctggccaacctgtcagcgaacttctctgccgtggagaacggttacacgtcattcggtatgagcgcatccggtggtgcaacgattaccgcgaaaggcgcggccctgcatgcagggggcatgaacggaggaacccgtcttctggtggataccgatggtgtcggaggtgtgccggttgacggtggccgggtctccaccaaccggtggggcattggtgtggtgacggatgtgagcagctattaccgcaacatcacctcagtggacctgaacaggctgccggaagacatggaagccacccgctcggtggtggaatcggtcctgacggaaggggccattggttacagggagtttgaagtcctgaaaggaagtcgtctgtttgctgtgttgcggatggcagacaacagccatccgccgtttggtgccagcgtgacaaacgcgaaaggccgtgagctggggatggtggcagacagcggcctggcctggctgagcggggtgaatccgggtgaaaccctgaatgtcggctgggacggccggacacagtgtgtggtggacatcccggcacatccggacccggcacaacagttgctgctgccctgccgtaaggcgaactga

SEQ ID NO: 15630 - DNA, 552 bp, Escherichia coli
gtgaataaaaacagaatgcacagagtgttattcagtgttctgttatcggtgatattcctgcctgtatccggttatgcctcagaactgggatttaagggcaatctgctggacagaccctgccagattgacctgtcttccgtggcacaggatgtgacgtttatggatacgacgacgcgtctttatcatgtctggcccggcaaaagttatgaagagacatttcaaataaagctggttaactgccatgtcaccacgatggggaaggtggtggaactgacatttaaaggtgcagaagagccgaagctgcccggatatctgcaggtcagcggtgtgaacagcggaaggctggggataggaattattgattctgacggcagcagtcttctgaagctgaatcaagtccataacggtggactgggtagtaaggtggaaaaggacagcgtgacgctgaattttaaggcatttgtgcaggccacatcagaagccattacaaacaaggccgttcagccgggaaattacagcgctacggcaacattcgaacttttgtataaataa

SEQ ID NO: 15631 - DNA, 528 bp, Escherichia coli
atgaagaacaaattacaatgcatggtgttatttgcgatgatttatatatctacttctgcatggtctgctgataatttaaggtttaaagggaatctaattatcccaaactgcactatcaacaataatactgtcatagagacggattttggagatgttgagatacagactattgcaaatgtgaatacaggatatcactggagagcaataaatatacctgttaattgtccttataatataggtactccaaaagttaaaataacaggaaaaaaaggaactgcaacgaatagtattcaaacagataagtactctcaagaaaagcttgtgatctatttaaatcaatcaaatgcatcaggtatacggggtaataatattactgtcggtcagagtgttagcctgggagcgggagctgtaagtaataataagagtaatgtatatcttactgctggtatcgcacgggaaggggatatgtcattgttgaaaccggggcctttttcagctgcagctacgatggagttacgttatgagtaa

SEQ ID NO: 15632 - DNA, 534 bp, Escherichia coli
atgcggttgaattttataaagcgggcaattggttgggggatgttattattatcatatagggtattggcaatggatattcctgttgaaattacaggggaaatacaagttccaccatgccaggttaataatggaaaaattattgaagtaaaatttggtgatgtatctgttgcagatgtgtcaaatcagcataatcgtcgaaaggttatcattccggttacttgtggttatgcacaaggtacagcatacgttaaagttaccggagcccctctgggaagtaataaaaatgtacttatgacaaatataaatgattttggtatagctctctaccagggagatggaacgacccagaagttaatactgggggaagggaggggggatggtaatgaaacaattggctatccgatagaaacaggaatatctggaaaggagaaaggcacatttacatttactgcagttccatataaagacgggaatagtgaactgaaaacaggtagtttctctgctgcagctaacataagcataagatatcaatag

SEQ ID NO: 15633 - DNA, 258 bp, Escherichia coli
atgtatcactcttttaatatcgctgtaattattccttgttataatgagcagaaggcaatagcaaaagtcataaatgatttcaaaacgaatattccaactgcttctatatatgtatttgataataattcgactgacagtacagcacaagtggcagaggatgctggagcaacagttcactctgttcctctgaaaggcaaggggaatgtcgataagacgtatgttctcagatgtagatgcggatatttatctaatggttga

SEQ ID NO: 15634 - DNA, 678 bp, Escherichia coli
atggttgatggagatgacacttatgatgcaagttctgctccagaaatgattaaccatctcataaaaaatcaattggatatggttgtaggatgtcgtcaagagaatggagatcaaaatacatacagaaaagggcatcgctggggaaataaactgttgactggtactgttcagactatctttaaagggaattttactgatatgttgtcggggtatcgtgtattttccagacgctatgttaaatcttttccatgtctatcaaggggatttgaaatcgaaactgagcttacaattcatgctttagaattacgtatgaagtatggtgaggttaatacaaaatatggcgagcgacctgaagggagtgtgagcaaactatcaacttggagtgatgggttcaagattctgaaaacaataattaaactttactcgcttgaacggccactatacttttttagtattatcggcgttttacttgctgctttgtctataattttaggattgcccatcattgttgattatattgatacaggtttggtgagaagatttccgactgcctttttaactgcctccatcatgttatcgtcaataatggcatttgtatgtggcattattttgcattcaaatacaacaactagacgtgaaatgaaggcattattttatctttctgaaaaaaaactataa

SEQ ID NO: 15635 - DNA, 1770 bp, Escherichia coli
atgattgaattgccgttgtatttgtatgttgtgtattgttttgcttttggaatgacattttttgtcattggtaatattgtattgtcatctttttttaaggagggggtggcaggacttaacaaattttctttatttttttattgcctatgcatagggatgtctttaagtattttgataatttactttctgggcatggtcgggcaatttaataagattgctatctttttaatttttacggtgtgttgggttttaagcattattaaacgtcagcaatttagatggctggcaataaataatattgagttcagtacgctgtttgttattttatttcttgttttgatttttgcggttacattgttatcgtccctgcgagctcccggtgattgggatgatactatgtatcacttacctttggctcgttcattagttgagcaccatgcaattgttgttgaacaatatttgcgttttcctctgttcccgcaaaatgcagatcttttaatggctttaggtttacagttaggagatgtaaggttagctcagtttttagcaaatatctgttttttcgtaatagcctgtggacttgttggctgttcatgggaaattacgaaaacttattatcctggcattattgctacaatcctactatttactatcaatccacttaaagatcatcttggttatgcatatattgatttaacgctatctttgttttgttttgctgcagccagtattcttatatatattcgctcagaaaacaataaaacacaaaatgaattaatttttttatgtggtttttttattggaattgcttgtggcgtaaaactatttggtgccatatatggagctatcatatttgttatattgatagcgaaaaagagaaacatacagacatttcttatttttagcttggcaacaattcttggtggcatttattggtatgtgcgtagtttttggatctctggtgatccttttagtcctgctggaggaaatatatttggtcactacctatggaatgaaattgatctacaagttcaaacagcagaacaagctcgacatggtataagtcctgccacattagatttgcaacaagcaattaataaagttggcagtgatgttgttttttatgctatactgtctgtctttacacttaggaataataaaatactttgggtatttttctcgattgttttaacatatgtcttattttggttttctgttacgcaagttgacaggtatttatcacccatttacccattgtcagtattgctggttgcgatctcaattgcaagtttaataaaagatatcaacattacaaattacaagttgggacgatattttatccttgcgtgtattatttttttttcggggcgatcgttgtattttgaattcaaatatttttattctgaatacttgaattttaattcacgcttagaaagtcgctatagctatgaactgatgaagaaagcaagtgaatatagtgagttatatggagataatcttatccaattaggcttggaggatggcatttacttctataaagggatggcaattggtgacgtctttggattagcaagatatagtgattggactatttgtaatcccgagtgtgaggtaatcccacaggatgatttaatagagaagatgaaatcttttaatagttcgtttattgttatatctaaacgaagctatgctaattttaatccagaaaagtatccaaaattcaaagttcttatggatacacccaatggcatacttatcgctataaagtaa

SEQ ID NO: 15636 - DNA, 222 bp, Escherichia coli; identical to SEQ ID NO: 8109

SEQ ID NO: 15637 - DNA, 411 bp, Escherichia coli
atgaaaacttttatcaaaactttactcgttgctgtaactattctgttctctgtcttcgctgcggcgaaacaagtaaaactgccaaacaacatcaaatacgttaatactacagaggcgttttcctgtactgagattgacggtatgaattgccagacgaagaatccgttcaactataaagataacagctatgttttcgtgcttgaacgtggtggtgcctggtgttacgactacactgtctcggtacttaacctgaaaaccgggaaagaacagatgctcgaatacaaagacaaccagctgtgctcaagtagcaacaaaccgttcttcgaaatcaaaaatggcgtaccgacggtaggagtcatcgacacatccggaaaacctgtcgttgtggctctggacaaacttaaaacctga

SEQ ID NO: 15638 - DNA, 870 bp, Escherichia coli
atgaaatcttgggtaaaaatgaatagttggacatcagaagacaccaaagcagtgaaaacgtggtttgatttggacaaatatcgagagtttgaaagcatttctattaatatgctttaccatgaaatatgggcgagaacctattttttcaaaccagtaatagaagaaggaatgcagaaaacagtattgaaaaattatatgcagatattggatggtgatccttttcttatcaaagagaagcacttaaattatatggatgccgaaaatgaattatatcaacccccatacttttttattactactgttgatcgaatagcaaatatcagttttgattgtatgagaaaggctttattcattagagcaaatacagaacaatataaaattgattccactattgaaaatgaatatatttccgaaaaaattcctgaacagtttcctactacgattatgttagaaatcgatcttgcgggtggaagcgatgatgagatagctgaggccctgcgagtatcattaccacaatggcgaaaagtaaaaggcgttaaacctgcaccacttgatgcagtcagatttggttatggggcaataaaaaaattaattagctatcgaattatccctatgcttgatttgctcgcatggtcagaaagaaaaaaagtacttctgtcagacgacagattatctcgattgctatacacggatgaagatgatgataaggcgattcgccaaggatatcatataagagatgctgatcggcctttcgcaatgaaaactgtagaaattgattttttaaggcaatttaacttttttatcaataaaaatcagcatgttaaagaaatgagggtttcggatgttatgaaactctcagactctgagtga

SEQ ID NO: 15639 - DNA, 204 bp, Escherichia coli
atggaaaatcaagctcgtctcatccgtttaccagaagtcatgaagaaaactggatttggtaaagcgtggatctatcgtcttatcagccaaaatcggttcccacagccagtaaagatcggtattcgtgctaccgcttttgtagaaagcgaaatcgatgaatggattcaattaattatcgaaaattcaagaaagcatgtcgcttaa

SEQ ID NO: 15640 - DNA, 879 bp, Escherichia coli
atggaaatagttgcaactaacttacttatttttagtaatttcttagatagtaggaaaattaatatagttgagagaattgagcttaaaaagtatctcagcgttgcagaaatagatgaactggtaagatatgcgaaacaaagattcgatagacaaaaaattataaatataaaatcagcaagtaataggtttattgcaaagagaacctttagttatagagtacacgttttttcacgctaccttaagtggttatgtggattagttcattcgtcaaagaggattcatgcaaagtatgaagtagaagtatttattgaaagtatcagagcacatattccaagaaacagttcattgaatatgaatgaaatatctgaaaaatcgttaaatgaagaagagatcaatgtgcttttccgtctattggaaattggtgggattgaaaacccttttcataaggaagtacaggtcaggaacagactaatatttaccttgctcttaaatttaggtttaagggctggagagttgctcaatcttaaaatagatgattttgatctcagagacaacactttaagtgtagtcagaagacatgattcaaaagaagatggaagagcttatcagccattagtaaagactggagaaagggttattccgttatctgatgagttagccagtgaaatttttgattacataagcaatagcagggaaaaaatgacaaaaaggaaaaaacataatttcttattcgtggctcattgcaccggaaaaaacgcaggagaacccttaagcatttcagcttatgagaaggtgatatcaacactgaaacgagcaagtccaaagctatataatctttccttctactatattctaattcagcgccttcaattcctttag

SEQ ID NO: 15641 - DNA, 1071 bp, Escherichia coli
atgaagctggttgaacactacatcatgcgtggtatgcgccgtctggtgctgattatcgtcgggtttctgatttttattttcgccagctactccgcacagcgttatctgaccgaagcggcaaatgggacattagctcttgatgttgtgctggatatcgttttctacaaagtgctgattgcactggagatgctgttacctgttggactgtatgcgtcagttggcgtgacgctagggcagatgtataccgactcggaaattaccgctatctccgcggcggggagcagtccgggacgtttgtacaaagccgttctttatctggcgataccgttaagtatttttgtcacccttctgtcgatgtatggtcgtccgtgggcttatgcgcagatttatcaactggagcaacagtcgcagtcggagctggatgttcgccagttgcgggcaaagaaatttaacactaacgataacggacgaatgatcctttcgcagacggttgatcaggataataatcgcctgactgacgcgctgatttatacttctactgccaatcgaacccgcattttccgcgcccgttcggttgatgtggttgacccatcacccgagaaaccgaccgttatgttgcataacggtaccgcctatcttctcgatcatcaggggcgtgacgacaacgaacagatctaccgtaatctgcaattgcatctgaatccgctggatcaaagccctaacgtcaaacgcaaagcaaaatcggtcacggagctggcgcgctctgtctttccagccgatcatgccgaactgcaatggcgacaaagccgtggcctgacagcattgttgatggcgctgctggccatttcattaagtcgggtaaaaccgcggcaggggcgattttcaacgttattgccactgacgttgctgtttgttgccattttttatggcggcgacgtctgccgtacgctggtggctaacggcgcgattcccctcattcctggtttgtggttagtacccggactcatgctaatgggcctgctgatgctggtcgcacgcgacttctctttgctgcagaaattttcccgatga

SEQ ID NO: 15642 - DNA, 1851 bp, Escherichia coli
atggcaacaataatcccaacaatcagtagctgcaacgataaaattactgccggagagaaaaggctggcaagaattctggaaagaggactaggcgaagagtgctgctgttggtatgacattcccacgggtgataagcatcttcacccagattttatgatactttcgccagaaaaaggcattatttttctcgaggtaaaagattggtttattacaaaaataaaaaaagccaacaagtctaatgtgttgtatgagacacaaaatggtattcaatctttaaagaatccgatagaacaagttaggcgatatgctttcgaagctgtaaaccagttaaaaaaagaccccctattgtgccaacaggatgatcgttacaatggcaatcttcttttcccctatggatatggcgtctactttagtaatattacacgagaagcattaaataataaatttactcaagaagagctgctcgggatcttcccatcagatctcatcatctgcaaagacgaaataaatgaattcatgtcaaaagaggatgtttcatccaaaatacattcgttgattaaatatgacttcaaatgtcatgctacacaagaacagttgaacaggattagatggcacttataccccgatgtcagaatagaaagggaaaagagaagtaaaaaccgtgatgaatttagtgtcgatgcaccaaccatcatttctatcctggatactcaacaggaacaacttgccagaagtatgagagatggccaccggatcattcatggtgttgcaggttcagggaagacattgatcctctatcatcgctgtcaggaattagcgaaaaaaaatgacagcgaaaagccaatacttgtcatttgctacaatattactttagccaaaaaacttcggtcgatgttcatcaatcatccctttgcagagaaaataaaggttaaaaattttcatgcttggtgtttccaacaaattaaagaaaacaagatcactattccagaaggggataatatttttgaaaatatggagctagcgttgactgatggtttcaagacaggaaaaataaaaccagaacaatacagcgctgtattaattgatgaaggacatgattttaagcccgaatggttaaaaatcctggcaaaaatgactgactctcaggacgagaatttgctattcctttatgatgatgctcagtcaatttaccaaaaaaagaaagcattagactttacactgtccagcgtagatattaaagcgacaggacgcacaaccattcttaatataaattatagaaacacacagcaaatcctacactttgccagttgcattgcatttaattatcttaatagccatatcgatagttctttaacctatcataaacctgctgcgggaggaatgaatggcgattatcccaaccttgaacatttcgacacacaggacgaagaaatagcaagagcagtcgaatggattacagagcaaaatgaacaagggattccgtggtctgaaattgctatactaagtccatcaactcacaccctttctaactctctaagttctgtacttgaatcgaaaaacatcccctttaatcttattgtaagctctgcagataaaaagtcctggacgccagaacaagagcgtatttctgttatgccattacccagcagcaaaggacttgagtttcactcagttgtcattattgatgcagcgagaacacgggataatagcgatgatttgagtgaggatataaagagactctatgtaggttttacccgagcacgttgcaatctcttggtaaccttgcacggtgaaggtgcgttaaatgagcatctactaaaaacctatgagcaaagcccacaatatatgtaa

SEQ ID NO: 15643 - DNA, 1467 bp, Escherichia coli
atgaataaagagtcgtatcataatgatctaaaaaataaatggaaaatgtttgttaagcatggttgggtcgcgacaaattcgactaatcatgtgatgctgaggtcatggcaaaaatgtctcaagcattgtgaccctcgccactggaacacgcctgtcaaagcttccgggcaaacattgcagacgattttttctcgtaacgaagagtttattagaatttcacaaagagttgttgaagaccatttcaccctggctggtgacgaccggttggcatttttgatcattgacccacacggctgggttctatcgttgaatgcagcaggcgattattccagtcaattgcgagagttaggaattgaatctggtatgtcatgggccgaagatggcattggaaccaatgtatatagtctttgtcgggaaacaaatttatatacacaactggaaggagcagaacattttagtgaacagctacattgttatgcgatgagcgctgctccggtcattgattattatggtaatatccatggatacattgtatgtataattgaaaccaccgccgagcttgttaaattaaaaacatcatattcatgtgcaacagaaatcgctaattatatctatattgagaatgaacaaaagttaataaacaaagtgctttgccagcataatgctgtgattgaatgtatggatgacggttttatttgttggaatagtcattctttaattacgatggttaattctcaagcacaaacactactgaatattgataaagaaagtttaattggtcagaacatccgaaaaggattcgtatttccgccgattttgaatgaggcaattacacaacgaaacaaactatcgcaaaagcaaattgtcctcgaatgccgtggcgaatttattgaacttatggttacccttcgcccgttaagcgatggttcatttttgctttttcttcatccattagacaaaatcaggaaaatagcccaacagcaaataagcactaatgcaaattttacctttgacagtttacatgcggcttcaggtggtatgaagcaggtattacttatcgctcgccgggcaattaaatccatctctcctattttgatcaatggcgaagaaggtgtgggaaaattgagtttggcgatggcaatacataatgagagcgagcaacgtgatgggccatttatttctgtagattgtcagatgctatcaccagaaaatatcttacacgaacttcttggctctgatgttggcccttcgccatcgaaatttgaactggctcataatggcaccttatatctggataaagtcgaatatctatcaggggaagttcagagtgttttattgaaagtattgaaaacggggcttgttactcgctcagacagccatcgtttgatccccgtacgctttcgcctgattacatgtaccagtagttctttacgtgagtacgtgcaacaaggggcttttagccgatag

SEQ ID NO: 15644 - DNA, 783 bp, Escherichia coli
atggcaaagtttgcagcaaatttatctatgctctttaccgagtatccatttattgaacgttttgcacaggcaagtcacgcaggattccacggcgttgagtatcttttcccctatgacttttccgcagatgagttggtttcgcaactacatcaacataatctgacgcaggttctgtttaatcttcctgcgggtaactggcaagagggtgaacggggtattgcatgtcatcctggtcgggcaaaagaatttcagaagggcgtttccagggcaatagagtatgcattggcccttaattgttcacaagttaattgccttgcaggaaaacatccaggtggttattcgcatgaacaatgtcatgaaacactggtcgaaaatttgcgctatgcagtagataaattggcttctcatggcataaagttagttctggaagccattaatacaaaagatattcccggtttttttgttaacaacaccagacaagctctcaatattattcatgatgtaaatcatcctgattttcgctatcaatacgatatttatcatatgcaaatcatggaagggaatattgctacaacaatcaaaaacaacctgaataacattggacatattcaattagccgataaccctgggcgtcatgaaccagggacgggagaaatcaattacccgtggttgttaaattatatagaccagattggttatcagggatggattggttgcgaatatattccatctacgacaacgactgaaagtctacgctggctaaaaaacgagactcaattttaa

SEQ ID NO: 15645 - DNA, 1107 bp, Escherichia coli
atgaataaaacaataacggcgcttactatcataatggcttcatttgccgcaaacgcgtctgtattaccggaaactcctgtgccatttaaaagtggtaccggagcaattgataacgacactgtctacattggtttaggtagcgcaggtacggcatggtacaagctggatacacaggccaaagataaaaaatggacagcattagctgcattccctggcggaccgagagatcaagcaacctctgcatttattgatggcaatctgtatgtgtttggcggcattggcaaaaacagcgagggcttgactcaggtatttaatgacgtacacaaatacaaccccaaaaccaatagctgggttaaattgatgtcgcacgcgccgatgggcatggcgggccatgtgacttttgtacacaacggcaaggcttatgttactggcggtgttaaccagaatatcttcaatggctattttgaagatctcaacgaagctggaaaagattcaaccactatagataaaatcaacgcccactattttgacaaaaaagcagaagattatttcttcaataagtttctgttgtcttttgatccctctacacagcaatggagttacgctggcgaatctccctggtacggaacggctggtgcggcggttgtgaataaaggtgataaaacctggcttattaatggcgaagccaaaccaggattgcgaacggatgccgtatttgaacttgatttcaccggtaataatttaaaatggaataagcttgctcccgtcgcatcaccagatggcgtcgctggcggttttgcaggcatgagcaatgactcacttatatttgccggaggggccggattcaaaggttcacgagaaaattaccagaacggtaagaactatgcgcatgaaggcctgaaaaaatcatatagcgctgatattcatctttggcataacgggaaatgggataaatcgggcgaattatcgcaaggtcgggcctacggagtatcattgccctggaataatagtttattaattattggcggtgaaactgcaggcggcaaagcggtgacggattcagttttaatttctgtgaaggataataaagtcacagtacaaaactaa

SEQ ID NO: 15646 - DNA, 651 bp, Escherichia coli
atgaataaactccctgatcatcttccgcggcggtatatcatcgaagctatccatttatgggatgcgggagaaactcatcagttccagcctgcgcggttgtatgagattgaatatcatggccgacgttacccctcgaaggcgattgctggcatcgcagcgacattgatgacggggacgcaatttacccctgcggatttcaccggcggaataaaatctaaatgcgtcaaactactcatagagcagggatttcatattcatcaggataaagccgctgcggctcccatagccgacgttctgttcccggatgagttgccgtcgcaggagacatacgttgaaggtgcggcgataaaggtgacagtaaaccgctatgaacgcgataaaaaggcccgagataaagcggtcgaatatcatggatgccagtgcaacgtatgcggcgttgatctggtgaagatctatggtgatattgctgaaggctttatctatatgcatcacctggtgccgctttcagccattaaagaggattaccagctggatccagttaatgatttgctgcctgtgtgccctaattgccatgcgatgttgcaccgacgcaaaccaccgtttacgccggaggagttaaaagcgctgatggatgcgaataaatcaaattaa

SEQ ID NO: 15647 - DNA, 873 bp, Escherichia coli
atggcttccagtaaatcgctacagcaggcaattgccaatataaaaatctggcacaagggtgaacagcgcgcgccgcataagccattgttattgctatacgtattagcgggatacctgaatggacatccgcgccttttcgattatggctcggaaatctacgaacctctgcacagtttactggaacgttttgggccacagcgttcacagtaccgacctgatatgccgttctggcgattacaaggcgacggattctggcaattacacaatgccgagctttgctcaacagcagggagcagccgacaaccaccagtgaaggaactgactgaataccacgttgcaggcggtttcgatgaacagcactacgccctggtaactggcaataaaaaactcatcaatactctggcgcaacagatactcgaagcgcacttcaccgagagtattcaggaagaaattgctgacgagctgggttttgatctccagcaaatccgtaaacagcgcgacccgttatttcgcaaaaatgtattacgcgcttataaataccagtgcgcgatatgtggctttaatatgcgccacgacgacaccaccgtcgcgcttgaagcggcgcatataaaatggaaacagcacggcggtccttgtgaaattcctaatggcctggcgctttgcgcaattcaccataaagcctttgataaaggatcgattggcctggatgaaaatatgcgggtactggtctcggatgcggtaaacggcggagggatcgttgagagattattctgggattttgacgggaaaactattgcgttgccacaggtgcgtaaaaattacccttttgaggggtttgtggagtggcatcgaaaagaggtttttagggggtga

SEQ ID NO: 15648 - DNA, 1521 bp, Escherichia coli
atgcatgatataaataattctttctttgcggctacaaaatgtgctggtatttggcgtaaaaatacaaaaaaatcacatgcattaatacttaatctcatcatgttttgtgagatgtttttatcatcattatcatccttggttgtggtcaatgatcctaaaaaaatgaagaggatttttccattatttatcgtttctgaaaatattaatattcatgctgaacctgatatcgaatattttcgagttatcgatagggcatttgatgaggtagccaattacaccggaagaatattttcttatttacggactcatgggccattgaaactaacttcttgtgtgaataaacaaaccttgctttcaatgggagggtaccttaatgagtggaatgtttttgactcattaagcagagtaagagactttttcagactaagtagtgcagtatttacaaaattggataataacatttactctcttgaggttgatagtttttgtttataccgagattatgagattgcaagaaatagactaatgatgagagcgtcacatctatatagcgaagttcatgaatttagtaacaaacattttcatctaaatagttgggtaaaggatcatatgccatcttacttaaattctgatggcgtttttagctcatttcatctaagcgagttggaaaatatgtctcctgatgaccttcatgaagaatatgggaatatatcattatttaattgggtgcacgcttatcaatgtttagtcgagttatctaaagaagaaatgagcaaaagattttcatcgacaaaacctatacccctacagttggatcgctggctgatcataaaaagccgtgagagttggttatcattctttcaacgtaaggggattgcagcagatgcagcaaaaaaactgatagattattttaccttcaattcaaaatcacatgatcttaatgattgcccatttattccctgtatggacggtttatgcttaatgcctgcattaatagcaaatagctcagtgactcgctctctaatgtcattatttggttccaaaaaaatttctcaagcaagtaaagggcgatttcatgagcaacaatttataaaacaagttcgtgatgcggggattaaagcttctccaattgatgctcatgctaattatcagtgcgattgcgtgattctcctggatgattgtttgatttttacagaactaaaatcaaatggtcaaccaatatattatggtaagtactatcagcaagtgtgtaacatcgttggagatagctcattaatacatgatcataataataaatttatgcgttcttattttcaacaaataaatcgaatttctgaacattatcttaatcatcttgatgtgatcattaaagaattcgaactaccatcaacatggcaacccaaaggtgtgtataagcttattgttactacaactatgctcggtgggaaatatcatgtggatgatacatatgtagcggacaaatatgcattatctagttttttcaacgaatacctggagtga

SEQ ID NO: 15649 - DNA, 1164 bp, Escherichia coli
atgtcactcttccgcagaagtgaaatatggtacgccagtttcacattgccgaacggtaaaagatttaaacagtctcttggaacaaaggacaaaaggcaggcaacagagctccatgacaagctaaaggctgaagcatggcgggtcagcaaacttggtgaaatacctgatatgacgttcgaggaggcgtgtatcaggtggctcgaagagaaagcacataaaaaatcactggacgatgacaaaagccggatcggattctggcttcaacatttcgcaggaatgcaactaagagacattactgaatcaaaaatttattcagcaatacagaaaatgacgaaccggcgtcatgaggaaaactggaaactcagggcagaagcatgcagaaaaaaagggaaacctgttccagaatacacgccaaaaccagcgtccgttgcaacgaaggctacgcatctttcatttataaaggccctactaagagccgcagagcgtgaatggaaaatgctggataaggcaccaattattaaagtgcctcaaccaaagaataaacggatccgctggctggagccccatgaagcacaaaggctgattgatgaatgtccggagccattaaagtctgttgttgaatttgcactggcaacaggcttaagacgctcgaacatcatcaaccttgaatggcaacaaatagatatgcagcgccgggtggcatggataaacccggaagagagtaaatcaaaccgcgcaatcggcgttgcgctgaatgatactgcatgtcgcgttttgaaaaaacaaatcgggaatcatcaccgttgggtatttgtgtacaaggaaagctgtaccaaaccagacggaacgaaagcgccaacagtaaggaagatgcggtatgacgcaaacacagcctggaaagcggcgctgagacgagctggtattgatgatttcagatttcacgacttgagacacacctgggcaagttggctggttcaagccggagtcccgttgtcagtgttacaggaaatgggtggctgggagtctatcgaaatggttcgtcgatatgctcacctcgcgcctaatcaccttaccgaacacgcacggcaaatagactcgattctgaacccatcggtcccaaatttgtcccagtcaaaaaataaggaaggtactaatgatgtgtaa

SEQ ID NO: 15650 - DNA, 327 bp, Escherichia coli
atgcctcataacccaaatacctggctggacttggtccagagctggtggcgtggagacacaccgctgggtgcagtgattatgtcgatcgttatggctggtttgcgcatcgcctattttggcggtggtggtggctggaagcgaaaaacgctcgagattttgctatgtggcgctctgacgctgacctttgcatccgctcttgagtatgtcggatggcctaaatcactttctgttgccattggtggtggggtggggctgatcggtgtcgatgctattcgtggggctgcaatgcgagtaatcggtaacaaatttggtggctctaaggagtaa

SEQ ID NO: 15651 - DNA, 402 bp, Escherichia coli
atgtcatatttttattctgcatcgacaaacggattttattcgactgaatttcacggcaccaatattcctgatgatgcagtggaaatctcggaatcagagtggaaaacactgattaatgcacagagtgtaacaaaaatgattacctgtggtgagaacggtcatcctgtcattgttgaccgtccttctccaacaccagaacaattagccttaataaatgatgaaaagaaatctgcactgatagcagaggcaacgaatgtaatagctccgcttcaggatgcggttgatttaggtatggcaacagatgatgaaacgaaactgttactggcatggaaaaaatatcgggtgctgcttatgcgtgttaatgtagtaaaacccgagtggcctatgcatccaaataaatag

SEQ ID NO: 15652 - DNA, 1050 bp, Escherichia coli
atgtataataacaaaatcgacaacaacagaaaaacaaggcatgattgggttgatgctttaaaatttctcggtatttttgctatatatttaggtcaccttggtttgggggctggcaaattgtatccttttgtttttagttatcacgtcccactattctttttcgctgctggtttttttactatcaaaaaaaatgacttatctattttcgattatatcaagtcaaagttttacagattaatgattccatatttcacttttgcatttactatattaataataaacacaattaactcaggtgagacgattgattatatatatagccacatttatgatataatatatggtgttagaaacaaccaatttgtaggaacaatatggtttataaactgcctttttgttataataacaattgatgcaatctttaaagaaatagtcaagaacaatatagtgattttaatcatatcactattatcgttcatgttgtcacaaacagtgctcaatcataacccattactagatcctcaatggttttggaacatagactccgctatggcatactggtggttattgcctctcggtagatgtatgtttttagaattaacacgtgacaggttttttggaaaatctaaaattggtttcattgtcttctcaattaccgcgataatgagtgcgtatcaactccttaaccagaaacctttgctttttaagattatctcaatattcaatgcagacataatatcaagtagttatattcaagctattaatactattatcaccacggtaggcttgataatatttaatatctttatagcaaaaataatttgtgggaatgactttattgtaagagctggaagaaatactcttaacatatgtggaatggagtatatcaccaaattatttatccctatggctttagcaatcataggcttcagcgtgaccattccaaatcctatctgcgcaatcatatatacctgtatttgtgtatatgtatcagataaaattggccattggctatcgaggacagtcggtgggccatttttgataaaatga

SEQ ID NO: 15653 - DNA, 204 bp, Escherichia coli
atgagtttgcgaacattcaaggcttaccagctcgttggcgatttcgggtttttccgggaggttcagcgcaataaaagggcggcgaactttggttattcctggcagtgcggcaatgagtttgtcggcgcaacgctgccagcagctttcctctgccagagagagatgcttacgcaatcggagatcgaattcgttataggtttctga

SEQ ID NO: 15654 - DNA, 1053 bp, Escherichia coli
atgagcataataaaaaatagtgtctggaacctttttggctatgcaataccaactttaattgctatcccctcgctaggatttctcgctcgaggtttggggcctgaaggtttcggtgtttatacaattgcaattgcacttgttgggtatgctggaatttttgatgtaggcctgactcgctctgtaattagagaaattgcaattcatcgtgataatcatcatgaaagaaccaaggtaatttcaacaagtacatcttttttggtgctattttcatgctttggtgcttttttattattgattttctctgatggaattgttaattatctaaaaatttctggtgttgaacatagtgatatacaactagcatttaaactgttggctatttgcattccattatttattctaaatcaattatggtcagccattcttgagggggatgaaaaatttggcattgtaaatattcaaaaatctatatcaagctcttgcatcgcgggaattccggccatatttgttttttatagtgctacattgtcggcagcggttgctggtttaatatttgcaagagttatttcgattttagtctctgcctattatgtcaggaatgatattaaaatttcgggggttcatttttgttataaaacctttaaacgactctttttctttggcggttggatgacagtaagtaatatcataagtccggtcatggtgtattttgatcgatttatagtgtcaaatattatgggggcagataaagttgcattttattctgcaccagcggaggttattctaaaattaggaataatacctgcagcaatcgggagagcagtgtttccaaggttaagtaacatcaaagactttaaagaatttaaacgtaatgtaaataaatcattgcttttaatgtttctaatctgtttgccggtgataatcataggcttgttatattcagggcttgtattgaaaatatggtttggtgagaattaccaaattaattcctttaatatattaaatgtgttattgatcggttttttcttcaatgcaggcattaggaaaatctaa

SEQ ID NO: 15655 - DNA, 891 bp, Escherichia coli
atgaatagtaatatttacgctgtcattgtgacatataatcccgaacttaaaaatctgaatgcactgatcactgaactaaaggagcaaaattgttacgttgtagtagccgataatagtactaatttcaccttgaaagataaattagcagacattgaaaaagttcatttaatttgtcttggtaggaatgaaggtatagcaaaagcacaaaatattgggattcgatattctcttgaaaaaggggcagagaagataattttttttgatcaagatagccgtattcgcaatgagtttatcaaaaaactttcctgctatatggataatgaaaatgcaaaaatagctggcccagtttttattgatagagataagtcacattattatcctatttgtaatatcaaaaaaaatggtcttcgagagaaaattcatgtcactgaaggacagacaccgtttaaaagttcagtaacaatctcatccggaaccatggtttcaaaagaagtttttgagattgttggaatgatggatgaggaactttttattgattatgtcgatacagaatggtgtcttagatgcttaaactatggcatattagttcatatcattcctgatatagaaatggttcatgctattggggataagtcagtaaaaatctgtgggattaacataccaattcactcgccagtacgtcgttattatcgagtaagaaatgcatttcttttgcttagaaaaaatcatgtgcctcttttactctctattagggaagttgttttttctttaattcatacgactttaattatcgcaactcaaaaaaataaaattgaatatatgaaaaaacatattttggctacgctggatggaataagaggaattactgggggcggtcgttataatgcatag

SEQ ID NO: 15656 - DNA, 594 bp, Escherichia coli
atgacttctctgtatttagcttccggttctccgcgtcgtcaggagttacttgcgcaacttggcgtgacctttgaacgtattgttacgggcattgaggagcagcgtcagccgcaggagagcgcgcagcagtatgttgtgcgtctggcgcgcgagaaagcacaggcgggtgtcgcgcaaacggcgcaggatctcccggtgctgggtgcggatactatcgttatcctgaacggagaagtgctcgagaaaccgcgcgacgcagagcatgcggcgcagatgttgcgcaaattatcgggtcagacccatcaggtgatgacggcagtggcgttggccgacagccagcacattctcgattgcctggtggtcaccgatgtgactttcagaacgttaacagacgaagacatcgcgggctatgtcgccagcggcgaaccgttagataaagcaggtgcatacggtattcaggggctgggtggctgttttgtcaggaagataaatggcagctttcacgccgtagtcggcttaccgctggttgaaacgtatgaattattaagtaattttaacgcactgcgtgagaaaagggataaacatgacggctga

SEQ ID NO: 15657 - DNA, 273 bp, Escherichia coli
atgtctcatattcagtggtattatggggataataaaaaaggtggtatgtggtcacaggattatacaactactgataaatattcaacgtgcaaagaggatgaagtttcatatgacgaacatatccgtattgcaactaaactgatctctaaacaaaaagatcaaatatttgagaatgcatataacatagaaagatattttgaaataagattaattgaaagtgagatagactcgattaatgatgaaatattaagcaattcagttaagaaaaaatag

SEQ ID NO: 15658 - DNA, 429 bp, Escherichia coli
atgaaacgttctggtggcacacgctatctgtatcttatatccctgataactgtggctgcagccctcacggcctgtaccccgaaaggcagtgtggaacaatatacccgacattatgtgtacgcttccgatgaccgttctgaccctaacttctacaccaacaaggccgacaccacacggatgatgattccgttctttcagcagttcagggagatgggggagaaagacaaagcagccggagtatcagcagaaacggcacagcaacgcataaaagaattccactcagaaaaatttcttcagtctctcagaagcacaaccacctttgcgggcagaaaatatacgaacagtgatatgccatcaccggaaaaaatgaagctactggctgacacgatttctgcggtttatctcgatggctacgagggaagacagtaa

SEQ ID NO: 15659 - DNA, 438 bp, Escherichia coli
atgggacactgtaactttatggcatggcacacactccgggacgcactgaaaatgactggaagatcgcgttcacagttttaccgtgatatgcgctcaggtcttgtcagttaccgtaccagccaggacggacgaagggagtttgaaaccagtgaactgatccgggcatacggcgaattaaagcaaaatgagacacaagaaaggcacactgtgggacaggcagaaaatccacatgatcagcagacagaacgcattctccgggaactgaatgagctgaaacaatgcctgacgctgatgcttgaggataaacaggcacaggatatggatcgcaggcaccaggaatcagaacgggaacagttacagaatgagatagcccagctcaggcaggcactggaacaggaaaagaaacggggattctggtccagactcttcggtcactga

SEQ ID NO: 15660 - DNA, 1857 bp, Escherichia coli
atgccggggtttaattacggtgggtatggtgacggtactggctggagttctgaaagtggtggtccagctccaggcggtggtatgcatggaaatagtggaggccagcgcggagataacgcaaacagtagcaattctgtgagtcagcagatttctgccattcagaatgatcagaaacttaaacagaaagtggtgaatatgctgattgctgcgagaaaaatgaatcctgaagcaaaaatgattctgggaagtattgctccttctggtgttatgcaggtcaccattgaggggataacctccactcaggccaagcagcttggtttgggagggctggtcatgggatataacgcttctggtgttattggggctgtgggcgaaatagacaccggtcaccgccttaatgcatcaggagcaagtactcccggaagcgaaacttctgtggagagttttgtgaacggacagaaacccgccggagaatggcatgctgtggcgaaggacagctggacaggggctggtccagtgaatgtagggctggttaataacgccatcaaaagtgtccggattatcaaaaaaggctatgtgactggtgttctcttgcctgaagaggtgatgaataaagcagagtacaaagcaatgcggcaggctttcgattcccttccactggcaaaacagggagaggctgtcagacagattgttgcagcctggagtctggcatatcaggatttcccggtaaatctgaaaaaagatatggggcgagttactgaacgggtggtggatgcggttaatttggcgctcattctcaaccagatatcatccggaatgtcggcctcacagaaggatgttgatgcggcgaaccggattattaatgagaccgtgaaagccattaacgacgtaaatcttaaaatagcggagaagaagaaacaacaggtaccattattaagccttatgaaacaaaaacagaaagaggttgaagaactaaaaaaagtatttaagaaccattcttatcaccgtattcgtgatgctcagagagcatatgatgatgcccggaacaaaaatgatttactggtcagtgatattaatgcgctgcaggcacaggtttccggactgactgcaaggaaacagcaggcagaaaagaacaaggcggcagcagaaaaagcaaaagctgatgcaaaggcgaaagctgaagctgaaaaagcggctgctgaagcaaaagcaaaagctgaagctgaaaaagccagaaaggaagctgaagcaaaagcaaataacgagaaagctgttctgacaaaagccagtgaaattatcattagtgtgggtgataaggtcggagaatatcttggcgataaatataaagctctttctcgtgagatagcaggtaatatcaaaaactttcaaggtaagacgatccgtagttatgatgaggcgatggcttctgtcaataaactgatggctaatcctgatcttaaaattaatgctgcagacagggatgtcattgtgaatgcctggaaagcatttgatgcagaggatatggggaataagtttgccgcgctgggtaagacatttaaagccgcagattatgtgatgaaggcaaataacgtccgggagaagagtatagagggatatcagaccggaaactgggggccgttaatgcgggaggtcgagtcctgggttgtcagtggtattgcttctgctgtggctcttgctattttttctgccacccttggagcttacctgcttgctgtgggggcatcagctgcagtcgtagggattatcggtattattatagccagttttattggagcattgattgatgacaaatttatagacaggttaaataacgaaattattcgccctgcgtattaa

SEQ ID NO: 15661 - DNA, 525 bp, Escherichia coli
atgagaaaagagcacactgacaacaaagatttaaacaggacgctttttttgattacttttgcaggcataacaccattaatcattatttttataacttatacatcaaaccccaagttctatttaattagcatcatttttgataacacacaaaatataccttcaataatttccgcatacaatcctgtgatgacaaaggtgatggatatctacgggaaaagcgctcccttactggcacttattgcttttactctccaactccgcgacagaaagctagagacaatagccaacagagaaaaactaattactgccagcatatttagtccatttttttatgctttttatgcatatttctttctgtggaataatttcgaattaaccactgcaggtaggactgtcagatggatgtccgataatgattttactttgtttattttttacgcctgcctctatttttgctctttctttatgacttatgctctgtgttatattccggttgtgtcatataaactctggaaagaaaggtag

SEQ ID NO: 15662 - DNA, 399 bp, Escherichia coli
atggttccccgtcgtcttatgctcctgcttcccttccaccgtcactttacggtcatttctgacgtacaggccgtcatcattactcacgctcaccgtccggtcattcgtcacctgcagcgtctggtcattacgtaccgtgatgcaccggtcgttcgccaccgtgatactctggtcgtggcccccttcttttctggtcccgacctgaaccgtctgccccttcaccaccgttatcttctggtcgttcccgatggtctccgtatggtcatgtttcacatccgttgtccggtcgttgagcacctccgtatccatgttcttctgggcatggatatacacctgctcattactggtggcgtcttcaaaccgcagctcgttaaatccgcttcctttataggtttttga

SEQ ID NO: 15663 - DNA, 339 bp, Escherichia coli
gtgaaactcaatgcccgtcaaatagacactgccaagccaaaagagaaggcttacaagttggctgatggtggtggtctgtacctcctggtaaaacctggtggaggagaatattggcgtctcaagtatcgtgtagctggtaaagagaagctgttagcactaggtgtgtatcctgaggtcaccttagctgatgctcctgcaaaacttgaagaagctaaaataggtatctctgggggaatcgatctgatggaagtgaagcgagaggaaaagattgcccgggaaacgcagttaaacaacaccttcaaagatattgcccttgagtggcacagtaacaaattataa

SEQ ID NO: 15664 - DNA, 570 bp, Escherichia coli
atgaaaaaaagtttattagctatcgccatttcattaatagcgactggttctgtttccgctattgcagcggcacctgcaccaggtactcaaattggcaccggtactttagctgtcaccggcgcaactgctgaatcagcatgtactgtatctttcccaacctctgtcacactgcctactttttcaaaagcagatttttcagcgaaagctcagaacagcgttattggttctcaaaatgcaggaaatattaccttttcaggatgtaatgatcagtccgttactataaaagtaacgactgcaaacacagtaagtggcaatggctatattacattcccagttgtaaatggcagcgagcaaggacaatatggtttagtagttggcttagaaaaagatggggctgaaaaatatataaaagtaaataaagatgatacaaattttcaaaatattgctgtgaacaatgagagctattctattcctgtaaccgtaagtacttataaggttggaactaatgctaatgctattagttatggcacttataacgttaactacgtgtttactgctacttatgcataa

SEQ ID NO: 15665 - DNA, 198 bp, Escherichia coli
atgcttggtgataatcctaacatagatgttgtggcaatggttccaataatcattgtggatatgaaaattgaagtgacattaaaattaagtgatattacggttggaaatataatgagtgctgtaagtatcatggcaaaagacaccctaaacacggagagtgtcgagaaaagattgctttcagaaaaatgtatggcttga

SEQ ID NO: 15666 - DNA, 174 bp, Escherichia coli
atgttgattcgtcattcgcagggttatatacccctgaagtatatgtttccgttccttgagattgaagaggataatatttatctaacgggtttaagtaaagataatcattgctgtgaaaatttattattccactatatccttcagcgtctgccggtaatgaaaacatggagttaa

SEQ ID NO: 15667 - DNA, 1416 bp, Escherichia coli
atgattatcccaattattatggccggtggttctggtactcgcttatggcctctttcgcgttcgttatacccgaaacaatttttatcattgattaatgaaaatagtttgctccaggaaacgttgaagagacttgatggattaaattgtttgcctcctgtcattgttagcaataatgagcatagatttattgttgctgaacaattgcgacagttcggtgtggatgacttccagattattctagaacctgtaggtagaaatactgcgcccgccgttgcgctggctgctctaaagtctctagaactccatggcgatcatcatatgctggttcttgctgctgaccatgctattcaggatattgaagccttccatgcagctgttttagctgcagaacaagagtccgttgacaataagttagtgacttttggcatcgtcccgaccaaacctgaaactgggtatggctatattaaaaagggcgaacaagttaaaaactctgtatttaaagtaaattctttcgtcgaaaaacctgatttagaaacggctaaaaattatctcgaacaaaaatgctatttgtggaatagtggtatgttcatgttcaaggcgagcgtatatttagatgaattgaaaaaatttcgccctgatattttagcagcgtgtaaagagtcgctttccagtgctagtactgatctagattttatcagattaaattctgatgtctttgcagaatgtcccgatgagtcaattgattatgcggtaatggaaaaaactcaggattgtgtagttattccacttgatgctgactggagtgacatcggttcatggacatcactttgggaaatatcagagaaagatgaacatgaaaacgtatcgcatggcgatgtaattaactataacagcaggaacaactacatttactctgaaggttcactgatcagcactgtaggagttaataaccttattatagttcaaactaaagatgcgctcctggtagcacagcaagacaacgtacaagacataaagaagattgtcgaaattcttaaaaagcaaaaacgtagcgaacatatatcccatcgcgaagtctatcgtccttggggacgttatgattctgtagaacgtggcgaccgttatcaggtaaagcgtattaccgttaagcctggtgaatgtctctcaacacaaatgcatcatcatcgagctgagcattgggtggttgtcgctggtactgcaaaggtgacttgcggcgaacgcacttttttcgtcactgaaaatgagtcaactttcataccaattggcacagttcataccttggaaaatccaggaaagataccattagaagtaattgagattcagtcgggtgtatatctaggtgatgatgatattgtgcgcctaagtgataaatatggtcgtgttgaggataaataa

SEQ ID NO: 15668 - DNA, 1854 bp, Escherichia coli; identical to SEQ ID NO: 14820

SEQ ID NO: 15669 - DNA, 363 bp, Escherichia coli
atggattacgaatttctgcgtgatattaccggagtggtaaaggtgcgtatgtccatggggcatgaagtggtcgggcactggtttaatgaagaggtgaaagaaaacctggccttgcttgatgaagtggaacaagcagcgcacgcactgaaaggtagcgaacggtcctggcaacgggcagggcatgaatacaccctgtggatggacggtgaagaggtgatggttcgcgccaatcaactggaattcgctggcgatgaaatggaagaggggatgaactactacgacgaagaaagcctgtcgctatgcggcgttgaggattttctgcaggtcgtggcggcttaccgcaatttcgtgcagcagaagtaa

SEQ ID NO: 15670 - DNA, 1293 bp, Escherichia coli
atgtgctacaatggtttaaataatatgtttttccctctttgccagattaacaataaccactctgtcacaagtccatcacatacaaagaaaacaaaatcagataattacagaaaacatcataaaaacacgttaattgacaataaagccctctctcttttcaaaatagatgatcatgaaaaagtgataggcttgattcagaaaatgaaaagattttatgatagtttaccatcaggaaaaatcacgaaagaaacggacaggaaaatacataaatattttatagatatagcttcacatgcaaataataaatgtgacgatagaattacgagaagagtttaccttaataaagataaggaagtgtccattaaggtagtatattttataaacaatgtcaccgtccataataatactatcgaaatcccacagacagtaaatggtggttacgatttttcacaccttagcctgaaaggcatcgtgattaaagatgaagatttatccaattcgaattttgcaggttgcagactacaaaacgctattttccaggactgtaatatgtataaaacgaattttaatttcgctataatggaaaaaatactttttgataattgtattctcgatgactcaaatttcgctcagataaaaatgactgacggaactctaaatgcatgctccgctatgcatgttcaattcgtcaatgcaacaatgaatagagccaatattaaaaataccttccttgattattcaaatttttatatggcgtacatggctgaggtaaatctttataaagtaatagcgccatatgttaatttatttagagccgatcttagtttctctaaactcgatttaattaactttgaacatgctgatctgtctcgcgtcaatctgaacaaagcaaccctccagaatataaacttaattgatagcaaactcttttttacgcggctgacaaatacattccttgaaatggttatatgtaccggctctaatatggctaatgttaattttaataatgccaatttaagcaactgccatttcaactgttctgttttaacaaaagcctggatgtttaatacccgtctctatcgggttaatttcgaagaggctaacgtgcagggaatgggcattaccattctccgtgaggaggaaaatatccccattaatagtgataccctgataacactacagaaattctttgaagaagattgtacctctcatactggcatgtcacaaactgaggataatattcatgcagtcgctatgaagattactgcagatattatgcgagatgcagattga

SEQ ID NO: 15671 - DNA, 624 bp, Escherichia coli
atgcggcgtaaacgccttatccggcctacattcggcaacggctgtaggcctgatagacgcgacagcgacgcatcaggcattgattgccggatgcggcgtaaacgccttatccggcctacattcggcaacggctgtaggcctgatagacgcgacagcgacgcatcaggcattgattgccggatgcggcgtaaacgccttatccggcctacattcggcaacggctgtaggcctgatagacgcgacagcgacgcatcaggcattgattgccggatgcggcgtaaacgccttatccggcctacattcggcaacggctgtaggcctgatagacgcgacagcgacgcatcaggcattgattgccggatgcggcgtaaacgccttatccggcctacattcggcaacggctgtaggcctgatagacgcgacagcgacgcatcaggcattgattgccggatgcggcgtaaacgccttatccggcctacattcggcaacggctgtaggcctgatagacgcgacagcgacgcatcaggcattgattgccggatgcggcgtaaacgccttatccggcctacattcggcaacggctgtaggcctgataagacgcgacagcgacgcatcaggcgttga

SEQ ID NO: 15672 - DNA, 1233 bp, Escherichia coli
atgcaaaataaattagcttccggtgccaggcttggacgtcaggcgttacttttccctctctgtctggtgctgtacgaattttcaacctatatcggcaacgatatgattcaacccggtatgttggccgtggtggaacaatatcaggcgggcattgattgggttcctacttcgatgaccgcatatctggcgggcgggatgtttttacaatggctcctggggccgctgtcggatcgtattggtcgccgtccggtgatgctggcgggggtggtgtggtttatcatcacctgtctggcaatattactggcgcaaaacattgaacaattcactctgttgcgcttcttgcagggcataagcctctgtttcattggcgctgtgggatacgccgcaattcaggaatccttcgaagaggcggtttgtatcaagatcaccgcgctgatggcgaacgtggcgctgattgctccactacttggcccgctggtgggcgcggcgtggatccatgtgctgccctgggaagggatgtttgtcttgtttgccgcattggcagcgatctcctttttcggtctgcaacgagccatgcctgaaaccgccacgcgtataggcgagaaactgtcgctgaaagaactcggtcgtgactataagctggtgctgaagaacggtcgctttgttgcgggggcgctggcgctgggattcgttagtttgccgttgctggcgtggatcgcccagtcgccgattatcatcattaccggcgagcagttaagcagctatgaatatggtttgctgcaagtgcctattttcggggcgttaattgcgggtaacttgctgttagcgcgtctgacctcgcgccgcaccgtacgttcgctgattattatgggcggctggccgattatgattggtctgttggtcgctgctgcggcaacggttatctcatcgcatgcgtatttatggatggccgccgggttaagtctttatgctttcggtattggtctggcgaatgcgggactggtgcgattaactctgtttgccagcgatatgagtaaaggtacggtttctgcggcgatggggatgctgcaaatgctgatctttaccgtcggtattgaaatcagcaaacatgcctggctgaacgggggcaacggactgtttaatctcttcaaccttgtcaacggaattttgtggctgttgctgatggttatctttttaaaagataaacagatgggaaattcgcacgaaggataa

SEQ ID NO: 15673 - DNA, 357 bp, Escherichia coli
atgagtattggatcagaaatgaataacgatgttggagaaaaagtatctgatctcacaaaaagtaaaaaatgtgacatcaaacttgcagccgcaccgtcggatttgctctcgaaagagggttttgctctttacatcggtaagacgcctcgtgctgttgctgaaatggcgaaagcaggcaagttaccagccttttatatgacggacccattaaagccgggcggtcatgctgagttatggattaatcgtcgtgagtgggacaagtacgcagcccagctagttgatgaagctccgacagaatggcatgactggaaaaatcgcattagttacagcaaatcaagacatggccgtgcggcttaa

SEQ ID NO: 15674 - DNA, 1338 bp, Escherichia coli
atgacagtgaaatactacgccattctgactaatcagggcgcggcacggctggctaacgcgacgatgctcggcagtaagctgaatctgacgcaaatggccgttggtgatgcgaatggtgtcttgccgacaccagatccggcacagacaaaactgattaaccagaaacgcatcgcgccgctgaatcttctgagtgttgacccgaacaaccagagccagattattgcggagcaaatcatccctgagaacgagggcggattctggatccgtgagataggtctttatgatgatgaaggcgtactcattgcggtggcgaactgcccggaaacgtacaaaccgcagttacaggaaggcagtggtcgtacccagaccatccgtatgattctggtcgtctcgaataccgaagctatcacgctgaaaatcgacccgtcggtggtactggcgacccgtaaatacgtggatgatgaagtcctggaattaaggctgtatgtggatgaccagatgagaaaccacattgccgcacaggatcctcatacccagtatgcgcagaaacataatccgacatttaccggagaaccaaaagcgccgacgcctgccgcaggaaataacaccacgcggattgcgaccactgagtttgttcaggccgctattaccgctctgattaacggcgcgccagccacgctggacacactgaaagaaattgccgcagccattaacaatgacccgaaattcagtaccaccattaacaatgcgctgtcaggtaagcagccactggatgagacgctgactcatttgagtggaaaggatgttgccggtcttctcgcataccttggtttgggagaaggttcggcattacccgttggtgtgcctgttccgtggccttccgccactccgccaacaggctggctgaaatgcaacggtgcggctttttctgctgaagaatacccggaactggcaaaggcttacccgacaaataaattgcctgatttacgtggtgagtttattcgtggctgggatgacggacgtggtatggatacggggagggcaatattatcagctcagggcgatgccatacgtaatatctatggtgagttcaagactgtaaacaccgaaaattattcaatatgggaatcagcaggctcgtttaagggggcagtggtgcctttgaatccctcaacgaacaatagttatttctccttaatcagaagtatggtgactgaaagaacagatggcgctgtttacccaaaagtgattggccttgatgcttcaagaattgttccaactgcaaacgaaaaccgtcctcgtaacattgcctttaattatatcgtgagagctgcctga

SEQ ID NO: 15675 - DNA, 477 bp, Escherichia coli
atgccgatcatagcaccaattccccgtgacgaacgacgcctgatgcagaaagcgatccataaaacgcacgataaaaattatgcccgtcggctgactgccatgctgatgatgcaccgcggctgtcgcgtcagcgacgttgccagaacgctttgctgtgcccgttcctccgtcggccgctggattaactggttcacgctgtcgggtgttgcaggactgaaatcattacctgccgggtgtgcccgtcgctggccttttgagcatatctgcatgttattacgtgagctggtaaaacatgctcccggcgattttggctaccagcgatcacgctggagctcagagcttctggcaataaaaatcaatgagataactgggtgtcagttacacgggtgcagcgcatggcgcgggtgcatcattatgggttgcgggatcggctggtgcgtgggggcgaagatgtgcggtatgaggccaggccgctga

SEQ ID NO: 15676 - DNA, 252 bp, Escherichia coli
atgtctgaagataacgaaatttcccaaaatgaaaccactccagaagttgcatctgaaacaacgcctgtagttaaagtaaggaagcctagaaaaaaagcgaccaaaccaaagcgtgacttccctcaatactctctagaagattgtagaaaaatagctgactgtctgaaggaatttaacgccggtaacccatgggcaccaggtgaagttgctaaagcactgggtttaggtaaagtgccaattttttctacatga

SEQ ID NO: 15677 - DNA, 870 bp, Escherichia coli
atgactgcgtctgctcgagattacggcataaccgtgggtactcgcgacacaagcaaaattgaacttacggaattagggaagagtttagtatatcctaaatcacaggaggaagaaggcaatgcaatattaagtagcttcttaaatatagacttatttaagaaagtatatgattactatcaaggtggtaacctacctgagattgaatatttaaagaatactctaaaaactgaattcggtatagatgatcaattacaagacgacttttataacttatatcaacaaaacctcaaatacgttcgagaaaaagtcgctagagaagatagcattagtactaactcagttaatgacaaaactgccacagctagtagttccattatgctcggtgaatctcaagggcaaagtaaacttattgcatttgttgctatgcctttttcagaaaaaacgtctaactacccgcatggttattttgatgaagtacttaaacatctcattacgccttctgcggtgaaggctggatttaatgctaagacggcaaaaaaagcagggagtgaagttattcaatctacgattgtcaacgatcttgatgctgctgatcttgtgatagttgatctaactgaacacaatccaaatgtgctttttgaattaggtatgaggattgcctttagtaaacctgtctgtttgatcagagcaaaaggtactgcacctatatttgatatagaccacatgttaagagtctatgattataatccttgcttatggccttctacgctagaaagcgatattccacaattgtcagagcatataaaagaaacatggataaataggagagagcgttcatacctcgatattcttagagaaaataaaagctaa

SEQ ID NO: 15678 - DNA, 885 bp, Escherichia coli
atgaaagaaaaaataagcaagattgataaaaatttctatactgacatttttattaaaacatcatttcaaaatgaattcgaggcagggggagttataccaccaattgccaagaatcaagtatcaacaatcagtaacaaaaataaaacattctattctctagctcactcatccccacactactctattcaaaccagaattgaaaaattcttacttaaaaatatacctttaagtgcatcgagttttgcattcagaaaagagcgctcatacttgcattatttagagcctcatacccaaaatgtcaaatattgtcatcttgacattgtttcattctttcatagcatagacgtaaatattgtacgtgatactttttcggtatacttttccgatgagtttttggtaaaagagaaacaatccttattagatgcattcatggctagtgtgactctgactgcggagttagacggggtcgaaaaaacattcattccgatgggatttaaatcttccccatcaatatctaatattatttttagaaaaattgacattttaatacaaaaattttgtgataagaataaaattacttatacacgatatgcagatgatcttttgttctcaacaaaaaaagaaaacaatatattaagcagcactttttttataaatgagatttcatccattctctccattaataaattcaagttaaataaatcgaagtatttatataaagaagggactatttctttaggtggatacgtcattgaaaatattttaaaagataacagcagtggaaatattagattgtcgtcttcaaaattaaaccccttatcaaaagatttatatataaaaaaaataaagaaaaatttgaagccaagttctactcatcgcaactga

SEQ ID NO: 15679 - DNA, 2247 bp, Escherichia coli
atgggaataaaaagtatacggattaaaaacatactctcctttgatgacgtatatattgatagctttgaagattttaatttgattattggtagaaataactctggaaaatcaaatcttttaaaagtatttaaatacttttatgaaaaattagacgagcaacggagcattcctcttactctaaattcgaattacacgccctctggaataataacaattacatatgatacaacccggataaagaaaatagtaaccagcactaataataactctcgatttcataaacatatatacaacactctttttaaagaaccaaataaaaataaattcaccgcacttttcgcacccgaaagaaaaaaacaaaatagcgaatattccttaacacttacaatatcaaatgatgactcaatatcatggtctacgaaagataaaaaacttttatccctaattaaaattatcttcccttttttttatatagacacacgtagaatggatttatacaactgggaagacatatggagaataataagtagcattaactccttcaactttcagaaaataagcgaagatgaaatcctgaaatttttagatgaaaatatttcatctagagatggcgactacaaaaaatacatcactcgcattactgatgtaattgacacaaaaccatacacctataaagagaaagtaattaattatattaagatagcattgaaaggtcatattttcacgaactcaggtgaagatatccttcatcagtctgatggaacaaattcacataaatatattgaaacaattattaagttgctcatttcgttatcacgaaccgagttcataacacctaccatatatatagacgaacccgagataggactacatccaaaacttggcgagcaatttattacaacaattcacacaacttataatagatataaaaaaagcgttcccgaaaaggaatcaggaaaatactcaacaccttatccttgtttaattttcagcacccatgcaccaaatattttaaagcaaactattaaacttttttcaacagatcagcagattttgcatttttctaaaaagaataaacactccacaaagatatctaaattaaactcacaatatagtgatttgcgttttataaatatgtttagcgataatgaagctagactttttttcagtgagtatattcttttcgtagaaggttccactgaaatggaagtcttccaaaatagttctttagctagaatttatcctgatttaggcaggattgacatatacgccagtgatgatgttatgttgagaaatataaacccaacttattctcaagcagcaattccttttttaattgttaaagatatagacaaggtgattaagcttgactataaaaatgaaatattaagtctggatggtgatgtttctctagttaataaactaatacgaaaaggcagtttaaagttttataatccatccttaataaaaaaaattgacagcgcaaaggaaataataagagcggataagtctaagaaggaaatgtcggttgatggcttgtttttcaaaacatttaaaattgaaaattttgtgagggatttcaataaactgttaaaatcatttaaccttaattatatgacaactacaatagagggtgcattaataaatgagcattctttaaaatacttttacagatggatttgtcatatcgtttttaaccagctagacgtcaataatgaaaaccctaaaaaaatgtttgctggcttaatgagaacgtacaatcttaaagatggagctataagtatattaaattcggcttttgttctctcaactcatttaagtatattagatccagtggagcaaaagctggtattcaaggttaaaaaaagggctctttttttaattaaaaaaagcattaaaggagattttaaaaacaataaagaaattacaaccctatttagacttctttttggaggaaaaactgccacacttataagtttagaaatgaatctgaaaaaaagctgtcaaagaatagacccatctattacagccacaataaagaaatataaaagcaatgagcttaaattcttactcccctataccacaaaaactagtggctgggttaccagttttttggattttacgatagctaagttagagcaagaaaatgctgataagatagccgagaatttacgcttccttttccctgaaattatatctataatagagcaagcttcttcttcgatagatataggggagtttcactga

SEQ ID NO: 15680 - DNA, 1020 bp, Escherichia coli
atgccacacgctattatgccttgggctcaaattgcacctaactatcatcggaatacgatattgttgggtaatggtgcaagcattgctgtttcaccggtccttgactacggttctctactggcttacgcccacagggcaggtctgcttacacatgatatgaatcgactcttccaatttttcagaacatccgatttcgagatgattcttcggctagtttggcaggcatccaacgtaaacagatcacttcaaataccagacaatcgcacacatcaagcctacctgaatgtcagaaattgtttgattcaggccgttcgtgatatacaccctgaatatgagcaagttagcgataaattgcctaatatgtaccagttcctcaaagggttcgataccgttttatcgttgaattacgacttgttgatctactggacgatgacctatggattcgacatccaagatggtcatttattcaaggattgtttcttgtggaacggcatcttcgacgatgcttggtggagatttcgtgatacttttagagagcgtactaacaccttggttttctacccgcatggaagcttggccctgtgcagaaatgttgtggagcaggagttcaagatccacaacgctggagaaggcttgcttgaggcaattcttgaagagtggcgcagcgagcaagcggtgccgctgtttgttagcgaaggaacgatgcagcagaaagtatcttctatccagaatagctactatctgtccaccgtgtaccgggaggtacttacgtcgcagcgaccctccttaacgatacttggttgggggcttggagaacatgaccgtcatattctgaagcggatgcgcggaaccggcatccaacgtgtagcggtttccgtttatcgctggaatcaggtctattgcaaccatgcgtatcaggttattcaggacgatctagggcctgttcgtgttgatttttttgacagtgaaagtcctggatgttgggttcatccggtgcagccaattttgccccgattttag

SEQ ID NO: 15681 - DNA, 1881 bp, Escherichia coli
atgacgacagtaactcccggcttacgcttgcgctttctcggtttttttgggccacaaaagccacccgctacagtgaccttcggtactggcctcaatgtcatttacggcgcatcaaacactggaaaatctttcattgtcgaagccatcgacttcatgctcggtggaaagccgcctctgcgtgatatccctgagcgcgttggctacgaccttgttctattggggcttgaaacccttgatgggaagtcatttacactctggcgcagcatagatggcggtggttttcggctctacgaagacttgcaccagacgccaccaacaaacgaaattccgtatacgcagcttgacgaaaaacacagcgataagaacaatacgaacctttcatcattcttgctggatctatgtagccttggtggaaagcgtgttcgcaaaaattcccggaacgaaaccctcagtttaagctttcgcaacattgcgcgtttgatgatcgtcgatgagacggagatcacacaacaaagctcaccgcttattgatggcaatcccaccgccaacacgccgaacttggccacattcaagttacttttaaccggagcagacgactccgcattggtcgccaccagtaataagagtgagccggaagagttatcgcgcaaggcacaattgcgtcttctcgatcagcttcttgaagactatggtgaccggctcaaggagttgacaaagagtcctaaggaactcaaggagcagctagagaagattaacacctcacttcgtcaacaggcggcccaggtaaacaccaccgaagatgagtttcaggaggctgccgggaagcgacgagaattacgcaaaaaactggaagaaagccgagagcgacgtgcagaggtaagtgcgatgcttgagcgattcaggctgcttgatagacactacttgtccgatattgaaaggctacgtgccattgaagaaggcgggacgctctttagcgtactgagtgccgggcattgtcctctttgcggagcggcccccgatcatcatccccccgatactgggtgtaatggagatactgatgccgtcgttcaggctgcacgtgtggagattgccaagatcgaagttttgcgcacggaacttgtagctaccgtccaaagccttgagcgcgaaggcgccaactttgatcgcagaatacccactgttgttcgagaattagagtcgatttcggagtcagttgaagaattcctcgctcccaagctctcgacccttcgcaagtcctattcagactttgccgacaagcgggccgaggtacgcgaagcgctggcactctatgccactgttcaagacatggagcgccgtcgggctgatcttgagaagggcactgaggacgagaaggctggggtggttactaacgcagatctctcaagcactgtggcccatagttttgctaagactgttgaaggcatactgactggttggcacttcccagaggttggggatgtgtacttcgattccaagtctcgagatcttgtaattgctggaaagtcgcgtagtgcttttggtaagggccttcgcgccattacgcatgcagctttcaccctcgggctgcttgctttctgccgtgagcgccacacaccacacacgggattcgttgtactcgattctccattgctggcatacagagagccagatggaacagaatatgatttgaccggtactgaccttaaagatcagttttacgcgtaccttgaagcgctgcctgaggacacccaagtcatcgttgttgagaacaccgacccgcctgatgcaatcatgaagcgtgagcagtctcttatgtttggcaagaatccgcatcatggccgttacggtttgttcccttttatagccgaccctgcacaataa

SEQ ID NO: 15682 - DNA, 495 bp, Escherichia coli
atgagccaagaacataagccaattaccttcaatagcccacttgaggcgggtatacgtgcggtctcgattctgggtgctgcctatccgcaaacctacgacctccagcggcttgtggcctttgactaccttcttgttcacacgggcgatattggtggaccagacaatttgcacccaccgacgccaatgcgctctgctgaattgctcgtgcgccgcaagttagttgagcaatcactgcttctgatgatgacccgtgacctagttgagcgcgaagtcacatccgagggaatcaagtacggcgcgggtgaaaatgctgcaacgttcctgtcatcagtatcttccaactatttgctgtccctgaaggatcgcgctgtatggcttgtcgaaactattggtgatctgacggatgaacagttcaaagccatgatgcgccgtttcttcgataaatgggtcgaacagtttcagagcattgagcaaagcttaggaggtgatgcatga

SEQ ID NO: 15683 - DNA, 1089 bp, Escherichia coli
atgactgcgagttggatggacatcaataagccgccgagcccagcaaccgctgttacggcagctcaggtggcgaacggccccatttttccaccgcagcaaagactactgacctactcaccagacgagtgggagggattcgtcgaggaatgggcttattactgcctcacgacgaagtatgaacacgtcctgcgtttctctggtgctggtgatatgggtattgatgtcgccgggttcgttggtgatgaacgcctgctgggggtttgggacaatttccaatgcaagcactacggcaatgccatcaggcctagtgatgtttgggttgagttcgggaagatcatctggtactcgtacaaaggtgaatatacggtccctcgtcgctactactttgtttcgccacgaggtgctggtacgtcgcttagccgcctattttcgaatgacacgaagttgcgtgaggaattgttagctaactgggataagcatgtgaaaaatgcaatcactagcacacaagaagtgttactcgacgcgaagcttcgtgcctatgtagactcattcgattttaccatcttcgacgccaagactgcgcttcagcttgttgacgatcacagagccacaccggttcacacagcgcgctttggtggtggactaccaacgcggcctgcatctgaaaagccgccccaagaagttgccgccaccgagagccgctatgtgacgcagttgttcggcgcatacagcgaacacacaggaacaatagtgactgacccttcggccttgcccttgccgaaactcaaggatcatttccgtcgccagcgcgaggcgttctatgaggctgagtcactgcgcgtcttcgcacgtgatagtgtcccgccaggcacgttcgaagctttgctggatgacattcatgatggcgttattgatacacatgacgggaaccatgctgacggctacgaaaaggtctgcgctgtcaccaaggctgcccgcgacatgcaaattacggcaaacgccctcatcatttgtactaaccccaaggatagagacggaatctgccaccaacttgtgaacgaagagcgccttcggtggacacgatcatga

SEQ ID NO: 15684 - DNA, 996 bp, Escherichia coli
atgaatgatgcaccttcagacatcatatttcactatccaccggagctgttcaatctcctggtggatgttgtgccgttgctcaatcgctctaagcaggatgtgctggttttcttccggggcgcaggagtacctgacaacataacttctgacattgcagttcacttgagggctgcaccaaaggatgtcaacaagtaccagatggttcgcacggtacttgaacgcctcaacgcgaagggggaacacgctctccgtgaacggcgcgaggtgctgcggcgcgtggtggactttgcgaactttgattcgtgctggcccgcagaccaacttaaggccaaaggtcttgtcgccagtatccgcgaagtcgtcaaccaaaaagacgctttcacgcgcatgaacaatgcccgcgaagaagaacggcaaacccgcctcgctgagtcacagcggatcgcagcagaaaaacgtgatcgtagttatagaatcgagaatgccaagcagggtttatataaattatttggcactactgcgactgcacaggaaagaggaaaattgctggagacggctctcaacaatctttttcaagcctacggtgttctcattcgtaaatcctttcatttggttggtgaggctggtgaagggatcgtcgagcagattgatgggatcattgaactcagtggtgttctgtatttcgttgaaatgaaatggtatcgcaatccggtgggtaagcctgagatttcagagcatcttgttcgcctcatgtcgcgtgccgaggttcgaggtatcttcatttctgccagtgactatacagaaccagccattcttacggcacgtgaatttctgcaacacaaagttgtagtcctatccacgcttcatgagatcgtccgtctgcttgagcagcaagacgacctttcagagttcttcacaaagaaagtccaggctgcgcagatacacaaaaacccgtatttctgcccacacgatagccaagcacaaggtgcgttatga

SEQ ID NO: 15685 - DNA, 945 bp, Escherichia coli
atgacgatttccctgcatacccagactagcgcccctaacatcacagcggcgaccagcgtatccccgctggacccgtcaggctcctcaaaaacgaaattttctaaaaccagagccgacatttatcagaccgttaccaacaacatcattgcagcacttgaaggcggtgtaaaaccgtggtcctgcccgtggcaacgcgtatccggcatatctggtctgccatcgaattacgccaccggcgtagcctacagcggtatgaacatcatgttactgtggtgcagcgcatctaagcagggtttcagcgattcacgctggatgacctacaaacaggcacaggtagcaggtggacaggttcgcaagggggaacatggtacaacagctattttttacaccacgctggagaaggaaaacgacgccggagaagttgaacatatcccgatgctgaaaaccttcaccgtgtttaacgttcagcaaatcgacggcctgtccctgacaactgaaactgtcagcccggaagcaacctttgacccgttgccgcaggctgagaacctgttgcggaagagtggcgcaaacatcatcgagaaaggacaaaacgcctttttcagcccatcaacagatgaagtctggctaccggagcgccatctgttttcggatgcggctaatttctacgctacaggtctgcatgagctggttcactggagtggtggcaaaaaacgtctgaaccgtgaaatgaaagggaagtttggcagtgcggattatgcagaggaagaactggtagcagagctgggaagtgcctttctgatggcggatcttgggattgagggagaggtacaacatggaagctatattgcttcctggctgaaagcgctaaaaaacgacaagcgttatattttcaaagcggccagcgcagcctctaaagcacatcgttacctgatggataaactctga

SEQ ID NO: 15686 - DNA, 747 bp, Escherichia coli
atgctgatttcgtcatatcacgagcgccagacgcgcaacagcgagaaaataagacaactgctgaacttcctgaaagaagaaacctacagtgattttaaaacgctgatgcagttatttagcttccgagatcataagtcgctttattcgctgcttgcaaaaatggagcgaatggggttaatccagaagcatatgcttgaatcacggacaatcaagatttcattatgggggatcaccagcgacgggctggcggcggtcttaaccccgaatgataaaatctttcctgcgcggtttgaaccatcaaaaatcaccggctggacactggagcaccatcttgataatcaggccgccaggcttattctggagaagaaaggtgcttcgggatggattaacggcgaccgtgccagctttctcagccagtatcaggtaaaacatcgcccggacgggttactgaccctgcctgacggtaacgttattgccattgaaaccgagcgccgcctgaaaacccgagcccgctaccagtcgattatcgccagccacctgctggcccgaacaaacaagtactggatttacattttttatgttgtgcccgatccacagaagaagcgtgcgcttgaactgctgtttgacagtatcaggcatgtcatcatcaaccatcagcacatcccgctggaagaacgccaccgtagggtgtttcgcatttatacctttgatgaactgaaacacctgtcattaggcagctatacgtaa

SEQ ID NO: 15687 - DNA, 1860 bp, Escherichia coli
atgattttaaataagcttgccgcttcactgtcgccgatagtgaacgggatgctggcgctgctcgcttttgtgcaacagcaacaactggtgctggcgttattagcggggctgacgatgccgttttttgcgtcgatgaaaagcgatgaacggcagaaagccccgttatggaaaaagctgattatcgctttttccctgctgtgttttctctccggcacactggctccggtcgttatcggaccctttcagtggttgtataagatcagacccagcagtgataatacggtactggcttggtcagtacggattgcattcactgtaaccggggttatttttcatattatgcttcgccggatattcacgccggaactggacaaaataaagaaacgccttgttaaaaaaaccacccttgaacgggaattgcgcaccgatgtccgcaccgtaaagtccctgctgcccgaaacactgcattatgatccgctggattatatcgacctgaataaaggcatttttactggcatggacagggagaacgaaccaatgtatctcccgttaaaagactggcagaaacagcacgcggatattattggcaccaccggagccggtaaaggggtagctgccgggatattgctatatcaaagtattattgccggtgaaggcgtttttgttatggaccccaaagacgatgaatgggcaccacacctttaccgcaaagcctgcgaggatgcaggaaaaccctttgccttaattgacctgcgaaaacagcaataccagctaaacctgattgaagatattacgccagatgaactggaagaattgttcgttgccggtttcagcctggcagaaaaagggcaggaatcggacttctatcgtattgatgaccgaaaagccgcccgtatggccgcgcaatttgtcagtgataacccatcggcaactctccgtgatatttataacggtgattacgttcagggtattgccgaaaaaatcaaagcgttctttgggaagattgaggaactggcattactcaatgccattaactcaccagaaggcttttcgcttaagcacatatttgatgagggcggctgctgttatgtagtcggctccatgcgaaacagcaaaattattaccgcccagcgcatgctgctggttcgcctttaccagttagcagaaaggcgcgaccgtgtaacagacgtaccccgccccattgctgtttatctttccgaactgaaataccatttatccaggccagcgctggaaggtttaggcgcggcgcgggataaaggcgtacacattattatggaccaccagtccatcgccgatttaaaagactgcccggcagatttgaaaggtgacgccgttgtcggtgcggtcgttgaaaatgccaaattcaaactggtttaccgggttatggatccggatacggcaggctgggtggcaagaatgtcaggcacgattctggtggatgacgaactccgcaaggctaagacggataatatgctgacagaaaccatcgacagtgagcgcacaatccgccaggccgaacgtttctttattgacagcaatatgatcctgaacctgcccgattttgtcagctttatctttacgacaaaaacgctaccttctgcctccttgatttcaccgataaaggtcagaaagcgtcagctaaaaatcttctcggtttcccctgatattgccgcagcggcagccccggtgaagatcatgctggattttggcgaggatgataaaccagccatgccggatgtgatgacaacccatccggctcttttcttcgacgaaagcgaagtaaaaccggcaaagtcccaatctgatgatgaagaacacttctccccactggatttttaa

SEQ ID NO: 15688 - DNA, 306 bp, Escherichia coli
atgcaaaaagaagacttatttatccgaaatatacattctcgtaatcaggacaggatatcggtagccctgatatatgacacgttatctaaagaagcccacagtggttgtgggctgtattatgagatatacgaaagcaggcttatcggtcttttgcgcgatcatcttttagaacttaatgaagctgacgcaaataaattacgacgctatgccgaaagcaaaggcacgaaaattgatgatgcgtcctacagtgaagcactggaagctgaaagggagtgcagggctgaaatataccgcgaacagatgtaa

SEQ ID NO: 15689 - DNA, 303 bp, Escherichia coli
atgaataaaaccgttatcgcggcggctgtattatgtatggccgcaggaaccccaatttattcctttgccgctgacccgtgcgaagttgttctttgcatgtacggaaaagcaacgggtaatagtggtggaagtgaatgccgctcagcagaaaaggctttctttaatatagtcaaaaagaataaacatggtttcttacctaaccatacgttgaatgcgagaaaagcatttcttggtgaatgtcccagcgcagacccggaggcagtaaataaaatactatctaagttcggcaaggtcagaggatag

SEQ ID NO: 15690 - DNA, 369 bp, Escherichia coli
atgataaaacaaattaaagtaatcatgttggcagcaatagttaccggatgttcatcgccaccgcctcccgttcctgtagattgggataaagccgccgccccattaaataccagtttaccgcaatggagcgacaataacgttatggtcccttccccgacagttaacagtaaatggacatcatcaatcagcgcacaaagtttctacaatacaatacaatatggactccagccgtattttacgcagtcgcccactcaacacgaattgtcgtcactgcacaatccggcactgatttctttaatgccaaaaactggcttcggcagaatggagcaaaaggtgttattgaataccagcctgtttttaattgtctga

SEQ ID NO: 15691 - DNA, 1026 bp, Escherichia coli
atgaccgctaagaatatttccctcgaccgctataaacaacgtttctttggcgactttctggagcttcccggcctgacggaaatcgccgtcaaccgtccaggtgaactgtacacaaaaatcaacggcgtgtgggagcaacatgccgttcctttgaactatgaggattgctacaactttgcccggtgcctggcaaaacaccacggcgacaatatcgaagatattaagccggggctgtcagccacgctggaatccggcgaacggtgccaggtgattgttcctccggcctgtgagcgcgatacggtgtctatcaccatccgtaagccatcaaaggtacaaatcccgcatcagtcatatatcgatgcggggttttataaccgggtaacaggcgaggaaaaaacggagacgcacgacgaggaattaattgcattgtacaatacaaaaaacattcctttgtttatggagaaatgcgtcgagtacggtaaaactctcgcggtcgccggggaaaccagtacagggaaaactacctatatgaaaatgttgataggttatattccggtacatcttcggatatcaacaattgaggacaacccggaaatcacgttctttatccataaaaactacgtccatcttttttatccgtcagaatcatcagatgaaaaaggttctatcgttaccccggcgagccttttacgctggaattaccgtatgaaccctgaccgcattttattaacagaggttcgcggtgcggaagcctgggacttccttaaaataacaggttccggccatgaagggagtatgacctccattcatgcaggatcagcgaaagaagctatagatgggtttattacccgttgctatgaaaatccacagtgcgcccagctcccctatacatttatgttacgtaaggttctggatagcctggacgtgattgtgagcattgatttagacggaaatgtccgccgtatgaatgacatttatttccgtccaattcatcgaaaccagtattttgaggaaatgaaagcatga

SEQ ID NO: 15692 - DNA, 1263 bp, Escherichia coli
atgaacgacgaaaacaaagtgcctgtgccggatgaagcgcaggcatccccggcacacgctgaggatgatattgccacgcttgagcgggaagcccgcgtaaaaagggaggcagagcttctcaacgcgcaggacgacgaagagaaagacccggtacaacccgccgttaacaagctgaaaaagcgcaaacggggcaaagcaaccgcctttcttgccattgtcgcggtcgcgcttatcttcctggcatggggtggtaactgggtttatcgcaatatcctgtggcagcctacggaagaaaagaaacaggacacagccccgcagacgaacaaaaccgattaccggcagcgtaacgatctcggtatgtccatcgatacagccgaagaagagccagagcaacaggataacggccagagcagcgcggggggaacagggcaggcggctgccccgccagaactcaacaaagccagcttccttattcgccgtgatggttcggccaccacacagaaccaggtaaaaacccggcagcaggaaatgacgctgacatcggcaacaaccaccggacaacaggacagcagcgcggccacacctcccggccagccgcaaaataccaccgcaccgtcgcagggacaaagccccgcaccagtacggcgcataccctataaccctgacctgtacatcccggaaaatacctcgatcccctgctcactggatcgccgctttgtatctgaccgggcggggaaacttcgctgtacggtcactactgacatctggagcgccagcggcaacacgaagctgatagagaaaggcactaccgcatcattactttaccgcgccatagcggaagaaggtatgaggcacgggcaagggcgggcattcatcattgcgacgaagctacgcacccgccagccaccttatctcgatatcccgttggttgataccagcgcggctggcgagctgggcgaggctggcgttgatgggtggatagattcgcacttctgggagcgattcggcggcgcattaatggttggcatgatccccgatattgccgcatgggcatccaacagcgcaggtaaaaaagaccgcaatacggactatacggaaaacagtcgccaggctatggcagatatggctcgtaccactctggaaaacagcatcaatattcccccaacgctccataagaatcagggcgagatcatcaatctgatcacaggcgaggatattgatttttccaacatctatacactaaggttgaaaaatgaccgctaa

SEQ ID NO: 15693 - DNA, 906 bp, Escherichia coli
atgaaaaagttaacgtttaccgcactggcactgatgatgtgcggcgcggcatggggtgcggccataccacaggcaagccgctatgactcccgtgttcagcaggttatctataaccctcagaacgtcaccgtcgttaacaccaaacccggctttatgacaacgctggtatttgataacgatgaggcggtcataagcgccaaacccggctttgatgaggcgtgggaagcaacgccggatgcaaaccgggtaaacgttcgcccggttgcgctcacgcagggagcgcccggagaagatggcaacacaacgcaggtcgtgatccccccgaacagccgggactggcataccaatatgctggttgtcaccagtaagcgcctgtacaacgtcgagctgaacgtcatcgatgataaatcggcacagcaacccgcttttcaggtgagctatcgctatccgggcgaagaacgggacaaagcgagccgggaggcgacggccagacagcgcgagtgggagcagaaacagcaacaggccagcgtccagaaagcgctgaactcggcgcagacgccccgcaactggagttacaccaaatatccgggcaaaggcagtttcaacatagttcccgactttgcttatgacgatggccgctttacgttcgtgggcttctccccgtctaagtccattccttctgtcaccaaagagctgaacggcaaagagcatgcggttaacagcagtatccagaagaaaggcgacttcaccgtactggtgattcaggaggtgacgccacgcctggtactgcgttccggtaatgccgttgtaggtctggaaaatagcggatttggcaaggtacacgccgccgatggttccaccgtatcccggcaggtggaaagagtggaaaaaccggaatccaattaa

SEQ ID NO: 15694 - DNA, 684 bp, Escherichia coli
atgaatgaacagaaattaattgctgaatcccgcacctttgagcagcaaatgattgaccgggataaacgcgccacgaaagccggttttgttgttggcggtgtgggtctgctgattgcggtactggcgctcgtcgccgtggtcgtgatgttgccactaaaacagacagacgttgatctgtataccgtggataaccacacaggacgggtggaacatgttacccggacatcgaaaaccagcctgaccgcaacagaagcctatcaaaaggcgatggccgcaaactacgtcaaagtacgtgagcggtatgtctatccctctttgcaggacgactacgagacggtacaggtctacaacgctccccaggtaaacgatgactatctggcgctttacgccggaaaaaacgccccggacaaggtttataagaacggtgcgcacaccgtgaaagtggagatcctgtccaaccagatcaccgatggaacagcccccgataaagtcgccactgttcgctacaagaagattatccgccgtctggctgataacagcacccgcaacgagtattgggatgcccggttcacattccattcagaccctgacaaggacatgagcgatgcggaacgcgagatcaactacttcggctttaccgtcaccagttggcagaccgaccgcgaaatccggggaggtgaatga

SEQ ID NO: 15695 - DNA, 138 bp, Escherichia coli
atgaaacgcttgattgcgctggctttgctatgcgcgctttctggctgcgcccagaacacgcttccatctgcatttagcggtaagggagaacccgtaaacacatctcaaattatggcggagttaaacagtcatgaatga

SEQ ID NO: 15696 - DNA, 1074 bp, Escherichia coli
atgagtggcggtctttttgttggggttgagaaatacctaataggaggaataacggacgccacaaaaggattaatgatgtcgtactcttctatgatgatggggctggcagcagcgtcagctaccatctacatcatgtggcgtggataccagactctggctggtaagctctctacgccgatggaagacacgatgtgggacatcatgaggatggcgatcatcctgtcctttgtagctaatttaggtggctacctcgatggcgttattgatgccataaacggaataaaggagggtttttctggcagtgataatatatggcagctattagacaccttatggaataaagcaaaggtgttaggtaaaacattacacgacatggatgattccacttatataaaagatgagggaatgactgctcaattttatgtctggcttgggatattcgtcttaatgattatcaccgcgtttgtttccatgatagcggaagtcatgatcttattactgagtattacagcacctatatttattttttgccttatgtatggttttctccgcaccatgttcaataactggctacaaaatatatttgcagccatattaaccattatgctttcagctctttctttaagaattgtagtgaattatttaaacctagtccttaccaaggcaacgaaggtcgcggacagttcaacaattgttgaattaggagcacaagtctgtcttgcgggtatctgtgcggcaatattggtttatctctccgcaaaactggccgcagcactggccggggcgagtgctaccgtatccatgcaggggctggccgctgtaggtatcggtgctgctgcttttggtgccgggaagctagccggaggtgcaattaaagaaaccaaacgttccacccaggacaacattcagggctggaaggatgcgaatgcaggtaagcccggcaagcctggaggtgagttaggctataacgcttctaaagcgcgtaaatacgcgattgagcagatgatagcccggaacgaagcgcggaggctggcacagtcgagagaatccgcagttaagaagttcaatagctaa

SEQ ID NO: 15697 - DNA, 243 bp, Escherichia coli
atgttatcaaaaaaaattattttaatttcgacgctcaccctgtgtttttctgttattggatgcaaggaggaagctaaaacaacaaaatggtataaggaacaccctgatgaattaaaactcgtttatgaaaagtgccaaaagagtggtgatgctactgaaaactgcaagaatgcaaatgaagcccactatcaaataaagcagctaaacgcaccaactccagacttaaataatttagaggagtaa

SEQ ID NO: 15698 - DNA, 714 bp, Escherichia coli
atgaaaactcacttttacgcgctaattttcgcatgttcgcttgcaagccctctggcacaagcgggaggtatattagtatttgatgccacggccaaactggaaaatgtccgccagtggcagaaagaagcgaagcaatggatggagaccgcacaacactacaaagaccagatacgagcttataaagaccaactggcaacagccacaggtgttcgagatatcgccagctttgttgaccaagccaaaagcctgaaagccgatctcgaaaaactacgcaagccgggacaggctctgaatgatttgcttctctccggcggctcctccgggcagttcgatgcgctgtacgaaaaatataaaatttttgatacctgcaaagccgaacgctcggagagttatgccaacgtgtgcaaacaacaggtcatcaataaagctatccagcttgagcagaccgacgagatccagaatcaggtaagccaggccctgggagaaatcaacagcctctccaacagagttgcgctagccaaagattcgaaagaatctcaagaccttgcaaacagtattcagctaaaatctgtcatgctgaacacgcttaccactcagtgggaaatgagtgtgaaagcagcagataaacgcgaaaaagtgcttgaggcggagcgcgttaaacagtggaaccaacagcagttaaacgcgccaactgctgaccttaataatttatga

SEQ ID NO: 15699 - DNA, 2739 bp, Escherichia coli
atggcaaagctgctcaaggcaatgaaacgcccggcggcgctgtggggggtgcctatggtgcccctgctggctgtcacgggtgtaaccatcatcgttgctgtctggacttccgtcgcactcctgttcttacttcccgtcgaatttctggtgatgaaatccctcaccagaaatgaaccaatgcggttcaatctgattgccgtttggctgagagtgaagggaaaaccggtagcaaaccgtttatttggcgcaacaacacttatgcccgttgagcatgaggctgttgatatcaaggagtttctcgacgccatgaaactaaatcagtgtgccaccatcaagaagtatattccgtactcatcgcacattcatcagcatgtggttcgctcacctaaaagcgatctgtactgcacctgggaattgatgggaacgccgttcgactgcgagtctgacgaatcactccagttcgggacgaaccagttacacgggctaatccactcattcgaaggtatgcccgtcactttctatatccataacgaccgcaatacgtttaccgacaatcttcataaagattccggcaacccgtatgccgatgaagttagccgtctttactacgcttctgtcggggtgttccggcgtaaccgcctgttcctgacagtctgctatcgcccgtttgtcagccttgaaaaagcagaacgcaaacggatgaaagacagccagaaactaaaggaactggacggtgctttgctggaaatgctggaaataaaaagcacgctcgataccgcgctgtcgcgctatggtgcgcggcctctcggtacgtttaccgaaggaagcgcggtgttttcgtcgcaactggctttctatgaatatctgttaacgcaccagtggcgaaaggtgcgcgtcacccgcaccccggcctatgacgtgatgggagcggcggcgttgttcttttcggctgaatccgggcagataaaccacgccaacggtacgcaatatttccgggggctggaggttaaagagttctccgaagaaaccgccacggggatgatggactcccttctttatgccccctgcgattacgtgatcacgcagtcctatacctgcatgtcacgcgaggaagcgaagaaagccattaagcgtacccgtcgccttttgatgagtgccgatgacgatgctgtttcccagcggctggatctggatgtggcgcttgacctgctgacatcggggaaaatcgcttacggaaagcaccatttttccatcatggtgtattccccgtcgctggaaaacctagtggctgatactaacgaaatcagtaatgcgctgaacaacatcgggataacgcctgttccggcagaaatatcgctttcagcggcgtatatggcgcaactgccaggcaactacaacctgcggccacgtaaaggggagctaagtagccaaaactttgtggagctggccgcactccataatttctatccgggcaagcgcgataaagccccctggggggatgctatggctttactgcgcaccccgtcaggagatggctactatatcaacctgcataacacactggcagataaggacgaattcaacgaaaagaacccggccagtacctgcatcctcggtacgaacggttcgggtaaaaccatgttgatgacgttctttgagatcatgcagcagaaatacgggcgtgaggatagcttctccccggatgccaaaaccaaacggctgacaaccgtttacctcgataaagaccggggcgcagagatgaacatccgggcgctgggtggccgttactatcgggttatcagtggtgagtctacagggtggaacccgttctcgttgccagcaaccaaacgcaatatcaatttcatcaagcaactgatgaaaatcctttgtacccgcaacggctcgacgatcttcccacgcgatgaacgccgtctgagtgatgcggttaatgctgtgatgaatgacgagccacaatatcgcgtctacggcattacccgaatgctggagaatttgcctgagccggctacgaaagaagcccaggaaaacggccttagcattcggttgtcacagtgggcgcagggcggtgagttcggctgggtgtttgataacgagtctgacacgttcgatatcagcaactgcgataacttcggcatcgacggaacggagttcctggacgatgcaagcgtatgtgcgccaatctcgttttatctgctgtaccgcattaccagcctgcttgacgggcgacgcctggtcattttcatggatgaattctggaagtggttacgcgacccggtgtttaaggactttgcttataacaagctgaaaaccatccgtaagctgaacgggatgctggtcgtcggcactcaatccccggctgagatcatcaaagatgatatcgccccggcagtgattgagcagtgcgggacacagattctggcggcgaaccccaacgccgaccgcgcacattatgttgacgacatgaagtttgaaccggaagtgttcgacgtggtgaaagggcttgacccgcaagcccgccagtatgttgtggtgaaaaatcagttcaagcgcggcgataccaaacgttttgccgctcgtgtcacgctagacctgtcgggtatcggcagatataccaaagtcatgagcggcgatgcccccaacctcgaaatattcgaatcgatttaccgggaaggaatgcagcctcatgaatggctcgatacctacctggctaaagcactctga

SEQ ID NO: 15700 - DNA, 294 bp, Escherichia coli
atgatacttttccgcaagctaaaagctgtggtcccccccgtttcggcctgtacgctgacgactttttctgcaaccccggcactggccgacggatttcagcgggcaaatactgtcatgcaaaaagtgtcaaccgggctgcatggtctggcggcaatcacgatcaccgtggccgtgatctggattggctataagaccctgtggaaaggcgagagcctgtcgcagtgcggctacatcatcattggcggcattttaattggcggaggcagtgaaatcggcgctctgctgatgagctaa

SEQ ID NO: 15701 - DNA, 711 bp, Escherichia coli
atgctttccaccacagcctttctggcgatagccatgcagtgcgccgccagcattcatccgtccacggcattcgacgtggcacgggtggaatccggttttaacccttatgccatcgctgagattgtcccgaaggccggcccctctttcggcgatcaacacattatttctcacctgccagccagccggggagatgcagagcatattctccgccgcctgacagcacaggatcgccgttactctgtcgggctgatgcaaatcaccagcaccaatttccgccattatggtgtgtccgccacagagctacttgatccctgtaccaatctgtccgtcttcgaacacattctcagagactgctaccggcgcggcggcacgctgaaaagggcgctgagttgttattattccggcaatttcagtaccgggcaacaacctgaaacggcgttttccggaacgagctatatccagcgaatcggttatccgccgggatcatcccgctatgcggtccccggaacccgtgaggacaaatcatcagttgccgttcccctgaaaaccgcccctgccagtgactcatcccgtcaccacgagatctggcccggagtcgtcgtccgtggcgtccctgcgaaactccgccaagaaaaaatcttcatcgcaccgttctccgcgccgtcagtgcgccggagtttctccctgtcaccccgtgaggaggaggaataa

SEQ ID NO: 15702 - DNA, 234 bp, Escherichia coli
atgagaaagcctgtttattacgcgtatgttgcccaggaaagtcatccggactctcagggtgagaaaaatacctggtggacaaaggtcggagtcgcctttccccaccacggtaaatccggtctgaatattgtcctgacgcccggtattgccgtttccggcaaactggtcctgcttgagccccgggaggaaaataatccaccacagaatacgggccccatcgaaaccgtgtcgtaa

SEQ ID NO: 15703 - DNA, 129 bp, Escherichia coli
atggaagaaaagctcacagggaatgagcttgaaatgctttatgccgcagcagattatcgccgcgcagagattgtaataaaccagtactttgataaggttcccggtaatgtctggaaatatgtcagataa

SEQ ID NO: 15704 - DNA, 210 bp, Escherichia coli
gtgccagatgaaatcgatcgcgatcaggcgtttaatgaacggtgcctagaagcactgattgaacaaagccggttaagacccacaccgacaccttccctgcagcactgtcgattttgcggcaaggctattccggaaaaacgccgtcagacgctgccgggtgtaacaacctgtactgactgtcagtcgatactggagaaacgcagacgttaa

SEQ ID NO: 15705 - DNA, 582 bp, Escherichia coli
atgcttccatccctgaatcatattatattaaccgttgctcttcaggcgctacgggaaggaaatattcatcactgcgaaactatgggattcacttacgatgaaatgaatttgctcggttgcttatcaataaacgatcttatcaccctcagtcaggcacctttaccgcttgtcgatattactatccgccatgatgtcctgcaaaaattactggcatcatcccacgaggaaaacaggcgtcaggaacaactgaacagagctgtcaggctggggggctcaatcgcactgatgaaccgttatttcggggttggctccagagaaacctgtgcacgccgccggttactcggtgtctccgttccaaacgggagaacacccattccggatgaagaaaccgatgctgcaatctggcatcagtggcaaaaatatcgggtcgaaaacattgattccccggaggcgctggacgccatgatgcaggttacagaaaacctttcatcgtgtactgccccctcgctgaccgttgtctggaactgcatcacgcattgcgaaagaaagaacacggtaaggagaatacaacgtgccagatga

SEQ ID NO: 15706 - DNA, 183 bp, Escherichia coli
atgaacattaatatccctgcactcataaacttcgatcctgcaggtataaaaaaaagcacctgcatgtatatttcagacctgcccggtattgtgctatatgaaactataccattcactgaatattcagctgaattactgagcacttattcagttaaggagtcaatttcatgcttccatccctga

SEQ ID NO: 15707 - DNA, 186 bp, Escherichia coli
atgacatcttatcagttactacgcctcagacaggttgagcaaaaaacagggctgaagcgttcacagatatacctttatatgaaagagggtgcatttccccgttcaataaaaataggccctgctagtgttgcctggctcgagtctgagattgacgagtggatcaacaaaaagttatctgaccgataa

SEQ ID NO: 15708 - DNA, 717 bp, Escherichia coli
gtgggacgtaaatgggccaatattgttgctaaaaaaacggctaaagacggtgcgacgtctaaaatttatgcaaaattcggtgtagaaatctatgccgctgccaaacaaggtgaacccgatccagaattaaacacatctttaaaattcgttattgaacgagcaaagcaggcacaagttccaaagcacgttattgataaagcaattgataaagccaaaggcggcggagatgaaacgttcgtgcagggccgttatgaaggctttggtcctaatggctcaatgattatcgctgagacattgacttcaaatgttaaccgtacgattgctaacgttcgcacaattttcaataaaaaaggcggcaatatcggagcggcaggctctgtcagctatatgtttgacaatacgggtgtgattgtatttaaaggaacagaccctgaccatatttttgaaattttacttgaagctgaagttgatgttcgtgatgtaactgaagaagaaggtaatattgttatttatactgaacctactgaccttcataaaggaatcgcggctctaaaagcagctggaatcactgagttctcaacaacagaattagaaatgattgctcaatctgaagttgagctttccccagaagatttagaaatctttgaagggcttgttgatgcccttgaagatgacgacgatgttcaaaaagtttatcataacgtcgcaaatctctaa

SEQ ID NO: 15709 - DNA, 636 bp, Escherichia coli
atgaataataagggctccggtctgaccccagctcaggcactggataaactcgacgcgctgtatgagcaatctgtagtcgctttacgcaacgccattggcaaatatattacaagtggcgaattacctgatgaaaacgcccgcaaacaaggtctttttgtctatccatcactgaccgtaacctgggacggtagcacaaccaatccccccaaaacgcgcgcatttggtcgttttactcacgcaggcagctacaccaccacgattactcgccctactctctttcgttcgtatctcaatgaacaacttacgttgctgtatcaggattatggtgcgcatatctcggtgcaaccctcgcagcatgaaatcccttatccttatgtcatcgatggctctgaattgacacttgatcgctcaatgagcgctgggttaactcgctacttcccgacaacagaactggcgcaaattggcgatgaaactgcagacggcatttatcatccaacggaattctccccgctatcgcattttgatgcgcgccgcgtcgatttttccctcgcgcggttgcgccattataccggtacgccagttgaacattttcagccgttcgtcttgtttaccaactacacacgttatgtggattaa

SEQ ID NO: 15710 - DNA, 8010 bp, Escherichia coli
atgttagctcgttcagggaaggtaagcatggctacgaagaagagaagtggagaagaaataaatgacagacaaattttatgcgggatgggaattaaactacgccgcttaactgcgggtatctgcctggtaactcaacttgcgttccctatggctgcggcagcacaaggtgtggtaaacgccgcaaccccacaaccagttcctgcacaaatcgccattgcaaatgccaatacggtgccctacatccttggagcgctggaatcggcccaaagcgttgccgaacgtttcggtatttcggtggctgagttacgcaaactcaaccaatttcgtacgtttgctcgaggttttgataatgtccgccagggtgatgaactggatgtcccggcacaagttagtgaaaaaaaattaaccccgccgccgggtaatagcagtgacaacctcgagcaacagatagccagtacttcacagcaaatcgggtctttgctcgccgaagatatgaacagcgagcaagcggcaaacatggcgcgtggatgggcctcttctcaggcttcaggggtaatgacagactggttaagccgcttcggtaccgcaagaatcacgctgggcgtggatgaagattttagcctgaagaactcccagttcgattttctccacccgaggtatgaaacgcctgataatctctttttcagtcagcatactctccatcgtactgacgagcgtacgcaaattaacaacggcttgggttggcgtcatttcactcccacatggatgtcgggcatcaacttctttttcgaccacgaccttagccgttaccactcccgcgccggcattggcgcagagtactggcgcgactatctaaaattaagcagtaacggctatttgcgactgaccaactggcgcagcgcacctgaactggacaacgattatgaagcacgcccggccaatggctgggatgtacgcgcagaaggctggctacccgcctggccgcaccttggcggtaaactggtctatgaacagtattatggcgatgaagtggccctgttcgataaagacgatcggcaaagtaatcctcatgccataaccgctggacttaactatacccccttcccgctgatgaccttcagcgcggagcaacgccagggtaaacagggcgaaaatgacacccgttttgccgtcgattttacctggcaacctggcagcgcaatgcagaaacagcttgacccgaacgaagtcgctgcacggcgtagccttgcaggcagccgttatgatctggtggatcgcaacaacaacatcgttctggaatatcgcaaaaaagaactggttcgcctgaccctgacagaccccgtgacagggaagtcaggagaagtgaaatcactggtttcatcgctacaaaccaaatatgccctgaaaggctataacgtcgaagccaccgctctggaagctgccggtggtaaagtggtcacaacgggtaaagatattctggttaccctgccgggttaccggttcaccagtacgccagaaaccgataacacctggccgattgaagtcaccgctgaagatgtcaaaggcaatttttcgaatcgtgaacaaagcatggtggtcgttcaggcacctgcgctaagccagaaagattcctcggtatcgttaagtacccaaacattgagtgcggattcccattcaaccgccacactgacttttattgctcatgatgcagctggtaatcctgttatcgggctggtgctctcgacgcgtcacgaaggtgttcaggacatcaccctttctgactggaaagataatggtgacggaagctatacccaagtcctgaccacaggagcgatgtctggcacgctaacgctgatgccacagctgaacggtgtagatgcagctaaagcccccgccgtggtgaatatcatttctgtttcgtcatcccgaactcactcgtcaattaagattgataaggaccgttatctctccggcaatcctatcgaggtgacggtagaactaagagatgaaaatgacaaacctgttaaggagcaaaaacagcaactgaatactgcagtcagcatcgacaacgtgaaaccaggagtcactactgactggaaagaaaccgcagatggcgtctataaggcgacctataccgcctataccaaaggcagtgggcttactgcgaagctgttaatgcaaaactggaatgaagatttgcataccgctggatttatcatcgacgccaacccgcagtcagcgaaaattgcgacattatctgccagcaataatggtgtgctcgccaatgagaatgcagcaaacaccgtctcggtcaatgtcgctgatgagggaagcaacccaatcaatgatcataccgtcacgtttgcggtattaaacggatcggcaacttccttcaacaatcaaaacaccgcaaaaacggatgttaatggtctggcgacttttgatctgaaaagtagtaagcaggaagacaacacggttgaagtcacccttgaaaatggcgtgaaacaaacgttaatcgtcagttttgtcggtgactcaagtaccgcacaggttgatctgcagaagtcgaaaaatgaagtggtcgctgacggcaatgacagcgccacaatgaccgcgacagtccgggatgcaaaaggcaacctgctcaatgacgtcaaggtcaccttcaatgttaattcagcagaggcgaaactgagccaaaccgaagtgaatagccacgacgggatcgccacagctacgctgaccagtttaaaaaacggtgattatagagttacggcctctgtgagctctggttcccaggccaatcaacaggtgaattttatcggtgatcaaagtactgctgccctgaccctcagtgtgccttcaggtgatatcaccgtcaccaacacagctccgcaacatatgactgcaaccttgcaggataaaaatggcaacccactaaaagataaagaaatcaccttcactgtgccaaacgacgtcgcaagtcggttctcgattagtaacggcggaaaaggcatgacggatagtaacggggttgcaatcgcctccctgaccggcacgttagcgggcacgcatatgatcacggctcgtctggctaacagcaatgtcagcgatacacagccaatgacgtttgtggcggataaagacagcgcagttgtcgttctgcaaacatcgaaagcggaaatcattgggaatggcgtggatgagacgacgctgacagcaacagtaaaagatccttttgataacgtggttaaaaatctgtcagtagtcttccgcacctcccccgcagacacgcaactgagtctgaacacgcgtaatactaatgagaacggtattgctgaagttacccttaagggcacggttttgggtgttcatacagccgaagccatactgcttaacggcaatagagatacgaagacagtcaatattgcgcccgataccagcaacgcgcaggtcaccctgaacatccctgctcaacaggtggtgacgaataacagcgacagcgtgcagctgacggcaacggtgaaagatccgtcgaatcatccggtggcgggaataacggtgaacttcaccatgccacaggacgttgcggcaaactttaccctcgaaaataacggtattgccatcactcaggccaatggggaagcgcatgtcacgctcaaaggtaaaaaagcgggcacgcatacggttaccgcaacgctgggtaacaataatgccagcgatgcgcagccagtcacattcgtggcggataaggacagcgcagttgtcgttctgcaaacctcgaaagcggaaatcattgggaatggcgtggatgagacaacgctgacagcaacagtgaaagatccttttgataacgtagtaatagatctaccggtcacctttagtactaacccggctgatacacaacttagtcagagcacgagcaatacaaacgacagtggtgttgctgaagttacccttaagggcacggttttgggtgttcatacagccgaagccacactgcctaacggcaacaacgatacgaagacagtcaatattgcgcccgatgccagcaacgcgcaggtcacgctgaatatccctgctcaacaggtggtgacgaataacagcgacagcgtgcagctgacggcaacggtgaaagatccgtcgaatcatccggtggcgggaataacggtgaacttcaccatgccacaggacgttgcggcaaactttaccctcgaaaataacggtattgccatcactcaggccaatggcgaagcgcatgtcaccctcaaaggcaaaaaagcgggcacgcatacggttaccgtaacgctgagtaataacaataccagtgattcgcagccggtaacgtttgtggcggacaaaacctcggctcaggttgtcctgcagatatcaaaaaatgagataacaggtaatggcgtcgatagcgcaacgctaactgcaacggtcaaagatcagttcgacaatgaggtgaacaatcttccggtaacattcagcacagcttcttcaggcctcaccctgaccccaggggaaagtaataccaatgagtctggcatcgcgcaggccactctcgcaggcgttgcctttggtgagcagactgttactgcatcactggctaatactggtgccagcgacaacaaaactgtgcattttattggcgacacagcggcggcaaaaattatcgagttgacgcctgtcccagacagcatattcgccggtaccccgcagaacagcaccggcagcgtcattaccgccacagtcgttgataataatggctttccggtgaaaggtgtgactgtgaacttcaccagcagaacaaactctgccgaaatgacgaatggcggccaagccgtaacgaacgaacagggtaaggctaccgtcacttataccaatacccgctcctcgatagaatcaggagcgagaccagataccgttgaggccagtctggaaaatggtagctccacgcttagcacatcaattaatgtcaatgctgatgcgtctacggcacacctcactttgctacatgcactttttgatacagtctccgcaggcgagacaaccagtctgtatattgaggtgaaggataattacggcaacggtgtcccccagcatcaggtgaccctcagcgtttcaccaagtgaaggcgtgacccccagtaataacggtatatatactaccaactactacggcaatttttacgcaagctttaccgctacaaaagccggggtttatcaagtgacggcaaccctcgaaaatggtgattcgatgcaacaaacagtgacctatgtgccgaacgtcgcgaatgctgaaatctcgctggcagcctctaaggatccggtgattgccgacaataacgatctcacgacactcacagcaacagtcgctgatacagagggcaatgcgatagccaacactgaggtaacatttactctgccggaagatgtgagggcgaacttcacgctgagcgatggcggtaaagcgattacggatactgaaggcaaagcgaaagtcacgctgaaaggtacaaaagcaggcgctcatactgttacagcatcgatggctggcggtaagagcggacaactggtggtgaactttactgcggatacgctcactgcgcaggttaatcttaacgttaccgaggacaactttatcgccaataacgttgggatgaccacacttcaggcaacagtgactgatggaaacggcaacccgttagccaatgaggcggtgacattcacgctaccggcagatgtgagcgcaagcttcactctcggacaaggcggttccgccattacagacatcaacggcaaggctgaagttacactgagcggtacaaaatccggcacctaccccgtgacagttagcgtgaacaattatggtgtcagtgatacgaaacaggtgacgttgattgccgatgctggtaccgcaaaactgacctccttaacctctgtatactcattcgtcgtcagcacgaccgagggcgcaaccatgacggcaagcgtcactgacgctaacggcaacccggtagaaggcataaaagttaatttccgcggaacctccgtcacgctaagcagcaccagcgttgaaacggatagtcagggattcgctgaaattcttgtgacaagcaccgaggtcggactgaaaacagtttcagcctctctggcagataaacctactgaagtcatctcgcgattactgaatgccagtgcagatgttaattctgcgacgtttaccagtctggagatacctgaaggtcaggtaatggtcgcacaagacgtagcagttaaagctcacgttaacgaccagtttggcaacccggttgcgcatcaacccgtgacattcagtgcagagccatcctcgcaaatgatcatcagccagaatacggtgtctactaatacgcagggtatagccgaggtcaccatgacgcccgaaagaaacggttcgtatatggtgaaagcatccctggcgaatggagcctcaattgagaaacaactggaggctattgatgaaaaactgacactcacggcgtccagcccgcttatcggtgtcaattccccaacaggtgcaactctgacggcaacgctaacttctgcaaatggcactccagtggaaggtcaggtcatcaactttagcgtaacgccagaaggtgcaacgttaagtggcggaaaagtgagaaccaactcttcaggtcaggcaccagtcgttctgaccagcaataaagtcggtacatatacggtgactgcatcgttccataacggcgtaacaatacagacacagacaaccgtgaaagtcactggcaactcaagcaccgcacatgttgctagctttatcgctgatccatcgactatcgccgccaccaacagtgatttaagtaccttaaaggcaacggttgaggatggcagtggtaacctgatcgaaggtctcactgtgtacttcgccttaaaaagcggctctgccacattaacgacattaacagcggtgaccgatcaaaacggaatcgcgacaacaagcgtgaaaggagcgatgacaggtagcgtcacggtaagcgcagtcacgaccgctggtggaatgcaaacagtagatataacgctggtggcaggcccggctgacgcctcgcagtccgtccttaagaacaatcggtcatcactgaaaggggactataccgatagtgctgagctacatcttgttttgtacgatatatcaggcaatccgatcaaagtttctgaagggatggaatttgtgcaatcaggtactaacgtgccctatgtgaaaattagcgcaattgattacagtcaaaatatcaacggtgattacaaagccactgttacaggcggcggagagggtatcgcaacgctgatccctgtattgaatggtgttcatcaagcgggtctgagtaccacaatacaattcactcgcgcagaagacaaaataatgagcggtacagtgttggtcaatggtgctaacctaccaacaactacattcccttcgcagggattcaccggggcgtattatcagttgaataatgacaactttgctccaggaaaaacggcggctgattatgagttttcaagctctggctcctgggtcgatgttgatgctaccggtaaagtgacatttaaaaatgtcggcagcaaatgggagaggattacggcgacgccaaaaacaggcggccctagctatatatacgaaatccgagtgaagagttggtgggtgaacgccggcgatgctttcatgatatacagccttgctgaaaatttttgcagtagcaatggctacacacttccccttggagaccatttaaaccatagtcgttcccgaggcatcgggtcactgtacagtgaatggggagatatggggcattacacgactgaagctggttttcaatcaaatatgtattggtcatctagtcccgcaaactcaagcgaacaatacgtaatttctctggcaacaggtgagcaaagtgtatatgaaaagcttgggtttgctcatgcgacatgttataaaaacctctga

SEQ ID NO: 15711 - DNA, 882 bp, Escherichia coli
atgatgcgaatcgcgctcttcctgctaacgaacctggccgtaatggtcgttttcgggctggtactgagcctgacagggatacagtcgagcagcgttcaggggctgatgatcatggccttgctgttcggttttggtggttccttcgtttcgcttctgatgtccaaatggatggcattacgatctgttggcggggaagtgatcgagcaaccgcgtaacgaaagggaacgttggctggtcaatactgtagcaacccaggctcgtcaggcggggatcgctatgccgcaagtggctatctaccatgcgccggacatcaacgcttttgcaaccggtgcgcgccgtgatgcctctctggttgctgtcagcaccggtttgctgcagaacatgagcccggatgaagccgaggcggtaattgctcacgaaatcagccacatcgccaatggtgatatggtcaccatgacgctgattcagggcgtggtgaacaccttcgttatctttatttcccgtattctggcgcagcttgccgcgggttttatgggcggaaatcgtgatgaaggtgaagagagcaacggcaacccgctgatctactttgcggttgcaacggttctggaactggtgtttggtattctggcgagcattatcaccatgtggttctcgcgtcatcgtgaattccacgccgatgcgggttcagcaaaactggttggtcgcgagaaaatgattgctgcattgcagcgcctgaaaaccagctatgaaccgcaagaagcaaccagcatgatggctttctgcattaacggtaagtcgaaatcgctcagtgagttgttcatgactcacccgccgctggataaacgtattgaagctctgcgtacgggtgaatacctgaagtaa

SEQ ID NO: 15712 - DNA, 2049 bp, Escherichia coli
atgaacatgttttttaggcttaccgcgttagctggcctgcttgcaatagcaggccagaccttcgctgtagaagatatcacgcgtgctgatcaaattccggtattaaaggaagagacgcagcatgcgacggtaagtgagcgcgtaacgtcgcgcttcacccgttctcattatcgccagttcgacctcgatcaggcattttcggccaaaatctttgaccgctacctgaatctgctcgattacagccacaacgtgctgctggcaagcgatgttgaacagttcgcgaaaaagaaaaccgagttaggtgatgaactgcgttcaggaaaactcgacgttttctacgatctctacaatctggcgcaaaagcgccgttttgagcgttaccagtacgctttgtcggtactggaaaagccgatggattttaccggcaacgacacttataaccttgaccgcagcaaagcgccatggccgaaaaacgaggctgagttgaacgcgctgtgggacagtaaagtcaaattcgacgagttaagcctgaagctggcaggaaaaacggataaagaaattcgtgaaaccctgactcgccgctacaaatttgccattcgtcgtctggcgcaaaccaacagcgaagatgttttctcgctggcaatgacggcgtttgcgcgtgaaatcgacccgcataccaactatctttccccgcgtaataccgaacagttcaacactgaaatgagtttgtcgctggaaggtattggcgcagttctgcaaatggatgatgactacaccgttatcaattcgatggtggcaggtggtccggcagcgaagagtaaagctatcagcgttggtgacaaaattgtcggtgttggtcaaacaggcaagccgatggttgacgtgattggctggcgtcttgatgatgtggttgccttaattaaagggccgaagggcagtaaagttcgtctggaaattttacctgctggtaaagggaccaagacccgtactgtaacgttgacccgtgaacgtattcgtctcgaagaccgcgcggttaaaatgtcggtgaagaccgtcggtaaagagaaagtcggcgtgctggatattccgggcttctatgtgggtttgacagacgatgtcaaagtgcaactgcagaaactggaaaaacagaatgtcagcagtgtcatcatcgacctgcgtagcaatggcggtggggcgttgaccgaagcggtatcgctctccggtctgttcattccatccggtccgattgttcaggtccgtgataacaacggtaaagttcgtgaagacagcgataccgacgggcaggttttctataaaggcccgctggtggtgctggttgaccgcttcagtgcttcggcttcagaaatctttgctgctgccatgcaggattacggtcgtgcgctggttgtgggtgaaccgacgtttggtaaaggcaccgttcagcaataccgttcattgaaccgtatttacgatcagatgttacgtcctgaatggccagcgctgggttctgtgcagtacacgatccagaaattctatcgcgttaacggcggcagtacgcaacgtaaaggcgtaacgccagacatcatcatgccgacgggtaatgaagaaacggaaaccggtgagaaattcgaagataacgcgctgccgtgggatagcatcgatgccgcgacctatgtgaaatcgggagatttgacggcctttggaccggagctgctgaaggaacataatgcgcgtatcgcgaaagatcctgagttccagaacatcatgaaggatatcgcgcgcttcaacgctatgaaggacaagcgcaatatcgtttctctgaattacgctgtgcgtgagaaagagaataatgaagatgatgcgacgcgtctggcgcgtttgaacgaacgctttaaacgcgaaggtaaaccggagttgaagaaactggatgatctaccgaaagattaccaggagccggatccttatctggatgagacggtgaatatcgcactcgatctggcgaagcttgaaaaagccagacccgcggaacaacccgctcccgtcaagtaa

SEQ ID NO: 15713 - DNA, 699 bp, Escherichia coli
atggaaaatcaacctaagttgaatagcagtaaagaagtaatcgcgtttctggccgaacgttttccccactgtttcagtgcggaaggtgaagcgcgtccgctgaaaatcggtatttttcaggatttggtcgatcgtgttgccggggaaatgaacctgagcaaaacgcaattgcgatccgctttacgtctctacacttcgagctggcgttatctttacggtgttaaacccggcgcaacgcgtgtcgatcttgacggcaacccatgcggtgagctggacgagcaacatgtagagcatgctcgcaagcagcttgaagaagcgaaagcgcgtgttcaggcacagcgtgctgagcagcaagcgaaaaaacgcgaagctgccgcagctgctggtgagaaagaagacgcaccgcgccgcgaacgcaagccacgtccgaccacgccacgccgcaaagaaggcgctgaacgtaaacctcgtgcgcaaaagccggtagagaaagcgccaaaaacagtaaaagcacctcgcgaagaacagcacaccccggtttctgacatttcagctctgactgtcggacaagccctgaaggtgaaagcgggtcaaaacgcgatggatgccaccgtattagaaatcaccaaagacggcgtccgcgtccagctgaattcgggtatgtctttgattgtgcgcgcagaacacctggtgttctga

SEQ ID NO: 15714 - DNA, 1203 bp, Escherichia coli
atgacgcaatactcctctctccttcgtggtcttgcagcgggttctgcatttttattcctttttgccccaacggcattcgcggcggaacaaaccgttgaagcgccgagcgtggatgcgcgtgcatggattttaatggattacgccagcggtaaagtgctggcagaaggcaatgcggatgaaaaactggaccccgcgagcctgactaaaatcatgaccagctatgtggttgggcaggcgcttaaggccgataagattaaactcaccgatatggtgacggtcggtaaagatgcctgggcgacgggaaatccggcactgcgtggttcatcggtaatgttccttaaaccgggcgatcaggtttcggtggcagacctgaacaaaggtgtgattatccagtccggtaatgacgcctgtattgcgctggccgattacgttgccgggagccaggagtcatttattggtctgatgaatggttatgccaaaaaactgggtctgaccaacactaccttccagacggtgcacggtctggatgcgccggggcagttcagtaccgcgcgcgatatggcattgctgggtaaagcattgatccacgatgtgccggaagagtatgccattcataaagagaaagagttcaccttcaacaaaattcgacagcctaaccgtaaccgtctgctatggagcagcaatctgaatgttgatggcatgaagacaggaaccacggcaggcgcgggatataatctggttgcttcggctacccagggcgatatgcgtttgatctccgtagtactgggtgcgaaaactgaccgtatccgttttaatgagtctgagaaattattgacctggggtttccgcttctttgaaaccgtgacgccaattaaacctgatgccacctttgtgactcagcgcgtctggtttggtgataagagcgaagtgaatctcggggcaggcgaagcgggctcagtgaccataccgcgtgggcagctgaaaaacctgaaagcgagctacacgttaacggaaccgcagcttaccgcaccgctgaaaaaaggtcaggttgtcggcaccattgatttccagcttaacggtaaatccattgagcagcgtccgctgatcgtgatggaaaatgtggaagaggggggattctttggtcggatgtgggatttcgtgatgatgaaattccatcagtggttcggcagctggttctcttaa

SEQ ID NO: 15715 - DNA, 627 bp, Escherichia coli
atgattacgctgtggggtcggaataattcaaccaacgtaaaaaaagtattgctgacgctcgaagaactggaactaccttatgagcaaattctcgcgggccgtgagtttgggataaatcacgatgctgattttctggcgatgaaccctaacgggctggtgccgttgttgcgtgacgacgaaagtgatctcattctttgggaatcaaacgccattgtccgctatctggcggcacagtacgggcaaaaacgcctgtggatcgactcaccggcacgtcgtgcggaagcagaaaaatggatggactgggcaaaccagacgctcagtaatgcccatcgcgggatcctgatgggattagtcagaacaccaccggaagagcgcgatcaggccgccattgatgccagttgtaaagagtgcgacgccctgtttgccctgctcgatgcggaactggcaaaagtaaaatggttctccggcgacgagtttggtgtgggcgatatcgctatcgcaccgttcatctacaatttgtttaacgttggcctgacctggacaccgcgtccaaatctgcaacgctggtatcagcaactcactgaacgcccagcagtgcgcaaagtggtgatgattcccgttagctaa

SEQ ID NO: 15716 - DNA, 1467 bp, Escherichia coli
atgactttaaatataaaaaaaacagccatatacatcattggatttatattcctgactttcttctacgcctcgatttcaaaacagattttgccaagttcggatgctgtttctggacttcttgagggtaaggacattgcggacggaaattggacgcttagtggatggtatctctctacagtatcattctattttacagacataatatggtacgggcttgcttcaaaggtattctggtacggacagtaccaagcatactgcataccggcaattatgtattcaatggttacattgatgacattttatctttcaaaagaaaggctttcatcgttatgggccatttcattttgcgttgcgctgccttctgggtttgcagtattaaacgtattaatacctgtgatacatgtcggcacatatgtatccatgttgttttgcttcataatgttagacaatttttccaaaacaagatcgttaatttctctatctctttatattttagtgttagctctagcttgtttcagtgatgacatcataaagctactcattattgcaccagtagcaatatcatcagtgatttttatagtaaaaaccaaaagccaaaaaaatctgatcatactagttgcaactatatttgcatatgttgcatcaaaaattatgaccatgtacgcaagagctcataactggtacattttgccaggcgttccagatccaacatttgttgcatttgatgatatcctgaataatttatacttattcgtaaaaggattcctcctatacagtggagctttcttctttggcaagccaccttctgatattacagcgcttatttctgttttttgttttgttgtaatgattttacttcttatattagttgcaatgtcagtaaaggaaatattctttacctccatgatcaatatggctatatgtatagcttgtattataatgataccagcataccttgcaagtaaccgtccaatagatgaatggactataagatatatcgttccattttttatactagcacctgttgttattggcagatctaacaactccagagggtggaaattcatcgcattaggggttgttacaacatttattctcttttgttctatttatatgcatgaaaaaaaagacaattctaatgatattataaatcagataaaacacactgtaaggcagaataacctcacaaacgggtatgcatctttctggtttgcttcatcagcaagtatagatggagacatatcaattgctccgattgatgtaaaccgaggtttgaatatacttgcatgcaataaatggttgtcaaaaaactattggtatgagcgcggaggaaatttcataattacagatgacgaggttatgagaaatataacaattaaagagattggtaatccatcaaaggttattgacgtcggagataagaagatttttgtttacgataaaaacattacattcaactgcaattaa

SEQ ID NO: 15717 - DNA, 1764 bp, Escherichia coli
atgacagacattacagccaatgttgtggtaagcatgccttcgcaactcttcactatggcgcgttcttttaaagccgttgccaatggcaaaatttatatcggtaaaattgacactgacccggtaaatcctgaaaaccagattcaggtttatgtagagaacgaagacggctctcacgttcctgtttcgcaaccaatcatcattaacgctgctggttatccggtatataacggacagattgcaaagttcgttaccgtacagggacattcaatggctgtgtatgacgcatatggcacacagcagttctactatccaaacattctcaagtatgacccggaccagttccggcaggagctagagggagagtttgcaagcggggcattccctgaaacagtaaagtataagtatggattaccatctgttgttgatggtgctgtcttcaggaatgtacaagaaaagctggatgattttgtatttttggaagactttggtggcaaagatgattctggaacaacagataatagcatagcctttcagaaggcattcgcttcaggcgcaagaaaaattcacttgaaaggttctggcatatatggaatgaagaccagagacattgagcttccagcaaaatatgaaattattggtaacgcaaaaaatccagagattaaatatctaggttctgattcaaccttcactatgtttacccttacagggtctggcccggctgctagtcagtggaaacagggtggcatattccgagatgtagtcatatcatccgacgtgctgattaactggattgtttgtcgtcatgtccagaacttagagtttgatcgggtgtttttctataacgcacaaactactatgaacaactaccattacgttaacttcttccggtgcgaacgttggggtagtccattcttggggcgtgcggatttaaatactgtggagttcatcagcgaatcacctaagtttcttatgtgtttcagttctaactctccgattgacgtatgggataccgccgatttatttattagtgaatgctcaatgtttgctggagattttgcggtaagaacacgcacaacacttggtgagatgggtggaacagaccaattcgcgggttatgcggttataatttcaaatagcgtttttgatgccatcaacggtactgcttttgatatggagagtctggcttacgctaccatcagcggtaacattattagtgcagggaggataaacaatagtcgtggaattaatattaaaggggcaagaaatctaacatttacgggaaacactatcacttactgtggtgagttcggcatggtattggaaaatgctgaacaatgttctttgtctaataatatattcaacggaaataagactggtgggctatcgttggtaaactgtaaagaaatatctgttattggcggctctatgggtacgtcttatatcagaggtggatactacgtgcaaccacttgggatcacagaccccgccgataactgtaacggcataaccatcaatggcgtttctttcgatagcgatatgacgaccaagatttaccttaatacatcggaagagcgcaaaaatcgtattatagcttgtctaggtgttaatgatactcagacgacttatcaaaaccgtggatctactgcgcagcgccctacagcaccagtcagtgggcagatgtattatgatacaacgctaggtcttccaatatggtataacacagtatcatctgaatggaagagggcggatggtacaagtgtatga

SEQ ID NO: 15718 - DNA, 1998 bp, Escherichia coli
atggctaaagcatggaaagatgttatcgcctctccacagtatcaggcgttagcaccagaacaaaaagcgcaggctcaggagcaatacttcaatgaagtcgtggcaccgcaagccggagaaaatgcagagcaggctaagcaagctttctatgcagcctatccattgtcatctgtgcagccagtggagacacagcaaccagtagcacagcaacaaccacagcaaagtagatttatgtctgaccttggtgaagcagtgaaagagactggtcgcggactggtgcaggctggcgtgaacgtggcaaacatacctgcatcaattgccgatgctgtaacaagcgcggcggcatgggctggcggtaaactcggcattggcgatgggacatatcaaccagcgccacgagtaacaacgcagggattagaacaggactttggtcttcagcaaggcgcgctgactccacaaacgacagagggcagggtatttgctgaggcattgccttatctcactcctgctggcgttgagagagcggcaacacaggcaccaacacttgctggtcgaattgctcagggtgcaactcgccttctcgcagaaaacgcagtcggaacacttgctgcaaatagtgcgaaagatgatgcggaagcactcgccaccgatttaggcgttggtgttctggctggaggcgctattaacgctgctggacgtggattaggtgctgcttatcgtggcgttcgtggtgctatcgcaccagaagcgcaacaggctatcagatttgcagagcgtgaaggggtgcctcttcatactactgacctcttacagcctacttcccgcgtcggaaaaatggcgcaaacgacagcagaaaatatccccctggctggcacaagcggaatgagagcaacgcaacaggaagcgagaagtcagttggtgcagagatttgctgataaattcggtgagtatgatccagcggttattattgacagccttaaagcgaaaacatcaggaattcgtcgtgctgctgggaaccgtcttgagcaggttcagaatgcaatggcgggagtcaacattcagcctgcgcgagcaattcagcagattgatactgagatatctaatctgcagaagcttggtaaggttgctgataacgagacgatttcaaaacttcaatcatatcgtgatgagcttgttcgcaatgctggtcctgatggtccggtaaatctggatttgaaacaattaagcgatctgcgcagccagttcagaatggacgtgaagggggagcgaccagtgttaccaaaccgttccgatgccgccattcagcgcgtttacaaggcaatgaccgacgatatcaatagtgtcattggtcagaatcttggcaacgatactctccggaaatatcagcaggccaatgccgtctacgctgacgaagcggcgaaactaaagaataccaggctgaagaatgttctcatgaaaggcgatctgacgccggaagttgtcaacaacatgctattcagcaagaacaaatcggaaattaagactctgtataactcagttggtcgtgttggcagggcgcaaatgcgcaatggcatcattggaaaggcgatggagaaatctggcggatcccctgaccagttccttcggcagcttaacatcctgcaaaaccagactggcatcacatttaagggtcaggacgctgcttatctgaaaggattaaaaaactacctgcaatccacgcagcaggctgcaaaagcggcagtaacaacacccacagggcagcaaaccatcccgttcattattgggtatggtacggcaatgaacccggcgacaactggcgcagcagtaagctacggacttcttactcgcgcctatgagagcgagccattcagaaatgcaatgctcagaatggcaaacaccccacgtggatcaacagcgtttgagaaagccatgcagcaggcacaaaaggcaattagcgccatgactcagggtgctaagtctgatgcgttgtcagaatag

SEQ ID NO: 15719 - DNA, 528 bp, Escherichia coli
atggcacttactgacaagcaagaaatgttctgtcacgagtacctcatcgatttaaacgccacgcaagcggctattcgtgcggggtacagcgcaaagacagctaaccgtaccgcatccgaaaacctgtcaaaacctgacatcaagttaagaatcgccgaactgaaagcgcaacgcaatgatcttgttggtattaatgcagaatatgtacttaatcgccttcttgaaatcgaccagatggatgtgctcgacattcttctgcaaaacggtgagttaaagcccattaaagactggcctaaggtatggcgcacaacgctatcaggaatggatgttgtggagatggtatccgcagatagtgccgcacttctgaagaaaatcaaatggcctgataaggttaaaaacctcgaacttcttggtaagcatgtttctgttcaggcatttaaagaacaatcttctcacgagctaaccggcaaagacggcggcgcaatccagatagaaacatcaccgatgagcactctattcggaaaatga

SEQ ID NO: 15720 - DNA, 906 bp, Escherichia coli
atgagcttattcgagaaatccggtcaaagtgtgggtgataactcctcagctatacaagttaccggtgatgcctactttggcaacaccactactgaggtcatggctatctgccagttaatggtcaaaagtgaaatggcttcgcttcgtgaagatgcattcgctttagtcgactcacgggctcaagaatttggtcaccaaattgcagaaaaactatctaaagatgttgatgaaaaactaagagcaaaactcgctgatcccgatattcagtacaccctcaatcaagcagtcgttcaggtcgcaagaaaggggtttgatgcaaaatcagaacttcttaaggagttaatagttactaaaattgaaaacgatcaagaagaccaaagcattttgatcgatcaagcgttagatacaacatccagactgaccactaatgatattaagtttttggcatttgtatattttttacgttcaatcaataagatggtaggaagtataaatatcacagaacttgcagagaaaaaaagtactcatttttcactacctaacatttccttggaagaaaattacatgatccataggtcaatgtatgctgtttatgaaacagattatataaaatttcttggagaacatttcaccctcaaacgcctaaatcagcagctattagaaattaaaggcgtatttttctcagataaaatatataatatcaattacttagagttattatcaaaaagaacgggttatgacactcttacatctgatgcatcattttatgaagcattcccagctacaaaattagttctcgactcttttggtatttcaacccttacagaacttgactcactagtcatcaatccagtaggtatgattattgcagaaaattatctcaaagctcatggatatatcagttaa

SEQ ID NO: 15721 - DNA, 126 bp, Escherichia coli
atgtccgacatctaccaaatcacgctaaccacccaaacaggcgaaaccttcactggcaagatgtcacgacgtcagcatgagctggttaatggctttgtgccgctggcgaccgagacaggcgagtag

SEQ ID NO: 15722 - DNA, 261 bp, Escherichia coli
atgtcttcgttcaaccaaacaagcctacgatcatccaacagcccgcttcgcatagaaacaactgataaagaacatgccattgcccatgaggcaattttggttgccttattgactaacgttgcaaggtctgcgcacagcaatcaggcgctgattgaattagaagaaacagttaaaggtttgattagcaattccaaccctaatagctttcggatcgcttcagatctcattaatgaagcaaaagagaatttcaacaggggttga

SEQ ID NO: 15723 - DNA, 2256 bp, Escherichia coli
ttgccggaacaggcgcaagcagagggaaataattgtctcgatttacgtatatggttcgcagaagttcaatacactcctgaactggatgcgcaacgactcaaactgacctttccgcaggcaatattaaagcatgaagcccgtggttatattccacctgaggaatgggataatggtatcccggccattcttattaattatgatttttctggcaacagtgatcgtggagactatgcgtctgatagttattatttaaatctccgttcaggtttaaatttaggggcgtggcgttttcgcgattattctacatggagtcgttcaggtaattcaccgggtaaaattgcacatgtgagtagtacgttacaacgagtaattattccttttaaaagtgaattaacactaggtgatacctggtcttcatcggatgttttcgacagtgtgagtattcgtggtgctaaacttgaatccgatgaaaacatgctacccgatagccaaagtggttttgcccccactgtgcgcggtattgctaaaagcaatgctcaggtaacgatcaaacaaaatggctatgttatttatcagacatatactccaccgggaccctttgaaatcaacgatctgaaccctacgtcttccgctggggatttggaagttacgatcaaagagtctgataattccgaaactatctataccattccttacgccgctgttcccattcttcaacgcgaagggcatattaaatattcggcaactgccggtaaatatcgtagcaatagctataatcaaaacagtccgaatgtctttcaaggagatttgatttgggggttaccctgggatattaccgcctacggagggatgcaatactcaaataattatcgggcaatagcactcgggcttgggttcaaccttggtatgtttggtgcgacgtcatttgatttaacgcaagccaatagcacgcttgccgatggcagtaaacatcaagggcaatcgtaccgtttcctatattcaaaatcgttagtgcagacaggtacggcttttcagattattggttatcgctattcgacggagggattttattcgttgagtgataccacatacaaacaaatgtcgggtacggttatcgatccagatacccttaatgaaaaagactatgtttataactggaatgatttttataatttacgttataacaaaagaggaaagtttcaggcaaatatatcgcaaccattgggcgaatatggctctatgtatttggcggcaagtcaacaaacttactggaatacgaataataaagataccttgtatcaggtcggctataatacgagtgtacatgggatttatttaaatattgcttataattatagtaagtcaccaggttcagatgcggacagaatcttatccgtaaatgtctcattgccgatcagcaattggttatcactagctgtcgatgggcgtactgcgacaaattctatgacagcaacttatggttatagtcaggataatagcggtcatgtaaatcagtatgccggagtatctggatcgctgatggaacaacataatctcaactataatattcaacaaaattttgccaaccagaataatggcgaaaatggctcggtagggataaattaccgtggtacatatggttcactaaattctggatacagctacgataataatggtaaccagcaatttaactatggtttaagtggtgccctggttattcacgaaaatggtctcacgttaagccagccgttaggagaaacaaatatactgataaaagcacctggggcaaacaatgtaaatgtggaacgcggaacgggggttaaaacagactggcgtggctatgctgtcgtaccttatgccacggaatatcggcgtaataatatctctttagaccctatgtctatgagtatgcatacagaattagatgctactactatggaagtgatacccagcaaaggtgctttagttcgtgctgagtttaatgcacatgtcggtattcgaggtttatttaatgttcactatcgtaataaaccagttccatttggtgcgacggtcagtgtacccactgaggggacaactcagattacaggaatagtgggtgacagtggacaggtttatctctccggtttgcctttacaaggcataataaatatacagtggggagaaagttcttatcagcaatgtcgggcaaactatcaattaccggaaagtgagttggataatgccattagctatgcaaatctggagtgccgctaa

SEQ ID NO: 15724 - DNA, 1173 bp, Escherichia coli; identical to SEQ ID NO: 8889

SEQ ID NO: 15725 - DNA, 336 bp, Escherichia coli
gtgctgtggaatatcgtggtgctgatgaatatttatatcccggattggcagagaaaaagcttttttcatgcactatttttgcaaatatttctatatggggggcggttttgttgcagattaattcataaagaaatgcatttgggtcttggtttgaagagtagctggttgatgttattgtgccaggtggtgcaggataaggggctgtatcgatatgctttggcaattgcgtgtgccgcagatggagatgaaatgccaataaaaaagcctgagttcgatgagggacgaactcaggctattcttaagttttacagtaacacgccgcggcgcgttggctga

SEQ ID NO: 15726 - DNA, 255 bp, Escherichia coli
gtgagtaattcagcacgactacagcttggtttttcaccgctatcaaaaactatcatgctggcaaaaatgcgcgatgttgaaggtggacgtatgcgcgttggcaatgatccaggtcgtgatgttaccaatgaggctgctcaattggtgtggcgactggtcatggctgaaggtggtgagatcgcgtgggatctggatgatggttctcgcatggtgttgaaggcagaaaagcaggaggcaaccagtgagcaagattga

SEQ ID NO: 15727 - DNA, 309 bp, Escherichia coli
atggatgaagtttttactgagatttatatcaatcgtaatttgaaagtgaaaattcatggtcttcgaatgctcgacgtgagagttcttggtatgtatccgttcgccagtgcggattctactaatgttgctgttaacgtaccgaagacagagaagcgatttcctgagattaccgacaaactggcacgtacagctgtacttcgcgctgctattgaaaaggtgcatccgccatcgatatcagcatgggtagacagaaagatgagagagccggcgcaagccggttttttatttgaattcaccgacgccgcttaa

SEQ ID NO: 15728 - DNA, 567 bp, Escherichia coli
atgattaagtcggttattgccggtgcggtagctatggcagtggtgtcttttggtgcatatgctgctccaactattcctcaggggcagggtaaagtaacttttaacggaactgtagtagatgcaccatgtggtattgatgctcagtctgctgatcaatctattgattttggacaagtatcaaaattatttctggagaatgatggggaaagtcaacccaaatcttttgatattaaacttataaattgtgatattacaaactttaaaaaagctgctggcggtggtggggcgaagactggcacagtatctctgactttttcgggtgtcccaagtggtccgcagagtgacatgttacagaccgtcggtgcaacaaatacagctattgttgtcaccgatccacatggaaaacgcgtaaaatttgatggtgcgacagcaacaggtgtttcctatttagttgatggtgataacacaattcattttactgctgccgtcagaaaagatggtagtggcaaccctgtaacagaaggtgctttctcagcagttgcgaatttcaacctgacttatcagtaa

SEQ ID NO: 15729 - DNA, 327 bp, Escherichia coli
atgcttaatcctcacgagcatcctgttctgcactctgaccagggatggcagtatcgtatgagaagatatcaaaatatccttaaagaacatggtattaaacaaagcatgtccagaaaaggcaattgtctggataatgctgtggtggagtgtttctttggaaccttaaagtcggagtgtttttatcttgatgagttcagtaatataagcgaactgaaggatgctgttacggaatatattgaatactacaacagcagaagaattagcctgaaattaaaaggtctgactccaattgaatatcggaatcagacctatatgcctcgtgtttaa

SEQ ID NO: 15730 - DNA, 501 bp, Escherichia coli
gtgaaagtactcaacgagctaaggcagttttatcctcttgatgagcttctcagggctgcggagataccgcgcagtacgttttattaccatctaaaggctctcagcaagactgacaagtatgcggacgttaaaaagcgtattggtgagatttatcatgagaatagaggccgatacggataccgtagggtaacgctgtctcttcatcgagaagggaaacagattaaccataaagctgttcagcgcctgatgggaatcctctcactgaaggcagcgattaaggtcaagcgataccgctcttacagaggagaggtagggcaaaccgcccccaatgttctccaaagagatttcaaggctacgcggccaaacgagaagtgggttaccgatgttactgaatttgcagtcaatgggcgcaagctgtatttgtctccagtaatagatctcttcaacaatgatgttatttcttacagcctttcggtaagcgtcaacggagcaccgtattga

SEQ ID NO: 15731 - DNA, 312 bp, Escherichia coli
atggttgtcgcggtcgtcggtcgcagcggtgcgggtaagtcgacgctgattaagctgattgccgggttgtatttccccacgcacggcaacatcagaatcggtgtgcaaatgctcgatgatgcctcgctcactgagtatcgtcgccagattgggcttgtcgatcaggatgtagcactgtttagtagtgatattgcagaaaacattcgttattcacggcatccgccaccaatgaagacgttgaaattgcctcacagcgggcagggctgtatgagatggtgtgcaatctgccgcagggattccggacaccggtga

SEQ ID NO: 15732 - DNA, 348 bp, Escherichia coli
atgttcgcaatcgccgccaccatgttctggctcgacccgttcctggcgctgacggcattaagcacagtgccagtggccgcaatggcaaccatgatttatcgccgcctcagtaccccttcttatgcacaggcacgggcaaagtcaacaagcaccctgcaggagaaagtctccggcctgcgcgtcgtgcaatcgcataatcagcaggaactggagggcgtcccgctgcgcgcgttatcggagcgcttccgcgcaactgcgtattccgctctattcgatcgaggattggcagcagttatcaaggattgtcaacgcctggcagcaggcgacagccagcggcaaacatattga

SEQ ID NO: 15733 - DNA, 768 bp, Escherichia coli
atgaaatgtatgaaatggatgtggattgtgtcatcaaaaatacttttatcccttagttttttttcatttgcaaatgaacaagtgtttggaaatgttgaaaacaattcaaaggtattttctttgcgtttagatacaacccgtgttgtctataaccaaggttcgtctggagaaacattggcagtcattaatgagcatgattatccgatattagttcaggcagaggtgctgcttgaagaccaaagaactccagcgccttttgtaataacgccaccactgtttcggcttgatgctctacaatctagtcgtcttcgtattattcaaactggaggtgatttcccgacagatcgtgaaactctacagtgggtttgtataaaggggatcccgccgaaagttgatgataagtgggctgaggaaaatagtaagaataaagatggtacagataaagtagctctagacatacaagtttctgttaaaagttgcattaaattatttgtccgtccgaaaatggtgaaaggtcatccagatgacgttgccgaaaatgtaaaatggcagaaggttggtaataggttgaaaggagtaaacccaacaccgttctatataaatcttgcggaattgaaagtgggcgaaaaagaaatactggagcgtcattatatagcgccatttggctcttatgaatatcctatcgatatgaattggaaggggggggttacatggagaatagtgaccgattatggtgggatcagtaaccaatttgaagcaaagctttaa

SEQ ID NO: 15734 - DNA, 2595 bp, Escherichia coli
atgaaagaatacatctgtaatgcctctctatgcagtacatctttgtgtactcaaaaaaataagctctcatatacaacattatttataataattatatcttcatttttttatgtgggggatgtggcagcacgttcgtattcgtttgacgcatcattattaaacggaggtggtaaaggggtagatttgaggttacttgaaaatggaggacaactacctggtatctatccagttgatattattttgaatggtgcccatgttgaatcaagagatatgttttttcatacagggagagatatacatggaaaagattatctaaaggcctgtttgaccaaggaaatgttaatacgttatggagtaaaagttgaagaatatcccggtctttttcgaattgatagtgaaaaggaacgaggtagagatatttgtgctgacttatcagtaatacctcaagctacagaatattatcgattcctatcacagcaattaataattggaattccgcaggtggcaattcgtccatcattgacaggaattgcacctgaagtaatgtgggatgatggtatcgatgcatttgtagtgaattggcaggcggaagcgagtcgttttgactatagaggctacggcaggaattcttcagataatttttggtccagttttgaaccggggattaatataggcgcttggcgcctcagaaatctaactacttggaataaatcatctggacaatcgggtaaatgggatagttcatatatacgggctgaacgtggattgaacagcattagaagtcgtttgactttaggtgaaggctattctcctgcggatatttttgacagtgttcctttccggggaggaatgttaggaactgatgaatatatgattccatataatcagcgggagtttgcgccagtggtaagaggaatagctcgaactcaagcccgaattgaagtacgtcaaaatgggtatctgatacatagtcagatagttgcaccgggggcttttgctttgaacgaccttccggtgacaggctccagtgatgatttacaagtggcaattctagaatcagatggcactattcagtcctttaaaatacccttcactttgccggctattgctctacgtgaaggatatttaaagtataatgtaaccgtagggcaatatcggccatcggatagtgggggggaaaaagcatacttggcgcaatcgactgttatgtatggtttaccatggggggtgacggcatttgctggagttcagggggccgaacattatcgggctggtgcactggggttaggattgtcgctggggaatttcggtgctatgtcactagataccatttattctcgaggacaacaaaagggatatgattatgaaacaggacaaacttggcgtattcgttacgacaagtcctttggactgacaggaaccagttttgcggctgcgagttatcaatatacaggtgaaaattatcacacattagcggatgttttgaatacttataataatgtcactagcctcatagacaggaattttgataacaaaactcgtcggattactatgaatataaaccagcctcttggccgttgggggcatgtggggttgaatggaggacgtgatgtatatcgtagtaaaccaaatcaagattatattggagcgtcttatagtacttcatggaaaaatatttccctttcattaaattggtcacggaatcttaatcttgggaactgcaacggtagacgtttctgtacagaggataatttcaacatgtggataagtgttcctctgcagcgctggtgggggggatatgataatgatatctatgccacggcacagatgcagcgttcaaccagacaaaactccagttatgaagtaggcttgagtggacgcgcttttgaaagaaaattgaactgggatgttagtgagcagatagtaccaggtagcaaatatgatgcagatacaggtcggttaaagttacgttggtctggaacctatggcgaattggcgggaatgtatagttataatactaacacccgtcagatgaacctagggatgtctggaagtatggttatgcatagcgaaggtctaactttcggtcagagaactggagacacgataggcttgatcgttgctccggatgtagcaggggcttcagtcagcggctggcctggtgtaagtacaggctcccgtggatatggggtggtaggttatgtatcaccataccaggaaaatgtcctcacactggatccgacgactttccctgaaaatgtagaagtcccacagacagatagtcgtgttgttccgacgaaaggagcagttgtccgggctgaatttaagacccaagtgggaaaacgtgctgtgctgaatctgatccgtaaagatggaacgcgtttaccattcggtacagtgataaccttggaaggaaaagtatccggttctgtaggggtggtagatgacaaggggactgtgtatctgagtggcctgtctgaaacaggaaaactaaaggcacagtggggaaggaatagtcaatgctatgcagactacattcttccaaaagaaaaggggccagccggagtttttttaacaaatgcggtatgcatatga

SEQ ID NO: 15735 - DNA, 435 bp, Escherichia coli
atgagataccgtataatgtctttatcctgtgtagtgtttctgatgataggaggactgtctcaggctgccgagattacgttagtaagccacaggagtacgggaagtcagttacgtgatggcatgatactggcgacaggacgaattatctgtcgggaaatacatacagggtttcagatatggatgaatgatcgtcaagagggaggacatccgaggcattatgttatacaaaatagtaaaggaaaccaaggcgagttacgggtcaggataggcggtaatagctggttttcttctttggatgaagaatggcaggggtggatcaggctaggaaaggaaaagcaagttaattttgatgtgatagtcgatggagaacagtatattcctccaggtaaatatatattctcagtaagtggtaaatgtatggcatcagagatataa

SEQ ID NO: 15736 - DNA, 516 bp, Escherichia coli
atgaaaaagagtatctatttcattatatgtccagttctttctctatattgtggaatgacgatggctgaaatattaccaccgtcaaatactatttctagagatagcattgcatctgcgcaaggtacgatcgtaataactaacaattgtaaggttagtatcaccccccctgcacaaattgaacgtcctgctacacaggccaaacaaactcatcacgtgacttttactattactcaagatccgtcttgtgcaaatataggctccagaattgcttattggtctgaaggaagtcagtcaggttttcgtatggtcaatacaagtaaaccttctttatattacacttttaaaaccgttagcgaatcttctagaacagatacattatgggggggtggtaaacaatattcgctagctacaagaggggttaataacctaagggtgagtatcgaaattcccaaaacaagtaattttattcctggtcgttatacacttggtcttaacgcaggcttggtcatgaactaa

SEQ ID NO: 15737 - DNA, 348 bp, Escherichia coli
atgaaaaaacttaatgtgtcaattttttctattgcggtttgttttagtcttaatgtatttgctggtggaggaggatggagttcggatcttgtagatccgcaacaatgtgtaaaattgtcaggtgcacagtatacatataatagctcttctaataaatgtatgcaaggtatcaacgaagggaaagtccatggtgtttcattatttggaacattctattatggcgatggcagccaagggacttttaaaggaagagtttccccggggacaacactgaatacaaatcaagatatgaacaaaactaataaatatggcgtgaaatataaggttattactgagtgggttagataa

SEQ ID NO: 15738 - DNA, 849 bp, Escherichia coli
ttgaaccataccgatgaggcaactgaacaggctgttgttgattacgccgtctctttcccggcacacggtcagcaccggaccagcaacgagctgcgtaaacagggcgtttttatctccggcagtggtgtccgttctgtctggttacgccataaccttgagaatttcaaaaaacgtctgaaagcactggaagaaaaagtagcccgtgatggcattgagctaactgacagccagatcgcagcactggagcgtaaagccagtgatgacgaggcctgtggcgaaatcgaaacgactcatccgggatatctgggttcgcaggacacgttctatgtaggcaacctgaaaggtgtcgggcgtatttatcagcagacgttcgttgatacgtactcgaaagtggctcactgtaagctttacgtcaccaaaacacagattagcgcggctgacttactgaatgatcgtgtactgccgttttattcgtctcagggcctgccgatgctgagaatactgaccgacagaggcacggagttctgtggcaaagtagagcagcatgattatcagctttatctggtaataaacgatatagaacacacgaaaacaaaggcgatgcccccgcagaccaacggcacctgcgagcggttccataaaacaatcctgaacgaattttatcaggtaacgttccgtaaaaaactgtacggcgatcttgatacattacagtcggatcttgatgaatggctggctcactataataatgagcgaccccatgagggaaaaatgagcaatgggcggacgccaatggaaacgttacttgatggaaagcgcatctgggccgagaaaaatttaagccagatgtaa

SEQ ID NO: 15739 - DNA, 747 bp, Escherichia coli
atggcagacaaactccgtcctctgtatatagcgctgaatgactatgttctggaggcaggaaaggtgcatgccgatgacacgccggtaattgtactggagccggggcagggtaaaacccgtaccggacggctgtgggtctatgttcgtgacgatcgcaacgccggttcgaccatgccggcagcggtgtggttctcatactatcccgaccgcaaaggtatccacccgcagcaacatctggcggactacagaggtatcctgcaggccgatgcatatgcgggttacaatgctctttacgaaagcggtcaggtaaccgaagcggcttgtatggcacatgcccgatgcaagatccacgatgtacatgtccgccatccaacgacagtaacgggagaagcgctccgtcgtatcggggcactgtacgctatcgagtctgagatccgcggcagtccggcagaagagcaactggcggtcagaaaagccagaacggtaccgctaatgcagtcgttgtatgagtggctccaggggcagatgagcacgctgtcgcgtcactcggatacggcgaaagcgttcacctatctgctgaagcaatgggacgccctgaacaaatactgcagtaatggctgggtggagatcgacaataacctgtgtgaaaacgccctccgggtaattgcactggggcggcactctatctgtaaactaatttttaccccacgtccttcacggtgcgcttaccattattacgcactgtaa

SEQ ID NO: 15740 - DNA, 1143 bp, Escherichia coli
ttgtcatgtaaaacagaaactgtctactactatctgacagaagcacttttaaatatattcgaaaacaaaaagcagaaccttgcctttatgctttttttatcactttcttttgtggggattataataacagattcattgatatatagtgtgtcattaaaagctgaaaatgagctgcaagtttatggtgacaaagttatgcatgtaaaactcaaccaacctaaaaccactgaaaaaataatgaggatttttgagaccatcagcaatgatatctcattttcaaaacagagttttttttatgttggaagcagtccgttttcaggtgactcattacctgttactgggatcgatgaattaggtttaggtatgtcaaacataaagtttttagatgataaattctatggtaatgttgctattgttaatgatataggaatatttggaaaaagcaagcaggtattcatcaatggtataccatttaaaattatcggtgttatttatacatcaaatacagactttcttgatagtcttggactgagcagtaatttatataatgagcagatttatgtcccactaaaaacaatgtttagactcaaaatgagcaacgaaatcgactcgttcaaattgctattaaacaaaaacataacattcgagagtataaacgaagtgagagaaatactgtataacaataagataagggactttaatattataacatcattgaatgcaaaagaaactgttgaacgagttttgaaacgtttttcgttattgactaactccgtatatatcatactaacattttctgctgtcgtaacatgctttatgctgtcaaaacgtaacttttattcacgaagcactgaaattgcattaaagataatacatggagtgaagcagggagaaattattttaatggtcctaacagagtcatttattatactatttatttgtttggttttatccatttcctcgggttatactgcaatgtatgttattacgaagatactggatgtagatataagcataagaatgacaatgatcactatatctttgagcactatattgatggctttcataatatctaacgttatatttggtaaattgtttttcaatatgaaccctgtaaatgttattaaaggtagaatagagtga

SEQ ID NO: 15741 - DNA, 369 bp, Escherichia coli
atgaccgaacgcatagaatttgttttgccttactcgccgacggtgaacacttactggcgacgccgtggcagcacatattttgtatcaaaagccggggagcgttatcgccgggcagtggcgcttattgttcgccagcagcgactgaaattaagcctgtccggacggctggcaataaaaattattgcagagccaccggataagcgtcgtcgtgacctggacaatattctgaaagcaccactggatgcgctgacgcacgcggggttgttaatggacgatgagcagtttgatgaaatcaatattgtacgtggccagccagtatctggtggacggctggagataagaattacagaggtgggtgtgcatgaataa

SEQ ID NO: 15742 - DNA, 717 bp, Escherichia coli
atggtgttgtgctggcactgcgacaaccagctgcgcgaccagacctccgaatcactcgggcaacttgctcaccaaaacctgtctgcatggatgattgacgtcatacgccatgcaatgaatggctcgcaggaacgggaattatcgctggctgaattatcctggtgggcggtccgcaatcaggtggcggacgcgctaccggaagcggtattacgtcgttcgctggggttgcgtgcggaaaaaatccgctcaatgtaccgtgaaagcgacatcgtaccgggagagcagaccgccaccagcatactgaaacagcgcacaaaaaatcttgcgccgctgcctcacgcccaccagcaacagaacccaccacaggaaaagacggtggtcagcattgccgttgatccggaatctccggctcagtatctccagcgccagaaaccacaacgggaagagatgcctgtatacacgcgctgggtaaaaacgcagaaatgcatgacgtgtggcaatcaggcagatgatccgcatcacatcattggtcatggactgggagggatgggaacaaaggctgacgatttgtttgttattccgctgtgtcgtaaatgccataacgaactacacgccggggtaaaagattttgaagaaaaacacggtagtcagttgttgttgctgattcgttttttaatgcacgcgagaaattcgggtgttctgaagtggaaagcataa

SEQ ID NO: 15743 - DNA, 510 bp, Escherichia coli
atggtcgggaagtgctgtcatgagcgcactgaccagcgtatccacttcccagccggtgcgggccgatacggcaacaaccggatgtacgggccggaacagacggaataccgcctccgttttctcccgaatgttctgtgcctgtgcgggagaaggctgaatgccggccatatcccattcatggcagggctccgttttgtcggcctgcgtcaccacaaacagcacctgctgatgtccccggtgcagtatgtgtcgccagaaatactcatccacagacagggcacggtcatcggctttaatcagccacagtaccaggtcaagttcaggcagaatgtcacggtacagggcttcatactctgcatccctgtcccggctctcgcccaccccgggcaggtcagtgataatcatgctgtgaccgtggccactcagacggaagcgccgcacttcccgggtgccggcgtgaacatcactgaccggggtgacctccccctgaaacagtgcattacagagtga

SEQ ID NO: 15744 - DNA, 933 bp, Escherichia coli
atggaatggagatttttaggttctctatcagaggccaggaaatctggctgtagcggagtttatcttattgtccataaaggacttttcagtcgtgtggtttacgttggggtaagttgtaatgtaggtagaaggataaccgaacattacgacggttatcttagaggaaatcgaacaatttacgacgctggtcacgacgaagacgtttatcgcttcatgtcagcttataaaattcataaccacacaaaatactatcaagccttggcgaatgattataagatatgggcatctaccacaatgtattctgatttgccgaaaaacatgctagcaaaaagccaaacctttgatactgattggcagagcattgcattagaaaaatatattcctcaactggtagtatgggcccttccaatggcaaagtactgttattcaaatgcaagcaggattgaaagtgtaatccaatcaaagctcattaaatcttttgatttgagaggtttttttaatataaagcaattaagcatattgggtaaaattgaatatccctatatggaaaaggtcaaagttttcattattaacacacctgatttagacccggcatcccagcttatttttagcaatctatataacaaaaaaactgataacaacttctgtaaagagttccgttcacaatttaaaagcgagatttttcagagggaaagtgaaactcagagaaagcgaactatcagggagcgtaaggtatctctttatgaaaattatggcaagccttggactttaaaggaaatggaaaaacttagagtcatgcttgtcgattttgatttgtccccgatagaaatatctgagtatctaggaagagagccgcgctctatatctaaaaaaataagcgaaaatgataaagttactaattataaatggcgagagagcgtcggctggttgtga

SEQ ID NO: 15745 - DNA, 246 bp, Escherichia coli
atgaatatgaatgaagacgagatttatcgccatatccggcaggcactttccagtgcgcctcgtaaccagtacaccgtcgagctgcacctgcaaatgattaaatatgccgacaaactggaacacattacggcaaaagccttttgcgaaggcactggtctgaaccagagcctcggtaccgaattcagcaaaatgcgtaacttaacccatcggttaaaggccgccggtctgaataccgatctgctgtaa

SEQ ID NO: 15746 - DNA, 2439 bp, Escherichia coli
atggctatcaaaaaaaccgaactctattcttccctgtgggcaagctgcgacgaactgcgtggcgggatggacgccagccagtacaaagactatgtactgaccctgctgtttatgaagtacgtttccgataagtataaaggcgatccttacgggatgatcgtgatacccaaaggagccagctttgacgatatggttgcgctgaaaaatgacaaagagatcggcgacaaaatcaacaaaatcatccacaagctggcggaagagaacggcctgaagggcgtcatcgacgaagccgactttaacgacgaagataagctcggcaaaggcaaggaaatgattgaccgcctgagcaagcttgtcggtatctttgaagggttaaatctctccagcaaccgggccgaaggcgacgatctgctgggcgatgcctatgaatatctgatgcgtcacttcgcaaccgaatccggtaagagtaaagggcagttttacactccagcggaggtgtcacgtattctggcgaaggtgattggtattactcccgatactccgcaagatgcaacggtttatgacccaacctgtggctctggttcgctgctgttgaaagtgaatgatgaagcccggcgcggactgtcgattttcggccaggagatggataacgctaccagtgcgctggcgcggatgaacatgattctgcataacaatgccaccgcgaaaatctggcagggcaatacgctgagcgatccgcagtggaaagaggcgaacggcaaactgaaagccttcgattttgccgtggcgaacccgcctttttccaataaaaactggaccaacgggctgacgccgaaaaaagatccgtttgaacgcttcggctggggtattccgccggaaaaaaacggcgattatgcttttttgttgcatatcattaaaagcctgaaaagtaccggcaaaggcgcggtgatcctgccccacggcgtactgtttcgcggtaacgccgaagcgaatatccgtgaaaatctaatcaagcagggctatatcaaaggcgttattggtttgccagccaacctgttttacggcaccggcatcccggcgtgcatcattgtgattgataaagagcacgcccacagccgcaaaggcatttttatgatcgacgccagccggggctttatcaaagatggcaacaagaaccgcctgcgtagccgagatattcaccgcattgtggacgtgttcaaccatcagcgaacggtacctggctacagccggatggtgccctccagcgagatcgccggaaatgattacaacctgaatattcctcgctatatcgagagcggcgagccggaagatttacacgatctgaccgcgcacttacagggcggtattccggcacgcgatgtggatgctttgcaagattactggcgggtattccctgccctgcgcaacgtgctgtttgctgacgaccgtcccggttactgtcgggcgcaggtgaacgcgcaacaggtgaaaccgaccattctggcgcatcaggagtttaaggattttgccacccgcagcctgctaccgtttaaagcgtgggtgaaagaggcaagtctggaagagattcgcaaaggtgataaacccaaagcgctaatccacgatatcagcgaaatgctattggcgcagtacgccaacagtgagttgctgaacaaatacagcgtgtaccagatcctgatggattactggactgatgtcatgcaagacgatgtgtatgcgattatgcaggatggctggcaagccgccgcgcaaatccgcgagcttcagccggtgaaaggcaaagatggcaaaaacatctggaaagaaacgcacgatttcgagtttaccaaacggcgctacaaggccgatgtgctgccccgttcgctggtggaaattcgctgtttcccggaactgctggatgcgctgaaccgcgcgcaggagcgcagtgaagaagccagtcgtcagctagtggaattcatcgaggagcaggcaggtgaagaggatctgctggccgaggcgaagaacgataaagataaggtgacgcaaaagctggtgaatgcccgtctagcacagttaaagaaaaccactgccggcccagatgagctggcagtgctgaaccgctgcctggcgctaattaaggccgaagccagtgcgaaaaaagcgctgaaagccgcacaagaagcgctggatcgggcggtgtttaaacattatcccacgctggatgaagcagcgattaaaacgctggtagtgcaggataagtggctggcaacgttgcaggcagggatcaaggcggagattgagcgtattacccagcaactggcgtcgcgcgtaaaggagctggaagagcgttatgctgaaccgttgctagcgcttgaagcctccgttgaggcgttgagcgagaaagtggccgagcatttgcgggcgatggggctggagtggtga

SEQ ID NO: 15747 - DNA, 1335 bp, Escherichia coli
atggtggatttaatggtgaatgagcaacggtcgagtacggcggggaaagatgtgcctgcggggtataaactgactgaggtgggcgtgattcctgaggattgggattgcgtaccatttggtaatctgtttaaaacaaacacaaagaaaaaaaaagtcagcgattatgagctagtttcatttattgggatgcaggatgttagtgaagatgcacaattaaaaaataatactcaacttccttttaaagaagttaaaagtggttttacttactttgaaaaaggggatgttttattagctaaaataaccccttgttttgaaaatggaaaaggatgtcataccgctgatttacctactaatgtaggttttgggagtacggaatttcatgtattaagggaaaatgaagactccgattctcgcttcatctatttttggacaactgataaaaaattcagagcatcactggaatctgaaatggtgggaagtgcgggacaccgtcgtgtgccgctagttgctatagaaaaatatttgattccatgtcccccaaatttgcaagagcaaagtgctattgctgattcattatctgatattaataattttattctagctctagaaaagcttatcgttaaaaaacaagccattaaaaccgctactatgcagcgactactgactggtaaaacccgtttgccacagtttgcgttgcgcaaagatggctctgctaagggatataaaaagagcgagttgggggagattcctgaagattggaattgtattaatcttggtgagctaggtaattgcattattgggttaacttacaaacctgaagatacatctgattatggtacattggtattacgctcatccaacattcaaaataatcacttagcttatgatgataacgtcttcgtcagcatagaaccacctgagcgtacaattgtgaaagaaggtgatatcttggtatgtgtaagaaatggcagtcgccaacttattggcaaatgcgcattaattgacaaaaatgcgcagggctcagcattcggtgcatttatgtcagtattccgaactgatatatatggatttacatttcaccaattccagtctgatattattcaaaagcaaatcgctgaagttatgggtgccactatcaatcagataactaacaaagatatgttgggctttaaaatcccattacctgaaaatacagaagaacaagccgccatcgccgccatcctctccgatatggacaaggaaatccagatcctgcaacagcgtctggacaaaacccgccagcttaagcaagggatgatgcaggaactgttaaccgggaaaatccgcttaatatag

SEQ ID NO: 15748 - DNA, 657 bp, Escherichia coli
atggcttatgattacagcgccagcctcaacccgcaaaaagctctgatctggcgtatcgtccatcgggacaatatcccgtggattctggataacgggctgcactgcggcaacagtctggtgcaggcggaaaactggatcaatatcggcaacccggagctgatcggcaagcgtgccgggcatccggtacctgtcggaacgggcgggacactgcatgactatgtgccgttttattttacccccttctcgccaatgctgatgaacatccacagcgggcgcggcggcattaagcaacgccccaatgaggagatcgttattctggtcagcaacttgcgaaacgtggcagcacacgacgtacccttcgtgtttaccgacagccatgcttactataactggaccaactactacaccagtctggatagtctggaccagatcgactggcccattttgcaggcacgggactttcgccgcgatccagacgatccggctaaatttgaacgctatcaggcagaggcgctaatctggcaacactgcccgatctctctgctggatgggataatttgttacagcgaagaggtcaggttacaattagaacaatggctgtttcagcgtaatctaacaatgtccgttcacacacgggctggatggtacttctcatga

SEQ ID NO: 15749 - DNA, 1068 bp, Escherichia coli
atgatcacatatacacaaggcaatttactggacgcaccggtggaagctctggtgaatacggttaataccgtcggtgtcatggggaaaggcatcgcgttgatgtttaaagagcgcttccccgaaaatatgaaagtctatgccctcgcctgcaaacaaaagcaggtgatcaccggcaaaatgttcattaccgaaaccggggaactgatgggaccgcgctggattgttaattttccgaccaaacagcactggcgcgctgattcccgcatggagtggattgaagatggcttgcaggacttacgccgctttttgattgaagagaacgtgcagtccatcgccattccaccactgggcgcaggcaacggtggtttgaactggccggacgttcgggcgcagattgaatctgcccttggcgaccttcaggacgttgatatcctgatttaccaaccgactgaaaaataccagaacgttgccaaaagcactggcgtaaaaaagctcactcccgccagagccgccatcgctgaactggtgcgtcgctactgggtattggggatggagtgcagcctactggaaatccagaaactggcctggctgttacaacgcgccattgagcagcatcaacaggacgatatcctcaaactgcggtttgaagctcactattatggcccctatgcgcccaatctgaaccatctgcttaatgcgctggacggcacctatcttaaagccgagaaacgcatcccggacagccaaccgctggatgtgatctggtttaacgatcagaaaaaagaacacgttaatgcgtatctgaacaacgaagccagagagtggctacctgcgctggagcaggtcagccagttaattgacggctttgaatcgccgtttggtctggagttgctggcaaccgtagactggttgctgagccgtggcgaatgtcaaccaacgctggattccgttaaggaagggctgcaccagtggcctgcgggcgaacgctgggccagccgtaagttgaggctgtttgataataataatctgcaatttgccattaaccgcgtaatggagttccattgctga

SEQ ID NO: 15750 - DNA, 3096 bp, Escherichia coli
ttgagtaccgtgggccagcgcgaacgcgccacacagcagcgtctgattcagttttttgttgaagatttaggttaccgccatctgagtcaccgcaccgggtacaccgggaacagcaacatcgacactaatatactgagcgcgtggctaaaacggcgcggcgttaatgatacgttgatcacccgggcgttgcggcaactggattccgccgccgctctgggcgaaggcaaaaaactctattacgccaataaagaggtctatcgcctgctgcgttacggcgtgaaagacaaagaaggcgcaggcgagcagaaccaaaccgtgtggctgattgactgggccaacccacaagccaatgatttcgccatcgccgatgaggtgacggtcaaaggcgagtactgcaagcgcccggatctggtgctgtacgttaacggcattgcgctgggcgtgattgaacttaagcgttcgtcagtgcacgtcagcgaaggcatccggcagaatctcgataatcaaaagaaaacctttatccgcgatttcttcaccactatgcagttagtgatggcgggcaacgatacgcagggcctgcgctacggcaccatcgaaaccccggaaaaatactatctggagtggaaagaagataatccaggcgactatacacataaactcgactttcatttaagtcgtctgtgtagcaaatccaggctgttggatatcgtccataattacattgcctttgatgtcggggtgaaaaaactctgccgccataatcagttcttcggcgtcgaggcggctaaacaacatattgcccgtcgtgaaggcggtattatctggcacacacagggatcgggtaaaagcctgacgatggtctggctggcgaagtggatccgtgaaaatgtgccaaactcccgcgtgttgattgtgactgaccgcaccgaactggatgaacagatcgaaagcgtgtttatgggcgtgaatgaagatatttatcgcacctccagcggcaacgatcttatcgcaacgctcaatcatcctaacccgtggctcatttgctcgctggtgcataaatttggtcgtcgcagcgaagctgaagacaatgcggctaccgacgcctttatcaccgaattacagcagtccctgacgaaaacattccgcgccaaaggcgatctgtttgtttttgtggacgagtgccaccgcacacaatccggcaagctgcataacgccatgactgccattctgccggacgccctgtttatcggttttaccggcacaccgctgatgaagaaagataagaagaagtcggttgaggtgttcggcccttatatccatacctataaatttgatgaagcggtggccgacggtgtggtgctggatctgcgctacgaggcacgcgatattgaccagtatctgacatcagagaaaaaggtcgatgactggtttgaagccaagactcgcggtttgtcgaatttagccaggacccagcttaagcaaaagtggggatcaatgcagaagctgctctccagcaagtcgcggctggagcagatcgttaacgacattttgctggatatggatacccgtccacgcctgatggacgggcgcggcaacgccatgctggtatgcagcagtatctatcaagcctgcaaggtttacgagatgttcagccagaccgagctggcaggaaaagtagcgattgtgaccagctatcgccccgatgccgccagcatcaaaggcgaagaaacgggcgaagggttaacggagaaactctctaaacacgccacctatcgtaaaatgttggctgactattttgaacaaagtgaagagaaggccgccgcacgcattaccgagttcgagcgggaagtgaaacagcgttttattgaagagccggggcaaatgcgcctgcttatcgtggtggataagctgctgactggctttgacgcgccgtccgccacctatctctacattgataaaaccatgaccgaccatacgctgtttcaggcgatttgtcgggtgaaccggctggacggtgaggataaagagtatggctatattatcgattataaagatctgttccgttcgctggataaagcgattaccgattacaccacgggcgcgtttgatgattacgatcgggacgatgtggccgggttgctgaaagacaggctggagcaggcgcaactggatctcgacagcgcgctggagatggttcgcagcttatgtgaacccgtcaaaaccccgcgcagcctgctggactatcagcactatttttgcggtgaatcaggagagaatcagacttcgttaaacgaaaaagaggcgctgcgcctgacattttaccagtgcgtcgcccgtctgctacgcgcttatgcaagcatcgccaatgaaatgccggaagcaggctacactgccgaagaggtagagagcattcgcgccgaagtcgctgaattcgaaaaactgcgctatgagattaagctgaccagcggcgatcttctggatatgaagcgctttgaacccgctatgcgtcatttactggatatgtatgttcgcgccgatggtagcgaagtgctgatggattttgaagagttaagtctgattgaactgattgtcgagaaaggcttggcggcgaccgtcgccctgccggatgatatccgtaataatcaggatgcgatggcggaaaccatcgaaaacaacgtgcgcaaaaccatcgtggatgaaaacccggttaacccaaaatactatggacgcatgtcgcagctgctggatgaactgattacccttcgccgacaaaatgcgctcaattatcagcagtatctggaacgtatccgcgatttgtgtaaacaggtcatccgcccggagcaaaccgccggagcgtgctaccctgccaccatggatacacaagcaaagcgcgccttctatgataacttcggccacgacgaggtactggcgacccgcatagatacgacgattcgctataccaaaagggcagagtggattggcgatcgttttaaagaacgggaaattgccaacgcattacgtgaagagaccgccagctataatattgatattgatgaggtgatagcgcttgcccgtcagcagaaggaatatcactga

SEQ ID NO: 15751 - DNA, 717 bp, Escherichia coli
atgccaatcatgcaaataggctcgttacacttgctggtcaaccgtaaggcgattaagaatctgcatatcagcgtgctgccgcctgatggcaaagtccgcgtttcagcgccggaacatatgacggagacggcgattcgtatggcggttgcttcacgctttcgctggatcagaaaacagcagcaggatttcgccagacagcctcgtcaatcagagagggaaatggtcagcggagagtgccactatctttggggccgaagatatcgcctacttgtgattgagcgtcacgggcgtcacgaagtaaaagttgcaggaaataataagctccagctttatgttcaaccgggaacccgtgatgaaaataaggcattggcgttaagtgaattttatcgacatgaactaaaacagcaggtggctaagcttctacctgaatggcaggaccgaatcggtgttcccctaacattctggggcatcaaaaagatgaaaaccttttggggcacctgtaacactacaacaaaacgaatctggctcaatctggagctaattaagaagccgccggagtgtctggagtatattctggtgcatgaactggttcatcttctggaacgtcaccataatgctcgcttccggttgcatatggatcggtttattcctgactggcgtgagcgtcgggatttgttaaataatatgccgttagcgtttgaggcatgggagtattga

SEQ ID NO: 15752 - DNA, 339 bp, Escherichia coli
atggacgaatcaagaaagcagtttgaagaaagttggttgcgacgtggaggcgaatcttcagaccttatccgttaccctgaaaatcaccatgaaattggcagcggtaatattggtggtcaatacgtgatgaacgatgttcaaggccactggcaaacgtggcaggcatcgcgagcagcttttgaactggatatcgactggcccgaatcgaatgacgacttttggaaagatggtgaagaaggtgcttatgcgatgggttatgaggatgggcgtgacaaaacgataattgcagtaatgaaagctatcagagccgctggaattaaagagaagaattttcgatga

SEQ ID NO: 15753 - DNA, 1377 bp, Escherichia coli
atgaggcaggatatcgaagcgagcgttatcggtggcctgctgattggtggattaactccaaccgccagtgacgttctggcaatgctggagccggaagcgttttcaattccgctctaccggaaagccttcgaagttatccggaagcaggcgagaaacagaaacctaatcgacgcgctgatggttgccgaggcgtgcggagaggagaatttcacgtcaatcctgatgaccagcaaaaactgtccgagtgccgcaaacctgaagggatatgccggaatggtcgcggataactatcaccgccgtctggtgctggaaatcatggatgaaatgcgcgaaccaattcagagcggaaccatcgacgcatcgagtcaggcgatggatgagcttgtaaatcgtctttcagccatcagaaaaccccgtgacgaggttaaacctgtacggttaggggaaatcatcaccgactacactgacacgcttgacaggcgtctgaggaacggagaagagtcagataccctgaagaccggaatcgaagaacttgatgccatcaccggagggatgaacgcggaagacctggtgataatcgctgctcgtcctggtatgggtaaaaccgaactggcgctgaagattgccgaaggcgttgcaagccgcgttattcccggttctgacgtccggcgcggagtgttgattttctcgatggaaatgagcgcattgcagattgcagagcgaagcattgccaacgccgggaggatgtcggttagcgtgctgcgaaaccctgcatcgatggatgacgaaggctgggcgcgtgttgctaacggcatgagtcagcttgcagatttggatgtatgggtagtcgatgcctcgcggttatcggtcgaagaaattcgctcaatcgcagaacggcacaaacaggaaaatccaaacctgtcactcatcatggcggattatcttggcctgattgagaagccgaaagcagatcgcaacgacctcgcaattgctcacatctccggaagtctaaaagcgatggcgaaagacctgaaaacgcctgttatctccctaagtcagctttcgcgcgatgttgagaagcgaccaaacaaacgcccgacaaacgcagatttgcgtgattctggaagcattgaacaggacgcagactcaatcatcatgctctatcgggaagcggtatatgacgagaacagtagcgccgcgccatttgctgaaatcattgtgacgaaaaaccgttttggctcgcttggtacggtttaccagcggttctgcaacggacactttgttgcatgtgaccaggacgaagccagacagatttgcacagcatcaaatgcacctgctgcgcgtggcagacgatatgcacaaggggctgacgtatga

SEQ ID NO: 15754 - DNA, 435 bp, Escherichia coli
gtgttcgacggtgagctgagttttgccctgaaactggcgcgtgagatggggcgacctgactggcgcgccatgcttgccgggatgtcatccacagagtatgccgactggcaccgcttttacagtacccattattttcatgatgttctgctggatatgcacttttccgggctgacgtacaccgtgctcagcctgtttttcagcgatccggatatgcatccgctggatttcagtctgctgaaccggcgtgaggctgacgaagagcctgaagatgatgtgctgatgcagaaagcggcagggcttgccggaggcgtccgctttgccccggacggaaatgaagttatccccgcttccccggatatggcgggcatgacggaggatgacgtaatgctgatgacagtatcagaagggatcgcaggaggagtccggtatggctga

SEQ ID NO: 15755 - DNA, 519 bp, Escherichia coli
gtgcatgcaagagcgcccacctacatcaccacggaagccctgcagcgtatcggtgaactgtatgccatcgaggcagaggtccggggctgttcagcagaacagcgtctggcggcaagaaaagccagagccgcgccactgatgcagtcactgtatgactggatacagcaacagatgaaaacactgtcgcgtcactcagatacggcaaaagcgttcgcatacctgctgaaacagtgggatgcactgagcgtgtactgcagtaatggctgggtggaaatcgacaacaacatcacagagaacgccttacggggagtggccgtaggccggaaaaactggatgttcgcgggttccgacagcggtggtgaacatgcggcggtgttgtactcgctgatcggcacatgccgtctgaacaatgtggagccagaaaagtggctgcgttacgtcattgaacatatccaggactggccggcaaaccgggtacgcgatctgttgccctggaaagttgatctgagctctcagtaa

SEQ ID NO: 15756 - DNA, 906 bp, Escherichia coli
atgaaggcgtttctggctcatgctaggtccatcagtctgtcccgtaatgcatttatgaatgggaatatcagggccgttaaccagagcactgttattatcggcggagatacagtctttactgataaaaatgacggaacaggtaatgatgtcatcagtgttgaagggaaatctgctgccgcaggaacatcctcctatacagggcatatcactctggagcaaaaatcagcactggatatccgcaataattttcgtggcgggattacgtctgaagacagtcatatcaatgtttcttcatcttcagtcctgttctcagaagcatcgtcatttataaacagctccttgaatattcataaaggagaagcgctgaccgctcagggagggctgtttacaagtggaagcattgatattggtgacgctttccttctgcttaccggtacaccagtgaattcagatgatgctgcttttttaccgaccatcaatatggctgatggcggatttaaactgatgtctgattcatcagtactgaaagccagagaccaggcatctgttgttggtgatattatttctgataaacaggccacaatcagcttcggaactgaatcaggtaaagagggcatattgtctgagaaggcatcccggggactcgcggtcggattactgagtggttttaatacggcataccgcggtgcaattcatgccccgtctgcatctgccactgtgaacaatacctggtggcaactgacaggagactcctcacttcgctcgttaaaaaataccggaagtatgacatattttacaggaagtgcagcgaataaagtattccatacactgacggttgataagctgacgacgaatggcactgcttatgccatgcgtacggacctgaaaaatgcggataagctgtga

SEQ ID NO: 15757 - DNA, 222 bp, Escherichia coli
atgtacaggataaaacagctgttcagtgttttactgacattgcgtgactacgatggccaggttgcagaggcactggctatggagcacgccctgaacaaaatgacgaagacgggtatgtcagaagcgtgcgaattgcctgaaagccaaaccggatgcagagagactcatccgaaatctgatttattcaacaaagccgtcaataggttagtatggttatactag

SEQ ID NO: 15758 - DNA, 798 bp, Escherichia coli
atgctaaaggaaataaatgacaataaactaacaacaaactttataagaataaaaagaataactctaaatgcttttacaataatgcacactgataattgtttcatcacactcaaaaatgaaagagattgtattacctgtactaaagacaattttctctttctagaaaaaaatatgacattttcatgtgagatcgtcaaagttaacgaaaaactaccgccatttagtattgtgagtttcgatagaaaatcgcaaatactactgaaagatattttgaaagaaatatatccactctttatggggggctgtgatattcagagagaaaaaataattacggaaaactccattgcacctcagtaccagctatttgagcttattacaagaacaaatgacttaaaactaaaagttattaaatcggcctatcttatagcgacaatgaaaaatcatgcaaagataataagctctttatatgcgtcatgtggaataacctttaccgataaggtaaaaaatgagttaagaaaagatctatcaaagaattggaagataagtatgattgcagataaattcaatatatctgaagtatcagtaagaaagcgcctgagttcagaaaaaacatctttcagtcagttattacttcaggccagaatggatagagcccttcaattaatcctggataatgaattaccgctctcctccgtttcagaaagtataggaatatctagcatgccatatttcattagagtattcaaatatttttttggaataacaccaaaacaattctcaatttatttcagagaataa

SEQ ID NO: 15759 - DNA, 453 bp, Escherichia coli
atgaatctgaaaaactttcttcacaagataagatcaattatagagaagaacaaagcatcgcctgcatggttactgatatcccagctaaatcccgtcattcggggatgggtgaattatcatcgtcatgtattagcaaagaaaatgttccgctatattgatcaccagatatggttaaaagtgtggcaatggtgtgtgagacgccatccaaagaaaggtaaacgctggatcaggaataagtatttcacatatctaaccttgtcttgttacatccaaattgccatcgacagttacaccgttgtgaaaccggctctctcaaaaagggcttataaaggcttgagcggtgtaccgggaaaccggtatgcaccgttcttaggggaggagggcagtccagcaatgaactgtccttatccgacaagcacccgaaacttcgaaatgatttttgcgggttcatga

SEQ ID NO: 15760 - DNA, 942 bp, Escherichia coli
atgtcaactcttggtttaataataccattaaaccccttaattctattgtataatgagttttcaagttttctacctgtgactgatatacctgctttaaatttatttattttaaatttgtttcccaccatcattttcaaattcaacattatattttatatcgcattagcatcaattatctcttacatattttttacggaacgaacaccggcaagcatatatcataaaccactaaacattgtggtcgtacaggtaggcttgtatttaagaaacaatggttttaataataatatttataatgatttagaggcttacattaaaggtaaaaaagttgacttaatagttttttccgaaaatgtatttttcggacataaaaatgactatataaaaaagaaaacagatatcttcatcaataatttaaaagatggtagatataattttaaatatggaatagttatgaatctttatggctataatgatatcaacaatgtagtttctgtattttggcataaaaattcatttatcacccaccaaaagacaaaattaatacctttttttgaaaaaagatcagtatttaactcatatgaaccattgtcgtcatcttttttatattataacaaagaaaaaaaacaaaatatatttaacatcaagcaacatatagtgggtgttcatatatgttatgaggcgctattccctgagatcttcatcccaaaatataatattagtcttattcaatctgattattcacgactgaatggcggttataattatgataatgtgcttatcaatggcagtattctatcaaaatttgctgtcgccccaaacattccattcataaatgtccagaattatggaggtacagttctgataaagaatgactggactatcgatatgggcttgtttaataaatccaaaacagaagcttttttatatgttcaactgtaa

SEQ ID NO: 15761 - DNA, 630 bp, Escherichia coli
atgataaagataagaattaacagtaaacatgtagaaaatcgcactattctaaataataaaacaattgaaataaagaaaggttcgtttaatattataactgggccatcgggagttggtaaaagcactctgttaaatattattggtttattagatcacgagttctttggagaatatttttttttgggagaaaaaatagatgtaaaaaacaatcatgaaactacagacattagaaaaaaatattttggttttacttttcaagactcactaattaatatgaaacagaataccataagaaatttactatgttctgtttcatataatgaattaaaagaggcaagaaaaaaaagtcaagagatgctaatgagagttggtttgtctgagataaatcgtaatgtatcattcctttcaggtggagagaaacaaaggttggctcttgcgcgagcattaataaaaaaacccaatatacttttagccgatgaacctacagccagtttagatatacaaaataaaaaactagttatggatatcttatcggattataatgatgggggaggaactgtaatcatggtaactcatgatcttgagttggttaacgataagatgaatctaattcaattgctgaattcataa

SEQ ID NO: 15762 - DNA, 729 bp, Escherichia coli
atgtgtaatgtttattatggcgtgttacgtggaagccaaattgtaaaatacaaaagtccttttccaggcattgttaacttatctaatatatttgaaggtgatatttttaactctgaatgtacattattttctgtccataatcatgaatacatttctaagagagacattataaataaaaagaaagaaatggagacacgaaagctaacaggtctaaaagattcaagaaaacacttagctgctatgtttgtaaagggctttatctcaaaaaaagatttgcaggagatagagcaggaaattaataatgttgaattatcaattatgagtttagatattgaatcaaaaaacatagaatctttattgagattatcatcaccatcgttgtctgctccctttatcattagagacatatttgtaacggatggacagtatgttaattctggcgatgatattatatctatagaattattgagtaatttctatatagatataaccatagatcctgttgatataaatggtaatttaaaaaataaaagaataagatatcgttctttagttgattcattcactggttctgccacaatttttaaaacaagtcgcgcatacaaaccagatgaagtttcatctggtttacgcttggttaccttattaattcatgggaagtgggaagaattatcaaataatttagatactgcatttgagattttcattgatgataaagataagaattaa

SEQ ID NO: 15763 - DNA, 321 bp, Escherichia coli
atgtcgcaaccaccaataaatccgcttaagaacatgaaaattgattactggtataaagcgcttacagttgttggcgctgcgttgtttgtctttaatggaacgtctttttttgacagatatcccgttgttccattggtttttttgtcctccggcatcttttttattggtttgggggagtggattaatcaccctctcaaagtgagatttattggtcctggagtttggactcgtggatataatcgttcttcgtgcgcactcggtatcatcttcgacatacttggttgtttcctgattgttacaggagtcgtcaagttcttctga

SEQ ID NO: 15764 - DNA, 381 bp, Escherichia coli
atgtttgaacatgtcgccagtaaaatggccgatgttattgctgaatgggagaaaaaacacggcaaaaattactttgaaaatggatatgatgcccgccatgctgcatttttagaagataactttaaaatattatctcagtataataaagagtattctgttgaaagatcagtcctcattacccagcaacattgggatacgctgataggtgagttagcgggtgtcaccagaaatggagacaaaacactcagtggtaaaagttatattgactattatgaagaaggaaaacgtctggagaaaaaaccggatgaattccagaagcaagtctttgacccattgaaaggaaatattgacctttctgacagcaaatcttctacgtggtga

SEQ ID NO: 15765 - DNA, 579 bp, Escherichia coli
gtgctgactgacggtaagctccatgctgatgacacgcctgtcccggtgctgttgccaggcaataagaaaacgaagaccgggcggttatggacctgcgttcgtgacgaccgtaacgccgggtcaacgctggcgccggcggtgtggttcgcttacagcccggacagaaaaggcatccatccgcagacccatcttgcggggttcagtggtgtactgcaggcggatgcatacgccgggttcaacgagctgtaccgggatggccggataacggaagccgcctgttgggctcacgcccgccgtaaaatccacgatgtgcacgttcgcaccccgtcagccctgacggaggaagcgctgaaacggatcggcgaactgtacgccatcgaggcagagataaggggaatgacggctattagacgtcaactagttttgccgactcgcgccaactatactggccgcacccttcagtgcgacatcaagtcgcgcttgttactgccttcgctgtctttttcctgtagctttcacctttcagttcgaacatatatccgtgatggatcagccggtctgccgccgccaccgccatag

SEQ ID NO: 15766 - DNA, 348 bp, Escherichia coli
atgaaaaccctgtcgcgacactcagaactggcgaaagcgttcgcatacgccctgaaccagtggccggcgctgacgtactatgcagatgatggctgggctgaggcggacaataacatcgctgaaaatgcgttgcggatggtcagtctgggccgcaaaaactacctgttcttcggttcggatcatggaggagagcggggagcgctgctgtacagcctgatcgggacgtgcaaactgaacggagtggagccagaaagctacctccgctatgtccttgacgtcatagccgactggccgataaaccgggtcggcgaattgctcccttggcgcgtagcactgccgactgaataa

SEQ ID NO: 15767 - DNA, 423 bp, Escherichia coli; identical to SEQ ID NO: 8048

SEQ ID NO: 15768 - DNA, 582 bp, Escherichia coli
atgaacaactcatggtggcaggaactaatgcattttttcctgcaaggaatgacacttaaacagttgattcatatgctaatcatcctgatcatattgattattgttatgcctgtaagcgtaaaagaatggataaacctgcataatccagaaatccttcctcattactggatgtattacatcctgttgttttgcgttagctatgtgcttaacggcgttgttaattccgcttatcacgctgtgactgtaagaattgagatattcgctgctcagaagcgcaaatctaaagaagagaaatacgtgcaagatttgtttgattcgttaactcttggagaaagagcgtatttggcattcgctgtagccgctaataaccagctaaagacagaaaagggaagccctgaagcaatctcattgctcgaaaaagggcttcttattcgggtaccttctgctactggatatcctgaaatcgaccgttttgttatcccggaacgctatagaaatgagtgctacattaggtttgctgggaagaaagacagtcttatggatgaacttatcgctcaggataagcatggcaaaaacaagtaa

SEQ ID NO: 15769 - DNA, 309 bp, Escherichia coli; identical to SEQ ID NO: 9907

SEQ ID NO: 15770 - DNA, 300 bp, Escherichia coli
atggaacaaacaaattacagcaaactatcacagcgcgacgttgatcgcgcagaaacagatttacttatcaacctgtcaacgcttactcagcgcggtctggcaaagatgattggctgtcatgaatcgaagataagcagaacagactggaggtttatagcttcggtcttgtgtgcttttggcatggcatcagacatcagtccgattagcagagcttttaagtatgcgcttgatgaaatcaccaataaaaaacgcccggtgtgcaagaccgagcgttctgaacaaatccagatggagttctga

SEQ ID NO: 15771 - DNA, 510 bp, Escherichia coli; identical to SEQ ID NO: 8026

SEQ ID NO: 15772 - DNA, 1491 bp, Escherichia coli; identical to SEQ ID NO: 6135

SEQ ID NO: 15773 - DNA, 192 bp, Escherichia coli
atgaattcagcatttgcgcttgttctgacagtttttcttgtttccggagagccagttgatattgcagtcagtgttcacaggacaatgcaggagtgtatgactgcagcaaccgaacagaaaattcccggtaactgttacccggtcgataaagttattcaccagtataatatcgaaatcccggcaggtctttaa

SEQ ID NO: 15774 - DNA, 291 bp, Escherichia coli
atgacgggcaaagaggcaattattcattacctggggacgcataatagcttctgtgcgccggacgttgccgcgctaacaggcgcaacagtaaccagcataaatcaggccgcggctaaaatggcacgggcaggtcttctggttatcgaaggtaaggtctggcgaacggtgtattaccggtttgctaccagggaagaacgggaaggaaagatgagcacgaacctgattttcaaggagtgtcgccagagtgccgcgatgaaacgggtattggcggtatatggagttaaaagatga

SEQ ID NO: 15775 - DNA, 258 bp, Escherichia coli
  misc_feature (239)..(248): n is a, c, g, or t
gtggcttattacagcattggtgatgttgccgaacgttgcgggattaatcctgtcactctccgggcctggcaacgccgctacggtttgttaaaaccacagcgcagtgaaggcggacaccgactctttgatgaagaagacatacaacgcatcgaagagatcaagcgttggataagtaatggcgtccctgtaggcaaagttaaagcattactggaaaccaccagccaggatacggaagatgnnnnnnnnnncggaagatga

SEQ ID NO: 15776 - DNA, 1008 bp, Escherichia coli
ttgcgtcagacccgcacccgtaagccgttccctgaatcactaccccgtgacgaaaagcggctgttgcctgcggcgccgtgctgcccgaactgcggcggttcacggagctatctgggcgaggataccgccgaacagctggagttgatgcgtagcgccttccgggttatccggacggtacgggaaaaacatgcctgtactcagtgcgatgccatcgtgcaggcacctgcaccttcgcggcccatcgagcggggtatcgccggaccggggctgctggcccgcgtgctgacctcgaagtatgcagagcacaccccgctgtatcgccagtcagaaatatacggccggcaaggtgtggagctgagccgttcactgctgtcgggctgggtggatgcatgctgccggctgctgtctccgctggaagaggcgcttcatggctatgtaatgactgacggcaaactccatgccgatgataccccggtccaggtactgctgccgggtaataagaagacgaagaccgggcggttgtgggcgtatgttcgtgatgaccgcaacgccgacggcagcgtgggcaccaaaaacctgttgggtattaccaccagcgtgcactgcatggcagacgttgaggactacgtggttaaaattatcgaacgcgacctgctgccgaaatacctgagcatcgacggcgtggtcgacttgaaccacctctacagctgtggcgtagcgattaatgtaccggccgccgtggtgccaattcgcaccatccataatattgcgctgaacccaaacttcggtggcgaagtgatggtggtgggcatgcagtgcggtggcagcgacgcgttctccggcgttaccactaaccccgctgtcggctacgactctgacctgctggtgcgctgcggcgcaacggtgatgttctccgaagtcactgaagtacgcgatgccattcatctgttaacgccacgcgccatcaatgaagaagtgggcaggcgtctgctcgaagagatggcctga

SEQ ID NO: 15777 - DNA, 465 bp, Escherichia coli
atgagtgaaaagagtcacggcagagaagaaatccgtcttcacattgtttgcgatgtccctgatgaacttattgatttcacgtttgaatggaaaggtctgaagaaattatgcgtggcagtctcctttcggtcaataatagcagaacaaaagaaagagccagaaatgacggtcagatattatatcagttctgctgatttaaccgcagagaagttcgccacagcaatccgaaaccactggcacgtggagaataagctgcactggcgtctggacgtggtaatgaatgaagacgactgcaaaataagaagaggaaacgccgcagaattattttcagggatacggcacatcgctattaatattttaacgaatgataaggtattcaaggcagggttaagacgtaagatgcgaaaagcagccatggacagaaactacctggcggcagtccttgcggggtgcgggctttcgtaa

SEQ ID NO: 15778 - DNA, 648 bp, Escherichia coli
atggcagcgacgcacacactccctctggcgtcaccgggcatggcacgcatctgcctttacggggatttgcaacgatttggccgccgtatcgatcttcgtgtgaaaacgggggctgaagctatccgggcgctggccacacagctcccggcgtttcgtcagaaactgagcgagggctggtatcaggtgcgcattgccgggcgtgatgcaggcgaaaatgaattatctgcccgtcttaatgagccgctggcaaatggtgccgtgatccacatcgtgccgcgtctggcgggagctaaaagtggcggtgtgtttcaggtggtgcttggggcggcgctgattgcggtggcatggtggaaccctgtgggctggctgggggccgcggctgtatcgggcatgtatgcggcaggggccagtatgatcctgggcggagtggcgcagatgctggcaccgaaagccaggacgcccacggcagccagtacagataacggcaaacagaacacctatttctcctcactggataacatggttgcccagggcaatgttctgcctgttctgtacggtgaaatgcgcgtggggtcacgtgtggtttctcaggagatcagcacggcagacgaaggggatggtggtcaggttgtggtgattggtcgctga

SEQ ID NO: 15779 - DNA, 324 bp, Escherichia coli
atgtatataaaagcatatgactcttctcaggaaatttatgcatcacaaataaaagttattgataacaatgatacccatttaaactcttacagaaaaaaacttaaatatgaaagcaggattaatactttagagtcagcaatttctaattcatgcataaattatggattatggtatgaattaggtaaaacatatgaatcttcatgtaattggaatgatgctgtcattgcatatcatgaaggtattatgagaaacaatacatataccaaagatcattattccgcgatgggaattatcaacaggcatgtaatttttttcgtaaaatag

SEQ ID NO: 15780 - DNA, 567 bp, Escherichia coli
atggcggcgatgctgaccggcagtgaacagaactggcgcagcttcacccgttccgtgctgtccatgatgacagaaattctgcttaagcaggcaatggtggggattgtcgggagtatcggcagcgccattggaggtgctaccggtggcggctcatcagcgtcaggtggtgcagccattcaggccgctgcggcgaaattccattttgcaaccggaggatttacgggaaccggcggcaaatatgagccagcggggattgttcaccgcggtgaatttgtcttcacgaaggaggcaaccagccggattggcgtggggaatctctaccggctgatgcgcggctatgccaccggcggttatgtcggtacaccgggcagcatggcggacagtcggtcgcaggcgtccgggaagtttgagcagaataaccatgtggtgattaacaacgacggcacgaacggtcagatagggccacaggcgctgaaggcggtttatgacgtagcccgtaaggcggcaatggatgttgtgaccgggcagatgcgtgatggtggtctgttctccggaggtggacgatga

SEQ ID NO: 15781 - DNA, 477 bp, Escherichia coli
atgcagcagctttcctttctgcccggagaaatgacgcccggcgagcgcagtctcattctgcgggctctgaaaaccctggaccgccatcttcatgaacccggcgtggccttcacctccacccgtgcggcacgagaatggctgattctgaacatggcgggactggagcgtgaagagttccgggtgctgtatctgaataaccagaatcagctgattgccggtgaaaccctcttcaccggcaccatcaaccgcacggaagtccatccccgggaagtgattaaacgcgccctgtatcacaatgccgctgctgtggtgctggcacacaatcacccgtccggtgaagtcacacccagtaaggcagaccggcttatcaccgaacgtctggtacaggcactgggcctggtggatatccgggtgccggaccatctgatagtcggtggcagccaggttttctcctttgccgaatatggtctgctttaa

SEQ ID NO: 15782 - DNA, 306 bp, Escherichia coli
atggaccgtctgtgcgaagactactgcggtggtatctggaatctgtacaccctgaacaacggcggggcatttatggcccccgaaccggatgacgatgatgacgaaacatgggtactgttcaatgccatgaacggcaaccacgctgaaatgagcccggaagccgctggcattgctgcctgtctgatgacgtacagtcatcacgcctgtcgtacggagtgttatgccatgacggtccattattaccggctgcgggattacgccctgcagcatccggaatgcagcgccattatgcgcatcatcgactga

SEQ ID NO: 15783 - DNA, 153 bp, Escherichia coli
atggatactatcgatcttggcaacaacgaatctctggtatgcggcgtgtttcccaaccaggacggcacgtttaccgcgatgacgtataccagaagcaaaacgtttcaaactgaagctggcgcgcgtcgctggttaaccagaaacactgactga

SEQ ID NO: 15784 - DNA, 177 bp, Escherichia coli; identical to SEQ ID NO: 6043

SEQ ID NO: 15785 - DNA, 351 bp, Escherichia coli
atgtaccaaatcaccaaaaacggcttcgttttcctggtgatggggttcacaggtaaaaaagccgcaactttcaaagaagcctacatcgctgagttcgatcgcatggaggaagaactgcgccagaataacgccccgtctcccgacaaaatgattcacggggacggacgcaccctggttatccgtctcgacgaacacggcaatatcaaattcactgaaaccgttcctgacggcgcaatggtctgcaccctggataccttccggttttatctggagaaacaaggatggactcttgtaaaccggagcgcaattaaaaatatgactgtggagcaattgctaaaaattcattgttga

SEQ ID NO: 15786 - DNA, 363 bp, Escherichia coli; identical to SEQ ID NO: 14854

SEQ ID NO: 15787 - DNA, 483 bp, Escherichia coli
atgcccggagagcaggggcagcaggcgctgctggcgtggtttaatgaaggggatacccgagcctataaaatccgcttcccgaacggcacggtcgatgtgttccgcggctgggtcagcagtatcggtaaggcggtgacggcgaaggaagtgatcacccgcacggtgaaggtcaccaatgtgggccgtccgtcgatggcagaagatcgcagcacggtgacggcgacaaccggcatgacggtgacacccgccagtgcttccgtagtgaaagggcagagcaccacgctgaccgtggcattccagccggagggcgcaaccgacaagagcttccgtgcggtgtctgcggataaaacaaaagccaccgtgtcggtcagtggtatgaccatcaccgtgaaaggtgttgctgcaggcaaggtcaacattccggtcgtatccggtaatggtgagtttgctgcggttgcagaaatcaacgtcaccgccagttaa

SEQ ID NO: 15788 - DNA, 483 bp, Escherichia coli
atgcccggagagcaggggcagcaggcgctgctggcgtggtttaatgaaggtgatacccgtgcctataaaatccgcttcccgaacggcacggtcgatgtgttccgtggctgggtcagcagtatcggtaaggcggtgacggcgaaggaagtgattacccgcacggtgaaggtcaccaatgtgggacgtccgtcgatggcagaagatcgcagcacggtgacggcggccaccggcatgacggtaacgccagccagtgcttccgtagtgaaagggcagagcaccacgctgaccgtggccttccagccggaaggggcaaccgacaagagcttccgtgcggtgtcttcggataaaacaaaagccaccgtgtcggtcagtggtatgaccatcaccgtgaacggcgttgctgcaggcaaggtcaacattccggttgtatctggtaatggtgagtttgctgcggttgcagaaatcaccgtcaccgccagttaa

SEQ ID NO: 15789 - DNA, 312 bp, Escherichia coli
atgagagttgagcagaataatttcagggacatgttctccgtttatctctccggcccgccgcagacgcagcatgtgttttgtgtatccccggcggcccgggtcgcgcacgcgggtctggcaggcgaagaatggctgaaagccttcccgctgcaggctttccagtacggtgatggtgggaatgtacgtatagttctggcttcgggacgtgtgtttatcttccccgaaaatccccggcacatggtgcatcagctcttcatgtgtcagtggacggtcacggcgtatctggtttgcataaccaaaacgactggctaa

SEQ ID NO: 15790 - DNA, 219 bp, Escherichia coli
atgactaatccaatcaatatgaataatttttctcaaagtttaaatatagcaaccgcaacgggtgatgaagtcgtttcattagataaacacatcaccaccagtactactgatacagatcaaatacaagcatttatagtttcaacatggatggcatcttttcaaaatgatatgtattcgaaagataatcctatctctccttactatgaactggaatggtag

SEQ ID NO: 15791 - DNA, 396 bp, Escherichia coli
atgaaacatactgaactccgtgcagccgtactggatgcactggagaagcatgacaccggggcgacgctttttgatggtcgccccgctgtttttgatgaggcggattttccggcaattgccgtttatctcatcggcgctgaatacacgggcgaagagctggacagtgatacctggcaggcggagctgcatattgaagttttcctgcctgctcaggtgccggattcagagctggattcgtggatggagtcccggatttatccggtgatgagcgatgtcccggcactgtcagatttgatcaccagtatggtggccagtggctatgactaccggcgcgacgatgatgcgggcctgtggagttcagccgatctgacttatgtcattacctatgaaatgtga

SEQ ID NO: 15792 - DNA, 192 bp, Escherichia coli
atgcacaaagcatctcctgttgagttaagaacgagtattgagatggcacatagccttgctcaaattggagtcaggtttgtgccaataccagtagaaacagacgaagaatttcatacgttagccgcatccctttcacaaaagctggaaatgatggtggcgaaagcagaagcagatgagagagacccggtatga

SEQ ID NO: 15793 - DNA, 207 bp, Escherichia coli
atgcgaaagctgaaaatgatgctcttcggcgcaagcttgataatggtggtcgggtgctcgtcaaaggaaaatgccctgtgccatcctcagccgaaacctccagcgcctccggcatgggcaatgatgccaccgtcgaactctctccagttgctggacgaaacgttctcggtatccgggacggaattatccgcgaccaaacagcattga

SEQ ID NO: 15794 - DNA, 141 bp, Escherichia coli; identical to SEQ ID NO: 7328

SEQ ID NO: 15795 - DNA, 141 bp, Escherichia coli
atgctgaaaggggggatttccggtcgcagtgccagaggaaaacgtatccacacccgtgccattcacagcatcgacaccgacattaagctcaaccgcgcattgtgggtgatggctgaaacgctgctggagagtatgcgctga

SEQ ID NO: 15796 - DNA, 153 bp, Escherichia coli
atgcgcgacaaaaggtgttttctgtttgtgttttttctcctgatacatcgcgatatcggcagcatgcagggcactgtctgcatcggtcgtttcaggatcgacttctactatgccaagactggcaccgggataatacaaatcaacatcacctaa

SEQ ID NO: 15797 - DNA, 612 bp, Escherichia coli
atgagacctgtaaatcgacctccatataatggaactgtttatgcagattataaatcatttttaccttcgctattaactgcatatggcggatattgttcttattgtgagcggccggataaggttgatgtggagcatgttgtcccaaaaacgcatgcaccacttttgattactgattggaacaattttttactgggttgccctcgctgtaaccgagattttaaaaaaagtaagaatactcaacgtataggctatgtttggccagatgttgagaatacatttaatttattgacataccatccagatggtagagtagagcctaagcaggggctgtctgccggactaactgcgcaggtacaggctactattgatttggtatgtcttgatgatggtaaccaagtacaaaaaactttaaatcttggtagaaggagatattttggactcgcgaataaggccaagactctttatctgagtaatttattgagtattgatgaggtcatggatatggctcagttaggatattggtcgatctggtataatgtgtttcaaggtgtacctgctgtcctttcagctttggagaattcctatcctaataccgctataaaccgcccatga

SEQ ID NO: 15798 - DNA, 1329 bp, Escherichia coli
atgaaaatagccaatattagacttacgaattttagatgttttgacgagtttagtgttgattttgacccaagacttacagttctcattgctcgtaatggtagagggaaatctactctgcttgacgcggtagcattagctttaggaccatttttaactcgtttgccagggatcaaagggctaagtttcaagaaaaccgatttccggatcgacgaaaatggagaccagccgtcctatatgcgagtaagttgtactagtacaacgggtataacttgggatagaactgagcgaagagatctgacaaaaaaaacgttaggtagcatcccccaaggggcagcccttaaagccttgaatgattacgtcgatacgttcattgattctcacaatgagaataaacactatacattgccaatttttgtttattacggaactgggcgtggagtgtttgatataccactcagaaaacgtgcatttaacaagcatttttctcgatttgaggcccttgacggtgctcttgaaagcaaaacaaatttcaaaagatttgtgcaatatttttattttcttgaagaaaaagaaaatagattacagaaagagcaacgatcatttgaagtagaaatccctgaattaagggcaatacgcttggctgtggaaaaattactgccagagtttagcaatattcgctcggcagtacctgctggaattatggtcgattggtgtaagcctattggaaatggtgaaacaaccatacaaaagctaaggattgaacaacttagtgatggctatagaacaactttagctatggttatggatattgcagcaagaatggcagaagctaacccctattcgagtgatcctctaagttctgaggggataattctcattgatgaggtagatctgcatctgcatccggaatggcaacgtgagtttctccctagattaatcaacgttttccctcatcttcagttcatagtatcgacgcattcaccatttatcatccagtctgtcaaagaggggatgttggtcgatcttgataaagatgacatttcggatagcccctctttgaataaagaactcagcatcgaagatattgctgagggtgtaatgggaatggaaaaagttcaacgaagtgaattgtttaacaaacaagtcgcagtttcagatagatattatcagttactgaatgaaggaagaagtgaaagcgacccagaggtaaggaagctctccgctgagcttgataaattggaagagttttttggagataacccagcttatgtagccttacttcgtgctgagcgccgaaaaataatggggacacaaggaagtaaacaatga

SEQ ID NO: 15799 - DNA, 687 bp, Escherichia coli
atgcaaaaatccttccgattcaccaattcatccatcaaagcccttccggcaaacacagatacccgatctacagagcttgaggtatctgataccgaagtcattggcctcaaatgcctctcaggtcgaacgggcaacaaacgtttcctcctgcgctacacattccacggtaccaaaaaaagtatcagtattggcagattccctgaaatcgatgtgggaacagcccgtcagatagctcgtcgtcacaaggaggcgattgcactgggaaatgaccctaaggcagagcgcgataattatcgggcgatgccaacgcttagtgagttttttcaccagacctatgttccgttcatcaagcgccataaaaagtcctgggataaggatgttcagcgtttcacgcaatacattgaacctcgtctggggaagatacgttactgcgaccttcaggcccgggaaatccagcaggtgctttttgacatgcttgagggccgtattcacggccagcagtatgcaccgtctacctgtaacagggcactggctattctgaaaaccatgggccgttatgcgctacgacaggatgtcctggagaagaatgaagccgataagatccctttgctgaaggagaataatcaccggacgcgcttttttgacgctgatgagatcaggagaatccttgatgctgcgtctcgataa

SEQ ID NO: 15800 - DNA, 1407 bp, Escherichia coli
atggcaagtatttcatcgctgggagtcgggtcaggcctggatttaagttcaatccttgatagcctcaccgccgcgcaaaaagcgacgctaacccctatttcaaatcagcaatcgtcgtttaccgctaaacttagcgcctacggtacgctgaaaagcgcgctgacgactttccagaccgccaatactgcattgtctaaagccgatcttttttccgccaccagcactaccagcagcaccaccgcgttcagtgccaccactgcgggtaacgccatcgccgggaaatacaccatcagcgtcacccatctggcgcaggcgcaaaccctgaccacgcgcaccaccagagacgatacgaaaacggcgatcgccaccagcgacagcaaactcaccattcaacaaggcggcgacaaagagccgatcaccattgatatcagcgcggctaactcgtcgttaagcgggatccgtgatgccatcaacaacgcaaaagcaggtgtaagcgcaagcatcattaacgtgggtaacggtgaatatcgtctgtcagtcacatcgaatgacaccggccttgataatgcgatgacgctctcggttagcggtgatgatgcgctacaaagttttatgggctatgacgccagtgccagtagcaacggtatggaggtctcggtcgccgcccagaatgcgcagctgacggtcaacaacgtcgccattgagaacagcagcaacaccatcagcgacgcgctggaaaacatcaccctgaacctgaacgatgtcaccacgggcaaccagacgctaaccatcactcaggacacctccaaagcgcaaacggcgattaaagactgggtgaatgcctataactcgctaatagataccttcagcagcctgaccaaatacaccgccgtagatgcgggagctgatagccagagttctagcaatggcgcactgctcggcgactccacgctgcggacgattcagacgcagttgaaatcgatgctgagtaataccgtcagttcttccaactataaaacgctggcgcagattggtatcacgaccgatcccagcgatggcaaactggagctggatgccgacaaactcaccgctgcattgaaaaaagatgccagcggcgtaggtgcattgattgttggcgatggtaaaaaaaccggcatcacaaccaccatcggcagcaacctgaccagttggctttcgacaacaggcattattaaagccgctaccgatggcgttagtaagaccctgaataagttaactaaagactacaacgccgccagcgatcgcattgatgcgcaggtcgcgcgctacaaagaacaatttacccaactggacgttttaatgacctcgttaaacagcaccagcagctacttaacgcagcagttcgaaaacaacagtaattccaagtaa

SEQ ID NO: 15801 - DNA, 1194 bp, Escherichia coli
atgaaaagaaaagttctggcaatgctggtcccggcgttattagttgctggcgcagcaaatgcggctgaagtctataataaagatggtaataaactggatttgtacggaaaagtagcgggcctgcactacttctctgatgatgctggcagcgatggcgacatgtcatatgcccgtatcggtttcaaaggtgaaactcagatcgctgaccaattcactggttatggtcagtgggaatttaacattggcgcaaacggtcctgaaagcgacaaaggtaataccgcaacgcgtctggcatttgcaggtttaggctttggtcagaatggtactttcgactatggtcgtaactacggtgtcgtatatgacattgaagcatggaccgatatgctgccagaatttggtggcgatacctatgctggtgccgacaacttcctgaacggtcgtgctaatggtgttgcaacctaccgtaacaatggcttctttggtcaggtcgatggcctgaactttgctctgcaatatcagggtaataatgaaggatcgggtgggctttgggatcaagaaggttctggtaatggtaataatcgtaaactgtctaaagaaaatggtgacggtttcggtatgtccacttcctatgactttgacttcgggttaagcctcggggctgcatattcaaactctgaccgtactgataaccaacgtgctactggtttaggtgagcaacgctcgaataaatatgctggtggtgaaacagctgaagcatggacagtcggtgctaaatatgatgcgaataatgtctatttagcggcaatgtatgcagaaacacgtaatatgactgcatatggcagcggaaaagacaataacgacattgacagaggtggtattgcgaacaaaacccaaaactttgaagttgttgctcagtatcagttcgacttcggcctacgcccgtccatcgcttacctgcaatctaaaggtaaggatttaggtggttgggctcatgacggcaacggcgacccacgttacaccaataaagatctggttaaatacgttgatattggtgcgacttactacttcaacaaaaacatgtccacctacgttgattacaaaatcaacctgctggacaacgacgacgacttctacaaagcaaacggcatcgctaccgatgatatcgttgctgtgggcttagtctaccagttctaa

SEQ ID NO: 15802 - DNA, 1332 bp, Escherichia coli
atgattatcaaccaggtacctataaaaataaaaatcttcatctttttattttcatgcatctctattatatttttgttactgcatgaaaataatggaatatacataacacaaacaacacaaataagttatagtgttttcattattgggctttttttcataaacctgatgatttttatttttctattgctttactatgtttctaatcagagacaaagttatctcttaattctttcattcgcgtttttgagcaacacgtattatttattagaagtggctattatttctttatctccgttaggtaacgatttatctacaatctatcagaaatcaaatgatatcgcaatatattatctattccgtcagttcagctttatatctataatctttctggctgtttattccaccaatgttaaaaataaaagtattttagaagataaaagaaacataataattgttgttttgtcaatattaattctttttattactccgtttgtagcaaaaaatctaagcagtgaccatataaaatatagtcttaatattatacaatactcgctgaatcgtcatttgtcgacgtggaatatcgtgtacaccaaaataatatcagtattttggcttgtattacttatcagctcatgcatcagcatacgtaattactcaaaaatatggttgtgtataatacttattagtatagtgtcagtatgcaataatctaattttattgtattttattgataaatcccatcctgcatggtacatgacaaaatttcttgaattgatatcaatgatttatatcatttcaacactcatgtattatgttttcaggaaattaaatcatgctaatcatatggcaattcatgatccactaacgaatacatacaatagaagatactttattgactcattgaagaatatatcaaaacaccatgatttctcagtaataatgttagatattgacagtttcaaaagcatcaatgacaaatgggggcatcatatgggtgatcaagtcatagtaatggttaccagaataataaaaaaatccatcaggaaagaggatatattagggcgcttaggcggtgaggagttcggtattatcattaaaggtaatactcaaaaactcttgctatcaattgcagagcgaatcagaaaaaacattgaagagcaatgctcggaaaaattattatcgcatggacctgagaaaataactgtcagtattggttgctttgcttcaaaagagaataatctcagtccatctgaaatgttagtcaatgccgacaaagcgttatatcaagccaaaagaaccggaaaaaacaaggtgataattcactcaaaataa

SEQ ID NO: 15803 - DNA, 1275 bp, Escherichia coli
atgattacgggcttttcgccgtcatataaaaaaattgttattggtgatgatgaaataacgatgcctggcgacaaggttgttaagtttaaacgcgcatcaactgccacatatatcaataaatcaggcgtatttagtgttgctaaaattgatgagccacgatttgaaaaagaaggtttattgattgaaggacagcgcactaactattttgttaaatccaatactcccgctgaatggacgagtaccagcaatatcgataaaactaataatggtgttgatgaatttggtttttcatatgccaaaatgcgaacaaaagataatatgacaggacaatcatctgcacttagtctgcatacatgcagtgcatcccgggggattgatgttagtggcgataataagtattgcactgtttcatgcagggttaaagctcctgatggtcttcgttgtcgtttgcgttttgaaaaatacgatgggtcggtttatacatttttaggagatgcttatttaactttcggaactctgataatagaaaaaactggcggagcagccaatagaatagcagctactgcaactaaagatccggttacagggtggattttctatgaggcaactatagaagctgttgaaggtgaaaccttaattggcgcaatgattcagtatgcgccgaaaaaaggtggtataactgaagcgggagattatatttaccttgcaacaccacaatttgaaaacggcggatgtgcttcatcttttgttattacgacaactgcacccgcaacccgctccagtgatatggtgacgatcccaactgaaaataatatctataatagaccgcttacgtgtcttgtcgaggtcaatagaaattggggcgatattcctcctaatgtagcaccgcgtatttttgatttttctggtgtgccacctattgagtcaattacatacgcttttaacacaactgagaaatattacggtcagctttatatgcaaacttataaagcgtcgacaagtacttacgtttctagtgtgtttgctggtcgagctgatgttcgaaaattcattggtggttttaatatttattctgatggtactaaacgagtagtttctaacggtgaggctactaaaactatgaaaacggagtggacgggcgtaaaaacacggacctttattcgaattggaggtcaagccacatcgggaactcgtcatctattcggccatttgagaaatcttcgtctctggcataaagaattaactgatgcgcaaatgggggagagtattaaatga

SEQ ID NO: 15804 - DNA, 1512 bp, Escherichia coli; identical to SEQ ID NO: 9562

SEQ ID NO: 15805 - DNA, 582 bp, Escherichia coli
atgaatacttttgataatattgttttaaacagtgagaaatataaaaacattacaattaataacaagggtgaaaataatcatatatatattggacaaggttataaagataaaaaattagtaataaattttttagggcgtgatagtgtaattaagttaggtgataatgtaaattttcagggggtaattacagtttcaacaaattcaagagtaaccataggaaataattttgcatctacaggaggtgtcacaattatatgcagagatgattgtaatgtatcaattaatgatgattgtatgtttgcaacatcaattctaatcagaacgtctgatgaacactcaataatagatttgcacactaacgaaataattaataaaaataaagatgttacaattggaaaacacgtctggatatgtgataacgttctggttttgaagggggcaataattggaagtggttcagttataggtgcaaggagtgttgtgactggtactatacctgagaatagcttatgtgttggggttcctgctagagtagtaaagaaagatataagatgggatagaaaaagaccctcaaaactataa

SEQ ID NO: 15806 - DNA, 1029 bp, Escherichia coli
atgacaattctcattactggtggagctggatatattggatctcatacaactgcagcattactcgaaaatggttatgacaatatagttgtcatagataacctttgcaattctgatataggctccattaaaagcgtcgaacgaataacaggtaaaaaaatatcttttttcaacgctgatattagagatgaaatagaattaaataaaatttttacaagatgtaatatttcctccgtaattcactttgccggtttaaagtctgtagctgagtcaaaagatttgccaattgaatattatagcaataatgtatatggcactatgaatcttgtaaaatgcatgctaaaaaatagagtatacaatctaatatttagctcatctgcgactgtttatgggattcctgaaaaaaacccactagatgaaaattgtataaccggtggaacaactaatccttatggttattcaaaatatatatcagaaaatatacttaaagatattgccaaagctaataacaaactaaatattacttgtttgcgatattttaaccctgttggagcgcatccttctggacacttaggagaaaaccctgttggtatacctaataatatcatgccttttattagtggcgttgctatcggaagatttaaaaagttaaacattttcggttctgactataatactaaagatggtacaggtgtaagggattatatacatgtgatggatttagcgtcaggtcatttatctgcattaaacaagaaatggttaacaaatggctttagagtgtataatttaggaacaggcaaaggttactcagtactggagctagtaaaaacttttgaaaagatttctaaccgtaccataaattatgaatttgttgcaagacgacctggtgatgtagctgaatgctggtcaacgccactcaaagcaaaaaaagagttaggctgggaagctaaatatagtttagaaaatatgatagaagatgcctggaggtggcagttaaattatcctaatggtttttattcagttaattcataa

SEQ ID NO: 15807 - DNA, 924 bp, Escherichia coli
atggaaattatcgataatgatccaacctatcatcaggcaagatattttttatgtgaatatctttgggagacatcagggattacaagagagttattacatcatttaaacattctattccttgatatagaaaaaatcagccaacaagcgaaattatttatatgcgcttgttactgtgaagctggtttctattcaaaagctttatcattgtatgacttacatcaaaaggagttctcaaacctgaaaaagtattatttattagaggcaataattgatagccgaagaaacaataacaatgaaaagtttcaaaaaatagaatccatatataaagcacaagctgatttcattgataaaataaaaagagataaaaactttgcggttgttggaaatgggcctgttgagatagggagcaaaaatgggtctattattgatagtttcgatattgtaattagattcaacaactataatttagatcatgagtatagtgttgattatggtacaaaaacaacagtgtgggtgaaatctggatactatcaagatatagacaggcgttacaatggacaatttgaacttgtaattcagtcaggtataaaccctttattcaggaatagctcttttgaggacttcattcttgattttgatgttttaaatattcccttttcaataatacctccgacaatatattatgaattaatcgaaaaaatcaaacattccccatctgctggcttatgtatattatattggatttataaaaacataggcaaaataccaaaaaaaaatatatttggctttactattggagaacaaaaaaacaatacttcagagcattacttcaataatagcaaatctgtggggtattatcctcataactgggatgaagaaaaaaaaatattgaaagaaattattgactttaacgataatcaataa

SEQ ID NO: 15808 - DNA, 741 bp, Escherichia coli
atgatcggttctttgttcagcttaatggtacaaccggcagcagaacgctcggcggacgcatcggtcagctcaaaggcctgctcaactttcagatccggcagaccttcaatttccagaatgcgacctgagaagatgtttttcttgcctttcttctcaacggtcagcagaccttgtttgatcgcatacagcggaatagcgtgtaccagatcgcgcagggtgatgcccggctgcattttgcctttgaagcgcaccagaacggattccggcatatccagcggcatgacgcctgttgcggctgcaaatgccaccagaccagaacccgccgggaaagagataccgatcgggaaacgggtatgggagtcaccaccggtaccgacggtatccggcagcagcatacggttcagccaggagtggattacgccgtcacccggacgcagcgacacaccaccacggttcataatgaagtccggcagcgtgtggtgcgtgttcacgtcaactggcttcggatacgccgcggtgtggcagaaagactgcatcaccaggtcagccgagaagcccaggcacgccaggtctttcagttcatcacgggtcatcgggccggtggtgtcctgtgaacctacagaagtcattttcggttcgcagtacgcgcccggacgaatgcctttcacgccgcaggcacgacctaccattttctgcgccagcgagaagccgcggtcgctctcagcgacatctttcgcctga

SEQ ID NO: 15809 - DNA, 522 bp, Escherichia coli
atgttcaggttagagacgtccacttcaattggcagtgcacccgcatcttccatcgtgttaaagaagatgggtgcaattttaccgccgaggcacaaaccaccgccgcgtttgttcggcacatgtggaatatcatcgcccataaaccacagaacggagttcgtggcggatttacgcgatgaacccgtacccacaacgtcaccgacgtacgccagcggaaaacctttctgttgcagagcttcaatctgtttgatcggaccaacaacacctggctggtctggctcaataccttcacgggcgtttttcagcatcgccagcgcgtgcagtgggatatccgggcgtgaccacgcatccggtgccggagagaggtcatcggtgttggtttcgccagtgactttaaagacggtaacggtcagtttttcagccagcgccgggcgattcaggaaccattcggcatccgcccaggactgcattacctgcttagcatattcattgcctgctttggctttctcttctacgtcatag

SEQ ID NO: 15810 - DNA, 1353 bp, Escherichia coli
atgttgaaatcccccctgttctggaaaatgaccaccctgtttggtgcagtattgctgttgttgattccgataatgctgattcggcaggtgattgtcgaacgtgctgattaccgtagcgatgtggaagatgcgattcgccaaagtaccagcgggccgcaaaaactcgttgggccgctcatcgctattcctgtgaccgagctttatacggtgcaggaagaggataaaaccgtggagcggaaacgaagttttatccatttttggttacctgagtcattgatggttgatggcaatcagaacgtggaagaacgcaagatagggatttataccggtcaggtctggcacagtgatttaacgctaaaagccgatttcgatgtttcgcgtcttagcgaactcaacgcgccaaatatcaccttaggcaagccatttattgtgattagcgtcggggatgcgcgtggtattggtgtggtgaaagcgcctgaagttaacggaacggcgctgaccattgaaccgggcaccggcttagagcaaggcgggcagggcgtgcatatccctttacccgaaggggactggcgcaagcagaacctgaagctgaatatggcactgaatttaagcggtaccggcgatctttctgtggtgcctgccgggcgtaatagcgaaatgaccttaaccagcaactggccgcatcccagttttttaggtgattttctaccagccaaacgggaagttagcgagtcaggttttcaggcgcaatggcaaagcagctggtttgctaataatctcggtgagcgttttgcttcaggcaatgataccggctgggaaaacttccccgcgtttagcgtcgcagtgacgacgccagccgatcaataccaattaacggaccgggcgactaagtacgccattctgctgattgcactgacttttatggcgttctttgtttttgaaacgctcaccgcgcaacgtttacacccaatgcaatatttgctggtggggctttcattggtgatgttttatttgctcttgctggcgctttctgaacatatcggttttaccgtggcatggataatagccagtctgattggggcgttaatgaacggtatttatttgcaggcggtattgaaaggctggcgcaatagcatgttgtttaccctcgcgctgttgttgctggatggtgtgatgtggggactgctcaactctgccgatagcgcgctgttgttgggaaccagtgtgctggtggtggcgctggccggcatgatgtttgtgacccgtaatatcgactggtatgcgttttcactgccgaaaatgaaagccagtaaagaagttacaacggacgatgaattacgtatctggaaataa

SEQ ID NO: 15811 - DNA, 336 bp, Escherichia coli
atggatcaggccggcattattcgcgaccttttaatctggctggaaggtcatctggatcagcccctgtcgctcgacaatgtagcggcgaaagcaggttattccaagtggcacttacagagaatgtttaaagatgtcactggccatgctattggcgcgtatattcgtgctcgtcgtttgtcgaaatcggcggtcgcactacgcctgactgcgcgtccgattctggacatcgcgctgcaataccgcttcgactctcaacagacatttacccgcgcattcaagaagcagtttgcccagactcctgcactttaccgccgggtaatgactccaacttattga

SEQ ID NO: 15812 - DNA, 540 bp, Escherichia coli
atgtcggttttccagttccggaaaacgccgctgcaccgacagggggagcccgtcgagaatactggcaatttcacctgcgatccgcgacaacacgaaagtacagaatgcggtttccaccacttcagcggagtctctggcattcttcagttcctgtgcgtcggcctgcgcacgcgtaagtcgatggcgttcgtactcaatagttcctggctggagatctgcctcgctggcctgccgcagttcttcaacctcccggcgcagcttttcgttctcaatttcagcatccctttcggcataccattttatgacggcggcagagtcataaagcacctcattacccttgccaccgcctcgcagaacgggcattccctgttcctgccagttctgaatggtacggatactcgcaccgaaaatgtcagccagctgctttttgttgacttccattgttcattccacggacaaaaacagagaaaggaaacgacagaggccaaaaagctcgctttcagcacctgtcgtttcctttcttttcagagggtattttaa

SEQ ID NO: 15813 - DNA, 156 bp, Escherichia coli
atgagggacacccccgcgaaccataaacgcggtaaaaacccggtgtgcatcgtttttgattattcccgcacactcacgcagaaggaattccccgtcgggctacggtcatggttaatgcgggaatacggcgacgatacagcgctgctaaaagggtaa

SEQ ID NO: 15814 - DNA, 732 bp, Escherichia coli
atgccatacatatgttctatcattttggtgttgaactcgtttgatgtccgaattggtaaagaagatattttgtttaaaaaaggaagtgctgttctcattgattacaatttaaaagattttttttcatcaaatatagatcatgtaatgatcgtagatgttgaagagaaaacagttaatgatttctttaaaagcaacacactctcacctttttctgtaagaaggttttatccggcatacttgatggtggaatgtgaagatttttcattgttaaagaacttgattgcatgcttgaattgtgatggcagaactgtggattttgttagaaatcaaatatcacttgcatgtcttgctatcttatcttcagagaaaatagtgcaaagttttttatttggatgtcttaatagtttaggaagtaaagttaaggctattattcacacggatatatctgcagcatggagactttgtgatatatcttcaagactgtatctgagtgaaagtctgttaaaaagaaaattaaagcacgaaggcttatcatttagtaagttaattcttgaagagcgaatggtgatggcggaaaggttattaagctacaatttatattctgttggaaaagttgctgagatatgcggttatgaaaacacgtcatattttgtaagtgttttcagaagatattttggtgttcctccccatcaatattcatcaagactttttttagaaaaagacatgatgtaa

SEQ ID NO: 15815 - DNA, 1023 bp, Escherichia coli
atggtcacttttgagacagttatggaaattaaaatcctgcacaagcagggaatgagtagccgggcgattgccagagaactggggatctcccgcaataccgttaaacgttatttgcaggcaaaatctgagccgccaaaatatacgccgcgacctgctgttgcttcactcctggatgaataccgggattatattcgtcaacgcatcgccgatgctcatccttacaaaatcccagcaacggtaatcgctcgcgagatcagagaccagggatatcgtggcggaatgaccattctcagggcattcattcgttctctctcggttcctcaggagcaggagcctgccgttcggttcgaaactgaacccggacgacagatgcaggttgactggggcactatgcgtaatggccgctcaccgcttcacgtgttcgttgctgttctcggatacagccgaatgctgtacatcgaattcactgacaatatgcgttatgacacgctggagacctgccatcgtaatgcgttccgcttctttggtggtgtgccgcgcgaagtgttgtatgacaatatgaaaactgtggttctgcaacgtgacgcatatcagaccggtcagcaccggttccatccttcgctgtggcagttcggcaaggagatgggcttctctccccgactgtgtcgccccttcagggcacagactaaaggtaaggtggaacggatggtgcagtacacccgtaacagtttttacatcccactaatgactcgcctgcgcccgatggggatcactgtcgatgttgaaacagccaaccgccacggtctgcgctggctgcacgatgtcgctaaccaacgaaagcatgaaacaatccaggcacgtccctgcgatcgatggctcgaagagcagcagtccatgctggcactgcctccggagaaaaaagagtatgacgtgcatcttgatgaaaatctggtgaacttcgacaaaccccccctgcatcatccactctccatctacgactcattctgcagaggagtggcgtga

SEQ ID NO: 15816 - DNA, 501 bp, Escherichia coli
atggaaaacatacactcattagagaagataatcaaatatcaacaaaacaaagatcccctgtatccctgtcaggaacatcttttgatacaactctgtatccgtgcaaacaagaaaatacaggataatatatcgagaatgctgggaggatacggaataaattactcaacatatatggttctcaccgtattatctacagcagataatcattgtctttcgccttcagagatcagcagagaactccagtttaccagaacaaacattacccgcattacagattttttagaaaaagccggatatacagaaagaactgatagcaaagaggaccgccgtgctaaaaaaatcagtctgacatctgaaggcctgtcctttattcagggcattacccttacacaaaaccagtacctgaaagaaatctggagtcctctgacctatgatgaacgtgaactgtttaaagacattaatcaaaaattactgacgcattttgctgatgtacgttcataa

SEQ ID NO: 15817 - DNA, 318 bp, Escherichia coli
atgagcaaaactcgtcggactaaacgcaccttttccccggagttcaggctcgaagctatcgagcaagtagttaaataccagcgcgatgtcagagaagtcgcgctggcacttgagctcaatcctgaccatttgcgtaaatggatacggttgtataagctggaacttcagggtattgagcccgctggtaatgccatacccctgaacagcgagaaattcagcagcttaaaagcgcagataaagcgccttgagatggaaaaagaaatactaaagcaggctgccgtgctgatgagcgaaatccccggcaagctgtcgcgctaa

SEQ ID NO: 15818 - DNA, 1389 bp, Escherichia coli
atggaaaacaagtctgctcgtgcaaaggtccaggcttttgggggctttttgactgcaatggtcatccccaatatcggcgctttcatagcctggggttttataacggcgttatttattcccaccggctggctgccgaatgagcatttcgccaaaattgtcggtccgatgattacctatttattgcccgtgatgattggttctaccggtggtcatctggtcggcggtaaacgcggcgcggtcatgggcggaattggtacgattggtgtgatcgtcggcgctgaaatcccgatgttccttggctcgatgattatggggccgctcggtggtctggtgattaaatatatcgacaagtcgctggaaaaacgcatacctgctggttttgagatggttatcaataacttctcattaggtatcgcggggatgctcctttgtctgctgggttttgaagtgatcggccctgcggtgttaattgccaatactttcgtcaaagagtgtattgaggcgctggtacatgcgggttatctgcctttgctgtcagtcatcaatgaaccggcgaaagtgcttttccttaataatgcgatcgatcagggcgtctattatccgctgggaatgcaacaggcatcagttaacggcaaatccatcttctttatggtggcatccaatccagggcctggcttaggactgttgctggcattcactctgtttggtaaagggatgagtaagcgctccgcacctggtgcgatgattattcacttcctcggcggtatccacgaactgtatttcccgtatgtgctgatgaagccactgaccattattgccatgattgcgggcggtatgtctggcacctggatgtttaacttactggacggtggtctggtggctggcccaagtccggggtctatctttgcttacctggcgctgacgccgaaaggctcattcctggcgacaattgctggtgttacggtaggtaccctggtgtcctttgctatcacttcgctgatactgaagatggaaaaaacggtggaaacggagaacgaagatgagtttgctcagtcagccaatgcggttaaggcgatgaaacaagagggtgcattctcgttaagccgggttaagcgtatcgcctttgtttgcgatgcggggatgggctccagcgcgatgggcgcaaccaccttccgtaaacgtctggaaaaagcggggctggcaattgaagtaaaacattacgcgatagaaaacgtgcctgcggatgcggatatcgttgttactcatgccagtctggaagggcgcgtgaaacgtgtgacggataaaccgctgatactgattaataactatattggcgatccaaaactcgacactttatttaatcaattaaccgccgaacataaaaactga

SEQ ID NO: 15819 - DNA, 714 bp, Escherichia coli
gtgaaaatcgaactgacggtgaatggactaaaggtacaggcgcagtactctgatgatgaaattgaaaatgttcataaaccgctactgcgtatgctggcggccttacagacggtaaatccgcagcggcgtacggtggtttttctttgcgctccgccggggacgggtaaatctaccctaaccaccttcttggaatatctcgcgcaacaagacccggaactacccgctattcagacgctgccgatggatggttttcatcattacaatagctggctggatgcgcatcaattgcgccccttcaaaggcgcaccagagacatttgacgttgcgaaactggcggaaaatctgcgccaggtcgtggaaggggattgtacgtggccgcagtacgatcgacaaaagcatgatcctgttgaagatgcgttgcacgttaccgcaccactcgtcatcgtcgaaggaaactggctattactggatgatgaaaagtggcaggagttggcatctttctgcgatttttctatttttattcatgcacctgctcaaattctgcgggagcgcttgattagtcgtaaaattgcgggaggattatcgcggcaagaagccgaagctttttatgcccgaaccgatggccccaatgtcgagcgtgtgctgatgaatagttgtcaggccaatctgatagtagagatgaccgaagaaggcagatatcacttcaaaagctga

SEQ ID NO: 15820 - DNA, 1326 bp, Escherichia coli
atgagagatctataccgtgaccagtatggggaagtgggagagaatcttgtccatgctctggcaagcgagccactgactattgaccagcatcgctatattaatgaggctcttaatgtactcaaggcctgcatgaagcgcattgaagcgggagatagccagccacttatagattatatagatggatttgatgctgctgctggggctaatgaccaagcctctgcaactctatctgttagtgctccccaaaaaacaagcattactgaaggcaaacactgcgtaaccgttgcttctctctttgagcagtacgagcaggaaaacgcccagaactggaagccagcaacattacgagaaaacaaagcttctcatgctgcgttaatcgaagtttttgattatctgggcctcaatgctgacgccaatgtgttagctcgtgcggatatgcttagggttcgggatatcctccagcaattgccgaagaatcgtaagcagcgtttcaaagatgttccgttggttgacctgctaggtcgtgaggataaaaccgattgtctggatattgttaccatcaataataaatatctcattaagatggcggctgttttcaagtgggccgtgcgtaatgacctgattaaaaagaatatgacagaagggctagagcttaaggttccccagcgtaaagcctctgaggcgcgtaatgctttctctacggagcaggtaggacaactactggctgccgcccaagtttactcacagagaccttctggtaagccatatcattattatgttaccgccttggctgctatcactggggcgagactcaatgaaatagcccaactacaggtcaaagacgtcaggaccactgaggcgggaaccgtttatattcatatcaatgaagacgatagtagtctacccggtaagagcatcaagaacgctcatagtgaccgctgtgtgcctctggtcgatggggcctatggttttatattggctgactttatgaggttggttgagacccgtagaggcgctgatggtgatgacgctatggtgttcgatggtcttcgcctcatgaagaacggttacggtgagcaggtgagtaaatggtttaatcggacgttgttgcctaaagtcctcgcagaccgtagcggtttagcgtttcactcgtttagacatacagttgcgacccagttaaaacaacatggggtcgagttggcgtatgcacaggcgatcatggggcatagttcagggtctattacttacgaccgttatgctaaagaggttgaggttgataggctggtcaatgtgatggctgatgtttataaggagattgtggggtaa

SEQ ID NO: 15821 - DNA, 564 bp, Escherichia coli
atgaacaataaacataaacatgcaggtcatattatcactattgaaggccacagctttaagtctaatgagtctggcatgtggaatcttacagaaatatggaaaatcctcggattacctaacaataagctaccctctcagtggcgcggcaaggtaacaaagaggctcaccgacatgcaaaaaatgcacgtcgagaagattggtattgaaagcataacctacgcagacaaacaggctaccctcaagtatgcaggatgggtctctgaagatttcgaggacatggtctatgcagcctttgaggctatccttgagatgcctgaagttgccacggtcgttgctaataagatggtcgaacttggctatcacgctgaagctgagctattggaacgtcataaggacgactatagagaagctatgcagacccttaaaaagattggtaaatgtgttgacggcaggaagcctgagcgcatctacaaggccgtacttaacggtaatctgacgaaatttcaagggttatccatgatttctcgcagcagtgtctggtacgcccgaacagtgaatctatga

SEQ ID NO: 15822 - DNA, 474 bp, Escherichia coli
atgtttgggctttttaagaaaaaggcaaaagcggaaaggtgttatgatgtaacacgcattcaatacgagctggttgtaatgtcatctaagctgataaaaaaacagaccgatatgttcaaagtaataaaaggggagcgagaggaggctttaggagaccctttattatcagcagggtatataacgccatgggtcattggatattgcactggtctcctggatgcagtgactcagacggaggctaacaggatggcatttacatcagaaatgcttgggcttctttttgctgcagttttcggtgatgataagtctcttgaggccatgggaacttatatagcctgtaacgaagcctcctcaccagaccatggatttcatgttacgtatgagctttatatgtctggtctagcgaaagcgtttaatgaggtatgtgaggataaacctgcgataggacttctgaactatttaatgcaggattga

SEQ ID NO: 15823 - DNA, 1638 bp, Escherichia coli
atgaaagggaaatctacattaactcttctgctcgctggtatattttcatgcggcacatgccaggcgacaggggcagaagtgacgagtgaatctgtatttaacattcttaattccacgggggcagcaactgataaaagttatttatcgttaaatccagataagtatcctaattatcgtcttctgattcactcagccaaattaaaaaatgaaataaagagccactataccaaagacgaaattcaaggattgctaacattaacagaaaatacacgaaagttaacgttgacggagaaaccctggggaacatttattcttgcttctactttcgaagatgacaaaacagcggcagaaacccactatgatgctgtctggctgagggatagtttatggggctatatggcattagtatcagatcagggaaatagtgtagccgcaaaaaaggttctgctcactctgtgggattatatgtctacgcccgaccagattaagcggatgcaggacgtcattagcaacccaaaacgactggatggtattcctgggcaaatgaatgctgtacatatccgatttgacagcaactcccccgtgatggctgatgtacaggaagaaggcaagccgcagctgtggaaccataaacaaaatgatgctttaggtctttatcttgatctccttatacaagccatcgacactggtactattaacgctgaagactgggaaaaaggtgaccgattaaaatcgattgcgctgttggttgcttatctggataaagccaatttctatattatggaagattctggagcgtgggaagaagatgcccgattaaacacatcttccgttgcactggtgacctctggactggaacgtttgtcgaacttactctcgaagaaagactctgtttttatctctgatttactgcgcgaagctaaagccaatgaactggatgaacctctttcaacaacgaggttgaaccacctcatagataaaggttatgaaagaataacgctacaacttgatttagggggagaatcccctggttatctggaaaaagataaacattacagagaagctgatgcggccttacttaatgttatttatcctgcaaatctttcaaagataaacaccagaagaaaagagcaagttctaaaaatagttaaaaaattagcaggtccgtatggtataaaaagatacgagaaggataattatcagtcggcaaatttttggttcaatgatattaaaactgataccgatcaaaattcacatgcgaaaagagaaaagagcttcattccatcaacagaagcagaatggttttttgactcatggtatgcaaaatcagcagcaattgtttataaagaatcaagaaaagaagaatatttgaatgactcagtgcaatttatgaatagatcattggcccaaataacaggcgagaatatgattggtgcaaatggcaggagcgtacctgaaatggcacttcccgaaagctataactatatccacaagtcaggaactttgcatgaagcgccaagccctatcattccgctaaactggtcgaaagcctcaatgactcttatgttgaaagaaatgtccaaccttatcatgatgagggaaataaatagttttcataatgaggcggtcctggattaa

SEQ ID NO: 15824 - DNA, 189 bp, Escherichia coli
atggcatttaaacactatgatgttgtcagggcggcgccgccgtcagatcttgcggaaaagctgacacataaactgaaagagggcgggcagccgtttggtagtccggtggccataaccccttataccctgatgcaggcgattgcagcagaaggtgatgtggtggtcagtggtgcaactgagccggagtga

SEQ ID NO: 15825 - DNA, 909 bp, Escherichia coli
atgttagtatttttatacaattcgactaagggaaaaacaatgaggctttacataataggaaatggatttgacatgcgtcatggcttaccaacaggatacaagcactttaagtcgtatgtagaaaaaaatgaccaagatctatatgacgcgatagaagaatacattcctgctggggacgagtggaatgagttagaaaatgctttaggtgaaattgattatgagcttatccttcaaaacagtgagatatttttggcttcatacaataccgatgattggagcgatgcttatcatcacgattaccaatatgaagtaaataaaatcacacaaatgctgtcagctcgtttgaaggagcaattcgctgattgggttaaagggattaacatagccgatgcttacaatcctaagcaatacatcccgcccataccaagagaaagcatctatttttcatttaattatacaaataccttgcagcagatctatgccgttccagacgagcaaatcatacatattcacggcaattgtagttacgatgacgatctcatacttggtcatagttttagggtggaaaagtcactaaatccatatataggaccggatcaagatacaagaatagcagaggcatacgacagaataaacgaatacttcggtaatacattcaagcccagcgaagacataattaaagaagaaaacgtttttttctcatcgcttaaaaatgtggacgaggtcatcgttttaggccactcgctcgccgaagttgacggtgaatactttactgaaataaataaaagcatccaagaaaatgctcgatggatagttgctttatatagaggtgagaaaaaatcaggcagtttagaagattatggtatcagaggctcaaatatttcttacgtacagtatgaagatatctga

SEQ ID NO: 15826 - DNA, 1392 bp, Escherichia coli
atgatgaattatactgatgagtcaacttttcttgaaaagtacaaaccgtttaggaagttttggacaattttatcacctcattatgtatctttaatgcatgcacttgccaaaatgataaggggagggaatccaattcaagaactaccttccaatgatgaggattttcttgcagagtatgaaacctgtctcaaaaattggaaagactcacaaaaaatcatatcttttgagattattattcggctgagagatataaaaagattggaaactgaaaaaaaagagcaccatcgaaacaaggataaagaaaataaagaaaagtgtattgatgaaataagtttaaaaaaatttgaaattcttattcttcgccgttgtattgactcaataatttggagcattcttgatgaagaatactctagtttgcggcgtttacctattaatgcaagcaatgacaatctatcagaagataacataattgattctatggtcgcagccgatcttatcaaccaggacaaacactccgtagcgattgtctctgacatgagcacatttgttcatgtgggagatttagtcacctttaatctactggatggcttccagctcgtggaagttaaaacaggtgaaaagaataatgagctttatgaagctgctgaattttctgttatctcagaatgtccgcactttgaagaaaacttcattaacaatatgcctgataatgatgttaagcaatttaatcgcataaaaaggcaaatcattcgtggcatgaatgttctggaggcgattaatactggcgagggctttgacaactttcatcagtctaaagttaaaatcaatgagatagatcatccgtctgaattttatacccaccgcttagttaaaatgtgggagattattcgcggaggaaaaaattgggcaattgatactattgatgaatgtttgttcttaggtatgtaccgtgattctgaaatgggctttgttgccttcaatggatggatggatagtctcggtataaaaagccctgttgtgaatataaatgattcattctttgaccctttgtctcgaccatttatgagtttgcatctgccaactgaaatgctctccgatctcatgtcgggacaaataatcatcgtcatgtgttttgacaatgaacttttttttcaccgtgctaacaaaacgtacccgggtttatatctccttagcgatgcagcaagaacaaagcagccattagaaaatattcttcgtgttggttcacaagggatagcttcttacgtagatgggaataccagctttttaggtaatggtattgaatcccgtatccttttcgatcagcaacgacccgacaacattattgagtggagctatgctagaagcgatctcaaaaagcaacatgaagcataa

SEQ ID NO: 15827 - DNA, 423 bp, Escherichia coli
gtggcaaaagtttttacacaagaagagcgggaaaaaattaaagggcaggttgttgaactcgtacgccagagtgggcgcgagacgttaagacaactggaaactaaaactggggcaacaaaatatatgatgaacgttctggccagagagctggttgccagtggcgatgtatacaactctggttacgggttattcccgtctgaacaggcgcgtaaggactggcaaaatgcccgtaaaaagctctcaagggcaaagctgaagaaaccatctgcggttgatccggaccttatctggtcattacctgatggagaaatacgtcgttacgacaggcgtcataatatgatttgtactgagtgtcgtaaaagcgaagttatgcagcgcatattgtcgttttatcagggggatgttcggtatttattgaagtga

SEQ ID NO: 15828 - DNA, 192 bp, Escherichia coli; identical to SEQ ID NO: 9355

SEQ ID NO: 15829 - DNA, 549 bp, Escherichia coli
atgagtaatgatagcgaaaagataatatcaacatattcgctcaattttttatcaccagatgatgtgaggaaagaagaacttaaggcatcacaaggtgatagtgatgctgcatttaaattgtacaaatattaccttttttgcgagccaaaatcatacagaaaacagcacgaatggttaataatatcggcaaataatggaaatgctatagctcaatataacttatcaagagaacttgagtcagaaggaaaagtagatgaatcaatacaatggctgaaaaaatcagcggaacatggtaataattatgcacaatatcagatgtcaaaatatttattaaaaataggtgatattagaggatcggaatattatctaaacttatctgcggataacggatgtgtatttgcaataaaagatattatcaaaaatatgatggatagtggaaggtacgatgacgccctcatttgggttgaaaaattgaaaaaattgtatcctgacacaaataccgaactttacatacaaaaaataacgcagaaaaaaaagcaatccaaataa

SEQ ID NO: 15830 - DNA, 4182 bp, Escherichia coli
atgagcggaaaaccggcagcacgtcagggcgatgccacaatgaaaggtggcccgatagtccaggggtcggcaggcgtgaggattggcgcgccaaccggcgtggcctgttcagtgtgccccggcggattcacttccggtaacccggtgaatccgctgctcggtgcaaaagtacagcccggcgaaaccgatttcgcgctgcccggcccgttaccgttcgtgctctcccgcacctacagcagctaccggacgaaaacccctgcgcccgtcggtatcttcggtcctggctggaaagcaccctttgatatccgcttacagatacgcgataacgaactgatactcaatgataacggtggcagaagcattcattttgagcacctgtttcccggtgaggatggcttcagccgcagcgaattattctggctggtgcgcggcggcgtggcgaaactgaatgaaagtcaccgtcttgccccactctggcaggctctgccggaagaactccgcatgagtccgcatatttatctggcgacgaacagtccgcaggggccgtggtggatactcggctggagtgagcgggtaccgggtgtggatgagatgctgcctgcgccattgccgccgtaccgggtgctgaccggcctggtggaccgcttcgggcgtaccctgaccttccggcgtgaggcagttggcgaatttaccggggaaatcaccggcgtgaccgatggcgcaggccgtcagttccgcctggtgctgaccacgcaggcgcagcgggcggaagaggcccagcagcaggcggttgcagccggagcaaaacgaccagatatcccggtttcattgccggactatacagaatatggccgggataacggcatccgcctgtcagcggtgtggctgacgcatgacccggaatacccggagaatttacctgccgcgccactggtgcgctacgactggacgccacgcggtgaactggcggcggtgtatgaccgcagcggtacgcagatgcgccactttacttacgatgataaataccggggccggatggtggcgcaccgttacgcaggcaggccggagatgcgttaccgctacgacgacatcgggcgcgtgacggaacaacgtaatccggcgggtttaagctacacctatcagtatgagaaaaaccgcatcatcatcaccgacagcctgaaccggtgcgaggtgctgcatacagaaggcgaagccgggctgaaacgggtggtgaaaaaagagcacgctgacgacagcgtcacacagagtcagttcgattccattggccgccttcagtcacagacggatgcggcaggccggacgacagaatacagtccgaatgtggtgacgggtctcgtcacacgcatcaccacgccggacggcaggaaatcggaattttactataacaaccagaaccagttaacctcagcatccgggcctgacggactggaaatgcgcaggaaatatgatgagtacgggcgtctgacgcaggaaaccgctcgcaacggcgatatcacccgctacagttatgataatccgcacagtgaattaccctctgcaactgaagatgcgacgggtagccgcaagcagatgacgtggagccgttacgggcagttactgactttcaccgactgctcaggctaccagacccgttatgaatacgaccgctttggtcagatgacggcggtccaccgtgaggaaggtgtcagtctttaccgcagctatgacagccgtggtcagttaatctcggtgaaagatacgcagggccgtgaaacgcagtatgagtacaacggtgcaggcgacctgaccgccattatcacgccagacgacaacagaagcgagacacagtacgatgcgtggggaaaggccgtcagtaccacgcagggcgggctgacgcgcagcatggaatacgacgttgccggacgtgtcatcagcctgaccaacgagaacggctgtcacagcgacttcagttacgatgtgctcgaccgcctgatacagcagagcggctttgacgggcggacgcaacgttaccgttacgacctgaccgggaaactcacgcagaacgaggatgaggggcttgtcaccctctggcactacgacgaatcggaccgtatcacacaccgcacggtgaacggcgaaccggcagagcagtggcggtataacgaccacggctggctgaaagaaatcagccacctgagcgaaggtcaccgggtggcggtgcattacggctataaccgtaagggacgtctcaccggcgagtgccagacggtgcataacccggagacgggggaactgctctggctgcatgagacaaaacacgcctacaacgaacagggtctggcaaaccgcgtcacgccggactgcctgcctgctgtggattggctgacctacggcagcggttacctggcggggatgaagctgggcgacacgccgctgctggagtacgcgcgcgaccgcctgcacagagaaacggtgcgcagctttggcagcatggcaggcagtaatgccgcatacgaactgaccagcacatacacccctgcaggccagttacagagccagcacctgaacagcctggtgtatgaccgtgactacgggtggaatgacaacggcgaccttgtgcgcatcagcggcccgcgacagacgcgggaatacggctacagtgccacgggcaggctggcgagtgtacgcaccctcgcaccggacctggatatcagcatcccgtatgccaccgacccggcgggaaaccggctgccggacccggagctgcatccggacagtacactcacggcgtggccggataaccgcatcgccgaagacgcgcattacctgtaccgttacgatgaatacggcaggctgacggagaagacggaccgcatcccggcgggtgtgatacggacggacgacgagcggacccaccactaccactacgacagccagcaccgtctggtgttctacacgcggatacagcatggcgagccactggtcgagagccgctacctctacgacccgctgggacggcgaatggcgaaaaggatatggcggcgggagcgtgacctgacggggtggatgtcgctgtcgcgtaaaccggaggagacatggtacgggtgggacggcgacaggctgacgacggtgcagactgacaccacgcgtatccagacggtgtaccagccgggaagcttcacgccgctcatcagaatcgaaacagacgtgaccgaactggagaaagcgcagcggcgaagcctggcggagaagttacagcaggaagggagtaaagatggtcacggcgtggtgttcccgcctgaactggtgcggctgctggacaggctggagggggaaatccgggcagaccgtgtgagtgacgaaagccgggcgtggcttgcgcagtgcgggctgacggtggagcggctggcggcacagatcgagccagtttatttgcctgagcgaaaaatacatctttatcactgcgaccaccggggactgccgctggcgcttatcagtactgaaggtgcaacggaatggcgtggggagtatgacgagtgggggaatcagcttaatgaggagaacccgcatcatctgttccagccataccgcctgccggggcagcagtacgatgatgaatcggggctgtgctataatcgttatcgttactacgagccgttacaagggaggtatattacacaggacccgattgggttaaatggggggtggaatttatataaatatccgctgaatccaataaattatgcagatcctcttggcttagccgtagatataaaccacttcccagtcaacgaagacatacgaaattatgcagagaaagtttggaataatcctaatatcattacaattggaacacatggtgatcctcaatcagtatatgatgaaaattataataagatagatgtcaagacattagctaatgaggttcgaaatcatcctaaatttaaacctggaatgtcagtaagactgttatcctgtaatacaggaaaaggaaataactcttttgcacagcaattggcagatgaactaggtgtgagagtctatgctcctgaccaatatgactggtactattcaaatggtaaggtagagccttggggaggattctatgatgcaaacaatcaattgcaaatggacacgaatcagcctggacatgagtttacattcaagcgaaggaaaccatag

SEQ ID NO: 15831 - DNA, 462 bp, Escherichia coli
atggcgactactctcacctctgaatgcaatttacttgctgttccctttagtgccgctaccgatttcaccgatctggcggagtactgcgatcgcgttgccacaacgctcatcgagtgctgcgaaccggcgctgaaaacggcgctctgtggcaggcttaatacctgtcttgcactgttgcggcccacgctgaacgagccgatcccaccacatctgattgacgggtttattacgaatgatcttcccgatgtttcacccggttttgagcctgatgcaggatcactctgcgattactgcctggcgctgacgcagatactgaacggccacgtgctgctgccggaaaccgaaaccacgctgaccgggctgctgtgcgaactggtctggtattttgccgccaatctgaacgccccacgctggatatgtactgctgacggcatacaggttatcgacgggaggccagcatga

SEQ ID NO: 15832 - DNA, 189 bp, Escherichia coli
atgatgcaacccgactggcaccccgccgatattatcgcgggcctgagaaaaaagggaacatcgctggctgaggtttcccgcagggccgggctggcgtcttccacgctggcaaatgcgctgacccgctccaggccgcgcggcgaaaaactgattgcggatgcgctggaaacatcaccggaaattatctga

SEQ ID NO: 15833 - DNA, 618 bp, Escherichia coli
atgagtaaattaagcagtgaaatgaaggcgctggcgaagaaagcgggcggcagcttcaaaacggtgaatgaccgtatccatattacaaaacggttcagtgaacatttacgggcgctgaatatccagatccagcgggtggagcagatcaaggttcgccatatcgaatgctacattgaggaacggctggagctggatattggtttacgaacgttgcaaaacgaaatggcagcgttgcgggccgtgctgagacaggctggacgcaggcaggtgatggagaaagcccgtactcaggacgcagggctggcagcagcgctggagattgcgcggctgatggggctgcgttcgcaggaggcggtacagagttcacagtcgctgaaaacgtggctgaaagccatttcccgcggtgaaacccggctaaaagtggtatttggcaccaaaggcgggcgtccccgttatacgacagtcctggatactggcgcagggattcagcgaaaaggagtcactggcgctgacggcgacggatctgggtcatggcgacggtcgcggtcgctgggtgaaacaggtgtacggctaccgctggagggaggaatgactgaattcatgaatgtcgcaaaatag

SEQ ID NO: 15834 - DNA, 567 bp, Escherichia coli
atgtacagtgagaaaagcctcacctggaacggtatcacccagcaaaaccgtaacgggttattgtgggataaaaccatgaatgttgacggcctgaaaacgggtcatacttctggtgccgggtttaatctcattgcttcggctgtagatgggcagcgtcgtctcattgcagtggtaatgggggctgacagtgcaaaaggtcgtgaggaagaggcaagaaaattactgcgttgggggcaacaaaactttactacggtgcaaattttgcatcgtgggaaaaaggtcggtacggaacgcatctggtatggcgataaagaaaatatcgccctgggaacggaacaagagttctggatggtgctaccgaaagccgaaattccacatatcaaagccaaatatacccttgatggtaaagaactcactgcgccaattagcgcccatcagcgggtaggggaaattgaactttacgaccgtgataaacaggtggcgcactggccgctggttaccctggaatctgtcggggaaggcagcatgttttcccgcctgagtgattatttccaccataaggcttga

SEQ ID NO: 15835 - DNA, 582 bp, Escherichia coli
ttgaaacgccgtcttattattgctgcttctttgttcgtttttaacttatcgtctggttttgcggcggaaaacattcctttttcacctcagcctcctgagattcatgccggctcctgggtattgatggattacaccaccggtcagatcctcaccgcgggtaatgagcatcaacagcgcaatcccgccagcctgacaaagctgatgacgggttatgtcgtggatcgcgctatcgatagtcatcgcattacgccagacgatattgtcaccgtggggcgcgatgcgtgggcgaaagataatccggtgtttgtcggttcttcactgatgtttttgaaagagggcgatcgcgtatcggtacgtgatttaagccgtggtttaattgtggattccggaaatgacgcttgtgttgcactggctgactatattgccggtgggcaacggcagtttgttgaaatgatgaacaactatgccgagaagctgcatctcaaggatacgcattttgaaacagtgcatggtctggatgcacctggccagcatagctcggcttatgatttagctgtgctttctcgcgctatcatccactga

SEQ ID NO: 15836 - DNA, 1005 bp, Escherichia coli
atgcgtatcaaatataaagataacggttatatattatgttttctattatgtttcattttgagctacttagttttactcaaatctgactactttcctgctgattttctgccatatacagaaatatacgatgggacatacggagaaatcaataatattgagcctgcctttttatatttaacacggttgtttcattatttaaatttcccctatatattttttgcaatgttagtttgtgccttatgtttaagttggaaaataaaatatgcaagaaaaataattaaagatagttatatatatttattcttgtatgtatatgtatcattttatgtgtttttgcatgaaatgactcaattgcgcatagcaattgcagtcactatgtgctatgtgtcggtttattattacttttataaaaattgtattaaacatgcactgccatggatggtgttggctattttgtttcattacagcgccttgcttttatttatgtcattatttatatacagttataggaggttattaatagtaattatagggtttgtaatatgtatgagctttttaaacgtgtatgcagatacaattgcactatatttgccaaatgaaaaaatagtaaattatttatatagtatttcatcgtcattagacaatagaaatgatttggcaatattcaacctgaataatataatatttttatcaatatttattttgatcttttatcttagccgatatataaaattaaatgataatgaggcgaagtttattaagtatgtgcaatgttcaggaatattagccttttgtattttctttctggctagtggagtcccggtcattgcttatcgaactgcagagttgctgcgaatattttatccgatggctttagtattaatcctttcgcatataaaaaataataatatgcgttattttattgcagtcattatagttatcctttcaggcttaatgttgtttataacactaagggctgtatcaatagttggtcaaggattataa

SEQ ID NO: 15837 - DNA, 1011 bp, Escherichia coli; identical to SEQ ID NO: 7289

SEQ ID NO: 15838 - DNA, 1128 bp, Escherichia coli; identical to SEQ ID NO: 8783

SEQ ID NO: 15839 - DNA, 549 bp, Escherichia coli
atgaacgtaattaaaacagaaattcctgatgtactgatttttgaaccgaaagtttttggtgatgagcgtggtttcttttttgagagctttaaccagaaggtttttgaggaagctgtaggccgcaaagttgaatttgttcaggataaccattcgaagtctagtaaaggtgttttacgcgggctgcattatcagttggaaccttatgcacaaggaaaattggtgcgttgcgttgtcggtgaagtttttgacgtagctgttgatattcgtaaatcgtcatcgacttttggcaaatgggttggggtgaatttatctgctgagaataagcggcaattgtggattcctgagggatttgcacatggttttttagtgctgagtgagacggcggagtttttgtataagacgacaaattattatcatcctcagagtgatagaggaataaaatgggatgatccaagtatcaatatttcatggccagtcgattcacaagtgctgctatcagctaaagataataagcatcctccattaacaaagattgaaatgtatagttaa

SEQ ID NO: 15840 - DNA, 474 bp, Escherichia coli
atgaaaacattgtctcagaacaccaccgcttcggcctgtgcaccggagactggcctgcaacaactggttgccaccattgtccctgatgaacagcgcatcagcttctggccgcagcattttggcctcattccacagtgggtcaccctggaaccccgtgtcttcggctggatggaccgtctttgcgaaaactactgcggtggtatctggaatctgtacaccctgaacaacggcggggcatttatggcacccgaaccggatgacgatgatgacgaaacatgggtactgttcaatgccatgaacggtaaccgcgctgaaatgagcccggaagccgccggcattgctgcctgtctgatgacgtacagtcatcatgcctgtcgtacggagtgttatgccatgacggtccattattaccggctgcgggattacgccctgcagcatccggaatgcagcgccattatgcgcatcatcgactga

SEQ ID NO: 15841 - DNA, 477 bp, Escherichia coli
atgcagcagctttcctttctgcccggaaacatgacgcccggcgagcgcagcctcattcagcgggccctgaaaaccctggaccgccatcttcatgaacccggcgtggccttcacctccacgcatgcggcacgggaatggctgattctgaacatggcgggactggagcgtgaagaattccgggtgctgtatctgaacaaccagaatcagctgattgccggtgaaaccctcttcaccggcaccatcaaccgcacggaagtccatccccgggaagtgattaaacgcgccctgtatcacaatgccgctgccgtggtgctggcacacaatcacccgtccggtgaagtcacacccagtaaggcagaccgccttatcacggaacgtctggtacaggcactggccctggtggatatccgggtaccggaccatctgatagttggtggcaaccaggttttctcctttgcggaacacggtctgctttaa

SEQ ID NO: 15842 - DNA, 465 bp, Escherichia coli
atgcgttcttattttcaacaaataaatcgaatttctgaacattatcttaatcatcttgatgtgatcattaaagaattcgaactaccatcaacatggcaacccaaaggtgtgtataagcttattgttactacaactatgctcggtgggaaatatcatgtggatgatacatatgtagcggacaaatatgcattatctagtttttttcaacgaatacctggagtgatatatcaaacaaatgaaaatggaaaaatggcgaaaaatatcattgatgggtttgagtgttgcgaaggggaaatcactatcgataagtttatagattatctttcctctttgcccagtattaatgctgtacgtaaaaatataaaaaaattaacttatagtgttcgatttaatgaaaaattagtccatcacccttattatgattcttggacttttggcccatatattcgtaagggaaatgattag

SEQ ID NO: 15843 - DNA, 345 bp, Escherichia coli
gtgtttgacggcattggcaaaaacagcgagggcttgactcaggtatttaatgacgtacacaaatacaaccccaaaaccaatagctgggttaaattgatgtcgcacgcgccgatgggcatggcgggtcatgtgacatttgtacacaacggcaaggcttatgttactggcggtgttaaccagaatatcttcaatggctattttgaagatcttaacgaagctggaaaagattcaacataccgaacgccggagaactggacgacgacaccacgaagcagtcatttcagtcgggggatgattgtagacaaatttgttgacgctattttgcggttttggcgcgaaaggtga

SEQ ID NO: 15844 - DNA, 228 bp, Escherichia coli
atgaataaagcaataacggtgcttgctataatgatggcttcattttccgtaaatgcgtatgtattaccggaaacgccggtgccatttaaaagtggtaccggagcaattgataacgacactgtctacattagtttaggtagcgcaggtacggcatggtacaagctggagaaacagaccaaagataaaaaaatggacagcgttagctgcatttcctggtggaccgagtga

SEQ ID NO: 15845 - DNA, 1104 bp, Escherichia coli
atgaaattatctatcgacatttcagaacttattcaattagggaagaaaatgttaccagaaggagtcgatttttttctggatgaatcccctattgactttgatccaatagatattgagttatccacgggtaaagaagttagtatcgaagatcttgaccctggtagcgggcttatctcttatcatggccgccaggttcttttatatattagggaccattcagggcgttatgatgcggctatcatcgatggcgaaaaaggaaaacgttttcatattgcctggtgcagaactcttgatgaaatgcgccataaaaatcgatttgaaaggtatcatgcaactaaccgcatagatggtttattcgaaattgatgatggttcaggtcggagccaggatgttgatttacgagtatgtatgaattgtctggaacgacttaattacaaaggaagtattgataaacaaaggaaaagagagatttttaaatcattctcattaaatgagtttttttcagattatagtacctgttttcgtcatatgcctaagggtatctatgacaaaacaaatagtgggtatgtcgaaaactggaaagatatatcaaaatcaatacgagaaaaggccaagtatacttgtaataattgtggtgtgaatttatcaaccgccaaaaacttgtgccatgtccatcataaaaatggcatcaaatatgataatcaccatgaaaaccttcttgttctgtgtaaggattgccatcgtaaacagcccctccatgaaggtatattcgttacccaagctgagatggctatcattcaacgtttacgttcccaacaagggttattaaaagccgaatcctggaatgaaatatatgacctgactgatccatcagtacatggtgatattaatatgatgcaacataaaggctttcaacctcctgttcctgggttagatcttcaaaactcagaacatgaaattattgcaaccgtagaagcagcatggccaggccttaaaattgcagttaaccttactcccgccgaagtcgaaggatggagaatatataccgtgggtgagctggttaaagaaatacaaacaggagcctttacgtcagcaacgttgtaa

SEQ ID NO: 15846 - DNA, 708 bp, Escherichia coli
atggataagattatagggaaacaattacctaaaaaagatcaagataatgaacactgggtatccatgtcagacctaatggcagggctgatgatggtttttatgttcatatctattgcttatatgcactacgtacgtattgaaaaagaaaaaattaaagaagttgccgtagcctacgagaatgctcagttacagctttataatgctctggatattgagtttgcaaaggatttgcaagactgggatgcagagatcgataagcagactctggaggttcgatttaaatcaccggatgttttatttggcttaggaagcacagagcttaaaccaaagtttaaactcattcttgacgacttctttcctcgctacctaaaagttcttgataattatcaagaacatattactgaagtccgcattgaaggtcacacaagtactgactggactggaacaacgaatcctgatattgcttattttaataatatggcactatcacaaggtcgtacacgtgcagtattacaatacgtttatgatataaaaaatatcgcgacacacaaacaatgggttaaaagtaaatttgccgcagtaggttattcatctgcacatcccattcttgataaaaccggcaaggaggatcctaatcgctctcgtcgtgtcaccttcaaagttgtaacaaatgccgagttgcagattagaaagattattcaggagtaa

SEQ ID NO: 15847 - DNA, 1653 bp, Escherichia coli
atgttagcgcagctttttgagcagttgtttcaatcgatagactctacactgatcaccaatattttcatctgggctgttatattcgtatttttatcagcgtggtggtgtgacaaaaaaaatatacatagtaaatttagagaatatgctccaaccttaatgggggcattaggtattctgggtactttcattggtattattattgggttactcaattttaatactgaaagtattgataccagcatccccgtattattaggcggcctaaaaacagcattcattacaagcattgtaggtatgttttttgccattttatttaatggaatggatgctttcttttttgccaataaacgaagtgcgttagcagaaaataaccctgaatctgttacacctgaacatatctatcatgaattaaaagagcagaaccagactctgactaaattagtctcgggtattaacggtgatagtgaaggttctcttattgctcaaataaaattactacgtactgagattagcgattcctcgcaggcacaattagctaatcacactcatttcagtaataagctttgggaacaacttgaacaatttgcagatctaatggcaaaaggtgctacagaacaaattattgatgctttacgacaagtcattattgattttaatgaaaatttaactgaacagtttggtgaaaactttaaagcacttgatgcctctgtaaaaaaacttgttgagtggcaggaaaattataaaacgcaagttgagctgatgtcagaacaatatcaacaaagtgtcgagtctctggttgaaacaaaaactgcggttgccgggatttgggaagaatgtaaagaaattcctctggctatgtctgaactgcgtgaagtgcttcaggtgaaccaacatcaaatcagcgaactctcccgccatttagaaacctttgtcgccatccgcgataaagcgacaaccgtattacctgaaatacagaacaaaatggctgaagtgggtgaactgctgaaatccggagctgcaaatgttagtgcatctcttgagcaaaccagccagcaaatacttcttaatgcagattcaatgcgcgtggccctggatgaaggtaccgaaggattcagacaatcagttacccaaacacaacaagcatttgcctcgatggcacatgatgtcagcaattcctccgaaactctaaccagcacgttaggtgaaacaattactgaaatgaaacaaagtggtgaagaattcctgaagtcactagagtcgcactcgaaagaattgcatagaaatatggaacaaaatacgactaatgtaattgatatgttcagtaagactggtgaaaagattaaccatcaactatctagtaatgccgataatatgtttgattcaatccagacatcatttgataaggcaagtgcagggctgacttctcaagtcagagaatcaattgaaaaatttgctctatccatcaacgagcagttacatgcttttgagcaagcaactgaacgtgagatgaaccgtgaaatgcaatcattaggtaatgctctgctttcaatcagcaaaggttttgtcggtaactatgaaaaacttattaaagattaccaaataattatggggcagttacaagcattaatttctgctaataaacatcgagggtaa

SEQ ID NO: 15848 - DNA, 3360 bp, Escherichia coli
ttgcttgtgaaaactccagttaacccacttttgcaatggcttaacatgttttttagtcgccgttcattatccggagctgatggacgggcgttatatgcttaccgttgtactgatacagagtacgaaagtttggcagaactactgcgtacatatgccccccgtagttatccaagaacgatattcatttcctatagcgatgttctatttagcatatatgccgcagagtttatccgccggactcatacggtcggacaccctaaatgggacacaattttagattctattgactggaaagttccgtatgttcatcgacagaagctggttaatgatggcattcgctactggaaaagaaagataagaaacctggggcaagcttcgggttatctgcatacactggcttgtgaaggtggtttacctatccgcatgattgaaaatgagagcggttatttgattacctatttcagaaggatatatcaggcgcttcgtgggcaagcatctcaatatcctgccgctaaaattgcacaagaattaggcgatacgattcctgtcacaatgcaaaacgaactggtctatgaaatagccggtgaattctgcgagactctctgccgattacttagtgagcatccacctcaaagcagtgatcccgtttctgcattacgtaagctctctccagactggcatcttcaacttccactcgttctccccgaagcgaatgctgcagagattgtaaggcgattactttctcaatcttctgaaatacgcagtgcaagtagtcttcaggttgaaagaatctgggtcgatgttgatgacagttggtattgtgatgcccggttccgattcccggccacaatgcgtacagaacagttaacctctttgtttgaatgcaatattcagccggagcagacccgactcatcatttcaggaaaatggagaaatggcggggcaaggttggcaatgctaagccgttatgagcagcaagattggcgggtcgagttattacctattgcgatgcaaaagctctctggtgcagatgcaatggccgaaatctcgttgtcgcttcatgaaggtccaattctgttaggccacacaattccaaaaggcggttatgaacttactgaagaactcccctgggtttttgaagcgatgaatgagagtgaatcgcagctaaaacttgtcggtatggggtctgtgagttccaggctaaatgctctgtttatttcgctaccgaaaaatagccatttagatattagtggagaaggtgagtttgatatcccaaggttgctgaaaaacagtgaacgcagcttaactaaaataagtggagtatttagcgttgttttacatgatggtgcagtttgtacaattcgcacccagcaactttatgattctgcgattgaatattatattaaatcgacagaagttgaactggttaaatcggattatcctgtccatcgagcctggccgaagatcggttggaaaaaggatctgcaatatggcattgtaccggagaaagaacttttttggcgttccattcgttcaggtaacaatgcctggcattctgtcgcatcagaaatgccaaaaggacagatagaagtcagacgaatagttaatgatgaggttttatttagcggtaaagttgtagttttaccagcagacttcgatattaatattatacctgagagtgttcagcaaggcatcataatgctttctggtataacggatactagaattgacaaatattcaaacaatgaaaaagtaacacttaagtccgattattcacaaaacgagtgtgctatttattataattcatcggagatgctggaaaataccgttgatttacgggtctcctggaaagatggttctaatcttaaactattattacctaagccggttagcggtggccgatttgtaactcatgatggttctgttcattttgatggtgtggcatctatagcgcatttgcatggaatagatgctgagttgttaaccatatcttgtgctggaagaggatatcttaatatcgagttgttggatgaaaatccagtagctgaaaaattccgttatttacatgccgaccttcctcttttatcaggatgcaatgacaaattaaaacaaatttcactttatgagaactataatttgctaaatgctatgctggcatgtgcatggaacagcaatagtacattatgtgttgatttttactctgacagatttggaaaggataaagcaacactcagtattaaacgctacgatggtagttttattgaacacgatcaagggttactggttgatataaaaaattctgttgtttttcctgcaaatagaatagacgagttggttgttgatgctatttctcttaaggatcctggcttacacatatcgttgctaaaaaaagatgaatttgcttatgatctttcagctctgaatgttcaggatagcccatggttaattgtggggaaacttgatggtacagctcgcattgcaccagtaattaaatgggggctacctgtattacagacaaatgatttattacttaatgctctatgcgaagcggattccgaacagcgaaaaaaatattttaatgagctaatttttgaaatagataacaatcctttgcaaaattattgctgtttattaacggagtatattaagaaatacaaaatgaataatggcttatccttgctggatctggatttgttcagaggtatttcgagtaattaccgcgtggttgttcagttgttaatatcatcatgtctttctggtgatagcgatacgatttatgatatacaggacgaattacccttttcatggggatggattcccgtttcaatctggaaagatgtttttcaaaagtgttgggcttatctggaaaaacagattaacgataaaacattagcattacatatattgcaaccctttattgcttttatgaaccatcgtgcacatatcgatcgtcggctggctcccattgcgaatatgttacttacatatagcgaactcctaccagccggttgtaatgtcttgccaactgttagtcgtgagcagtttaatgaagctaaacagatgctattaaggaaccccgacagctttgggcgtatcagtatcttccctaaagaactttggtctagtgctattactccagagttaaaatctgtttttaataagctttggattgaagataaatatcactcacggcttgaaaaacgttttaatttgatgttagtcgcagcgctgttaacccaaaaagataataacttgatatatcaactgtctgcgctttttgaattccactatcagcaagccccgcagcaattaggggtaatctatcaatattattttgaacaagcaggagtatgtcattga

SEQ ID NO: 15849 - DNA, 6315 bp, Escherichia coli
atggacgttcagcaactgcattatgcgccacttctaaatcagcttcatcagcgcgcggtgaggtcggtggtaagtcagttggcattgcggagcaagtcgttgactcattatctggaatcacaatatttccagcctcccggtcaggaggggtcactgcttgcagacccggtattcgaaagcacgttcggctggatgcctgcggatgaaacaatggaggatttgcgggacaagctaatttccagcccgctggttgatgcattgagcaaagcgccggtgccatttcgtcatcaacttacggcgtggcgaacgattctggaagacaaaaaatccttgttagtgagcagcggtacgggatccgggaaaacagaatgctttatggtaccggttctagaagatcttattcgtcagcaaaaatcgacccgtcagtcactaacagggacacaagctattttcttgtatccgttaaatgcattaattaacagccaacaggagcggcttcgtgaatggacgcgcggatttaaggggaaaatacgcttcgctctatataatggcgaaacccggcataccaaatacgaagttcaggaagatcagttgaaagtacctgaacaagctttgagtcgggaagccatttacgaagcaccaccttccatcatggtgacgaataccaccatgctggaatatatgctgattcgtcgtaaagatgccccaatcatcgaaaagtctcaggggatattaaagtatatcgtcctggatgaagcccatagttatattggttctcaggctgctgagttagcgctgcttttacgtcgtgttatgcaggctttcaatgttggacctggcacagataaacctgtgcagattatcgcgacctctgccactattggtgaagactctcctgaaggtaataaggagcttgctaaatttgtcgctgatcttgcgggcgttacagaacgtgatgtcaaagtggttcgcggctatcgacaaataccgcgggtatcggagtcgctgattcgtcatgaatatcccacatctttaacttctcttaaatctttgagccctcaggatctttaccaacagctttgtcattaccgtgtagcccagcaattgcgtcaggcgttaactcatcccggacggcaggcagtacgtttgagtgagttgctcaatgttgccagaagaacctggccagatattaatcaccgtgagttactgcaactcctcgacctaatggcgagatcgcgagaaggtgaactggcttttacgccattacgtatgcatgggtttatcagaacactggcgggtctatgggcatgttcaaacaaacaatgcttacataaagcgcatgaattaaatcagagtgactggccatttggtcaggtatggtttgagcagcgccaatattgtgactgtggtgcgccggtatttgaagttttacgttgctccgggtgtggttcagcttatttgtctgccaaagaggaggtgcgcggtgatggaacgaactggttggtagcgcaacccgccgctgccgaagtggatgaatttgctcttgatgtagatgtttattctgaagatgaagacaacgacgaattagacaataactctcaatttgatcgtctgattgcgatcgatggtgaaaaatatatcatttcactggaagaaacgacggcggggaaaattgatagtgaagcgcaaaagcactatgaaataaacctgttaagaccggaatctcgaggtgagggacgtaataattcctttgcttgtgtttgctgtggtgacacccaacgaaaaaataatcctttattccgtccgcttcgacttggcgcgcccttttttttaaatgaaattattcctactctgctggagttttcaccattaccgcagacaagagaagagcagttaggaccgtttaatggtcgacgtctgctcacctttacggattcacgtcagggcactgcccgcatttctgcccgcttacagcaggatgccgataaagcgacgttgcgagctctttgttaccaggagttggccaatattaatgagccatcagcaaagctcagcccggcacactgcgcattgttagagagttttattacccagttttctatccttcctttaaaaaactctattgacgcgctgaaaaaagcgatggttgctaatgaagagcttagcccggcggacattcaggcacttaaaattatcgagccgatggtgagttccttaagcccggatcatgctgaagcgatgcaaatactccaggctaactctggcaatcagcagaagaaaaccatgtcatggcaaacactgtctgaacagctggttggcagtgtggaccttgccgatagaatgagaggcagttttaaagaattgtctgggcttgatcttactaaacaacagtttgcagatttttgtttatacagtgagtttggtcgccgccctaaaaatgcctggaccctcgaaagtatgggtctggtagccattcactatccatttattgataaagttacaacctgcccgcaggactggaagacattattacccgatcccgataagcaattagcggaatggcgtaatttattgaagattactcttgatttctttatacgtgaaaacagtgccgttttttacgaaaacgagcaataccctcgctggatgggggctcgtttcccggtaaaaatgctccagggtccagataaaaaaaacaaagggcagaaacgtgatcaactttggccacaaatacgcgatcgccattataaccgggtcattaagctattaattgcagtctttccggcaatacaacctgagcaggctcactggaaatcgttagttaaccacttaatgattgaggtctgggatgcaattcgaccctgcttacgtcagtttgagtcgggttatcagctggatattaaacaacaagctgaattttacagtccaaagcaagtgtggcgttgcccctatactcgacgtgcgttagacgtcacgttactgggatactctccgtatttgccgggtagcaaagaaattgcacctgaaaaagcagtgttgattgaaatgcctgagcttcctgtacgtcactggcgtttgtctggtggtggagaaatcgcccgagaagaacgtctggagtggctggaaagtaatgcgctgattcaacatgcccgcgaggaaggattatggtctactcgcagcgaccgactggccctgaaagatagctggtatcgtctggaggaacactctgcgcagagaacgcctgagcagaaccaatttaatgaaaaacaatttaagtcaggcaaagttaatgtgctgaactgctccacgaccatggagatgggggtggacattggtggtatgagtttggtggcaatgaacaacgttcctccagctccggcaaattatttgcagcgtgcaggccgcgcgggtcgacgtggagagagtgcatctgctgccattacgttatgtaaaaacacggcgcatggaatggaggtattcaaagaccccctctgggcgttcaacactactgccagtgcgccacgggttcgttttgggagcagcagtattgttcaacgacatgttaatgccctggttttaggtctgtttttacgagctgaagttcctgatgcgacaaaactgagttgcaaatggttctttgaaggtgatgagagccagtgtcttcgttttctccattggttaaataaccaggccgatcagctggcggataaacttaaacgccttactcagggaaccgtcctgatgtcattgacggcaacccagctcttgacccgcacacaagcaatgatgcagcaggttgatatccgctggagaagccaacttgcgatactgttggaaaatatcgaagcgttgaaggcggataacagcgcgtgggaagaaacgccagcaggtaaagccatcgcttatcagcttcgtgattatcgcggtgcatatctgttttctaaactcattagtgaagcgttcctgccggggcatggtttcccggttggcgtcgtcaatttcaattatctgacggcagatgagctggaaaaacgtcgcgcaataaaagctactcaggctgaccctaatgaagggggagaaagcttttctcgtcgtattgaaaaattgcccagccgtgatttgcctacagcattacgcgagtatgctccaggtgcagatgtggtattgggcggaaaagtatatcgttcctcgggcattatgcttggcaaggtacttgccagcgggcaggagctgtcaggcgatcatcatattccgtggttctggcattgtcgtaaatgtggtgcgggggcaaccagtactacccgtcctgtcgaatgtagtcactgcaaagcggatatacagcaacttgatgtgaagcgttatttacagcctgttggttttgcgacagatatccgttatcaggcgcataatgatgtatccatgcctgcacaacttccctggaaagatccacgtgttcttgtaccgtcttcggtgtgggtttctttacccgatgctgggctaggacgttaccgttttagccatagtggggaattgttccacttcagtgaaggggaatttgggcacggctacgcaatttgcctctcatgtggtcgggcagaatctcaaaatcaaccccagcgtacccctgaaaatcttaagaacccagagagggaaaatacgcattacctgttgcgagggggcagtaacgatcgtctgggtagcaataaattgtgccacggtcacgtgcataaagatctttggttggggtatagcagtcgtacagatatggttgagctgcaactcaatgatgataatggcctgttgatccgtgatgaggttgccgcgcgttcccttgcggtcgctttgcgtgaagggttagcgcataaattgggtatcgaaaatactgagctgggcgtgacgacgcagcaagcgcgcgatatcaatggctataccggatattccatcttcatttacgacaataatgcgggtggtgcaggttatgcagtgcaattgatcgaccattgggctgatgtctttaattacgccagaaaattgctcgattgcagttgcgataaattctgtcaccactgcttgctcagctacgacagtcagcattatgtcaacagattagatcgtcaccatgcattaaccctgcttaccaatgtacggttgcagcgacttaacctcgcgccagaatatcagtacttcggcgatggtagccgggttgaaactaaccctctgagtttacgtattgcgcaatgcctgaacagcgagatttatgactcctgctcgctggttcttgcggggccgcaggaacagtgggactttgcccaatggccattatttaaagagttgctccagtttgcctcctccggtgggaatgttgagttgctggtggccacgccgctggcaaacttaactgatagctccagacatcagctttccgcgttggcggcgatgccgggaggtcgcttacaagtgaaatccattgccactgcgcagctcatgcaaggaaaggggcgctggcttgcgcaggtgactcgcgaagggcaaagccaacagtgggccgcagacgacagcgctaccgttgcacctggtgaattatggggacaaagtgcgtcttcaccagtagtgacacttaaaggaacgtccggaaaaaccttctcgggtcagaccttaagtgcagaagatttactgcccgccttacccaccggggcggtgcgcatcaatctctgtgaacaactggacgggccgctggaaggttttggttcgcgtttctggtcgttagtcacgcaacagcacgctggctggaagcaggcatttacccgccacaaagagataacgcatgttgagtacagcgatcgttatcttaatagcccattcacggcgcgtttgttaggtgaaatcttaaccgagctggttgaacagggaatggcggaacgcgccagcctcactgtttgcgtcaaaaaattggattacaactctcgccaacacgacgctctctataacgcgtggcttaatgaggaagatcgtcagcaggttgtgaccactttacttgaagaaggatatctggggcctgcgtggccgggagcaattagctggttaacgggggataaccagagtacggagcatggacgagaactgacagtcaccttcagcgatggcagtcagcattatgtcctgctcgacatggggcttagctactggcgctgtattgaagacaccttctttgattttgctctgcgagtaccgcagcaagttgaacggctggcaaacacgcgagcgcgagctgttgcctcgggtaatgaccttaggagttatgttatcgctggataa

SEQ ID NO: 15850 - DNA, 2859 bp, Escherichia coli
atgaataagcaaaattatgcacctggtatgcgggtggttattcgtgatgccgaatggcgtattcgccgggcggatgacagtggtgatggtgggtatttgctgacctgcgatggtatttcagagcttgtgcgcggtaaagaagggttatttctgaccaaactggaacaaaaagtagagatcctggatcccgcaaaaacgcatttggtggaagatgaatccgccaattatcaggcggcgcagttgtatatcgaaagtcagttacgccaacgcgtaccgacagacagtaaagtccattttggtcatctggcggcgatggattccatgccgtttcagctcgatcctacgcggatggcgctggcacagccgcgccagcggatactcattgccgacgctgtcggtttgggtaaaacgctggaagccggtattctggtttcggaactgatccgtcgtgggcgcggaaaacgtattctggttctggcggttaaatcgatgctgacacaattccagaaggagttctggagccgttttgcgatcccattgacccgcctggattctgctggtttacaaaaggtgcgtaaccgcatccctaccaaccacaacccgtttcactattttgacaagaccattatctccatcgatacgctgaaacaagacattgaatatcgtcaccatctggaaaatgcctggtgggatattattgtcattgatgaggcccataacgtcgcagaacgtggaaccagttcgttacgcagtaaactggcaaagctgctcgccgggcgtagcgatacgctgattatgctttcagcgacgccgcatgatggtaaggctgaaagttttgccagcctgatgaacatgcttgacccgacggcgatcgccaacccgaaagagtatgaatacgccgactttgccgataaaaatctggttgtccgtcgcttcaaaaaagacgtgaaagatcagatgtctggcgagttccccgagcgcaatatcgttaaactgactcgcctggcatccggtgccgaagaagaagcataccgtcgcctggttgagagtcagttccgtgatgatgacgatgaacaagcccagtctaacaaaggtcgtctgttcaagataactctcgaaaaagcgctattttccagcccgatggcgtgtgccagcgtagtggctaatcgtctgaagcgtcttgagagccgtaaagatcataatagccagagccagatcaacgaactggagtcattgctgttggcgctgaataacattgatgccagccagtttagcaaataccagttgctgctcgacaccatccgaaaagacctcgcctggaaagccaataacacggaagatcgcctggtgatcttcaccgaaagtattaaaacgctggagttcctcgaacagcaactgcgagcggatctgaaattgaaagatgatcagatcgccacgctgcgcggcgatcagggcgatacggtattgatggaaaccgtagaagcctttggtaaaacgcagtcgccgttgcgtcttctggtttgttcggatgtggcatctgaagggatcaacctgcatcaccttagccacaaaatgattcactttgatattccgtggtcgttgatggtattccagcaacgtaacgggcgtattgaccgctatgggcaaaaacatcagcctcaaatccgctatctgcttactgaggccagcgaaccacagatcaatggcgatatgcgcgtactggaagtgttgatcaacaaagacgaacaggcgcagaagaacattggggacagttcggagtttaccggcaaatttacccaggaagaggaagaagagcaggttgcagagttcatgatgcaggatgatggtgccagcctgtttgatcaactgctgaacagcaacgtctcggaaagcgccgaacacgatctgtttggcgaaatatgcagtgcggtttccagcgatgcctcaatggtcatcgaaacagacaccagcttgtttgccagcgaacaggcgtactgtgaaagagcattgggttacctgaaagccagtggtcaaactatccagtatgaaaccttgcctgataataccttgtcgctggtggcaccggaggagttacgccgccgcttcaaccagctaccgcctgaaatcgccccggagaactggcagctctttttaagtcaggataaaaccgtcatcaccgacgcgattgcacgcgctcgcggtgagcaacatgcctggcccgatgtgcagtatctctggcaaatcaacccggtagtgcagtggctggacgataaaatctcttcggcttttggtcgtcatcaggcaccggttatccgtctgccatacctgcttgaacccgatgaagatcacttcattctttccgggttattcccgaaccgtaaatcacatccgatggtgaacccgtggatagtggtgagctttaaccgtgaatcgctaatcggcagtcagccattcgctgagtttttacaacgtcatctgcagttgagtaacaagctgactaacagcggcggtaaagatcgtaatcaccagcgccagcaggatttactggaagcggctattgctcatgcccgggaggtattcatccatgatcggaatgcgtttgaaacgcacattaaccagcaactgaatgagcatctgcaaaagctggacgttttgcgtgggcggcagttgagccaacttgagctggattttgccgataacaaacagcaattgtcagttaagcagagccgtaaagagcagagacaacgcgaaatcgaacacaattttgacagctatatcgaatggattgaggacaccatgacgactgaaaaagaaccctacattcaggtaattgctgttatcaccggagcggagggttaa

SEQ ID NO: 15851 - DNA, 4926 bp, Escherichia coli
atggcgctggtcggtattaataacgaaaacgaattttactctaaccactatttgggtgaggtattcaccagtgatatccgcgatgtgctggaaccctggatagcccaggaaaatgcagcgcgtgaagcggagcgtgccgctcgtgaacagggcaaagacgtagagccgggataccgcgctccgtggaaccagtttaacagtctggcgactgagtttttccgcaaacttgccgagcacgaaaaacagcgtcagatcccgcagcgtctggccgatcaacgtaatcgctggcagccattgttaaaggcgctgggctacgaaattacgccgcagatccaaatgctggatgacgatacaccactgccggtactggcgcgttacaacagcactgacggtagcccgtggctgtggattgttgaagcacacgatcaggaagaaggaacgctggatccgctggcgctctctttactgaccgcgcaattcccggcggataccgacaaacataagcgcgacagcctgcgcaaaaaagccaacggtgaatatcgcagctggcaggatctgctctctacggcggtcttcactcaaaatgaaccgccgcgttttgtgctgctgctcggtaaccgtcagctattgttgttggaccgtactaagtgggcgcaaaaccgtctgctacgttttgattttgaagagattttaagtcgtcgtgaaacggatacgctgaaagcgacggcagtgttgctacataaagattcgctgctgccgggcagtggggcaccttatcttgactcgctggatgacaattcgcacaaacatgcgtttggtgtttcggaagatctgaaatatgccctgcgcgaaagtattgagctgctgggcaacgaagcgatgcattatctgatcgaccgtggcctggcaaactataccggtaaccgtgcggtggacccggatgaactgagccgcgaatgtctgcgttacatgtaccgcctgctgttcctgttctacattgaagcgcgcccggagctgggttatgcgccaatgaccgccaaaacctatctgcaaggttacagcctggaaacgttgcgtgatctggagatgatcccgctgaccagcgaagaagatcgcaacgggcgctacttccacgacagcctgaatatgctgtttaaactggtgcgcgaaggctacaacggcggcgtgaaaatgcagagtgacctggagagcggcgaccggatcaccatccatagtcatcagttcagcgtcccgcgtctggaaagtcatctgtttgatgccaacaacacgcgcattcttaaccgcgtggtattccgtaacgaaaccctgcaacagattatccaggcgatgtcgttaagccgcccgggcaaagggcgctttaaccgccgcggacgtatttcttatcgccagttgggtatcaaccagttgggggcggtgtatgaggcgctgctctcctatcgcggattcttcgccagcgaagatctctacgaggtgaagaaagccggggaagagtttaacgagctggagacgggttacttcgtcagtaaggatgagattggcaaataccacgaagacgagaaggtttacgagaaagacggcagtctgcgcattcaccgcaaaggcagttttatctaccgtatggccgggcgcgaccgtgagaaatctgcctcctattacaccccggaagtgctgacccgttcactggttaaatatgccctgaaagaactgtttaaggagcagattgatcccattagcgatccgcacgccaaagctgatgccatcttaaacctcactgtgtgcgaaccagcgatgggcagcgcggcgtttcttaacgaagccatcaaccagctggcggaagcgtatctgttccacaagcagcaggcggaaggtcgccgtattccgcaggatcgttacacccaggagttacagcgggtgaaaatgtacattgccgacaacaatgttttcggcgtggacttaaacccggtggcggtggagctggcggaagtgtcgctgtggctgaacgccatcagtggcgatgcctttgtaccgtggtttggttaccagttgcactgcggtaactcgctggtgggcgcgcgccgtcaggtgttcaacaagagcgaactgacctacaaaaaagccaaagatccgagctggcttaacagcgaaccggtcgagctggcgatgaacacgccgcgtgaagagacgcagattttccacttcctgctgcccgacggcggtatggctaactacagcgataaaactgttaagcagcgttatccggatgacttcaaagccctggacagctggcgcaaagagtttattaaaagctttgccgggcatgagattgctgatgtgcagcgtatcagcgaaaaggtggaagcactgtggaacacctatcgccagcaacttaaagcagaacgactgaaaaccgccgacagctacccggtgtggccggcagaaaacaccgagcagacgcgttcttcgctgagcagtaaagatgaaaccttcagtggtcgtcttgaagataacagtgcctaccagaagctgcgttgggtgatggactactggtgcgcgctgtggttctggccgatcgacaaagccgatgagctaccggatcgcggcacctggttgtttgagattgaaaccctgctcgacgggattgtaatcacggaaaaagtcactgaagttgcggagcacaccactggcgatctgtttgccgaagacggcctgctgcgagaagagtcttcgctgttttccggcgcaggtcgtctgaaaactgaggtgttgttccgtcatttgccgcgtctggcgattgtcgatgccctgagaaagcagcaccgtttcttccactgggatctggagttctgcgacctgtttgccgagcgcggcggttttgacctgatgctcggaaacccgccgtggctgaaagtggaatggcaggaagcgggcgtgctgggtgattacgagccggaatttgtgctgcgtaagctgagtgcatcgaagctggcaacgttgcgtattgatacctttaaccagatcccggcgctggaagcggcctggcgcagcgagtatgaaggctgtgaagggatgcaaaacttcctcaatgcgcagcagaactacccggtactgcgcggggtgcagaccaacttgtataaatgcttcctgccgcaagcatggcgcttaggggcgcagaaaggcgtgtcaggtttcctgcacccggaagggatttatgatgacccgaaaggcgggctgttgcgtgcggcagtgtacccgagactgagggcgcattttcagtttgcgaatgcttatttattattcaatgaagtacatgatcaaactcggtttggtataaatgtttatgggccttaccaacaaagtattagcttcgtttcgatggctaatgtgtttctccctcaaactatagatgcttcatttgcgcacaaaaattactctgaacaggttccggggattaagtttgatagtgctcttgaggcaggctcatcggttctatggaataataatggtcataattctagacttataaatgttggtccgaaagaacttacgttatttgctcgtctgtatgacagcgaaggaacgccagcctggcaggcacgtttgccagccttacatgctaaacaacttgttgctgtgctggaaaagtttgctaaccagcccaagagattaggcgatttacaggggcaatatttatccctggaaatgtggcatgaaacaaaccagcagaaagacggcactattgaacgtaagacgcagttccctgaggatgcatcacaatgggtattgtctggcccgcacttctttgttgggacgccgttctacaagactccgcgcgaaaactgtacgcttaacagcgattatgactgcctggacttgctaactctgcctgacgattacctgccgcgcactaactacattccggcatgtgatgcacaggagtatgcaaagcgcaccccacgggtttcgtggaaagagcaggatgaagacgagccgaggaaggtgacggattattatcgttttgttaatcggagaatgtttggtggatcttctgagagatctttcatctccgctattcttcccaagggatttgcaaacattaacacatgcgtcgctacggcctttgagtcaactaatgtactggtgaattttacgggcctttcgcattcaattgtttatgattttattttgaaatcaactggaaaatcagatctgtacggtgcacaacttggtgggttcgtatataccgaaagttttggtgtaaaaataaggactttattattaaatgccctatcaagtgaatacgccgagctctggcaatcctgctacaccccagacttcaacacccagcgttggagccgcgatctcccgcagctcccccaggatttcttcgccaaactgaccccagagtggcagcgtaactgcgccttacgctccgactatagtcgtcgtcaggcgctggtggaaatcgacgtactggtggcgcagtcgctggggttaaccctcgaagagctgcttaccatttaccgtgtacagttcccggtgatgcgccagtacgaagcggatacctggtacgatcaaaacggtcgcattatctttaccccaagcaaagggctggtgggcgtcggtctgccgcgtaccgcccgtaaagctgacctgaaaaacggctttgtctttaacgtcgacagcccggagtggaccggcggtgactgcaccgatcaagctatcggttgggatgatgtcaaacatcttaaaaccggtaccgtcagcgtcacctttgatgactatacccgcagcgacgaaggtgagcgccgtaccgtcacctggcaggctccgtttatcaagccagatcgcgaagacgactacaaagtggcctgggcgttctttgcacaagataaggagagcgcctga

SEQ ID NO: 15852 - DNA, 6342 bp, Escherichia coli
atgctgccgtccgttgtcagtcggcaggtcgccgacagcgttgccgcctttttacgggcggcgttcccgctaaacagcccgctgtttaatggtgaagaaaacaataacgtctcgatgctggagcaatttctggcccagccggaaacgctgctgaaagggccgtatctttccgcccagttgccgtttcgtaaaagtgacttaccgctgaattttttccctaatctgacgctgccgttcccgccgcacgcgcatcaggcccgggcatttcagcgtctgggaagcgacgcgccacagccgacgctggtcgctaccggtaccggctccggtaaaacagaatgttttatgttcccgctgctcaaccactgcgcgggcgcgtcacaagccggggttaaagcgattatcatctacccgatgaacgccctggcaaccgatcaggccagccgtttcgccaaaaccatcgccagcgatccacaactgcatggcaaggtgaccgtcggcctgtttgtcggcgacagcgaaatcgaacccagcaaaaaaatgtctgcagaaaaggtcattacctgtaagcacacgctgcgcgaaagcccgccggacatcctgttgaccaactacaaaatgctcgactacctgctgatgcgccctggcgatcagccgctctggcgttacaaccagcccggctcattgcgttacctggtcgtggatgaattgcatacgtttgatggcgcgcaagggtcggatctggcctgtctggtgcgacgtctgaagcatcacataggtgtggataaccaacaattcgcctgcgtcgggacatcagctaccgtcggcgacgaattggggcaactgctcgattacgcaaaaacaatctttgaccagccgtttaccgatgacgccgttattcgcgaagatcgctacacggcagcggagtacttgcaggattacaccattgcgtacagtcagtatccggggccggaggtcgcttcggccctggatccgcagggttacgctaccccggtggcgtatctcaacggacaaatccctttgtggttccccgacagcgacttgcaactcccggacgatctggagagcgacgacgggcgtgaaaagcgtattgcgctggggtcactgttacgccgccacagcgtgatgcatgtcttactccatgatctgcaaggcgggatcctctctgaacgagagtgtctggaaaatctccaggtcatgctggcagaaagcgccgaccatgcccgacgcgtgctgcaaagcattctggcgctgatcgcgcaggcacgtctcgaagtaccggaaacggaacacgatcggcaaaaacgtctccaggcgaagaaagcgcgcccggtgctgccgtttgtgcaactgcgttcccagttgtggcttcgtgagatgcgtcgtctggtcgccagcgtggcgaaaacgccgagactggtgtttgccgatgatgtggcggtggaagatcgcgaacactatttgccggttatccactgccgtgactgccacgcaaccggctgggccagcctgcgtcatgggcaaagtgttcagctggaaacagacctcgacggcatttatcgccagttctttgaaaaagggcgctccatcgtcctcgctttcccggataataacgaaaaagcggtcagtggcgcacaccagaaactgtgtcctacctgtctgaaacttaaccgacagtccagcgtccagtgtggacattgcggtcatacagagctgttgcaggtactgatcccggatatgctcaaagagcgtaaggacgagctggagtttgctaatgaatgcccgtactgcaacagcaaacaggggatttcgattctggggtcacgggctgccagtctgtcggcggtgatgattcaccagctttatggcagccagttcaacgaacataaaaagctgattacgttttctgactcggtacaagacgccgcgcatcgtgccagcttctttactgcccgtacctggccgctgatgattcgtgggcaaatcgccagtgttcttggcgaaaaagagacattaccgctggatgcgttcgcggcgcgtgtttgccaacaaacgcgtgaacgttcaccggacgatgctcattttgcagcgaacttcatcgcaccaaatatgcagtggctgaatgattatcagacgctgaaaaatgaaggcaaactggcggagaactccgatctgccggagctggtttccctgcgcctcgactgggaggtgtacagcgaatttaccctgcgcgcgcgtatcggacgtacgctggaagccaccggttatgccgttgccggagtggataaagatcgcttcaatccggctattaccgccctgcatcaacagctttgtgaagagctgggtgatgagatgtccggtgtgagcgtcgagcaggtcgcacacctggcgctgggggttatctggtatcaacgccaggccggggccgttatgcatccggcgttcgaaagttatcgccgtgatggcacgacctttatgatgacgcaaaaagagcgtacctcgcgctatatgccttctatcggtccgaaaacgcgtaaaccggcttatgcgtcgtttgaaaaaattaatggtttccatcgcctgattggcgcgaagtctaaccccagttggtatcagcattggatcaatcgcacgctgagtaacggcaataatctgtttatcagtagcgttgcggaaacagtgttaagacgcctgtttacggcgttgaaaatagccggagtagtaaaagattttgacaccaaagggcgtgaagcctggggactggtgccttcggcgctggtggtgagccgtgacgtcgttcagcttaattgctcatgttgccgtgaggttgtccgggctccggccgatcaaggctggcagtggcgtaatgcgccttgtctctctttacgttgtgaaggtcgttaccaggaagtcgacaatacggcgacctggcgttgggagaacatggatatcgcgcgcgtgcagggcgcagaacacacggggctgcttagccgtgaagatcgcgaagccaccgaaaaatcgttctaccgcggcaaccaaccgtggaatatcaacctgttgtcggcaacaccgacgctggagatgggtattgacgttggggatctttccaccgttttactctgttctgtcccacctgctcaggccaactacttgcaacgtattggtcgcgccggtcgtaaagatggtaacgcgttaaacattaccgtggcagaagggaacccgcacgatcagtttttctttgaagaaccactggagatgatgcagggccaggtgcaggctcccggcgtcttcctcaatgcaacggctattctcgaacgccagctggcagctttttgtatggataactgggtgaaaaccggtgtaccagaatccgctatctgtaaaaacgtcaaacagatgctggatgagctggagttcgggcgtaaatcgggttttccgtataacttactgagatatatcgaacagcatcatgcggagattgcttcacaatttacggcgatcttccccgatcttgccgcagaaactcgtcaacagttgttgtcttatcttcagggcgcgccaggacaacgctctctggtgcagcgtatcgaagaggcgttaaaactgctggtggaagatcgtaaatctctgcgttcacgcatcgataaactcaagcgcagtatcgataagctggagaacgcgccgcgcgatcaaaactttgacagcgatatgcgcgagttaacttcagaacggcaggcgctgatggcgctggtcaatcaaatcaacaataagcagacgctgaatttcctcacggatgaaggtctgctgcctaactacgccttcccggaagccggtattacgttacgttctgtgctctggcggcgtaaagaaggcggggaagcgcgtgaatatcaaaacaccactttcgaatatgaacgcccagcatcaacggcgctggctgagctggctccgctgaataatttctatgccggtggacataaagttgaaattgagcagatagacttgaaggtctctgagccggagaactggcgtatctgtagccactgtaactacagcgaaaatatcgaccagacgggcgaccagcataaatattgcccgaaatgtggcacaccggggtgggccgacgccggacaaaaaaccacgctgctgaaacttcgccaggtgtatgcccgcgccagcgcacgtgatagccagatcagcgacgagagcgacagccgtgaacctgctttcttccagcgtcagctattggttagtttcgaaaaagaggatgtatcggcggcatacgcgattgaggaaggcgaagttccgtttggttttgaatttttaagcaaagtcaccctgcgggatatcaacttcggcaaaatggcggatgatgccaatgagttgatgattgccggagaagcgaagaagcgaaccgggtttaaagtttgcctcgggtgcggcatggtgcagcgtcctcgcgatcatgaacctcgtcatgatttgagttgcaaatatcgcacggaaccggaaaaggcgaagttcgaagattatctctatctctatcgccagctggagtcagaagcgttgcgtattctgctcccggtaagcagttacagtaatgaccgtgtcgtggaggcttctcttggggcggcgatccagctcggccttaaacattacttcaaggggaatgtcgatcacctgaaaggcgttgtgtaccgcgagcctgaaaatgaaggtgaatcctggcggcagtatctggtgatttacgataccgtcccggggggaactggttctcttaaagagctgatgcgcactcccgacaatttgctgaaattacttgaactggcctatcaggcaatagtggaatgcagttgcaaccatgatacgcataaagatggttgttatcgttgcgtttacgcttaccgtgaccgtgggcgcatgaagtatgtctcccgcgatcaggcacgtctcttgctggcgaaaattttgcaggcaagagattcgatacgggtaattgattccatcaaaaacatttccctcgaagccatgatgggcagtgagctggaaaaacggtttattagctgcctgcaagaaaataaaaacctgattgtcagtcgcagttacgcgcatcagggcgctgggtggattattaacacccgcagcgaaccgatgatgagctggcatcttaaagctcaggtggatttaggcgctaaagaggcggtggggatcccttgtcgcccggattacgtgctatatccgcttatgcagcctgatgccattaaaccggtagctattttccttgatggctttgcgtttcacaaaaatagcgtcgcagaggatgtgcaaaaacgccaggcgattcgggatagcggtaatttctgggtgtggacagtcacgtgggccgatctcaaagagcctgggcttaaacatgttcaggatgtcctggggcttgggcataacccggatatgaaacagcctaagttttataacctgtttcacgataccaactttgcggcccttgaagcgtcgttccgggaacgcaacagttttgcactgctgctggattatctcgccgatccgggcggaagaacgcagttatggcagaaaatggctgctgcacatgcctgggtgtggttggatgtgaagaagtcacaggacgcgggaacgaaacaaaagtatgcctatgaaatgcaggaaaacgcgccagcctggcggctagcagagcttttgccagacgaaccgtttgtctttggtggtttactcgatagctgtaactcatcgcagcaatttattgagctggcttcggtgttgccacaacaagccattaaaccgacgaccagtgtcgcacaaatgcgcagctggctgcgtttgcatatctgttttgacgatcgctatacgcaggatgacggttatgaagcgggactcaatggcttctggcgactggtaaacctgttacagttcctgccggatataacctttaccagccgtaaagccgtgcatttatcgcaggaaagcgttgacactaaagtttcggcaacgccagaggcagtaccagagactgatgaaagttgggctgagattattgagtttggcttattaagcgctgaagagatcgcgttgcttcagtctcattctctctctgcgccgactctcggctacgaattgcaaaatgatgagggtgaaattattgcggaagccgatctcgcctggccatcacaaaaatgggcattgattattgataatcaagaatttattccattattcacaaccaggggttggcacgttgcattcgggccaattgacgaaaatacattgcaacatctgtccggaggtgacaaatga

SEQ ID NO: 15853 - DNA, 2115 bp, Escherichia coli
atgacggtgcaaacgcccaaggtggcactttctgatggttttctgggcgcattcgcgcggatcccaaaagcacagcaaaaaaaggtgcaggaattcatctccaaattccgtcaggacccgaccagtaatggacttaactatgaaaagatccacgatgcacgcagtaaaaatgtccattcggtgcgaatcgatcaaacttatcgcggcattgttctgaaacctgaacagggtgccctgtatatgctgatgtgggtggataaacacgacgaagcatacgactgggcgcggcggcatgattgttcaattcacccggttaccggcgcaattcaggttattgatattagctatatcaaaccggcggcggaaacggtgctagataaaccgaaactcttcgcagcttacagcgcggaacagattctggccctgggtgtgccgcctgtctttattgatcaggtgatggcgcttacagatgaagccgggcttaatcaacttgaaagcataatgccagcagaagcctgggaacccctgcattggctggcagaagggctggattaccaggaagtgctggaagagtttaacgatcatcgtgacgagcctgttgataccaacgactttatggaggcgattgaacgaagtaaacgtcgcttccatgtcgttgaaaatgaacaggagctgttgcagatgcttaatgcgcctttagaaaaatggcgtgtatttctgcatccgagccagcgaaaactggtggagtcgcccgctaatggtccggtacgagtactgggcggtgcaggtacagggaaaacggttgttgcaatgcaccgtgcgcggtggttatctcagcgtctggcagataaacccggtaagaaggtacttttcacgacctttacgcgtaacctggcggcagatattcgcgctaatctccagcggttgtgtacgcgagaagagatggcgcgtattgacgtcgttaacattgatgcctggatgagcgaccaactaaaacgccacggttatgatttccgcgtggtatacgacagcgatgaagggcgacgtaaatgctggaactatgccttgcagcaggcacctgccgaactggggctacctgacaatttctatgctgaagagtggcaacgcgttgtccagccaaatgcggtttacacccgggaggaatacctcaaagtcagccgggttggacgtggtacagcgttatcccgtattcaacgggcgaaaatctggccagttttcgaagaattcagagcacaaatggcgcgtgccaaactgcgcgaaatgggcgatgccatgcatgaggctattgttctgtttaaagaaaagcaggtccaactaccttatagcagtattgtcgtcgatgaagctcaagatatcggtgccccggcatttactcttattcgcagcctggttcccgagtcgcccaacgatctgtttattgtcggggatgggcatcagcgtatttatcgcaataaggtcgttcttggtcagtgtggtattaacgtccgtggtcgtcgcagtaaaaaattgaagattaactatcggaccacagaagagacgcgtcaatttgctgttgggctgttaactggtgtgaaggttgataacctcgatggcgaagcggataccagtaatgattatttgtcattactgcacggggaaaagcccatgattacgcatgcggcagatttcaaagaagaggctgcaacactcgtcaagcaaattcaggcattgctggcgaatcaggttcgttctcaggatatctgcattactgcgcgtactaaacatgcttgcgaccgctacgcatcagcactcaatgacgccggaattgagacatttaatttaggcaatgatagcggtgacagcgatgcacgcccaggcgtgcgagttgcaacgatgcaccgtattaaagggcttgagttccagtatgtgttcctggtggggattaacgaaggcgttgtgccggaaataaaagcattagcatccgatgatcccgttgaacagcgtgatgcattatttaatgagcgcgcgttactgcatgtggctgcaacccgtgccgtaaaagggctgtttgtttcatcatctggtatccctagtccgctattagtggctgattga

SEQ ID NO: 15854 - DNA, 651 bp, Escherichia coli
atgaatatccgtcaatcattacatgaccgaatctatgcagaataccctcaacaggctaaagaaatattactgtatttccccacttatgaaattatgccatcgaccataaaaatggttatgattaatgaggtggtagctataacaccgcaagaagatttttatacaccagagtctggttattttacgactgtcgcccgacagttagcgctggctggattatcggcaagtagtggcgaagtcttactcaaccatggtatctacctgacctccgcactgaaactacctaaaacacagatcacagccacacccgcggagatcattctctggtcacctattgtagaatgggagctcgaactctttgccaatataaaagttattttcgttggcggcgatatcgcgcgaaaatgccttaacatcatcgcgaaaaagcaaacacgtaaacatgccatcccttcaactccgacgtacaaactgatgaatagcgaattagtctggaaaggaataagcatacttcctggatatattcttaccggaaaaaacctgctcattgaaaagtcaaaaatcgaaatgaatgtcgaacaattaagaaaaggaattgcgatttatcgcaatagtaacagtaaccatacgaataattcagttcatgaataa

SEQ ID NO: 15855 - DNA, 240 bp, Escherichia coli
atgccaccgccctctacgcaactgtttgcagagcaccttcccaccgagtggatacagcacctcctgacgctttctgctcatgcgaccatttgtcgtcttaacctgagcgcggatggcgaagcggggattagtctgctggcccgcagcgctgtcacccagaagcgccagcgcgtgggggccccctggtggaatggctcttccgccagaccgcacagacatggggcgcggaacgttacctga

SEQ ID NO: 15856 - DNA, 1698 bp, Escherichia coli
atgcaactgcaacatggaaaaaataatacacaacaatatatatttggcgactttgtattaaaaaacaatggaatattattattcaaaaacaaagaatatcatattcccccgaaagaacttggcgttattattctattgcttaatgctgacggtgaaattgttagcaaagaagagattatcgataaggtctggagcgcgagtgttgccagtgatgaatctctaacacgatgtatttatgcattgcgcaaacttttgcatgagaataaacagtgtaagtatatcgaaacggtctatggtcgtggataccgttttactgtacctattgtgattgtgaccgataatgaaccggtaaagtcgaccactactcttgccgtttttccctttcgtactgaaggttcgatcaatgttctaaaactccattacgaacttgtccagggcctttcaaaatatgctttttgtggtttagatattttacccgcttcggtaacaaatgaggccagtgatttttccactatccatcagtttatcaataaaacaggtccagaatattatattatgggtcaggtcgttcactatggtaaaaactggcgtttatttattgagttaattcatgccagaacacataaattgattgatcatcaaagtattgatttcaaccccgataatcctctttccgtattattatcacaagtaattaatattcttattgaaaaaatacccaatattaattttaaatctattaatacacaacaaatgccatctctggattctgctgttatgtatatgaatggcagaatggaaatgtatcgttatacaccagagagtttgaaacgagcattagtaatatttagagattgtgtgagtacgcaaccgcaaaataccttgccctactgttgcctggcggaatgccatatatcattagccctccttggactcagtgaacaaaaacaagcaataactacggcagtaacctccattgaaaaggctcttgaaattaacccttcaaattctcaggcattgggtttactgggtttaatcagtgggctaaaagatgaacattcagtgtctaatgtgctatttaagcaagcacatttactcaaacctaattcgccagacgtttattattatcagtctctgctatgttttttgaacggtgaccttgcaagagcatttaatctaatagaaaaaagtattgctcttgaacccaataaaatgggtataagcattcttaaattaattatactttattacacatcccccctcgataacgcgatatcttttgcattaaatcttaacagtcaaaacacctgtaataatccaattattacctctattctggctatgttcatggcactgaaaggacataataacaaagccaaaagtttattgcttaaacttgagcctgaacatggtcttgattacacctgtgttaactcgctttatacgaaatttctgatctatggcgcatctataaaaaatgacattatgaagttactggcaaatattaacaccaacaaaatcaatggtgtgattttgccgttgatttacactgtgtatggtaaaaaagaatatgaaaagcgctggcaacaattaattaaagacaatgatttatggtcaaatgttttgcttcatgacccccgtttgctcagtgtaaaaaatgaatttaatactatcggtgtgatgcgtacttctgcgtaa

SEQ ID NO: 15857 - DNA, 528 bp, Escherichia coli
atgtcaaatgtgagcgggatcggtgatgcttattactggagtgtttttaaaatcgccgaggcctttgggcttcaccgggacacagtaaaaaaacggctcctcgcggccaacactcctgtggcagcgactgtcagggggaaccccgtttacgccctgcagcatgtcgggcctgccctgtttagtgtgaagcatgaggcagcagactctgttcatgatccatcccgtatggagccgaaagagagaaaggattggtaccagtctgaaaatgaaaggatcaagctggaaaaggagcagcgaaaactcatccccgttgatgaagtagtcatcgtctattcgtccatgagaaaggctgtcgtccaggttctggagacaattccggatgttcttgaacgcgattgcgccctgactcctcaggccgtcggcgttgtacagcaggccattgatgacctgcgatacactcttcaggaaaaatcctacgaggcttgtgctgctgaattaattcctgatgaggaaggagagagtctctag

SEQ ID NO: 15858 - DNA, 534 bp, Escherichia coli
atgaacgcaaaaatcagatacggcctgtcggctgccgttctggcgctgattgctgcaggctcgtctgctcctcaaatacttgaccagtttctggatgaaaaagagggtaaccacactacggcataccgcgatggttccggtatatggaccatctgtcgtggtgccacaatggtggatggtaagcccgtcatatcgggaatgaagctgtcgaaggaaaaatgcgaccaggttaacgctattgaacgtgataaggcgctggcatgggtggagcgcaatattaaagtaccactgaccgaaccacagaaagcgggtatagcgtcattttgtccctataacattggccccggtaagtgtttcccgtcgacgttttataagcggctgaatgccggtgatcgtaagagtgcatgcgaggcgattcgctggtggataaaagatggtgggcgcgattgccgcatacgttcaaataactgctatggacaggttattcgtcgtgaccaggaaagcgcattagcctgttgggggatagatcagtga

SEQ ID NO: 15859 - DNA, 351 bp, Escherichia coli
atgactcaaaactatgaactgattgtgaaagggatccgcaattttgagaataaagttacggtaactttagcgttacgggacaaaaaacgctttgacggtgaaatttttgacctggacatctcgctggaccgtgttgaaggtgccgcgctggagttttatgaggcagcagccagaaggagcatcagacaggtcttcctggatgttgctgccgggttatgtgaaggggatgagcagtcgccggaaaatcgccccgtaattttagatgcgcagaatgtgtggataacctacaaaggaaagctaccaggaagaattactggttctctgaagactcctccggaatcacaaccttaa

SEQ ID NO: 15860 - DNA, 216 bp, Escherichia coli; identical to SEQ ID NO: 7411

SEQ ID NO: 15861 - DNA, 204 bp, Escherichia coli
atgctaaaacagcaagatatgacagaaaccgccgccgcagtccttcatttcttacctgctgacaagtgggtaacgccacgcatgatgacgagaactaccggagtaagcgaagcccggtgccagttaatactgactcagttagttctggcggggctggcgaaggataacggcgggtacgggaataaattcagacgctgccagtaa

SEQ ID NO: 15862 - DNA, 186 bp, Escherichia coli
atgaatgtaatagcatttaatgaaatagaatcgagcatcgccgccaatgatcaggttgattctatctgcattgaattaacaacatttaatcaagataatgtcatttcatttgaaagtaaaaagaaaaataaagaaattcttgatgcattttttgaaatattaaatactgatatagttttcgactag

SEQ ID NO: 15863 - DNA, 1596 bp, Escherichia coli
atggctgaagcagcaaaaaaaactccacaaaagctgaatgaaaaaaaaggctcaacatcggcatcatcacttgagattgtgaattcacgacaatcaaaagatatttatcttggattgtgtggatatgttggatgtggcatgagaacgataaacaaaattatcgaagagatatccaaagaatgggggtataatgttgtacacatccgcataagtgcgcttatggaagacccattatattttgagccagcagcactgaaggtatccgaaagcacacaagttaatagacatttaaaactccaggatattgccaataaacttcgtaaacattacgaaaaaaatgagttgcttgcagaagctgctattgcagcaatcgcaacagcgaaaaagaatattgattataataatgatgaatataaaggtactgtcttcatcattgatcaattcaaaaggccggaagaaatagagttattcagagttatatatcagcataatttctatttgttaggagttttgcgcgatttagattaccgaattccgaatctcattgctgacgaatcggcaaaggacgaccttcatttaattatcaatattgataataaatcctctgatccgtatggacaaagaaccggggaaaccattcttgattcagatttttttattaaaaataacttcagccaaaaaagtgaattaaagaagaagattgatcggtttttcggtcttattcatggcaaaaatggtttaacaccaacttttaacgagaaaggtatgtatgctgccttttcaacatcattacaatcagcttgtttatcacgtcaagtaggggctgcactgtttgatgatgaagggaatttgcttgccgtgggtaagaacgacgtacctaaagctggtggcgggttgtatagcagtgatgattttgataacgatcatcgatgcgttcacaaaagtggtaagtgttataatgatgcaaacaagctaaaaattaaagaccgtataaaaagcatattatcaaccgaagtaagaagtgtattaggtatttccgcaggacaaactgttgccgatattaatataacacgacttctaaacaaattagataatattgcagaaggcatttacaaagacagcaaaatatcaagtgtaatggagtactccagatcaattcatgctgaaatggacgtcattacatcaatggctagaaaacaaaacggcgatactaaagataaaattctttttacgacaacctatccctgccacaactgtgcaaggcatattgtcgcatctggaataaaaaaagtagtatatatagagccatttgataaaagccttgctcttgatctgcataatgatgcaataacaaagaacgaagaatcttccaaagtaatattttgtgattttgagggggtatcaccccgccgctaccataaatttttcagaccaacggatgaacgtaaagatgataaaacaggggctgcaaataaatttaatgctcgctacaaaaatcatatagatgttcaatatcttgatgattatagaaagtatgagactgttgtagctaagaaatttataaacgagattgctaaaccagagtctcagccataa

SEQ ID NO: 15864 - DNA, 450 bp, Escherichia coli
atgcattgcccattctgtttcgccgtggacactaaggtaattgactctcgtctcgtgggcgagggctcatctgtacgccgccgtcggcagtgtctggtgtgtaatgaacgtttcaccacctttgaagtggcggagctggttatgccgcgtgttgtaaaaagcaacgacgtgcgtgaaccgtttaatgaagagaaattgcgtagcggaatgctgcgggcgctggaaaaacgtccggtgagttccgatgatgtcgaaatggcaatcaatcatattaaatcgcagctgcgcgccacgggtgagcgcgaagtgccgagcaagatgattggcaatctggtgatggagcaattgaaaaagctcgataaagtcgcctatatccgttttgcctctgtctaccgcagtttcgaagatatcaaagaatttggcgaagagatcgcgcgcctggaggactaa

SEQ ID NO: 15865 - DNA, 168 bp, Escherichia coli
atgcacaagaggaaaaacctgccccatccttttgaattattacaatttaatgatcttaaagtcaatacaagtgaatggtgtccagagatgatgaacttaatgaacaaaccactcgtcagcagactcccaggtatctttcagagtttcctgaacaaaagttttagctga

SEQ ID NO: 15866 - DNA, 1113 bp, Escherichia coli
atgtcgctgtcgcgtaaaccggaggagacctggtacgggtgggacggtgacaggctgacgacggtacagaccggcaccacgcgtatccagacggtataccagccggggagcttcacgccgctcatcagaatcgaaacagagaatggtgaacaggcgaaggcgcggcaccggagtctggcggaggtgttgcaggaggacacgggggtgacgctaccggcggagctgtcggtgatgctggggaggctggagcgggaactgcgcgcgggtgcggtgagtgcggagagtgaggcatggcttcagcagtgcgggctgacggcggaacagatgaaaaaccagatggaggcggaatacatcccggagaggacacttcatctttaccactgcgaccaccgggggctgccgcaggcgctcatcagcccggaaggggaaacggcgtggcagggggagtatgacgagtggggaaacctgctgggcgaaaccagcgcgcagcaactgcaacagccgtaccgtctgccggggcagcagtatgatgaggagtcggggctgtactataaccgcaaccggtactatgacccgttgcaggggcggtatatcacccaggatcccattgggctaagaggtgcatggaacctgtatcagtatccattgaatccaactactaagatagatccgttgggtctctccggagaagattccatagagcagtcaggtccatcttggttgattgctgaccccatggataaatacagacaacaggcagtgatgggtttaacaaaattgtgggatgatacctttagtcaagagaagactaaatgtttacctacgacacctgaaaacatcaggatggttgtggccaacagtcccttgttgacagtacaacaaaaagtctcagtacccgtagtagctcactacgtacaaatgctggaagatggtagtggagcaccaccggttgatatggatgggaatgtgattgttaatggtaatcacaggatggttgcgggtctgttatgtgataaacttcctcctgagcggccaggtacgcgtccattatcggcaccactatatccgtttagccaaatttttccggagttagatgattgggggaatagatga

SEQ ID NO: 15867 - DNA, 225 bp, Escherichia coli
atgatgacgctggcgcagtggtttgaagagaggggaagacaggaaggaagacaggaggtaagacaagaggtaagacaagaggtaagacaagaggtaatacaggaagtaacacaggaagtaagtcaggaattcgcccagcgtcttctgagtaaaggaatgtctcgggaagacgttgcagagatggcaaatttaccccttgccgagattgataagctgattaactaa

SEQ ID NO: 15868 - DNA, 1251 bp, Escherichia coli; identical to SEQ ID NO: 9434

SEQ ID NO: 15869 - DNA, 573 bp, Escherichia coli
atgaaatctcttgaaagaatatccatcaatcactttatctataatccagaattcagcaatggtgtgactaattatattaaaacagtcaatgaagtttatgatttcccatataaagagtttgtaaagccttacgatatgtcgatgccagactttagaaaattcacgtatctaaatttaaataaaaaagcaataaaccacactacaataattgaagcagcagaatcacaatctccaactcttttattcccaaaagatgcaaatatacatatcagattacattgcccctttcatctatataaaagaatcatcaatgaagagcctgatgaggctcgtttttcagatgaatgcagagcgatttataaagccaaagccgtctcctctccatcttacggcatgttagaactacttaaagatgatttagacattacaaatatacatgtatataaaaatccaatcacactaaaaaaagaccttcttaaaagtgtaattgaaaaagacatagatgtaattttcttcagcagatttaacaaccttaagggtcggaaaacaagagaaaaaaatcactttatctaa

SEQ ID NO: 15870 - DNA, 1218 bp, Escherichia coli
atggctattttggagtctttatcgacatatacacctgtagtctgttgggatgttggcggaaactcagaaatagcccctcctgaaattattagggttgttccttatggggatatatcaaccttcgcaaaagaaatcattgagtttattaatcaaccagtaaacccaagctgttttgaaacagcatgtaacatattaagaaaggattttttaaaagggttgcgacacgttgaaagatttattacgggattagagaaaaaaatatatagaggaataacatttaaatcagaacatgataaaagggattatatcccatacgagatttatgaacaggatatttcattaccgataacccctgtaaaagtgttaattgctgcatccactgtgcatgcaattaagttctattttaatttatataatgatagtaatattatccctgtctttatttattcaggtcgatatggttcagaagtaagtcaattttgtgaacatattctcccgcaaaatctcgctcaagatgacattttgaaaatcatttcaaaagaaaacccagaacttattatttttgatgaatcattaagcttgcacataaatgatctatatagaataagacaaaaagcaaacaaaccaattctttatagtttcaagtcaccaattgattcgaatgattatatattagaccctcttggattcagagagaattctgatttactttatcgtagagtaaaagcaggaaacaatagactaaaggataaattatcaaaaagattacttatctgggcgaaagggtataaagacataaatcaacataaattatatacactcttagacaacaccgattgttttgattgtatagatattgtctcagacaaattattgctagacactttagtttctaaatacccgaataaagaatacaaccttatcaatccaaatttagtatatactgaagactattcagacataatattattaagtgatttggggttcgaaaagttcgcaaaaaaagaatgtaacttatattttactcacaacagtatttttaaaactaaaaatattgaatctcctattggtctattaaactcctatcatatcatgttatctcaagagaataagaaaacagctttggcgtttgtctttatcaaaagcgttaaacgaaaccctatcgcttcttataacttaataaaaaaaaccattgactataaaaacaatattggataa

SEQ ID NO: 15871 - DNA, 1176 bp, Escherichia coli
  misc_feature (1141)..(1150): n is a, c, g, or t
atgaagaaacagatcagcggaaattttgatttaaccgaaccctatgccttgattgaacgcctgtcggcgcagatgggacttatttggtacgatgatggcaaagctatttatatctatgactcatcagagatgcgtaatgcgctgattaatctgagaaaggtatcgacgaatgagtttaataattttttaaaaaaatcgggtctgtataactctcgttatgaaattaaagggggcggcaatggtactttctatgtttcagggccaccggtgtatgttgacctggtcgttaatgctgcaaaattaatggagcaaaacagtgatggcatcgagatcggacgcaataaagtagggattattcacctggtcaacacattcgttaatgatcggacttatgaattacgtggcgaaaagatagttattcctggcatggcaaaagtactatcgacgttgttaaataataacattaagcaaagcactggggttaacgtactttctgaaatttcaagtcgtcaacaactaaaaaacgtatcacgtatgcctccttttcctggtgctgaagaagatgatgatctacaagtagagaaaataatatcgacagctggagcgccagagactgacgatatacaaattattgcatatcctgataccaacagtttacttgttaaaggaacagtatctcaggttgattttatcgagaagttagtagctacactcgatattccaaagcgtcacattgaattatctttatggataatagatattgataagactgatctagaacagttaggagctgactggtcgggcacgataaaaattggatccagcttaagtgcatcatttaataattcaggttcaattagtaccctggatgggacacagtttattgcaacaatacaggcacttgcgcaaaaaagaagagccgccgttgttgctcgtcctgttgttttaacacaggagaatattcctgctatatttgataataaccgtactttctatactaaattagtcggcgagcgtactgcggagttagatgaagtaacctatggtacgatgattagcgtgctaccacgatttgcttcgcgaaatcaaattgaattactcttgaatattgaagatggcaatgaaatcaattctgacaagnnnnnnnnnngcctcaggttggtagaacgcttataa

SEQ ID NO: 15872 - DNA, 300 bp, Escherichia coli
ttgattggtggatatacacgagatacgaatacctatgaaagtcgcaagatcccaatattaggcagtattccatttattggtaaattatttggatatgaaggaacaaatgcgaataacatcgttcgtgtctttcttattgagccaagagagatcgatgagcgcatgatgaataatgcgaatgaggctgcggttgacgccagagcaataacacagcaaatggcaaaaaataaagaaatcaacgatgaattactgcagaaatggataaaaacttacctgaatcgtgaagtcgtcggaggatag

SEQ ID NO: 15873 - DNA, 1146 bp, Escherichia coli
atggcgattcatgtagaacatgtcggtgtattagaaagagccagagaagtttctcgcttagaggacattatcacagaagataatgaagatattgaagctgaaatgcctaaaatgggagatgatcccgccggtaaagaagctcgattcttacaagctactgacgagatgtcagcagcgttaacgcagtttatgaagaaaaaaatctacgaagaacaactggccaactttctggacggagaagaatatgtcctggaagatcagccaatagaaaaaaccgataaagtcatggaggcgcttaaggcagcaactacccatgactatgaagtgtatagctttgctaaaaaattatttccagatgaaagcgatctggtggttgtattacgtgcaattttacgtaaaaaacaaatatctgaaaatgtgcggctaaatgctgaagcattacttaaaaaagttaatcaagagactactaaaaaattcattaatagcggtattaattcggcattaaaagcaaagttatttggccaggcgttgtcattaaatccaaaattactaagggcaagttatcgacaatttttaatggcagaagacgatgctgtagatacttatgtcgaatggattggtagttatggctatcaaaatagaatgctggtgacaaaatttatcaaagagacgcttttctcagatataaatgcacttgatgcgagctgttcatcattggaatttggtatgtttctcaataagttgtcacaactattgtctcttcagtcggcagaggctttatttctgaaaactttaatgaataacccaataattaaaaaatttattagcgcagaagattattggatattttttctgatatcgttaataaaatttcctgagactgcagaggaactcctgaaaaatgcactggtaaccctacccgcagatgctaattataaagacaaaacgttactcctgaaggcgatttacagcggatgtacaaatcttccattttcactttttattaataatgaacaattattagagattagggagtgttgtaaacaggcaataaaagtaacatttgcagcagagctctttgatacacaaaacagtaataaaaaacaaaataaaaaaccatggaagaaggtaatgttcaatgtttaa

SEQ ID NO: 15874 - DNA, 2061 bp, Escherichia coli
atgtttaacaaagttttgatagggttaaggagtcatccagaattaataattcttggattaatggtgatgattatcgccatgctcataattccattgcccacctacttaatcgattttttgattgggctgaacttaacattggcaatacttgtgtttttaggatcattctatgttgataggatcttaagtttttcttcattcccatcaattcttctcatcacaacgttatttcgtttggcgctggcgatcagtaccagccgacttatacttcttgaggcggacgccggagaaattataacgagttttggtgaattcgttattggagatagcctggtagttggttttgttattttctccattgttactattgttcagtttatcgtgattactaaaggttcggaacgtgtggctgaagttgctgcccgcttttcgcttgacggtatgccaggtaaacaaatgagtattgacgccgatctacgcgccgggatcattgatgccgatttagcaaaagaacgtcgtagcgtattagaacgagagagtcagctgtatggttcctttgatggtgcgatgaaatttatcaaaggtgatgctattgcaaacattattattatctttgttaatattatcggtgggctatcagtaggagtaggccaaaatggaatggatttctcgacagcgttgaccgtctacacaattcttaccgtcggtgatggtcttgtttcacaaattccagctttattaattgctattagtgcagggtttatcgtaacgcgcgtgaatggcgatagtgataatatggggcaaaatataatgtcccagttattaagtaattcttttgtcattattgtgacatgtgtcctcgcgctaagtattgggttgcttccaggttttccccttcttgtgtttttatgtttggcagtaatcttaggaatttatttttactttaaattcaaaaagaaaggggttgaagaaacggttgttgagggcgatatcaccgttgggttggaaccctataatcaggatgatgatatttcattaggtattattaataaacttgatcaggttattaccgaaacggtacccttggttttgattatgaatagtgtacaggctaaaaaatacactgaaatcaatcttgctgataggattcgtagtcagttttttattgagtatggtatccgtattcccggtattgtcattcgcgagggggaaggccttaatgatgaagatgtcatattaatgctaaatgaagtcagagcctcgcaatttaaaatttatcatgatctcgtcttgttggttgaatattcagatgaagtggtttcgactttgatcaagaaacctgtcatcgtaaatagtaatggtgaacaatattattgggttacaaaaagtgatgcccaaaaattaacaaaaattggctgttatactcgcacggccatggatgaaatgtacaatcatttatctgtatgtctggcgcataatattaatgagtattttggtatacaagaaaccaaatatattcttgatcaattagagatgaagtatcctgatctattaaaagaaatattaagatatataaccgtgcagcgcatttcagaggtaattcagcgtctgatccaggagcgaatttcagtgcgcaatatgcgtttagttatggaggctttagcattatggagtccacgggagaaagatataattacactcgtcgagcatgtacgaggtgcattaggtcgctacatttgccataagttttcatattctggagaaattaaagcaattgtgatttcgcctgaaatagaggacagaatcagagatggtgtcaggcctaccgctggcggtacttttcttaatctcgatgcatccgaagctgagatgattctggataattttaaactggcactttctggaatcaatattcctattaaagacattattttactgggatctgtggatattcgtcgttttatcaaaaaacttattgaatctagttatcgagacctcgaagtactttcgtacggggaactaacggaaaatgttcccgttaatattctgaaaactatttag

SEQ ID NO: 15875 - DNA, 876 bp, Escherichia coli
atggacgaagtcaagaaaattgaacactgtaaaattttaaacacagacacacccgataattctgcttcagatttagacagtttcttaaagaaaaacaaaaaaaataaagaaatgagtgagattgtcgctggaaccattctccagttattacgtcagactcaggatagccaattttctacgttggggaaaaaaaatgggcacatggagtctattgacaacaaatcatctctccaggttgacaggaatccatctctttctttgcaaacaaatggaacagagaaattttctacaaagaaaattctcaatatgacttcacgagatcaggggaatgattctgaaccatctaataaaacgatacaatttaaggaaaaaatccataatggtatccatacagaatacatcacagatcaaaaacacagtaataataaagatcgtgaaaaaaaataccgcgatggagacaaaataaatggaccgcaggcccattcattagacattactaacgaaagaaggtttgctgataacagaaccatgtttactcaacatatcgaaaagcaaaggaatgttcatacgctcaatcagaatgatataaataattctgctaataatgccaatgcgcgcgaaaatgaattgacatatcagtttcagcgttggggacaaaatcatacagtccggattctggaaagtagtgaagggatacgactaaaaccatcagacacacttgtctccgacagactccatgaagcccaacacaatgatgttacagcacaacgctgggtattgactgagcaagatgaacgacaagggcaacgacatcagcctcatgatgagcaagaaaatgaaggtaaattcgaaaacgatcagaaggacgaaagttaa

SEQ ID NO: 15876 - DNA, 948 bp, Escherichia coli
atgttcggtctgagaaaagtaaatggaaacactcattcctttgaaaccacttttcaaaattggaaagaaaagggcgaagatgttgcgttattaatgcccgaatttagcgccaaatggctaccgatagcagaagagagcggcagctggtctggatgggtgttacttcgagagttatttcccttaatttctgccgagctcgctgggatggctttaatgccagaaacggaaaggttaataggggaatggctcagtttatctagtatcccgttaaatctaaagtatcctgaactaaaatataatcgtttgtgtgtcggtaaagtatttgatggagtattgagtccagctcaaccactgataagaatatggacaggggaattaaatatttggttagataaagtcacagtctgccaatacgaaaacgctccaacgctagacaaaaaatcattatattggcccattcattttgtaattggatttagtaaaacatgttatagaaccattgttgatattgaagttggtgatgttttattaatttcaaataattttgcttatgcggttatttataatacaaagatttgtgatttaatttatccagaggagttaaaaatggttgatcattttgagtacgaggaagattttgaaacagatgactttgatatcaaaaaaagcgaaatcgagattaatgatgaaaatgactatcagcagattaatagttttgaagacttgcctgtaaaaattgagtttgttcttggaaagaaaataatgaatctatatgaaatagatgatctctgtgcaaaaagaattatatctttgcttcctgaagcggagaaaaatatagaaatacgtgtaaatggcgcgctaactggctatggcgaacttgttgaagtggatgataaattgggcgtagaaattcattcttggttatcagggaataataatgtcaaatag

SEQ ID NO: 15877 - DNA, 768 bp, Escherichia coli
atgggggaggcgatgctctatcagttgcatagtctgctggctgctacagcgctcggtttttgccgattggcaccaactttctatttgttaccatttttcgccagtgggaatataccaacagtagtccgtcatccaataataatagtggtatcatgtgcattagttcagcattaccactatgaattatctaccctaaatgaaatagatatcgctttgtttgctgccagagaaattatcatagggttgtttattgcttgcttattagcatccccattttggattttccttgctataggcagctttatcgataaccaacgtggtgcaacgttaagtagtactttggatccggctactggtgtcgatacatcggaattagcaagattatttaaccttttctctgcagcagtttatcttactaacggtggattgaactttattctggagactctatggcaaagttataacttatggccttcaggaaattttaattttcctaaattagagcctttattctcatatattaataatataatgactcatactatcgtttacgcaagccccgtgattgcggttatgctgggcggtgaagctgtcctgggattgctggcacgttatgcttcacaactaaatgcttttgccatctcactgactgtcaaaagtgcgctggcatttttaatattaattatttattttggcccaatactggctgaacgagttatgccgttatcctttttcccagaacaattgcaattatacattgataaatag

SEQ ID NO: 15878 - DNA, 1113 bp, Escherichia coli
atggcaaataaaactgaaaagccaacacaaaagaaactccaggatgcttctaaaaaaggtcaaattctaaaaagtagagacttaacagtctctgtaataatgcttgtgggtactttatatcttggatatgtatttgatgtgcatcacattatgtcgattcttgaatacatccttgatcataacgctaaaccggatatttgggactattttaaagctatggggataggttggttgaaaacgatcattccttttttgctggtttgtatgtttacaacactacttgtttcatggtttcaaagtaaaatgcaattagcaactgaagctattaagtttaagtttgattcattaaatccagtaaatggcttaaaacgtatatttggcttaaaaaccgtaaaagaatttgttaaagcaatactttatattattttttttgcattggcgatcaaattattttggagtaaccataaatcactgctttttaaaactcttgatggagatatcatttctttattatcagattggggagagatgctgttccttctcatactatattgtctcggcagtatgataattgttctaatatttgattttatcgctgagcattttttatttatgaaagatatgaaaatggataaacaagaagttaaaagagaatacaaggaacaagaaggaaatccagaaattaagtctaaacgcagagaacgccatcaagaaattctgtcagagcaattgaaatctgatgtcagtaatagccgtctgatgattgccaaccctacgcacattgccatagggatatactttaagccacatctttcacctataccattgatttctgtgagagaaactaatgaggtagcattagccgtaaggaaatatgcaaaggaaatcggaataccaattattacagataaaaaattagcacgaaaaatttatgctacccatcgtcgctacgattatgttagcttcgaaaatatagatgagatcttgcgtcttctgctgtggcttgaagatgtggagaatgctggacaacctgttccagatgaactgctcccctcagaagataaattcaaagaaggtgaagacacaaaaagcgagaataaagacaataattaa

SEQ ID NO: 15879 - DNA, 756 bp, Escherichia coli
gtggactatataagcgaagttgttttggataaagttgtgaatgaacttgcaacaagggctaaaaatgcaaggagagcaagggctctaataggtatgactataatttctgtggccgtaattctttctgcgtttatttcctatagactaactgatgacttttcattaaaagggtttagaagtggtttgttcgcttctacaatttcaaatggattcaatgatacatcgggaatacgtgaagcgtttaatctggaactattaaatgtatttccagaaacatcgaagagtgattcgattgccaagttgttttctcaattagatggaggaactcctcagtctagtggtgaaaatgaagtattaaaaaaaattactaaggaagagaaagacgaagctctttcttatgtaagtaaattggttgattactatgtcaaagttgccgcagctgaaaatggacgtccggttaacaaaacagataatacatatagtagtttgattagttcattagctctttcagcaggtgctgtcggatttgtattatatatcttacagatagcagttagttttgtgcgttattactctagactggctgagttatatgactctcaacggactgcgttaattgcatctgacggcaatgtcgaaacggcaaaaatacttatggatatattatcaaatgatcatgtcggtttgggaaaagaaccaactactttatatggaaaagcattagatgtaattggcgaggttgcaaagtcaaaataa

SEQ ID NO: 15880 - DNA, 357 bp, Escherichia coli
atgaaatacgaattcttcgcaacaagtagcagtagtttggatgtatacatagtcactgtatcaaacgattctggctcgctaatcatgacttgtaattgtcctgctggaagtaaaggtattctatgcagacaccgtaaagctttaatcaccggaaaaatccgaggtatatttacgcccccaagaaggaataaccccgaaaagttacaagaagctataaatttaatagccacatatggcatagataaaacattaaagctgtacactgatgaattagaacgagcagaacagacttggataagtgtccgagataatttgagagcaatgataaacgctcttgtagaaccacctaaatattga

SEQ ID NO: 15881 - DNA, 195 bp, Escherichia coli
atgtcaacgattattaagcgcgataaaaaaccaaaaggcacaggaaaggccccaccgttccatatgcgcatagttcctgaattgaaggagcagtttgataacgaagccagtaacgatggggtaagcctagccaactggcttaaagaattagggcgcaaagagctgctacgtcgcggaattgaaccaaaaggataa

SEQ ID NO: 15882 - DNA, 204 bp, Escherichia coli
atgagaaatcataccacacacccgcaagggcgggactcgcacaacctgaataaatacatctggcgttttatcgccctgagcaccgcacaaccacgcgtaatacacatcgaggccgccagcgaacaggaagcccgactgcaatccccaactggctacgtgatgatattcgccgcccgtattcgtcaggaggtgtgccatgaatga

SEQ ID NO: 15883 - DNA, 342 bp, Escherichia coli; identical to SEQ ID NO: 13836

SEQ ID NO: 15884 - DNA, 138 bp, Escherichia coli
atgaaattagggcccgctctggctggcgggtcctttccggcgatccagaacgttacggggcgtcaggcgcgcagtttttcgctatttgtgaaaattttcctgtttaaggcgtttccgttcttcttcgccgtaacttaa

SEQ ID NO: 15885 - DNA, 474 bp, Escherichia coli
atgcccgttctgcgaggcggtggcaagggtaatgaggtgctttatgactctgccgccgtcataaaatggtatgccgaaagggatgctgaaattgagaacgaaaagctgcgccgggaggttgaagaactgcggcaggccagcgaggcagatctcctgccagggactattgagtatgaacgccatcgacttacgcgtgcgcaggccgacgcacaggaactgaagaatgccagcgaaacaggtgaggtaattgacactgcatttgcgacttatgccttgtcgaaattaactggggaagttggagcaatcattgatagtcttccacttgcgatctgtcgacagtttcctggcatggaaaaacggtatcaggacttcattaagatggaggtcagtaaagcatttattcgagcttaccagatctcagataacattccagatatggctgaaaggtatatcaaggataatcagcgaagttaa

SEQ ID NO: 15886 - DNA, 906 bp, Escherichia coli
atgcgctcacccaacagaatgcatgaacgctcaacattttataagtatatgtcgttgaataccgcgaagattgttcttgattcatgcagccttagatggagttctccggtcctatttaatgacccttttgatgttccaagagaagttatgcctggtattaacgaaattaatattggcaaagctttagcccgcaagttaatagcggagttgattacccccagagaagacatacaaaatttaaaccctagaattagaacaatgctaagtgatttccaaaagtcatttcctttaggcatacccgcaggattaattgaaagatttcaagaaatggtaaacattccaccagttgggattggcgctcctgcggcaatacaagaaatgaaagatgtctggcgaggaatgcttaataacagaaggattttgtgtttatctgagagccctataatcactcctatgtggaatcactatgccgataaatataaaggtatagttatcgaatttgattgtgtagactttctggatagcgcttggttaatagccaaacctatgaaatacacagatgaaatgcctctaactcacactgctgaagggatggccgagttgcttttcatgccagacaataagtcaattgaatatatcaataatgagataatattcataaaaacagaagaatgggcatatgaaagagagtggagaatttcaacctacgctaggccaaatagcactggtcaatatagcgacttaaaatttcacccttttgagttaaaatctgtaatacttggtcctctttttgatgccagcgagttcgatgaagtcgcatcactagttaagatgtatccaagagcgaaattatttaaaagttcatttgggaacgacagaaaaatatccatagtaccactaccttaa

SEQ ID NO: 15887 - DNA, 843 bp, Escherichia coli
atgtcaaatacataccagaaaagaaaggcaagtaaagagtatggtttatataatcaatgtaagaaactaaatgatgatgaattatttcgcttacttgatgatcacaattccttgaaaaggatttcatctgccagagtattacagttaagaggtggtcaagacgctgttagattggcaattgagttctgctctgataaaaattatatccgtagagatatcggagcatttatactcgggcaaataaaaatttgcaaaaaatgcaaagataatgtgtttaatattttgaacaatatggcattgaatgataagagcgcttgcgttcgagctacggcaatcgagtcaacggctcagcgatgcaagaaaaacccaatttattcacctaaaatagtagaacaatctcaaattactgcttttgataaatcgactaatgtcagacgtgctacagcatttgctatttctgttatcaatgataaagcaacaattccactattgattaatctgttaaaagatccaaatggagatgtcagaaacttggccgcatttgcaataaatatcaataaatatgataatagtgatattagggattgttttgtggagatgcttcaggataaaaatgaggaagtccgtattgaagcaataatcggactttcctacagaaaagataaaagggttttatctgttttatgcgatgagttaaaaaaaaatactgtttatgatgatatcattgaagctgcgggtgaattaggtgataaaacgctacttcctgttttagatactatgttgtacaagtttgatgacaatgaaattataacttccgctattgataagctgaagcgttcatag

SEQ ID NO: 15888 - DNA, 537 bp, Escherichia coli
atggctcattcccggagaagaatccacgatgtgcatgtaagagtgccaaccgacatcaccacggaagccctgcagcgtatcggtgaactgtatgccaccgaggcagaagtccggggatgttcagcagaacagcgtctggcagcaagaaaagccagagctgcgccactgatgcagtcactgtatgactggatacagactcagatgaaaacactgtcgcgtcactcggatacggcaaaagcgttcgcatacctgctgaaacagtgggatggcctgaatgtgtactgcagcaatggctgggtggaaatcgacaacaacatcgcagagaacgccttacggggagtggccgtaggccggaaaaactggctcttcgtgggttccgacaacggtggcgaacatgcggcggtgttgtactcgctgatcggcacatgccgtctgaacaatgaggagccagaaaatggctgcgttacgtcattgaacatatccaggactggccggcaaaccgggtacgtgatctgttgccctggaaagttgaactga

SEQ ID NO: 15889 - DNA, 513 bp, Escherichia coli
gtgcaaataaccgaagcgttactttcagagccgggagatatctggcgttttgttcagcaggcggtggaccactggccgcgtctgctggcagtccacttcacgctctattcggcagaaggaaacatcaacgggcaacagattcatgcattctgtactgccttttaccgacaggtgcaagaacatattactgagcgtaatcacactgccagtccagcaccgccggtggtattacgctggttgctggaacaacatggagaagcaacaatacgatgcctgttgctgctcagccaggcgagcatttgccatctgcgggtcagtgccacagttgatgaagaatgttcgcaagtggtggatttactgcaacagacctggtcggggataaacgctggcggacaatgtcggttggaaagctgttttcaggttgaccgttcaggtacattagatcagttcgttgtgctaaagacaactgttcagtcccttatgttacccgttatggcaacaatagccaggtga

SEQ ID NO: 15890 - DNA, 150 bp, Escherichia coli
atgccatctgaacatgatgaacaacgggatgttgctgatacgcagcttcccggcgagtatgacctttttgatttaatggcgaaggttactgaagagaacctgcacgccccggtggattccgggccacctgtcggccgggaagcgttatag

SEQ ID NO: 15891 - DNA, 288 bp, Escherichia coli
atggaaacaagggtgcaattcagaattgaatctgaaacaaagaaaatggcaaagcaagcacttgaaaaaaaaggcatttcacttagcgatgcgttaagagcgtttctcgataagttagcagcaacggagaaggttatgacgaaagaagagacatggctgaaagagcagatagaagagacattctcaagagtagaaaaaggagagatccgctattactcagaagatgaagctgacgaacgcatgaactccttcatctctaaaatcgaacatcaacacgaaaccgcataa

SEQ ID NO: 15892 - DNA, 396 bp, Escherichia coli
atggcatttgttagtcaggttgataagtctagggctgcttcgagcaggattggtgattcgtctatagtggtcactcaatcatacaaggcttcaactaaggctcaggagctatccattagattaaaatcgttagtgttatctaagggaggtatgaaaattggtgattacgttgatgttctttatgacaaggatagtgatcgctggatgttaaggaagatggatggaggtttaaaaattactggtaaggatgatgcccctacggggttgattagatataccctgaaggatacacatgcgagatttaccgaggataaagagcacctccctattcgtaaatcctctattgaggattcactggagattgaggatgggcagattgtatttaagcttgactag

SEQ ID NO: 15893 - DNA, 264 bp, Escherichia coli
atgatctctaaggttctatgggcagataaggcattatctgatcgagagactatctttgagtctaacgataaggtttctggtttgtcgtatgcaaaatcagaagatgcaaaaattaaacgtgctgtttctacgataaaacgaaacaacaaagtaggcagaaatgacctggatgagcgaggttatgtctatgttctacctaaaagatacaagattttgtatcggctgactgaggagcatatttttattgagcgcgttttctactga

SEQ ID NO: 15894 - DNA, 1377 bp, Escherichia coli
atggacttagaaaataaattctcatatcattttctcgagggattaacgctcacggaagatggaattcttactcaaggaaatgagcagatttatattccaccgaaagagttaggagtattgatcgtattacttgaatccgctggtcatgttgtcctgaaagatatgatcatcgaatcagtatggaaaaatattattgtaagtgacgagtccctgacaagatgtatctattctttgcgctgcatttttgaaaaaattggctatgatcgttgcatagaaacaatctaccggaaaggttatcgtttcagtggacaggttttcaaaactaaaataaatgaagataacacttcagactattccatagctatatttcctttcaccacttcattgaatactctggatccattaatacttaatcaggaattagtgcaaaacatttcgaataaaaaaatcgatggcctttatacctatccgatggctgcgacaaatttttgtaatgatcacatatcgcaaaattcatttttgagaagattcaagccagattatttcgttacaggaagaataaaccagaataacgcggtgaaaactttatacattgaactgatcgacgctaaaaatcttttcctcatcgccagtaatcatcttcctgttgatgaactacataacacatcacaatttattatagataatatccttcaaacggtacataatccagagcgttctgtaagattagctaaaccggaccaaggttataagaatcattatttatcagatgaactgttggctggtaagaaagaactttacgagtttactcctgaaagcatttacagggctatggctatatttgatggattacaaaataaaagttatatacagacgctaaaaatagaatgttattgtctgctagcggaatgccatatgtctttggcacttcatggaaagtatgaacttgaacttgctgctcaaaaagcattagagcttttacattatgtatcagacataaccaatgtcgatggaaaaattttagctattatgggactgataactggtctgtctggacaagcaaaagtatctcatatcttatttgaacaggctaagatacacacaactgatatagcctctctctactactatagagcacttgtcaattttcataatgaaagaattgaagaggcaaggatttgtatagacaaatcactacaactcgaacccagaagacgaaaagcagttgtgataaaagagtgtgtagatatgtatgtgcctaacccgctcaaaagcaacatgaaactctactataaagaaacttcgagtgaaagccatcgagttataattgacaacattttgaaactaaagcaactgacgagaatttgtatgcgataa

SEQ ID NO: 15895 - DNA, 1062 bp, Escherichia coli
atgcagggccatgaaacgcggtatgaatacaacgccgccggtgacctgaccgccgtcattgccccggacggcagcagaaacgggacacagtacgatacgtggggaaaggccatccgtaccacgcagggtggtctgacgcgcagtatggaatacgatgctgccggacgggtcatccgcctgaccagtgaaaacggcagccacaccaccttccgttacgatgtactcgaccggctgatacaggaaaccggctttgacggccgcacacagcgttatcaccacgacctgaccggcaaacttatccgcagcgaggatgaggggctggtcacccactggcactatgacgaagcagaccgcatcacacagcgaacggtgaatggtgaaccggcagagcagtggcagtatgacgaacgcggctggctgacaggcatcagccatctcagcgaaggccaccgggtgacggtgcattacgggtatgatgagaaaggccgcctgaccggtgagcgccagacggtgcatcatccgcagacggaagcactgctctggcagcatgaaaccagacacgcttacaacgcgcagggactggcgaaccgctgtataccggacagcctgcccgccgtggaatggctgacctacggcagcggctggctgtcaggcatgaaactcggcgacacaccgctggtggagtacacccgcgaccgcctgcaccgggaaacgctgcgcagcttcggccgttatgaactcaccaccgcttacacccctgccgggcagttacagagccagcacctgaacagcctgcagtatgaccgcgattacacctggaacgacaacggcgaactcatccgcatcagcagcccgcgccagacccggagttacagctacagcgacaccggcaggctgaccggcgtccacaccacggcagcgaacctggatatccgcatcccgtatgccacggacccggcaggtaaccgcctgcccgacccggagctgcacccggacagcaccctcagcatgtggccggataaccgtatcgcccgtgacgcgcactatatctcaaaaagctaa

SEQ ID NO: 15896 - DNA, 438 bp, Escherichia coli
atgaatacccagaatctaatcgcagaacatcgagaaaaacatgacagagataacctcggattcactcaagtgtatccactaggatggaagcggctgatggctcttgccaaaggaaatcagggcgcatttggcttgtatacttttttggcacagcatatcgatggggcgtgcggtgctgttgtagcggatcaggcttttctggctgatcagtttgatgtgaccactcgaactgtacgcaattggatctcgtacctagaagagcagaaagccatagttaaaattcccgttgcgggaagagtttgcgcctatgctcttaacccacacgaggtgtggaaaggctatgacaataacaagccaacagctgcattcttaacaaagaccttagtcagcaaagatggggaaattaagcgccggattatggccatgttttcaaattga

SEQ ID NO: 15897 - DNA, 327 bp, Escherichia coli
atggttgcagtgacagtactggttccggcggtctggctggtgactgagatctccaccgtcccgtccggctctgtgattaccgtcggggcagtcgttgcgctgttgtccgccaacacgctgaccgtctgcccggcaagcgtattaccgttagcatcggtaaccttcacttgcagcgtgttcgccattgcgccgtcagccactgagttatcccgggtgaccaccagatccgcgatcttcgccgtcctgacatcggcgataaacatcacgttctggctcgcggtgctgttgttgatggttgcagtgactgtactggctcccgccgtctga

SEQ ID NO: 15898 - DNA, 708 bp, Escherichia coli
atgcgaaaaaaaatagagatgagcttgataaactctcctgcaaatggtgttgtgatcaaaagaataatttctgatggattgaaagaaatagtttctctaaaagaacagatccttcttgaaaccaccgcaaaaattcagagtattgaggaaaagagagaagaaaaagttattcaaggttattatgatggctatgcgaaaggcattattgatgtgatggatagttttatactcttgataagtttgctgagctcagaattagaaaaaaacagaataaacatgataaacgatctgaagagcatattgttaaaatcttcagaggaagttgaagtttttatcaaaatttttgacagttgggtaacaaaattaccgtcaatatcaggccctttaaatctctatatacctaccagtttcaaagataagtctattgaagtagagtcatattttgtcgacaagtcaatatggaatgtccatatttcatatcatgatgacaaacgttttattttttttacagatcaatttattgctgaatttagtccgcaggaatttgtggataattgtgagcaatatttaattagcaatcactgtttttcccctgacaaggttaatgaaatctgtgaacatgccagacattatttagttgaaagaatgtgtgaaatagattctttggctatgaataattctgatttgacgaatccagaggacttatag

SEQ ID NO: 15899 - DNA, 327 bp, Escherichia coli; identical to SEQ ID NO: 10004

SEQ ID NO: 15900 - DNA, 261 bp, Escherichia coli
gtggggaatctttaccggcttatgcgcggctatgccaccggcggttatgtcggtacaccgggcagcatggcggacagtcggtcgcaggcgtccgggacgtttgagcagaataaccatgtggtgattaacaacgacggcacgaacggtcagatagggccacaggcgctgaaggctgtttatgacgtagcccgtaaggcggcaatggatgttgtgaccgggcagatgcgtgatggtggtctgttctccggaggtggacgatga

SEQ ID NO: 15901 - DNA, 330 bp, Escherichia coli
atgaaaaccttccgctggaaagtgaaacccggtatggatgtggcttcggccccttctgtaagaaaggtgcgctttggtgatggctattcccagcgagcgcctgccgggctgaatgccaacctgaaaacgtacagcgtgacgctttctgttccccgttgggaggccgcggcgctggagtcgtttctggaagagcacgggggctggaaagcctttctgtggacgccgccttatgagtggcggcagataaaggtgacctgcgcaaaatggtcgtcgcgggtcagtatgctgcgtgttgagttcagcgcagagtttgaacaggtggtgaactga

SEQ ID NO: 15902 - DNA, 285 bp, Escherichia coli
gtgtggtacaggtcacaatgcgaaaatgacaggcgtgactggggattctacggattgattgccgaggaagtaggagaaattgcccctcagtttgtacactggcgaccagctaacgaagatgatgctcctgaagctatttccagcaatggccttgttgccgaaggtgtaatgtacgaacgtctggttgttccactgattcaccatatccagaagctgactgaaagagttgatgaacttgagtcagaattaaagttgttattaacttcccgaagcgatatcggataa

SEQ ID NO: 15903 - DNA, 444 bp, Escherichia coli
atggggtccgaactcataaaatgggttaaatcgcataaaatagatgctcatattattacatttgtagcaaaaatgccgtatattgattcaataaaattgcttgaagccggtgcgaaaggatgcgtatggaaaaccagtcatccggcgaaactaaatcgcgctattgattcgattagtaatggttacacttattttgatagtgtacatatggattgtgaaaaaatatcttcaagatattcctctgataatcaacttacaaatcgtgagtctgaaatactacaactcatagctgatgggaaaacaaacaaagaaatcgctaatttcttgcagttaagcaggaaaacagtcgaaactcatagactcaatatcatgaagaaattagatgttcacagtggtatcgagttgatcaaaacagctttacgtatgggtgtttgcactatataa

SEQ ID NO: 15904 - DNA, 378 bp, Escherichia coli
atggacgaacagtggggctatgtcggggctaaatcgcgccagcgctggctgttttacgcgtatgacaggctccggaagacggttgttgcgcacgtattcggtgaacgcactatggcgacgctggggcgtcttatgagcctgctgtcaccctttgacgtggtgatatggatgacggatggctggccgctgtatgaatcccgcctgaagggaaagctgcacgtaatcagcaagcgatatacgcagcgaattgagcggcataacctgaatctgaggcagcacctggcacggctgggacggaagtcgctgtcgttctcaaaatcggtggagctgcatgacaaagtcatcgggcattatctgaacataaaacactatcaataa

SEQ ID NO: 15905 - DNA, 480 bp, Escherichia coli
atgttccctgcagatgcactcgtttcctctccacgagcggaaaaagcaagattgtattctgctattgaacagcgtttagagcaatctctcaaaattatggatggcattgtttcttcaagagtacatgttagttacgatgttgatacaggtgatagtggcaaaactgctttaccaattcatatttctgtacttgctgtatatgaaaaagatatcaatccagaaataaaaataaatgacattaagagatttattgttaatagctttgcaagcgtacaatatgagaatatttcagtcgtattgtcaaaacgaagagatattattgaacaagcaccaacatatgaaattaacgaacctatttttgcttatgataagactatgccggtttctatcttacttgcattaatgtccattgcgacttgctggctgttatggaagtacagggctattctaactaatttaatcaggttaaaaaataagtag

SEQ ID NO: 15906 - DNA, 465 bp, Escherichia coli
atgagtgaaaagagtcacggcagagaagaaatccgtcttcacattgtttgcgatgtccctgatgaacttattgatttcacgtttgaatggaaaggtctgaagaaattatgcgtggcagtctcctttcggtcaataatagcagaacaaaagaaagagccagaaatgacggtcagatattatattagttctgctgatttaaccgcagagaagttcgccacagcaatccgaaaccactggcacgtggagaataagctgcactggcgtctggacgtggtaatgaatgaagacgactgcaaaataagaagaggaaacgcagcagaattattttcagggatacggcacatcgctattaatattttgacgaatgataaggtattcaaggcagggttaagacgtaagatgcgaaaagcagccatggacagaaactatctggcgtcagtccttgcggggagcgggctttcgtaa

SEQ ID NO: 15907 - DNA, 441 bp, Escherichia coli
atgcacgcctggggtattgacggccaccagctgacggtggaaatcacggaaagcatgatgatggaacacgataccgaaatctttaagcgcattcagatcctgcgcgatatgggcatcggtttatcggtagatgattttggtacaggcttttccggattatcccgcttagtcagtcttccggtaacggaaatcaaaattgataaaagttttgtcgatcgttgtctgaccgaaaaacgcatccttgccttactcgaagccattaccagcattgggcaaagcctcaatttaaccgtcgtggctgaaggcatcgaaaccaaagagcaatttgagatgctacgcaagatccactgtcgcgttattcagggatatttcttttcccgccccctgcccgccgaagaaattccaggctggatgagcagcgtgttaccgctgaaaatctga

SEQ ID NO: 15908 - DNA, 903 bp, Escherichia coli
atgattgcggttgatattgcgcttgcaacctacaatggtgctaattttattcggcaacagattgaatctatccagaaacaaacttatagaaattggcgtcttataataagtgatgataactcgagtgatgatactgttgatattattaaggatatgatgtctaacgacagtcgtatctatttggtaggaaataaaagacaaggaggggttattcagaactttaattatgctctttcacaaactacatctgaaattgtgttactatgtgaccaggatgacatttggccggaggagcgtctggaaattcttatagataaatttaaggccttgcagcgtaatgattttgttccggcaatgatgtttactgatttgaaattagtagacgaaaataattgtttgattgcagaaagtttttatcgaacgaataatattaatccacaagataatctgaaaaataataatcttctctggcgttcaacggtatatggctgtacttgcatcatgaataagaaacttgttgatattgcattgcctatacctacatatgcacatatgcatgatcaatggttggcattattagcgaagcaatatggtaacattttttatttcgactatgcgtctgttcgttataggcaacattctacaaatgttgttggtggtagaaataaaacgccatttcaaaaatttaattccatacaaaaaaacctaaaaaggattaatttgctagtggatagaactgttgctttaattaaatcaaataacgatttctatccagggaataaaatggaaaataaaattgattacttaaaatttggagtgaatgaagtattaccttatctttttaaaggaaacaagaaagttttttcactttgtgtattaattagtttggcattacaaaaatga

SEQ ID NO: 15909 - DNA, 372 bp, Escherichia coli
atggaaccccttcgtgaaataagaaatcgactgcttaacggctggcaactatcaaaactgcatacttttgaagtggctgccaggcatcagtccttcgctctcgcggcagaggaattgtcgctgagccccagtgcggtaagtcaccgtatcaatcagctggaagaagaattaggtattcagttgtttgttcgttcccatcgcaaagtggaattaacgcacgaggggaaacgtgtttattgggcgctaaaatcgtcgctggataccctgaatcaggaaattctggatatcaaaaatcagggaattatcgggaacgttaacgctgtattcccggccctctatcgcccaatgctggttggtgcccgcattaggtga

SEQ ID NO: 15910 - DNA, 1401 bp, Escherichia coli
atggaccagaagctgttaacggatttccgctcagaactactcgattcacgttttggcgcaaaggccatttctactatcgcggagtcaaaacgatttccgctgcacgaaatgcgcgatgatgttgcatttcagattatcaatgatgaattatatcttgatggcaacgctcgtcagaacctggccactttctgccagacctgggacgacgaaaacgtccataaattgatggatttgtcgatcaataaaaactggatcgacaaagaagaatatccgcaatccgctgcaatcgacctgcgttgcgtaaacatggttgccgatctgtggcatgcgcctgcaccgaaaaatggtcaggccgttggcaccaacaccattggttcttccgaggcctgtatgctcggcgggatggcgatgaaatggcgttggcgcaagcgtatggaagccgcaggcaaaccaacggataaaccaaacctggtgtgcggtccggtacaaatctgctggcataaattcgcccgctactgggatgtggagttgcgtgagatccctatgcgccccggtcagttgtttatggacccgaaacgcatgattgaagcctgcgacgaaaataccatcggcgtggtgccgactttcggcgtgacctacaccggtaactatgagttcccgcagccgctgcacgatgcgctggataaattccaggccgacaccggtatcgacatcgacatgcacatcgacgccgccagcggtggcttcctggcaccgttcgtcgccccggatatcgtctgggacttccgcctgccgcgtgtgaaatcgatcagtgcttcaggccataaattcggtctggctccgctgggctgcggctgggttatctggcgtgatgaagaagcgctgccgcaggaactggtgttcaacgttgactacctcggcggtcagattggtactttcgccatcaacttctcccgcccggcgggtcaggtgattgcacagtactatgaattcctgcgcctcggtcgtgaaggctataccaaagtacagaacgcttcctaccaggttgccgcttatctggcggatgaaatcgccaaactggggccgtatgagttcatctgtaccggtcgcccggacgaaggcatcccggcggtttgcttcaaactgaaagatggtgaagatccaggatacaccctgtacgacctctctgaacgtctgcgtctgcgcggctggcaggttccggccttcactctcggcggtgaagccaccgacatcgtggtgatgcgcattatgtgtcgtcgcggcttcgaaatggactttgctgaactgttgctggaagactacaaagcctccctgaaatatctcagcgaccacccgaaactgcagggtattgcccagcagaacagctttaaacacacctga

SEQ ID NO: 15911 - DNA, 129 bp, Escherichia coli
atgagtctgtcgctagttgtcgacctccgcctggggcttctcatcccccagtgtgtgaaatatacgaaaaaaagctcgcactttcgtacgagctcttctttaaatatggcggtgagggggaccgcctga

SEQ ID NO: 15912 - DNA, 243 bp, Escherichia coli; identical to SEQ ID NO: 8603

SEQ ID NO: 15913 - DNA, 852 bp, Escherichia coli
atggctgaactgactgcgcttcacacattaacagcgcaaatgaaacgtgaagggatccgccgcttgctggtgttgagcggggaagagggttggtgttttgatcatgcgcttaagttgcgtgatgccttacctggcgactggctgtggatttcgccgcagccagatgctgaaaaccactgttcaccctcggcgctacaaactttacttgggcgcgagttccggcatgcggtattcgacgcccgccacggctttgatgccgctgcctttgcggcacttagcggaacgttgaaagcgggaagttggctggttttgttactccctgtatgggaagagtgggaaaaccaacctgatgccgactcgctgcgctggagtgattgccctgaccctattgcgacgccgcattttgtccagcatttcaaacgcgtacttacggcgaataacgacgctatcctctggcggcaaaaccagccgttctcgttggcgcattttactccccgtactgactggcaccccgctaccggcgcaccacaaccagaacaacagcaactcttacagcagctactgaccatgccgccgggcgtggcagcggtaactgctgcgcgtgggcgcggtaagtcggcgttggcagggcaactcatttctcgtattgcgggcagtgcgattgtcaccgcgcccgcaaaagcggcaacggatgtactggcacaatttgcgggcgagaagtttcgctttattgcgccggatgccttgttagccagcgatgagcaagccgactggctgtggtcgatgaagccgcagctatacctgcgccgttgttgtatcaactggtatcgcgttttcctcgaacgttgttaa

SEQ ID NO: 15914 - DNA, 540 bp, Escherichia coli
gtgagcaagattgattatcaggcactacaaatggcagcagaacgggcaattccggcaatggaacgcctgttaatattgccagttgatgatgatttgttaagcgaacaggaacttaaagattgcggtgtggatattgacgcgatcaacaccttcagacttctggctggaccggaaaccatgctggcactgttggaacaacagaaagtcaaggacaatcgaatcgctgaactggaaaaaatcgccactgactatgcacttaaattccagaaagcacaggacgcattaaagtatgccgctttgctgcatagcaggacggcgcaacaaacaaataattttgcagtatcgcttccggacataagcgaatatttcattaatgacgtatttcagcccttgcgatacgagcgggatgttgaaagagccatcataaaggctggcggaaaagcattgtggcaggagaaacacgaggacagaacgcatcagtcctgcgatgtaaatcgtggatggtttagcccactgacgacagataaaaataacacctga

SEQ ID NO: 15915 - DNA, 525 bp, Escherichia coli
atgaaaaaatacgaatacatgctaatgaaagaagcactgcgggctggtctggctccctgtcctgtatccgtagaagctgttgttgggaacacgattttccgaacgctgcgaaatcgcgtatccgtgaagatgattcaccaaccccccaaatctaccagcatgatctatctgccgctgcccgaggctatcaaacttatgcgttcgctgaaatttgcgatttggatgcagacacaactcaacaaagcggtgcaaaacaccttcgttaagaaactgatgccggagcttgctgccagatgtgcaaaatgtaccagacccgcacttcaatttgatctgtcattgattcaacaagctacggaggcagaactataccgactgtcacctctccgtgatgctcacacggaagcctcagaaatgttccggctcatgtttcaatttaattttgccgttcgacgcacacgcgttcaggtcaatcgcatgatgcaggcacaggaagagctggcgcaacacaaaggagacaaccagtga

SEQ ID NO: 15916 - DNA, 417 bp, Escherichia coli
atgaacgcaaaagaagaaggcattatcgacacattaaaaaaaatatcagaagcggaagctgaaatggctaaagatgccgtgaagcgtagccaacatatggcagcacttcacgcactgaccatcgcaaaaatcaccgctgacgcagccaaaattattgaggaacagggcaaagaaatcgacactcttaaaacacagtcaacagttgcagccatgaatccgtccagcattggacgccgcatttacattcttggttcggcaataatgacgcaatacaccattattgccgaactgcacggcaaatacctgataacgccttaccacacaaaagagtcagagcttctgacaaatctccgcctgatagaacgctctcaagctgtattcattgatgacgcgcaacgtgccgtatttaacgcatag

SEQ ID NO: 15917 - DNA, 327 bp, Escherichia coli
atgaatgaagaactattgagggcattgtttaagatcccagaccccatcaccgtcgatgagttttcccgccgcacaggtaagaccgaatcagccgtaagaaagttggtagagcgtcgactcatccctctaactactgagcgcgaggttttaggcgaggaagggagttcgcgccgtcttctcatcctttggaatgagtggctcgaaatggtctatgacgcaacgaaacagcttcctcctgagcgtaaagattggcgcaatcactggcttaagaaagccaagaagctggcggaagatttgggattaggctttcttaattttgctgcatga

SEQ ID NO: 15918 - DNA, 303 bp, Escherichia coli
atgcgtatgactattggagaacgcataaaaatcatgcgtgaaagcgagagacttactagcctcccggatacagcaaaaatgcttggtttaaaccgtgatgctctgtggagatatgaaagcggtaaaaccatccctaatgctgaagtaattgagcaaatactaaacaaccccagatttgagaaatatgcgttgtggtttatgactggaaaaattgcgcctgaatccgggcagatagctccggctctcgcacactatgggcaagaaccaacggatttacccccatccgaaaggaaaattggttaa

SEQ ID NO: 15919 - DNA, 990 bp, Escherichia coli
atggcaattaaagcgctcgatggtggacggtataaagtggatgttagaccgcgtggccgaagtggacgtcggattcagcggatttttaagaaaaaggcagatgcagtggcctttgagcgttatgttctcagccacatgcacgataaggaatggcttgaaaaaccaacagagcaacgtcatctctcagatctgcttccgttatggtgggaattgggtggacgcaataagccatatgctaacggcgttctaaccaggttgaaaaaaatcatcaaagaaatgaatgatccaagggttagccagattaatgctcgtttcatggccgcttatcgaagctcccgtttatccttgggagtaaaagagtctactgttcggcgtgatgagtcggatctcggaggaatgtttacactcctgacaaatgccggggaatttcacggagaaaatccgctccgcgccctcccctctttgaaacgaaaatcacccgaaatgacgtatctcaccacggaagaaatcgccaaattactggatgcagtaagcggtgatgcccggcggattacgctactttgtctcagtactggtgcgagatggggagaggcgaaaaatctgcgcgcggaacacatcatcaataaccgcgtgacgtttaacaaaactaaaaacggaaaagttcgaattattcctgtctctgatgaagttgttagcgagatcaaaacaaagaaatccggccttttgtttgacgtcaattatgaggaatatcgcaaggtgctccgcagtgttaagcctgacctaccaaaaggacaggctgtacatgttctacgccatacctttgcagctcactttatgattaatggaggaaatatacttacgctccagcgaattatggggcacgccacgatccagcaaactatgacctatgcgcacctcgctcctgatttcctccaggatgcaatttcacttaatccgttaaaaggaggcatccacatttcatccacataa

SEQ ID NO: 15920 - DNA, 519 bp, Escherichia coli
atgcgtttttctcaccgactgttcttactgctgattctcctgctgacgggagcaccaatactcgctcaggaaccttctgacgttgcgaaaaacgtgcgtatgatggtttccggtattgtcagttacacccgctggcctgggctatcagggccaccaaagttatgtatcttttcatcttcacgttttagtaccgccttacaagaaaatgctgctacatctttaccttatctgcctgtcatcattcatactcaacaagaggcgatgatttcaggctgcaatggtttttattttggcaacgagtcaccgacattccagatggaattaaccgaacaatatccgtcaaaggcgttattattaattgccgaacaaaataccgagtgcattattggtagcgccttttgtctgatcatccacaataatgacgtcagatttgccgtaaacctggatgccttatcgcgtagcggtgtaaaggtcaacccggatgtcttaatgctcgcacggaagaaaaatgatggataa

SEQ ID NO: 15921 - DNA, 1278 bp, Escherichia coli
atgcaacacaactcatatcgccgttggataaccctcgcgataattagttttagcggcggcgttagtttcgacctggcttatttacgttatatttatcaaattcccatggcaaaatttatgggattcagcaataccgagataggtttaataatgagtacctttggtattgcggccattattttctatgcccctagcggcgttattgccgataaattttcacatcgcaaaatgattacttccgcgatgatcattaccggattactgggtctgttaatggcaacatatccaccgctgtgggtaatgctctgtattcaggtcgcctttgcgataacgacgattttaatgctgtggtcggtgtcgattaaagccgcatcgttgctgggcgatcatagcgagcaagggaaaattatgggctggatggaagggctgcgcggcgtcggtgtaatgtcgctggcggtgtttaccatgtgggtcttttctcgctttgcaccggatgacagcgccagcctgaaaacggtcattattatctatagtgtggtttacattctgctgggcattttgtgttggttttttgttagcgataacaacaatctgcgcagtgccaataacgaagaaaaacagtcattccagcttagcgacatcctggccgttttgcgcatcagcaccacctggtattgcagcatggtgatttttggtgtcttcaccatctacgccattctgagttactccaccaactatctgaccgaaatgtacggcatgtcactggtggcggcgagctacatggggattgtgatcaacaaaatcttccgcgcgttatgcggcccacttggcggcattatcaccacctacagcaaagtgaaatcccctacccgcgtggtccaaatcctttccatcatcggtttgctggcattgacagccctgctcgtcacgaactctaacccgcaatcggtcgcgatggggattggcttgattttattactgggattcacctgttacgcctcacgcgggctgtattgggcctgccctggcgaagcgagaacaccgtcttacattatgggcaccacggtaggtatttgttcggtgattggatttctgccggatgtcttcgtttacccgattatcggctactggcaagacaccctgcccgctgcagaagcctaccgcaacatgtggctaatgggcatggcggcgcttggcatggtgatcatctttacctttttgctgttccaaaaaattcgtactgctgatagcgcccccgcaatggctagcagcaagtaa

SEQ ID NO: 15922 - DNA, 1425 bp, Escherichia coli
atgcaacataagttactgattaacggagaactggttagcggcgaaggggaaaaacagcctgtctataatccggcaacgggggacgttttactggagattgccgaggcatccgcagagcaggtcaatgctgctgttcgcgcggcagatgcagcatttgccgaatgggggcaaaccacgccaaaagcgcgtgcggaatgcctgctgaaactggctgatgttattgaagaaaatggtcaggtttttgccgaactggagtcccgtaattgtggcaaaccgctgcatagcgcgttcaatgatgaaattccggcgattgtcgatgtctttcgctttttcgccggtgcggcgcgctgcctgaatggtctggcggcaggtgaatatcttgaaggtcatacttcgatgatccgtcgcgatccgttgggggtagtggcttctatcgcaccgtggaattatccgctgatgatggctgcgtggaaactggctccggcgctggcggcagggaactgcgtagtgcttaaaccatcagaaattaccccgctgaccgcgttgaagttggcagagctggcgaaagatatcttcccggctggcgtgattaacgtgctgtttggcagaggcaaaacggtgggagatccgctgaccggacatcccaaagtgcggatggtgtcgctgacgggttctatcgccactggggaacacatcatcagccataccgcgccgtccattaagcgtactcatatggaacttggtggcaaagcgccagtgattgtttttgatgatgcggatattgaagcagtggtcgaaggtgtacgtacttttggctattacaatgccggacaggattgtactgcggcttgtcggatctacgcgcaaaaaggcatttacgatacgctggtggaaaaactcggtgctgcggtggcaacgttaaaatcgggttcgccggatgacgagtctacggagcttggacctttaagctcgctggcgcatctcgaacgcgtcagcaaggcggtagaagaggcgaaagcgacagggcacatcaaagtgatcactggcggtgaaaagcgcaagggtaatggctattactatgcgccgacgctgctggctggcgcattacaggacgatgccatcgtgcaaaaagaggtatttggtccggtagtgagtgttacgctcttcgacaacgaagaacaggtggtgaactgggcgaatgacagccagtacggacttgcatcttcggtatggacgaaagatgtgggcagggcgcatcgcgtcagcgcgcggctgcaatatggttgtacctgggtcaatacccatttcatgctggtaagtgaaatgccgcacggtgggcagaaactttctggttacggcaaggatatgtcactttatgggctggaggattacaccgtcgtccgccacgtcatggttaaacattaa

SEQ ID NO: 15923 - DNA, 543 bp, Escherichia coli
atgacgtacgcagtggagtttgacaacgtctcacggttgtacggtgacgtgcgcgcagtagatggcgtcagtattgcgataaaagatggtgagttcttctctatgctggggccgtccggctccggcaaaaccacttgcctgcgcctgattgctggattcgaacagctttccggcggggctatctctatttttggtacgcccgccagcaatctgccaccgtgggagcgggacgtgaatactgtcttccaggactacgcgctatttccgcatatgtcgattcttgacaacgtagcctacgggctgatggtcaaaggcgtgaataaaaagcagcggcacgcaatggcgcaagaggcgcttgagaaagtggcgttggggtttgtacagcaacgtaaaccgtcacaactttctggtggtcagcgccagcgagtcgccatcgccagagcactggtgaacgaaccgcgtgtgttgttgctggatgaaccgctcggcgcgctggatctcaaattgcgcgagcaaatgcagcttgagctgaaaaagctgtaa

SEQ ID NO: 15924 - DNA, 1146 bp, Escherichia coli
atgagcaagacatttgcccgcagcagcctgtgtgcgctcagcatgacaataatgaccgctcacgccgccgaaccgcctaccaatttagagaatccggaagggcgactggatattatcgcctggccgggatacatcgaacgcggacaaactgataaacagtacgactgggtaacgcaattcgaaaaagagacaggctgcgcggtgaatgttaaaaccgccgcgacttccgatgaaatggtcagtctgatggccaaagggggttacgatctggttacggcatccggcgatgcctcgctgcgtttgattatgggcaaacgcgtgcagccaattaataccgccttgattcccaactggaaagcgctcgatccgcgcgtggttaaaggcgactggtttaacgttggcggcaaagtttacggcacaccttaccaatgggggccgaacctgctgatgtacaacactaaaaccttcccgacgccgccggatagctggcaagtggtttttgttgagcagaatctgccggacggcaagagcaataaaggccgggtacaggcttatgatggccctatctacattgcggatgccgcgttgttcgtcaaagccacgcagccacagttgggcatcagtgatccgtatcaactcaccgaagaacagtatcaggcggtgctgaaagtgctgcgcgatcaacataatttgatccatcgctactggcatgacactaccgtgcaaatgagcgatttcaaaaacgagggtgtggtggcttccagtgcatggccctatcaggccaacgccctgaaagccgaaggccagcctgtcgctaccgttttcccgaaggagggcgttaccggttgggctgacaccaccatgctacatagcgaagcgaaacatccggtttgcgcctacaaatggatgaactggtcattaaccccaaaagtgcagggcgatgtggcggcctggtttggctcgctaccagtagtgccgcaagggtgtaaagccagtccgttattaggcgagaaaggttgtgaaacaaacggttttaactatttcgataaaatcgccttctggaaaacgcctatagcagaagggggcaagtttgttccctacagtcgctggacgcaggattacattgccattatgggcggtcgctaa

SEQ ID NO: 15925 - DNA, 861 bp, Escherichia coli; identical to SEQ ID NO: 5314

SEQ ID NO: 15926 - DNA, 558 bp, Escherichia coli; identical to SEQ ID NO: 7707

SEQ ID NO: 15927 - DNA, 1071 bp, Escherichia coli
atgagtacagaaatgaaaacggggctggtgctgtccggtggcggggcggtgggcgcttatcaggcgggagtggttaaggcactggcagagtgtggtacacagatcagcatggtttcaggggccagcattggcgcattcaatggtgccattatcgcggcctctcccgatctgtcagaagctgccgtacgcctagaggcgctctgggatcatctggggaataatcaggtgctgtcggtaaaccgattggtttacttttcattgctgaaaaaattgttccaggcaatgaacctctgccagatccccggacgtgcaggagcactgcttacgacgcttcttcgccatatatcgatactcaacgggtttgacaatctgatggctcagccgttgttgtcagatgagcccctgacagcgctgttggatcattatcttgatactgatgctctggcagacgggctaccgctgtatgtgtcgctgtaccccacagaagggggcatgcaggatattattgactgcattcgtgctgaactgggtgccggaaccacgaaaaacgccgtttttcagcatatccagagcctgccccgcggacagcagaaagaggctctgcttgcgtcagccgcgctgcccctgctgttccgtccccgtgaggttcaggggacaatgttcggtgatggtggtatgggaggatggcgaaatatgcagggaaatacccctgtgacgcctctggtcgatgccggatgcaatatggtgattgtgacgcatctgagtgacggttctttatgggatcgccaggcttttccggacaccacaatccttgagatccgtccccggaaaaggctgaaatatgcaggtgatggtgacaacagcggcggtctgctcagtttcacgttggcacataccgacgcctggcgtcagcagggctatgaagacacgatgctgacgatggagcatatccggaaaccgctggcagcacgtcaggtactgtcccggtcagaaacggtgttgcagaaaagtctggagataacggaagaggcagatttggcactgagaaacgcgatggcccggattaaataa

SEQ ID NO: 15928 - DNA, 594 bp, Escherichia coli
atgtcatctagtcactcaaagactttaggctataagaggctgactaaaagcaatccaatctcatgccaaattctattgtataaatctcgctctaaaggccgaaaaaatcagcgctcgacacggactcattgtcaccacccgtcacctaaaatctactcagcgtcggcaaaggagccatgggttctagcaactaacttacctgttgaaattcgaacacccaaacaacttgttaatatctattcgaagcgaatgcagattgaagaaaccttccgagacttgaaaagtcctgcctacggactaggcctacgccatagccgaacgagcagctcagagcgttttgatatcatgctgctaatcgccctgatgcttcaactaacatgttggcttgcgggcgttcatgctcagaaacaaggttgggacaagcacttccaggctaacacagtcagaaatcgaaacgtactctcaacagttcgcttaggcatggaagttttgcggcattctggctacacaataacaagggaagacttactcgtggctgcaaccctactagctcaaaatttattcacacatggttacgctttggggaaattatga

SEQ ID NO: 15929 - DNA, 585 bp, Escherichia coli
atgtgcgaactcgatattttacacgactctctttaccaattctgccccgaattacacttaaaacgactcaacagcttaacgttggcttgccacgcattacttgactgtaaaactctcactcttaccgaacttggccgtaacctgccaaccaaagcgagaacaaaacataacatcaaacgaatcgaccgattgttaggtaatcgtcacctccacaaagagcgactcgctgtataccgttggcatgctagctttatctgttcgggcaatacgatgcccattgtacttgttgactggtctgatattcgtgagcaaaaacgacttatggtattgcgagcttcagtcgcactacacggtcgttctgttactctttatgagaaagcgttcccgctttcagagcaatgttcaaagaaagctcatgaccaatttctagccgaccttgcgagcattctaccgagtaacaccacaccgctcattgtcagtgatgctggctttaaagtgccatggtataaatccgttgagaagctgggttggtactggttaagtcgagtaagaggaaaagtacaatatgcagacctaggagcgtaa

SEQ ID NO: 15930 - DNA, 396 bp, Escherichia coli
atgctgcagggcgtaatcccgcaaccggtaataatggaccgtcatggcataattctccgtacgacaggcgtgatggctgtacgtcatcagacaggcggcaatgccggcagcttccgggctcatttcagcgcggttaccgttcatggcattgaacagtatccaggtttctccatcatcttcatccggttcaggtgctataaatgcgccaccgttgttcagggtgtacagattccagatacccccgcagtagttttcgcacagacggtccatccagccgaagacacggggctccagggtgacccactgtggaatgaggccaaaatgctgcggccagaagctgatgcgctgttcatcagggacgggagtggcaaccaactgagactggttattccctga

SEQ ID NO: 15931 - DNA, 801 bp, Escherichia coli
gtggggatcgcaatccagcaccaaccagcacatacaccggaacacactaaggtttatcagactgacaatgccacgctctgtcgtgggaatgcgctggaaatattgccgctgattgagccagaaagtattgatgccttaatcactgacccgccttacagttcgggcgcgacacacaaggccggacgcaccaaccagggcagccacgcaaaatatctgaacggcgagagccttcaccgctttgatgaatttgcgggtgaaaacatggatgcccgttcgtgggcttactggacacaattatggatggcacaggcacaccgcgcagtcaggccgggcggttatgccctggtatttactgactggcggcaactgcctgctttaaccgatgcgtttcaggccagcggttttacatggcgtggaattattgcgtggaacaaagggagggggtcacgaacaccccataccgggtatttccggcatcagtgcgaatacatcgtctggggcagtaaaggccatttaggtaaatcgccttcgggtccgttcgacggctgcatgacgttcccggttatcccgtcaaagaaaatgcacccgaccggaaaaccagaagaactaatggcggaactggtcaggactgtgaatagtggcggaacagtccttgatccttttatggggtcagggacaacgggtgtggctgcactgaaagcagggcgaaaatttattggtatagaaaccagtgatcattattttgaggtagcagcgcaacggcttcgggggactattaccacaaccatttcggctccataa

SEQ ID NO: 15932 - DNA, 273 bp, Escherichia coli
atgaagcgcggcattcacttccgttgcacgggcaataatggatacggcatcgctccgggtgccgtccaggcccgcgccattgatggtgatactgccttcagtcacctccagcgcctgcaggctgccgtcggcattcatcacaggtttgcctgtggtgagcgtcgcgtgcggcgtgttgataaaaccacagccgtcacaggtgataccatacgggttggcaaccatcacattcgccgctttgccggccacttccgtatagccctgcaacagtga

SEQ ID NO: 15933 - DNA, 273 bp, Escherichia coli
atgagtaagcaaactgttcagtgccccttttgttttaaagaaagtccccacggcgtaaaaatatgcaccggatgccatgcaaaagtggcctatggtgaaagtccgctcagtgtagccttcctgtttcaattcgtggcgttcggtctcgcatggttagcattttcattgaccggaagcactccagtctcggtcattacgtttttcgtaagctgtattgttcttatatatatacttaaaaaaatctatgcagacagggttttatttattcgataa

SEQ ID NO: 15934 - DNA, 1200 bp, Escherichia coli; identical to SEQ ID NO: 11028

SEQ ID NO: 15935 - DNA, 1590 bp, Escherichia coli
atggacaaagtattagtgcacaggggattttcaactcttaatgttattactgtcgcattatctgttgtggtggtgtttgagattatactcagcggtttaagaacttacatttttgcacatagtacaagtcggattgatgttgagttgggtgccaaactcttccggcatttactggcgctaccgatctcttattttgagagtcgtcgtgttggtgatactgttgccagggtaagagaattagaccagatccgtaattttctgacaggacaggcattaacatctgttctggacttattattttcattcatattttttgcggtaatgtggtattacagtccaaagcttactctggtgatcttattttcgctgccttgttatgctgcatggtctgtttttattagccccattttgcgacgtcgccttgatgataagttttcacggaatgcggataatcaatctttcctggtggaatcagtcacggcgattaacactataaaagctatggcagtctcacctcagatgacgaacatatgggacaaacaattggcaggatatgttgctgcaggcttcaaagtgacagtattagcaaccattggtcaacaaggaatacagttaatacaaaagactgttatgatcatcaacctgtggttgggagcacacctggttatttccggggatttaagtattggtcagttaattgcttttaatatgcttgctggtcagattgttgcaccggttattcgccttgcacaaatctggcaggatttccagcaggttggtatatcagttacccgccttggtgatgtgcttaactctccaactgaaagttatcatgggaaactggcattaccggaaattaatggtgatatcacttttcgtaatatccggtttcgctataagcctgactctccggttattttagataatatcaatctcagtattaagcagggggaggttattggtattgtcggacgttctggttcaggaaaaagcacattaactaaattaattcaacgtttttatattcctgaaaatggccaggtcttaattgatggacatgatcttgcgttggccgatcctaactggttacgtcgtcaggtgggggttgtgttgcaggacaatgtgctgcttaatcgcagtattattgataatatctcactggctaatcctggtatgtccgtcgaaaaagttatttatgcagcgaaattagcaggcgctcatgattttatttctgaattgcgtgaggggtataacaccattgtcggggaacagggggcaggattatccggaggtcaacgtcaacgcatcgcaattgcaagggcgctggtgaacaaccctaaaatacttatttttgatgaagcaaccagtgctctggattatgagtcggagcatatcatcatgcgcaatatgcacaaaatatgtaagggcagaacggttataatcattgctcatcgtctgtctacagtaaaaaatgcagaccgcattattgtcatggaaaaagggaaaattgttgaacagggtaaacataaggaactgctttctgaaccggaaagtttatacagttacttatatcagttacagtcagactaa

SEQ ID NO: 15936 - DNA, 372 bp, Escherichia coli
atgaaaaatcaactttatagccgtcaaggaatatacgacataatcagaagccactatttaagaaactttccatatacgattcaatttgaagcgcttaatgcaataaatgaacacattagccttataattgatagcgcatcaatacaaaaaagtgaaagtggtgagtacgtatttatcaataataatcctaatatggaagttgatgacccatttgaaagcacagagagaaatcttgctgcttatctatcaaagtctagtggtgttgaagcgttattccaagatgtgaacgcattacaaaaatggttgctccaatatggatttatccatggtggtatagcgactgaaaaaatgctggttacgaataaactataa

SEQ ID NO: 15937 - DNA, 468 bp, Escherichia coli
atgacagtaaatcttggcgatgtgtttggtggtttggcgttttttctctcaatctatgcaacaattaaaaccgtaaagttcaatgaaagacaaaaagcgttaatagaagcgcaagaaaggttaacgaatctccaacttactaaagaaaaaaatgagttggaaagttcaaagaaagctgatattagtgcaagcatggtctctgtaggaaatagagaatataaactaagagttattaataaagggaaggtttctgcgaaaaatgtaagaatagaatttcccgataataattcaccagtatcaatgagtgacgttaaaagcaaatttccgcttgagtatctcgcgacagatcaaccagtcgatctcattgcgtcaggagagttaggtcgagcaaggaaatttactgtaagactaatgtgggatgacgatttcaaggatgataatgaaattgttttacatataacatattga

SEQ ID NO: 15938 - DNA, 1035 bp, Escherichia coli
atggcgatgtctgctcaggcagctgaaatttataataaagacagtaacaagctggatctatacgggaaagttaatgccaagcactacttctcctctaatgatgcagatgatggtgatactacttatgcccgtcttggcttcaaaggtgaaacccaaatcaacgatcaactgactggtttcggtcagtgggaatatgaattcaaaggcaaccgtgctgaatctcaaggttcttccaaagacaaaacccgtcttgcatttgcaggcctgaaatttggtgattacggctcaatcgattacggccgtaactacggtgtagcatacgacatcggtgcgtggactgacgttctgccagaattcggtggtgatacctggacccaaacagatgtgttcatgactggtcgcactactggtgttgcaacttatcgtaacaacgacttctttggtctggtcgatggcctgaactttgctgctcagtatcagggtaaaaatgaccgcactgacgtaactgaagccaatggtgatggtttcggtttctccactacttatgagtatgaaggattcggcgtgggtgcaacctatgctaaatcagatcgcactgacggtcaggtcgcctatggtaagagcaaattcaatgcctccggcaaaaatgcggaagtatgggctgcaggcctgaaatatgatgcgaacaatatctatctggctaccacatattctgaaactcagaatatgaccgtttttggtaataaccatattgcaaacaaagcacaaaactttgaagcagtagcacaatatcagtttgacttcggtctgcgtccatctgttgcttaccttcagtcaaaaggtaaagaccttggtgttcatggtgaccgagacttagtcaagtatgtcgatgtcggtgctacttactactttaataaaaacatgtccacttttgttgattacaaaatcaacttaattgacgatagtaagtttaccaaaacagctggtattgataccgacgacatcgtcgctgtaggtctggtttatcagttctaa

SEQ ID NO: 15939 - DNA, 672 bp, Escherichia coli
atgactcctctattttcaaagaaattaagcaagataataagttatagcctattaattttcagtagcttctttttcgctttttctgaaaccatattaagtgcactccttgcaattttgccagaaggatccattgccagtgaaaaattaagtttttacttagcaaccgagcaatacaggccacagttatctattgggagtggcactattcttgacattatacttatttttctgatatgtgtaagttttaaacgaataaagaaatatatgctcgctaattataatgctgcaaatgagatattgcttattggttgctgtctttatatttctttcggtatttttatcgggaaaatgatgccagttatgactcgcattggttggtatggttttccatttgttatagtacttctttatattaacttgggttattcagaatattttaagaggtatataaataaaagagggtgtgggtatagcaaattattaattgctttttattttttgctacaaattttgcgaccattaacatatgattatagctattataatataatgcaccaggatactttgctgaataggtttgatgcattagatgatgcatcattaagacaatcagcgaagagaaaatgtttcgatttgggaaagataggatatggtttcttatgtagtatataa

SEQ ID NO: 15940 - DNA, 351 bp, Escherichia coli
  misc_feature (334)..(343): n is a, c, g, or t
atgctgataggtgagttagctagtgtcaccagaaatggagacaagacactcagtggtaaaagttatattgactattatgaagagggaaagcggctggaaagaaggccaaaagagttccagcaacaaatctttgatccattaaaaggaaatattgacctttctgacagcaaatcttctacgttattgaaatttgttacgccattgttaactcccggtgaggaaattcgtgaaaggaggcagtccggaaaatatgaatatattaccgagttattagtcaagggtgttgataaatggacggtgaagggggttcaggacaaggggtctgtatatgatnnnnnnnnnngtatatga

SEQ ID NO: 15941 - DNA, 438 bp, Escherichia coli; identical to SEQ ID NO: 11040

SEQ ID NO: 15942 - DNA, 324 bp, Escherichia coli; identical to SEQ ID NO: 10084

SEQ ID NO: 15943 - DNA, 141 bp, Escherichia coli
atgctgaaaggcgggatttccggtcgcagtgcaaaaggaaaacgtatccatacccgggccattcacagcatcgacaccgacattaagctcaaccgtgcattgtgggtgatggcagaaacgatgctggagagcctgcgctga

SEQ ID NO: 15944 - DNA, 795 bp, Escherichia coli
atgatcggtcgactgcttcgcggcggttttatgaccgctatctacgcgtacctgtatatcccaatcattattttgattgtgaactcctttaacagctcgcgctttggcatcaactggcagggttttaccaccaaatggtatagcctgctgatgaacaacgacagcctgttacaggcagcgcagcattcactaacaatggcggtgttttcggcgacgtttgctacgcttatcggttcactgacggcagttgcgctgtaccgttatcgctttcgtggtaagccgttcgttagcggaatgctgtttgtggtgatgatgtcaccagatatcgtgatggcgatttcgctgctggtgctgtttatgctgctgggtattcagcttggcttctggtcgctgctgttctcgcatatcaccttctgcctgccatttgtggtggtgacggtgtactcgcgcctgaaaggttttgacgtgcgaatgctggaagcggcgaaagatctcggtgccagcgaatttaccattctgcgaaaaatcattctgccactggcaatgccagcggtggcggcgggctgggtgttaagctttaccctgtcgatggacgatgtggtggtttcttcgttcgtcaccggaccaagttatgaaattctgccgttaaaaatttattcgatggttaaagtcggcgtatcgccggaagttaacgcgctggcaaccatattactggtgctgtcgctggtgatggtaattgccagccagcttattgctcgtgataaaacgaaaggtaacacaggggacgttaaatga

SEQ ID NO: 15945 - DNA, 267 bp, Escherichia coli
atgcgcagaaaagaatcaaacgttagcagtttgccggaactcaccaattttgaggtaagctattccctagttaccaatgaagtttacttgtctgcatccttcactgataacatggcctgtataccaaactggcccttacaagaatttccggatcaactaatatgcatttctcgagcaaaagctattgccctaatcgaagagctccagaagaccatcgactatatggacgcaggaatcgatcgacaatcaggtagcctgctccagtag

SEQ ID NO: 15946 - DNA, 846 bp, Escherichia coli
gtgaataaaaatccctgggatattccagcatggcacgctctgggccgagaagcatctttagttacacagctcattggttctggggcaacagccataggtaaagccaattatgcagacaaaataggtgaatattacacagcattttttgggctttctgtaggttttgagagacttgctaaactaatacttgttgcacactatgccattgaacacaaagggaaaatgcctgatgagaatattgtaagaaaatttggacataagctcattgaattaaccaacgaggttgatagtatttctaaaaaaatgcaactatctctgagatattcacgtcctacacataaaattacctacaaaatacttgaatgtttagattcctttgctgatgcccgacggggacgttacgcaaatttctcctcattaagcagccccaatttaaccaataatgaacctattaataaatggtggggagaagtagccgagagtatccttgaaaaacattattattatacagttgaacaaagacgtgttgaagaaaatgctaggtttatcaatgccactctttcaccgtatacaacggtcatgtatatgaatgaaagtaccaacattatgcaagaccttatatcagcctccatccgtactggacaaaataccattgttcaaaagtggggaagattctattctcttagcatcgctcgttggcttgccacagtattagcagaactgtctgatatagcttctcataaatatggaataattagtttttatggccttagtgaacattgttgcagttatatagttgaagatagttttttaaaaaacagaaaaatatggccacttcgccaatag

SEQ ID NO: 15947 - DNA, 513 bp, Escherichia coli
gtgacagttgatgatgatcctttgaattcatttcaagaccctgactttcaggaacttctcggcggaattgatattactcttgttataaggttttttaattatttttcgcgtttcgaatatgcgttaaaaagaattaatttcaaaaaaactgatcgtagaaattatctaatcggtgctgactggagccgctacgctactgatgatacgcggcctttatatcctactggaaatagaaatgtcgatagggcagttgagtatctatgtcagcaacctgtgaagcagcagaggcatgatttttcgtgggaggataaacctccaatcgaacctcattctcttgctgaagcattaaagcagatcccgtatataagaaataatctctttcacggcgggaagtatttacgtcccgcccccgttcgtgatgaaaagttattgaaatactctatttatttgatgcagttgtgtttgataactgataatcagctttctgaatactttaatactatccaccgatag

SEQ ID NO: 15948 - DNA, 423 bp, Escherichia coli
atgcgtgatattcgactggttttagagcgatgggggggctgggctgcgagcgaaggttgcagtgtctactatccacctgtttccgctggatttaagaatctgctacctgcaacgcaagccgggcggctgaagtgcagtgacaatgacggtctgatcatcagctctgctatgaactgcctgaagaaaaaagatccgtacctgtgtacgctccttgagtggcattacatccaggcgatgcctgtgagggctatgggtgtgaagctcggcgtatcacacactcaagttctgaagaggctccaggctgcagagggatttatcgacggctgcctggctatgctggacgtggttctggaaatggatcaagcagttcagtcaaagcctaaggctatcaggactttgcgaaggagctgcccggcggcataa

SEQ ID NO: 15949 - DNA, 291 bp, Escherichia coli
atgtcaaagatattccgccaatgtatgccttacggtatccgcaaaacagctgagggggcttgggaagcattcaacagagactaccagcccttaggggaggcttttttcttcaaaagagcactaacgcaggccactcgagatgtgttggcgccaccgccggtaactcagcgcgacgactgtgtatggctgtatagcgatatcgagcacccgatgcactctgaggcttactggaaagcgtattgccagcggcttaaacatctttctaacctcaaaatgaaagatgaacggtaa

SEQ ID NO: 15950 - DNA, 2262 bp, Escherichia coli
atgtctgataacaaaccatggggagctacgcccgatgagtggttccacttcgatctggtgttggggatgacagacaggcttttacctgtggtgtccaatccctgtgcagaactgtcgcctaatagcaagctgtctcataatttcggcaaaacccccagtcgctacaatggccaacgtaaggttgttggtatccccgactgggctaactatgttgttacggaaaacgattttgcccggtggtcgaacgaacccgattacggtatttgcgttcgtactggcgacggggtggtggctctggactgcgatatcaatgacgccgggatgcaggagatcgtacgcaatattatcctgtcatgcctgggggaacttccgccacgtcgctggcgggctgacagtcataaatgcctgtacctgattgctgttgatggcgactaccgtaaacgtggtcaccgcctggaaggcgaaaacaaacaaatagagctgctcgctaagggccagcagtttgtggcttgtggtacccatccggcaggcgaacgtattcagtgggactgcggtctgcccggcgaacctctgaaaattacatctgaacagctcgaaagcctgtggcagcgtctggcggataacttacccgtgaaagacagctataccgcaggtgcaggacgtcagcgtgatctttcctgtgttgatccttccgcgacagatgatgtcgccgactggcttgacgcgaacgggtggactctgtcagtcagctctgatggttcccgcaatctgaaaccgtttcgggatgagtcagaatacagcaacggttgcagcgaaacatccattaagtatttcccaaaagggacggggggatttgaacagggacattttaaaagcatgcacaacaccgatgcggggcttactgatgccgactggctggaaggctacggctatacgcaatccctgttcgaagatctcacggtggttgaagatggcgataagcctgaatttaccgatattaatacagatatgacagctcattttctggaacgctttatctacgtcatcgagggtgaccaggtatgtgatcttagccgaccgccatatcagtgcatgatggatatgaagtcgttcaaaaacctgatggcgccttaccagttcccgccagaagggaaagggcaaccaactcccgcaaccaaacggtggatagagcatcggcataagaagattgctgagacgacaggctataagcccggtgcgggacgtattatcgagcgtttcgacgggcggtttgagataaacgaattttatatgcctgagcatccacgtacagcggatacaagtaaggtgtccacgttccttaatcatatggcgtatctggtacctgatgcctggcagcgcgagtttttcatcgcccgtctggggtggatggttcagcgtccggagcgtcgatgcccgatttctattctgcatgtggcttccgcacatggtacgggcagaggatgggtcagccagttaatggagcgcgtgcttggtccgtggaactgtgctcgtactcgcatgaagatcctgtgcgataaccagttccatgactatctgtacaatacgcttctatgcaccattgacgaggtgcgcgaaaatgataagcggtatgaggtgaacgataagatccgtgacgtgctgacagaaccacggtttgaagtgaaccgcaaatatggcagcaaaaaaacgatggatatatacaccggctttctgttctacaccaaccactttgatgcgctggcgctgccagaggaagaccgacgtatcgctgtgctggggggccctgacttcgccgcaactgaagagcattacgccagcctgtacggtgcgctaagcgacagcgactttatcgcccaggtgtactggtatctgatgggcgttgacctgtctcgctttaactggcagcgcgcccccgagacgaaagaacgccttctgatgattgaaagcaataagagcgatgtggaggctgctcttattgaaatcctggataatccgcctgtgccagcaatgacttatcaacaaattgttaacgcaatactggcagaagcaggaatggatgtagaaattaaccagaagcatattactcgcattttgaaagaaagaacaaagcgggaacccgtacgcgtaaaaattgacgggtttgtatataggatttggattcttgtaaaaaataacgatttcagcaacgaagaattgcgcgaaatatataaatcttgcgaaattttgcaatctggattgtaa

SEQ ID NO: 15951 - DNA, 324 bp, Escherichia coli
atgctgcggtccgtatccgcgttgattaattttatcatcagcttcagaattacccgactgtgcagggtctgctgcagggccagggaagttgcagcggcctcactgatacggcatgacaccattgccgcggcaatggtgcgaaaccgggcactgccaacacattcacggaccgtcaccccgcccctactgacctcaatctgcactaatttgctattactctccgccttcgtaaaggtgatggtgtggctggaaaaaaagaaactgaacctgaacggctcagtgaatggctcagtgcgttgcagctcagtcctcaccaccgtctga

SEQ ID NO: 15952 - DNA, 2499 bp, Escherichia coli
atggctatatcatcatatagtacagttacagataaatttgctactctgactaaaatgcaagatgaaaatctgaatgaaaaaaatagaacgcaaaaatattcaggaaaaattggtttgtctgttgatgatgtgggtaagtattcagtaactcataaagatataacaaacattttagctggtgatagtcaatctttccttaaacgaagtctttgggaatttatactcgatctttttcccatgtatcatattaaggaggctaaacaagccattatagatttcgtgtcggaaactggtgataaagctgatatatttaataaaattaaatctctcgccgatcaagatcaacaatggcgctttaatgcgacgacagaatttattgtagatgaaaataaagatattattgttagtagagtatttaaaataaatattaatgcgcaagatcatcatattgatgctgaaaaaaagacaatgcattctttattttcagaaaaaatcagttttgatatttataagcatgatattcattttgatgagaaagcttttcaatcagggatgttgaaaatacagttcccaaatgataatgaaaagcttagcgtatatttaaaaaataaaatcccctttgaaaatatcacaattgatttatctgcactggaaaaagaagccctggcatctttaaaatattgtaactttaaaaatgtgacattcactggtaatatatcttacgaaaatcttaatggttcagtatttgaaaattgtttttttgagggctgtaaatttgagaatgtgtcacttataagctccaggtgtcgagtaaaactaaataatgaaatacctatttacggcgtgtttaaagagtgttttctgtatcgatgtgaaataaaaaattttaacatagatacatcaaaaatatactctgtaaatcaagatcccaatgtgggtaagcaagttggtgcatatctgtttatgcaatcatttgtatatgaatgtactcttctgaatggagtgtgtaaaaatgcaagtattattgcaagcagtttgttatgttgtaaaatagcaaagcttaatggtgctgaaatggatttcatagggacttcgttttatcacaaatatagatgtgaattaaaatatgataatcatttttatatgtgtgattttagctcatctgatatgacatgcaaacgaaatggaattcgcaaagatttactggattttgatcccagagaatatttcaaaaaggatggaggtaaacttaatctggataaacacatttcaaaccttatctacgttaatcttttccctaatatgagtggcggtcgttatataaatgataaatacgttgctgatgatatagataaatatttaaaacttagtaattgcaatttacttaaaacttgtttgggcgagtcaatcaatggaattaaattggatgattgtgctattgatccttcaaccacttggttaagtggtaatcttgctgcgaatagccagattagaattcctgtttatatggacatgaaaggagctatagctgaaaatggcatttcagatttcatggaaaatttaatggaagttaattcatgggtagaagaattcaataattatggcaaggatgcgataagtcattacgaaaaggaactgttatatttacaatctttgttggtcaagctgggtagcttcaatcttgatgatgaaggcaaaaaatatcaacttaatggtgaagctatccagtatattatattaaatgttttgtacaatatagaaaaagatatagccaatgaaatagatattgataaagtaaatttcatgcataacctctatactggattcttttggcaaagacattacgatgaacgtaactatttaaaaataaatcgttctgctatttcaaacagcgcaagatttcacttccactttaattttaatgatttgcgggatatttacaaagactataataataatcatgaagatgataattttgataaaatgcaaaagatttttttagcattgaatgaatttaaggaaagaacggaaataaattacagggattataggaaagtatcaaaatatgtagatgataaagtcgatttattctctagcattgagcaatatttacggtgggtaattgagaaaaataatgactataataaggaaaattatggcgatataaaagacaaatatgccaaacttattgtcgaaagaaatgatttagtcgatactaaggatcaattaattaaagaggatttttacttaaataataaagacaataaagataaaaaagatgcggaaagaattaatgagattaaggggataataaaggtgatagatggaaaaataccaaatataagtaaagagattctacatcttaaggatgaaacagagagattggtgaaagagtatcaacaagaaaatacacttaatgatgtagttaaaaatatcaggagttggctaaaagaaaatgaaaatatggtgaaagctattaagaaaactgatactgaataa

SEQ ID NO: 15953 - DNA, 294 bp, Escherichia coli
atggatataacacctttccttcatgctctttgtgctgtggctgcgcagctactgattggtctttttaccgggaactgggcttacggagcgatagccggttgtacgttcttcattgcgcgtgaacacacccaggcagaatatcgctggattgaaatgttcgggcatggcaagcgtatgaatatgccgtggtggggcggttttgatccacgcgcgtgggatgtggcaagcatgatggattttgctgtgccggtggtggcgtgtctgctggtctggcggttagttaatcgtgggtga

SEQ ID NO: 15954 - DNA, 1335 bp, Escherichia coli
atgccgcgctatcaggatatcgcccgtcagttaaaaacggctattgagcaaggggaactgaaacccggcgcaaggctgccttcaagtcgtacctggtcgcaggagctgggggtgtctcgatccactgtcgaaaatgcgtatgctgagctggtggcgcaaggatggctgatcaggcggggacaggctggcacatttgtcagtgagcggatatatccgcaacaatctactgtacaagttgtagcttttgccggtgaaagtcagcaaccgttgccatttcaaatgggattacccgcactcgatctctttccgcgagagctgtgggcgcgggtgatggggcgtcgccttcgtacccagacgcgctttgatttggcgttaggcgatgtctgcggtgaggtggcgttgcgcgaggcaatagttgattacttacgcgtttcacgtgggattgattgtcagccagagcaggtctttatcactcacggttatgcggcctcaatagctttaattctgcacgcgctggcgaaaccgggaaacgggatgtggatagaagatcccggctttccactgattcgcccgattgtcactcgccatgatgtggaaattttgcctgtgccggttgatgacaatggactggatatcacaagcggaatacaaaattatcctgatgcgcgttttgccctgataacaccagcacaccaaagtccgctgggtgtggcgctctctttagcgcgcaggcatcagatactggaatgggcagatcgtagtcaggcatggattattgaagatgattatgacagtgagtttcgctatcacggtaagccgttaccggcgttaaaaagtctcgacgcaccgcagcgggtaatttatgccggaacattcagcaaagcgctatttcctgcattgcgctgtgcgtggctggtgttgccagtgaagcaaattgcacaattccgccaccaggcgtcactggctccatgtgcggtacctgttctatggcagaacacactggcagactttcttcgcgaggggcatttctggcggcatctgaagaaaatgcgtcagcattatgcccaacgtcggcaatggattgagcaagcgttgacgcagcaaggatttcaggttgtgccgcagaaaggtggtatccagatggtgatcagaatgataggcgatgatattgcccatgcgcgtaaagccaatgctgcaggccttgcggtgcaggcacttagcgactggcgtatccgttcaagtggggaaggtggattactgctctcgtttactaatatcgttaacgaaggtatggcgcgacaggtagcacaacaattacgtaaagccttaagctaa

SEQ ID NO: 15955 - DNA, 1638 bp, Escherichia coli; identical to SEQ ID NO: 15823

SEQ ID NO: 15956 - DNA, 1029 bp, Escherichia coli
atgattatcggaaatgaagtggttgatcttgctccactgttcgaattaaacgactcacgcaattacctactgtctaccctggattttactgatcctgtgcctgtagaaagtcacaaagtggctgtttcccagcttatcgagagcaatgaatctctgttcaaccatcctacaagccgttttagctctgagcataacgttactaagcgtgagaacggggaagaatggctgattgaaatcccttacttcctgcgtgaagacctgatcaaaccgcaggacgtgcaaggcaaacgcaaagccggaagctctattgaagaaacactgccggatctgtatgcggaatatatcgctaaacacaatgttgcattccagcgcactaaagaaagcatcctcgcggcttctctgttctctggcaagacacataccccgaaaactgacgatgttctgatcgactacagcactctgttcggtgtgtctccaatgactgcaaccgttgacgcatccagcaccaacacaatgaccgtattcaagcaatttgatcagatgcatacggatatgattgctaaggcacaaagccaggctgcaaccattgagcgtgttgttgtgttctgtaaacctgcggcattcaacgctattcgttacagcgttggcatggttaatgcgttccagtatgcaagccctgtagacgatgcaaacgtggtgtttaatgtgcgttctctgctgcctggtgtaactactttcaccattccaggaactaacattgacctgatcaaagtgactgatccgctgctgctggcacatatgaccgctgacgctgtagctattcctaaacttgctaagggggcaggtgtttaccaagctatttttggtgcgccttccagttcattcgatctgctgtctcaaggcgctaaagagtattacagctatgctttcgaatcgaatcgcggcgacgcagtgcacgtagtgaccgagaatagctcgcttgtggttaaccacggtgttggcttctctgtgcagatcacagtagcgtaa

SEQ ID NO: 15957 - DNA, 375 bp, Escherichia coli
atggctattttaaaattaagcgatgttttcccacatcgtaaaagcatcactgacgtagtgagctatgcaaccgacccttacgcggctgtagaaagcaaaaaatttgcagcacttgcacaagatgtaacgtgcggcgacctcattgattcatccggcgctaaatatgttagcggcgctgatgttcttgtcgttgtgtctgacttcgtaactgctgattcaaataaaacagttaacgtgcttcgtgctaatgccggactcgtttgcatcaaagctgatgccctgaatgccgaaggcgctgtaaaagaagctgctattgcagctctcgctgctaaaggcttccagcttgaaggcttccactctgttttcacatcttaa

SEQ ID NO: 15958 - DNA, 210 bp, Escherichia coli
atgaaacaagaaattatcctgaaatatggcaatgaaaagttaacactaactgaagatgtgttgaatgctacagcctacgcgcttggcatcactcccacagaattaaagaaacagtgtgaacgtctttataaggctgaaagcaataaaccatctcaccaagatttgattaatgctaaagctcaacaaatcaaacaatctaaggaaaaataa

SEQ ID NO: 15959 - DNA, 552 bp, Escherichia coli
atggctaatattggatacattagggtatcgactgtgcaacaaaacacagaccgtcaattagctggagtaactcttgataaagtctttgaagataaagcgtcaggcaagaacactcagcgcccacagtttgaggcaatgatgaactatgtgcgggagggtgacgtgttacacgtccatagtattgatcgcctttgtcgtaatacagccgaccttctggcaacggttgagcaattaacagagcgcggcgtgtctgtgcatttccataaagaagactttaagacagggaagaactctcccgcagggaatatgatgctcacagtgcttgcagcagtggcacaaatggagcgtgaaatgatgcttgagcgtcaacgtgaagggatcgccgcagctaaggccgctggacgtatagcaaaacgtggtaatggaaaagcaattgatcgagcgggaattgttgccgctctcgcgaatggtggatcaattcggagcgtagcaaaagatttcagtgtcagcacacagacggtgcaacgtatcaagaaagagcaggaagcgtaa

SEQ ID NO: 15960 - DNA, 195 bp, Escherichia coli
gtgcgtaaattcctttacctcttatccaagaccatcaaacacatttttaacatcaacctactcaaaatcatcttctggagcttatcagcttggtatgccaactccactcttcaagaaattcattgcattttggaagtgattgctatcgtgaccagtatgataaatcagtcactcaataaaggtatgctgaaataa

SEQ ID NO: 15961 - DNA, 1734 bp, Escherichia coli
atggaacaattcaaacagttcagtattgaaaaacaggctgtgattaactcgctattacagttgcgcggaatgttagaaatgctgggagagatggggataaacatcagcgacgatttacaaaaagtcgcttctgcaattaatgccatcgaatctgatgtcctgcgtattgctctgttgggggcattctccgatggcaaaaccagcgttatcgccgcatggctgggtaaagtaatggatgatatgaatatttccatggatgagtcctccgatcggttgagtatttacaaaccggaaggtctgccagaccagtgtgaaattgttgatacgcccgggctgtttggtgataaagagcgcgaggtggacgggagactggtgatgtatgaagacctgaccagacgctatatatctgaagcacacctgattttttacgtggttgatgccacgaacccgctcaaggagagccacagtgacatcgtaaaatgggtattgcgcgatttgaataaattttcttcaaccatctttgttatcaataaaatggatgaagtgaccagcctgacagatcaggcactgtttgacgagcaggcggcaattaaaaaggcgaatctgaaaggcaaattgcaacgtgcagcggatcttaccgctcaggagtgtgagcagctaaatatcgtctgcgtcgcctcaaacccaaatggtcgcggcttaacgtactggtttgctaaacccgaacattacgaaagtcgttcgcgcattaacgatcttaaaaatgctgccaccgaaatactgaaaactaatgtgccagaggtcttgttggtgaaaacaggtatggacgtggtgaaagacattgtcattcagcgtgtcacccaggccagcagacacctcgatgaactgaatacctttgtcgagaagaatgacgaggatatgcaccgttttagttacgacataaagcaaagccgcattgaggttaaacggctggctggagaattatttgaagagctgaacctgatggaaaaacagctgatgagccaactgcgtccactcgatctggacgatatccgcccgtttatggacgatgagttgggatatacagaagatggggttggctttaagcttcacctgcgcattaagcagtcagttgatcgctttttcgaacagtcgacagcggtctcgcaacgcttatctgatgacattactcgccagttgagctccagcgagaactttctaagtggcttaggcgagggagcgtttcgttctttaggcggggcctttaagggggtgtcgaaaattagtccggcgacgctcaaaacgacaattttggccgcacgcgatacgattggcaaactaacgggatatgtctataaatttaaaccctgggaggctaccaaactggctggaagcattgccaaatgggcaggtcctgtgggtgcagcgtttacgattggttctgatctatgggatgcctataaagcacacgagcgggagcaggaactgaaagaagtaaaagcctcgctggcgaaaatcattaaagagccgtttgaagatatctatgacgtgctgagctctgatgagaaaatgttcgccttttttgcaccgcagatccaacaaatggagcaggttgttactgagctggcagagaaaagtcaggctattcgcgacaaccggcagaaactgagtcttattcagacgcagcttgcacaactaatggtacctgccacagaaaaccatactgccagatag

SEQ ID NO: 15962 - DNA, 456 bp, Escherichia coli
atgataccccgttacgatctgggggtaactgatttcagttcaatggctttaaaagttggcagttatgccatgtcaggcagtgcgattggcagcgtctttcccgttattggcacgctcgttggctctgcgcttggcgcgctggtcggcataataatgaccgttgcaggtatttttaccagtaaagcgtcaaaaatacgtaaagcacaaggaaaagtacgcgacaggctggaggaggtgcgggataaatctctcgacagcgttgtcgatgaaacccgcctcctggttgctgctattgaaaaagaacttgagagtggtctgctgcaaaaagtcaacgatatgcaggtggctctgcaacagcctgttgccattttcgaaacacaaatcagtcgaatcacaacattaaaaaaacaactggaggacatgccttatggaacaattcaaacagttcagtattga

SEQ ID NO: 15963 - DNA, 966 bp, Escherichia coli
atgggcaaagcagtcattgcaattcatggcggcgcaggtgcaattagccgcgcgcagatgagtctgcaacaggaattacgctacatcgaggcgctgtctgccattgttgaaaccgggcagaaaatgctggaagcgggcgaaagtgcgctggatgtggtgacggaagcggtgcgtctgctggaagagtgtccactgtttaacgccggaattggcgctgtctttacgcgtgatgaaacccatgaactggacgcctgtgtgatggatggtaacaccctgaaagccggtgcggtggcgggcgttagtcatctgcgtaatccggttcttgccgcccggctggtgatggagcaaagcccgcatgtgatgatgattggcgaaggggcagaaaattttgcgtttgctcatggcatggagcgcgtctcaccggagattttctccacgcctttgcgttatgaacaactaatggcagcgcgtgaggaaggggcaacagtcctcgaccatagcggtgcgccactggatgaaaaacagaaaatgggcaccgtgggggccgtggcgttggatttagacggcaatctggcggcagccacgtccacgggcggaatgaccaataaattacccggacgagttggcgatagtcccttagtgggtgccggatgctacgccaataacgccagtgtggcggtttcatgtaccggcacgggcgaagtcttcatccgcgcgctggcggcatatgacatcgccgcgttaatggattacggcggattaagtctcgcggaagcctgcgagcgggtagtaatggaaaaactccctgcgcttggcggtagcggtggcttaatcgctatcgaccatgaaggcaatgtcgcgctaccgtttaacaccgaaggaatgtatcgcgcctggggctacgcaggcgatacgccaaccaccggtatctaccgtgaaaaaggggacaccgttgccacacagtga

SEQ ID NO: 15964 - DNA, 2433 bp, Escherichia coli
atgaccacactgaaactggacacgctcagcgaccgcattaaagcgcacaaaaatgcgctggtgcatattgtgaaaccgccggtctgtaccgagcgcgcgcagcactatactgagatgtatcaacaacatctcgataagccgatcccggtacgtcgcgcgctggcgctggcgcatcacctggcgaatcgcaccatctggatcaagcacgatgagttgatcattggcaaccaggcaagcgaagttcgcgccgcgccgatcttcccggaatataccgtctcctggatcgaaaaagagattgatgatctggcggatcgtccgggtgctggttttgcggtgagcgaagagaacaaacgtgttctgcatgaagtgtgcccttggtggcgcggtcagaccgtacaggatcgctgctacggcatgtttaccgatgagcaaaaaggtctgctggcgaccggaatcattaaagcggaaggcaatatgacctccggcgatgcgcacctggcggtgaatttcccgctgctgctggaaaaagggcttgatggtctgcgcgagaaagtagcggaacgtcgctcgcgcatcaacctgacggtgctggaagatttacatggcgagcaattcctgaaagcgattgatatcgtgctggtagcggtcagtgaacatattgaacgtttcgctgccctggcgcgtgaaatggccgcaaccgaaacccgcgaaagccgtcgcgatgaactgctggcgatggcagaaaactgcgatcttatcgcccaccaaccgccgcagactttctggcaggcgctgcaactgtgttacttcatccagttgattttgcagattgaatctaacggtcactcagtatcttttggtcgtatggaccagtatctgtacccgtattatcgtcgcgacgttgaactcaaccagacgctggatcgtgaacacgccatcgagatgctgcatagctgctggctgaaattgctggaagtgaacaagatccgctccggctcgcactcaaaagcctctgcgggaagtccgctgtatcagaacgtcactattggcgggcaaaatctggttgatggtcaaccaatggacgcggtgaatccactctcttacgcgatcctcgaatcctgcggtcgcctgcgttccactcagcctaacctcagcgtgcgttaccatgcaggaatgagcaacgatttcctcgacgcctgcgtacaggtgatccgctgcggcttcgggatgccggcgttcaacaacgacgaaatcgtgatcccggaatttattaaactcggtattgaaccgcaggacgcttacgactatgcagcgattggttgtatcgaaaccgccgtcggtggcaaatggggctatcgctgtaccggcatgagctttatcaacttcgcccgtgtgatgctggcggcgctggaaggcggtcgtgatgccactagcggcaaagtgttcctgccacaagaaaaagcgttgtcggcaggtaacttcaacaacttcgatgaagtgatggacgcgtgggatacgcaaatccgttactacacccgcaaatcaatcgaaattgagtatgtcgtcgacaccatgctggaagagaacgtacacgatattctctgctcggcgctggtggatgactgtattgagcgagcgaaaagtatcaaacaaggcggcgcgaaatatgactgggtttctggcctgcaggttggcattgccaacctcggcaacagcctggcggcagtgaagaaactggtatttgaacagggcgcgattggtcagcaacagctggctgccgcactggcggatgacttcgacggcctgactcacgagcagctgcgtcagcggctgattaacggtgcgccgaagtacggcaacgacgatgataccgtcgatacgctgctggctcgcgcttatcagacctatatcgacgaactgaaacagtaccataacccacgctacggtcgtggtccggttggcggcaactattacgcgggtacgtcgtctatctccgctaacgtaccgtttggcgcgcagactatggcaacaccggacgggcgtaaagcccacaccccgctggcagaaggcgcaagcccggcttccggtactgatcatcttggccctactgcggtcattggctcggtgggtaaactgcctacggcagcgattctcggcggcgtgttgctcaaccagaaactgaatccagcaacactggagaacgaatctgacaagcagaaactgatgatcctgctgcgcaccttcttcgaggtgcataaaggctggcatattcagtacaacatcgtttcccgcgagacgctgctggaagcgaaaaaacatccggatcagtaccgcgatctggtagtgcgtgtcgcgggttattccgccttcttcaccgcgctctctccagacgctcaggacgatatcatcgcccgtactgaacatatgctgtaa

SEQ ID NO: 15965 - DNA, 141 bp, Escherichia coli
atgttcgggcatggcaagcgaatgaatatgccgtggtggggcggttttgacccacgcgcgtgggatatggcaagcctgatggattttgctgtgccggtggtagcgtgtcttctggtctggttgttggttaatcgagggtga

SEQ ID NO: 15966 - DNA, 219 bp, Escherichia coli
gtgataacgcatatggtttataaatctgacagcgatgaactagcagtactgcgggcagaaaatacccggctggtctcattacttgaagctcatgggattgaatggcgacgtaaaccgcagagccctgtgcagtgcgttttcgtattatccacggatgagaaagttgcgttatttcgtcggttgtttcgtgggcgtgatgatgtatgggcccttcgatag

SEQ ID NO: 15967 - DNA, 564 bp, Escherichia coli
atgtataatgccaatcccaattacaaaatggatttcatgattctgaaagacgtgaatgaacacatggatggtatgtttcaacgtttttctaaactgttacctttcagaattgattttgcttacaggaaagacacgcccagtttcgggcattcctgtaagcacagtatgtgtatggaaatataccgtttacttagcgaaacccagacgatgttggcgggatattactgggtaatggaatatacaccagacaaagggcttcatattcattttatcggctacctggatggacaacgtcacaagaactcttatcagatatccaggcaactgggagatatctggaggcggatcacggaaggggagggttactttcacctttgccgggctaaagacaaatacccggtgcgtatcgatcacgtgatgcactatagtgataagtccgcggtagacaacttacgttacgcccttagctatctggctaaacaggatcagaaagaacacggtattattctgggccgtagcaggcttcccgaaaaaagcaaccggggtcgaccacgacataactga

SEQ ID NO: 15968 - DNA, 1836 bp, Escherichia coli
atgcgcacatttacaaatatgttgtatgatatttgtactgttttggggttgtttaaggaaggcgagaatccggcacacaagcggaagagtaccaattttgaaatgcatcaaaaattctgggatcaacgttataatgagatcagtcgtattattgatgctgaaggggtgttcagtcaggagcaacggcggatcatatatgcccgatatgaacatttttattacatgatgaattcttatccagtgcattccacactaaaacctgaattccttcgcagctattgtctgcgcacttttggggttatttttcttgttgtagatatgtataatacatacagaccagagaatgactctgctttttattatcatatttataattttttacagaaatcgtattgtccttgtcttgatcacgctgatacagaaagcgatgaagctgctgttaaacgttatcttcgggaatatctggctgaactgggattcaacaaggaagattttcatgaaaatggaaagctgtatgctctggggaaatatacaggaactatacggaaggataacgggaaaagcaagagcctgatgcaacaatatatcatggctatcaaaaatgaatataaaaaggattaccgggagaagaagctggataaggatgaactggagaaagtgctcaggaatattgataaattctataatgcattttattcattaagtgtcttacttgatatacaacgaaagacgaagatacttcaaagccttgcatattatctcagagtgttggtgagagaaggactctggattcatggtttgtatggttacgctgcgcaatatctttatgactttaccagctttgatacaacgccttatgcaaaaaaattactggaaatgttttataagtttcaaaacagtgcagaaggaacattgtctcgttatagtgtttcacttgatgataaatctcaggaatatatttcccgtctgaaagatcttgtatttaatattaatgataagaatggttgtgatgacgcatatctgaaaaagattataagctattttgggcagttgcagaatgaggctgttcatgtgaccagctgctacgaaacacttgcggtgtacatttgtctgataaggaaaaataaaattaatgatgtgctgcagcattatgatgacatggaaagaaaaggattgtttggtgaattaccttcaggatatgtcaggggggcattatcgttgcttcggacagcactggaggttaaagtaaatagaaaaaatataaagtatggctcgttgttttattggcttgaccatgtaaaagcctatcaggatgcatttattgaaaaaataccacttattgatcctgtatataaggagggtgaaatacagtatgatgcgaacaattttaccctgatgcgtgttattaagatgtataattgtatgcttgaaaagatcagtacgaaaccatatattgcgcccccatatattacaggtttgcttgatgacgtagagaaggtgctggataagataaatattctgatagataaagagtatgtttatgatggtaagacgctggcagaagtcattatggaaaacaaagtattatccagtcgcgaacgtaaagaaactatgatagggcttttcacaggcagtaagaaatatactttactgcaatgtgttgagaagcttggtgtattagttcactatgtgaaatcaccggtcgatgaaattaaaaatgtgatgatgttgtatggcgataaggccgaaaacaggaacagacgcagaatgatatatgatgcgttaaccattatttgtgaagatgacatcaggaataaccctcctgagctgtcgtga

SEQ ID NO: 15969 - DNA, 288 bp, Escherichia coli
atgtcaaatcaaaccggacagctttacacgccttcacgcatcctgcgtatggctgaacttacccgactgctgggtatatcaagatctactatttacgtgaaaataaatccggcctcgaaataccacgaccctacctttcccaaaccaataaggcttggtagtgcatccgtaggctggcgggcatctgccatcgatgagtggctgatgttacatacggcaccagcctggtctgaacctgaaaacaaactaaaggaacttaatgatgacgacaaaactatcactccctga

SEQ ID NO: 15970 - DNA, 1530 bp, Escherichia coli
atgatgacgacaaaactatcactccctgaacttgacacaactaaactgcctgacaggtgccaggcattacttgatgaaatgcatgaagaaacaggaatacgccgtgaaatacttctgtctgttatgctgacggtcatggctgcctcggtccaggatacgcatgaagttgaactttccggagggcaacgtacaagtcttcagatatttatgtgtctttcatcagcatcaggcagtggaaaaacctctgcctgcgcaaaattaatcgctcctgttcatgaaacagaagaagaactacatcaggcatatatcgacgataaaaaaaactatgaccgaatgatggaaatgtggacaacagataaaaaaatcctggagcggagatataaaaaggaaattgaaagatccccggaaaatgctgctgctgcacgagcagcacttgaaaagtgtatagcaaataaacccgaacctcccgtacaacaggttctcatcgtgaatgacgcgacaccagaagggatagctttgaaactcagccagtcaccctctcttctgttgctgtctgatgaaggaggtactattctggataagcgtttcgaacgcaaatcggcactgtacaacacattatggagtgggcaaccagtcaacgttgaacgggcatccagacccggattccggctgaatgatgtccgtctcactatacttatactgactcaaccggtaatatttaataagttttttactctcactggcgatcagatccggggcaatggctttctggcccggttgctattttgcgaacccggagcaattaaaataatgacgacagaaccgcatactgccactcctgttgtgacgcaacaatgtgcaagctgttttcgtaagaaaagttttggcagtcagatcagagactctctgagagcatccagagaaagacgtgcaaaaagtaaagagcgcatctgcatgacattatcaaatgcagcatcccgcgcactggagcgctttcacaaagaaaatatggatactgtcagacagaatcctcatatgggtacttttgaagacattattgtcagaaaaagagagcaggttgtcaggatagccgcaattctggaactggagaaagatccagactcgacagtaataacgctggaaagtactaatagcgccatttatctcattgaattttatttcaagcatcttatatataaacttgaatctcttcgggaaatatccccggctgagaaacttgataaatggcttcagaaaagaattatcacaacagcaggttacatattccagaaaagttatattttacaatatgccccatatgctctcaggaaaaaatgtgttctggatgaagcacttgacatactggcggaacaaaggaaaataaggattgatgataacctggttgtttatataggaaacacgattacaccatccgaactggcaaaaaaactaaatattcctgcattcgatgccggagttttcatttgtgatcatcaaaacatactgaagtatcaccgaaacagactatag

SEQ ID NO: 15971 - DNA, 2058 bp, Escherichia coli
gtgggactggtacttgatgataataaatattatctcttttcgcggagggcgaatgataaaatcgttgtttatcatcaggaacaagtaaatggaccgcttgtcgacgagtcagggcgggttatttttgccgattttaatccagcgaaacgaccatggtcggtggcttcagatgactctaacaacagctggaatccggcctacaattgctttgatcgtccgggtaaaaaatgtatctcttttacgctacgcatcaacggcaaagatcacgatttgttagcggtggataaaatacatgtcgatttaaactggcgatatctgaacgagtatcttgatcaaatcagcgctaatgatgaagttctatttttgaaacaaggccatgagatcattgccaagaatcaactcgcgcgtgaaaaactgattatttataatagcgaaggtaattataatattattgattctgtcgatactgaatatatcgaaaaaacatcagcggtgccaaacaacgcattattcgaaatctatttttattatcctggcggtaatttattgaacgcatcagataaacttttttatctgccgtttgctttcattattatcgtattgctggtggtttatttaatgaccactcgtgtgttccgtcggcaattttctgaaatgaccgagctggttaatacgctggcgtttttgcccgactcaacggatcagatcgaggctctgaaaattcgcgaaggcgatgcgaaagagattatcagcatcaaaaattcgatcgcggaaatgaaagatgccgaaattgaaaggtcaaataaattgctctcactgatctcttacgatcaggaaagcggttttattaaaaatatggcgattattgagtccaacaataatcagtatctggctgtggggatcatcaaactgtgtggtctggaagccgtggaagcggtgtttggtgttgatgaacgcaataaaatcgtcaggaaattgtgtcagcgaattgccgagaaatatgcgcaatgctgcgatatcgtgacattcaatgccgatctctatttacttctgtgccgggaaaatgtacagacatttacccgtaaaatagcgatgataaacgattttgacagcagctttggctaccgcaatctgcgcatccataagtctgccatttgtgaacctttgcagggagaaaacgcctggagttacgcagaaaaactgaaactggcgatttccagtatccgtgaccatatgttctcagagtttattttctgtgatgacgcgaaactcaacgaaatagaagagaatatctggattgcgcgtaatattcgccatgcaatggaaattggcgaactattcctcgtctatcaaccgatcgttgatattaacacccgcgccattctgggcgcggaggcgttgtgccgttgggtgtctgcggagcgggggatcatttcaccgctaaagttcattaccattgctgaagatatcgggtttatcaatgagctgggttatcagattattaaaacggcaatgggtgaattcagacattttagtcagcgtgcgtcgctgaaggatgatttcttactgcatattaatgtttcgccctggcagttaaacgaaccacactttcatgagcgttttaccaccatcatgaaagaaaatggcctgaaggcgaacagcctctgtgttgagatcactgaaaccgtgatcgagcgaattaatgaacatttttatctcaatattgaacaactgcgtaaacaaggggtacggatatcgattgatgactttggcaccggtttgtcaaacctgaaacgtttttatgaaattaatccagatagcataaaagtggactcacaatttaccggcgatattttcggtactgcgggaaaaattgtgcgcattattttcgatctggcacgctataaccggatcccggtgattgcggaaggcgtagagagcgaagacgttgcgcgtgaattaatcaaattaggatgtgttcaggctcaggggtatctgtaccagaaacccatgccattctccgcctgggataaaagtggaaaattagtaaaagagtag

SEQ ID NO: 15972 - DNA, 549 bp, Escherichia coli
atgcccggtgacggaaaccacaatgcccttctcttcaacgcccgtgccttcaaagcgcagtttgatacccaactgtgccgccgccatttctacgaactgacgcacggagtactgaacgccggtagcaattacgaaatcttccggctgttcctgttgcagcatcatccactgcatttttacgtagtctttggcatggccccagtcacgcagggaatccatattgccgaggtacaggcacgactccagcccctgggcgatgttggcgattgcgcgggtgattttgcgggtaacgaaggtttcgccgcggcgcggggattcatggttgaagagaataccgttacaggcgtacatgccgtaggattcgcggtagttaacggtgatccagtaggcgtacagtttggcgaccgcatacggagatcgcgggtagaacggcgtggtctctttctgcggaatttcctgcaccagaccgtacagttcagaggtggaagcctgatagaaacgggttttcttttccagaccgaggaagcggatcgcctccagcaggcgtag

SEQ ID NO: 15973 - DNA, 1218 bp, Escherichia coli
atgaatattctgcaatttaatgtgcgactggcggaaggtggggcagcaggtgtggcgttagatctccaccagcgcgcgctgcaacaggggctggcgtcacattttgtctacggttacggcaaaggcggcaaagagagcgtcagccatcagaactatccgcaggtcatcaaacatacgccgcggatgaccgcgatggcgaacattgccctgtttcgtctgtttaatcgcgatctgttcggcaatttcaatgagttatatcgcaccattactcgcacaccgggtccggtggtcctgcattttcatgtgctgcacagctactggttgaatcttaagagcgtggtgcgcttttgcgaaaaagtgaaaaaccacaaaccggatatcactttggtctggacgttacacgatcactggagcgttaccggacgctgcgcctttaccgacggttgtgaaggctggaaaaagggctgccagaaatgcccgaccttaaataattatccgccggtgaagattgatcgcgcgcaccaactggtggcgggcaaacgccagttattccgcgagatgctggcgctgggctgtcagtttatttcccccagccagcatgtggctgatgctttcaatagtctgtacggtccagggcgttgccggattatcaataacggtattgatatggcaaccgaagcgattctggcggacttgcctccggtgcgcgaaacccagggcaagccgaaaatcgcggtggtggcgcatgacctgcgttacgacggcaaaactaaccagcaactggtacgcgagatgatggcgctgggcgacaaaatcgaactgcatacctttggtaagttctcgccgttcaccgctggcaacgtggttaatcacggctttgaaactgacaagcgcaagttgatgagcgcgctcaatcagatggatgcgctggtattcagttctcgcgtcgataactacccgctaattttgtgtgaggcgctatcgattggcgtgccggtgattgccacccatagcgacgcggcgcgggaagtgctgcaaaaatccggcggtaaaaccgtcagtgaagaagacgtgctgcaactggtccagttaagcaaaccggaaatcgcgcaggcggtatttggtaccacgctggctgagttcagccagcgcagccgtgccgcctacagtggacaacagatgctggaggagtatgtcaacttctatcagaatctgtag

SEQ ID NO: 15974 - DNA, 267 bp, Escherichia coli
atgtctgccgcaggaaagagcaacccactggcaatcagtggcctggttgtgctcacacttatctggagttatagctggattttcatgaagcaagtcaccagctacatcggtgccttcgacttcaccgccttacgctgcattttcggcgctctcgttttattcattgtccttttattacgtggtcgcggaatgcgcccgacaccgtttaaatacaccttagccattgccctgttacaaacctgtgggatggttggcctggcgcagtga

SEQ ID NO: 15975 - DNA, 552 bp, Escherichia coli
atgttagataatgtttgcgattacattgtacagtgggtggaagataatctagataccggaaaaaatatcaatgatctgattgaagatattggatatagcagaaaaacagtggaagtatggtttttaaataagtatggcgtaaatattggcgaatatttatttaaaagaagaatgagtagagcttctgtattattaaagctaactcatctaactataactgaaatcgccacattacttcactatagcagcagccaaaactttgccaggactttcaaaagatttagcaataaatcaccaacagaatatcgcaatagtgaagcatgggatgttactactctgcaacattcctttctttatgagtttgatataaaaaatgccaccaggtcaacaatatcatccatatttttccatggagtgtcatataaaataaatgagtcttttttatatagaaataaaacacaggataaaaaaagtcttcaatatctaatcaagaatttattgaatgaaaaaaacatgatattttggtttgcatcagcgagtttaactcaatag

SEQ ID NO: 15976 - DNA, 432 bp, Escherichia coli
atgtttattcaccggtttaaaggtaaaaatataaagttagtcattgagttgactgaacaataccccctattagttacggacacaacagcctctctttttaataaaatcaaaagattaggtgtttgcatagccttggatgattttggagtaggttataatagctataattgtatacgcaacattcccttagatattattaaaatcgacaaatcttacatccatgacatgcgcagaaatgatgtgtcaaaatacattatagagagtatcatctcattagcaaatacattaaaaatgaaagttattgccgaaggcattgaaaataaaaaagatgccctttatttatataggcaaggagtttgttatatgcaagggtattatttttctcctgctttaaagggggaagacttcataaaaaaatggttaataaattaa

SEQ ID NO: 15977 - DNA, 918 bp, Escherichia coli
atggctaagcaacaaacgaaagaaataaaccaagatgatgtaaaagacaacaaaaatatgccacctcatatatgcggcattattatgccaattgcggacatagaaggttatcccactggacattggagaaatgttcatgacattatttgtgaagcatcaaatgatgccggattcaaggcaaatttggtaagttcagatgatgatgttgcagtaatacaaaaacgaattgttcaaaatctttatgaaaaccccatagttgtttgcgatataagtgctcgaaacgctaatgtaatgtttgaattaggaatgcgtctcgcatttgacaaaccgaccgtaattattaaggacgagcgcactccttatagctttgacatttcatcaattgaacatttagagtacccttcggatttaagataccaatcaatcaatttattcaaagaaagacttgcgagcaagataaaagaaacatatttaaagtcagtaactgatcctgaatacacaacattcctcaaacattttggcactttcaaagttgcacaactagaccagaaagaagtatcagaaactgagtatctggcatctgagattaaagatatcaaatcattattgatatctcttagggcaacagcaacgacaaaatccagatttttcgactcaccgaaaaattactcgcagcaggaaattgacaactctgtagatattattaaaaatggagttgccagttatactataaggagtgaaggatttagtatatcaaaatcagcactagaaaagttacgccaaagactacacaacgcaggatttcaagtcgagcaaatagtattgacaggaaaagaagtaattattcatctgtcatcacctttaataaatgaagaagaaaatatttttaaagatgcaatagtaacagcactattataa

SEQ ID NO: 15978 - DNA, 195 bp, Escherichia coli
atgtctaatatcgataataaaggttgggggttccccgccctgtcgaaaaaagcacatttctttaattcgggggaagccatatcactatgcggaaaatggatgttcacaggtatcaggattgacgaatggcatgaccatcctgagaactgcgctatctgcatgaagaaacgcaaaaagcaggaaggcgaaagctaa

SEQ ID NO: 15979 - DNA, 762 bp, Escherichia coli
atgcaggaactaactgaaatgccgatcaactatccatacccgagagaatcttttcctgactttttgagggagtgtgggttcaccaatttttcccacgaacagcgtgagacttatgactgctatcgtttaacgaatggcgtaattgttaacctttacaccacccggaccattcagtttcaagggaaccctcaagaacgtcccaatgttgaaactgcaataatgtcccatttaggaacgccccccacggcaacaccactagccgtagaacagccatctgagcttcccaaaaagatattcattgttcacggccatgaccatactgcaaaggaacaacttgagctaatccttcataaacttggattaccagaccatttcattttgcagaatacgggagggactggactcaccattattgaagagcttgaacgtgaaattgggcaaggacaaactgctactcgtttcgggattgttcttttgacacctgatgatatgggatactcaaagcgcgccggtgaagcagaaatccaaccccgcgcaagacagaacgttgtactcgagatgggtatgcttctttcgtccttagggcgcagcaatgtagcaatccttcagaaacagcacctagaacagccttctgatgctaacgggattttgtatctgaatttcaacgaccatgtacgtgaaacagttcctcgtctagtgcaacggttacaaaattctggtttcgaatttacacaagctcaaatagctaacgcttcctcgtaa

SEQ ID NO: 15980 - DNA, 1374 bp, Escherichia coli
atgcttcgcattaaacctcttctggttctttgtgccgctttactgacggtcacacccgcagcgtcagcggatgtgaacagcgacatgaatcagttctttaataagctgggatttgcttccaataccacacaaccgggcgtctggcaggggcaggccgccgggtatgcctatggtggctccctgtatgcccgcacccaggtcaaaaatatccagctgatttccatgacgctgccggatatcaatgccggatgtggcggcatcgacgcctatctcggctcgttcagttttattaatggcgatcagttgcagcgttttgttaagcagattatgagcaacgctgccggttacttttttgaccttgccctgcaggcaacggtgccggaaatcaaaaccgcaaaagacttcctgcagaaaatggcaagcgacattaacagtatgaacctcagctcctgtcaggtggcgcaggggattgtcggaggattatttcctcagactcaggtgtcacagcagaaggtctgtcaggacattgccggtgagagcaatatttttgctgactgggccgcgtcccgtcagggctgcacggtcggaggacagtcatcgtctgttcgtgacaaggccagtgacaaagataaggaacgggtgctgaagaacatcaatatcatctgggactcgctgtccaaaaacaggatgcttgatggtaacaaagaactgaaagaatttattatgacgctcaccggtacgctgatttttggggaagacagcgagattacccccctgccggcgcgtaccactgaccgcgatatcctccgggcgattatggaggggggaacggcaaaagtttatcactgcaacgattcggacaagtgtctgaaggtggtggcggatgcaaatgtgaccatcgcccgggataaagccctgaaatcacagattacaaaactgctcaccagtattcagaataaagcggtgagtgatactccactggatgacagggaaaaaggcttcatttccagcaccaccgtccccgtctttaaatatcttattgacccgcagatgctcggtgtgtccagcagcgtggtttaccagctgacggactatatcggctacgacatcatgctccagtacattcaggaactgcttcagcaggcccgggccatgattgccaccgggaactatccacagaccgtgctggacagtgtgctggagaatctgaatcaggcacagcaacagattgcggttttccaggggcaggtaaaggtccagcaggatgcattgctggttgttgaccgtcagatgagctacatgcgccagcagctgtccgcccgcatgctcagccgttaccagaacaactatcacttcggagggagcacgctgtga

SEQ ID NO: 15981 - DNA, 822 bp, Escherichia coli; identical to SEQ ID NO: 8707

SEQ ID NO: 15982 - DNA, 555 bp, Escherichia coli
atgatgcttatcatgtactttattaattctctcaggcataaggaattaactgaaatactggaaaaaatatcttttcctgaaaaatccgggagcaatttgcttaaaccggaggcggtcagctgtaatttgttgtccctgtgtgtgctggcaccggtactctgtacacccagaaagctggcagaagtctccagggagatcatcgtggcgagtgcgcaggaaattgcatggacgccggggagcagtcgtattgatggtcatcagggcgaaaatattacctggtctctgtcatcgcagtctcctgccgataagtatgatctcatcaataaaacctcccgtgtttctcctgacagtggccgtttttatgaaccggacacagttctggatcaccgtgaacgggtacgcctttttattcagatccagtttccgcacgggagtgactggtctgaagtattgcgactgactgacattgttacagagaaggtctcttccggcagggctgcaggcggatatcaccaccggcatacagggtacacctggtctgtttctgtgaattaa

SEQ ID NO: 15983 - DNA, 5271 bp, Escherichia coli
atgatgagtatcgcgcaggtcagatcggccggaagtgccggtaactattataccgacaaggataattactatgtactgggcagcatgggagaacgctgggccggcaagggggctgaacagctgggactgcagggcagtgtcgataaggatgtttttacccgtcttctggagggaaggctgccggacggagcggatctaagccgcatgcaggatggcagtaataagcatcgtcccggctacgacctgaccttctccgcccccaaaagtgtctccatgatggccatgttaggtggcgataagcgcctgattgatgcacataaccaggccgtggactttgctgttcgtcaggtggaggcgctggcctccacacgggtgatgacggacggacagtcagaaacggtactgaccggtaatctggtgatggcactgtttaaccacgacaccagtcgcgatcaggaaccacagttacacacgcatgcggtggtggctaatgtcacgcagcataacggtgagtggaagacactgagcagtgacaaagtggggaaaacggggttcattgagaatgtgtacgctaatcagattgcctttggcaggctctaccgggaaaaactgaaagagcaggttgagtcactgggctatgaaaccgaagtggtgggtaagcacggtatgtgggagatgccgggcgtaccggtggaggccttttccggacgctcacaggctatccgggaggccgtcggggaagatgcctcgctgaaatcccgggatgtggcggcactggatacgcgaaaatccaaacagcacgtcgatcctgaagtcagaatggctgaatggatgcagacgctgaaggaaaccgggttcgacatccgggcatatcgtgacgcggcggatcagcgtgcggagacccgcacgcaggcgcccgggccagcttcacaggacgggccggatgtgcagcaggcggtgacacaggcgattgccggattaagtgaacgaaaagtgcagttcacgtacacggacgtgctggccaggacggtcggcatactgccgccggaaaatggtgtgattgaacgggcacgcgccggtatcgatgaggccatcagccgtgagcagcttatccccctcgatcgtgagaaggggatgttcacgtccgggattcatgtgctcgatgagctgtcagtccgggcactcagtcgtgacatcatgaaacagaaccgggtgaccgtacatccggagaaaagtgtcccccggacggccggttacagcgatgccgtcagtgttctggcacaggatcgcccgtcgctggccattgtgtccgggcagggcggtgcagccgggcagcgtgagcgggtggctgaactggcaatgatggcccgggagcaggggcgggaggtgcagattatcgccgctgaccgtcgctcgcagatgaacctgaagcaggatgaacggctgtccggtgagctgataaccggacgtcgtcagctgcaggagggcatggccttcacgctgggcagtaccgttatcgtcgaccagggcgaaaaactctccctgaaagagacgttaaccctgctggacggtgccgcacgtcataacgtacaggtcctgataaccgacagcgggcagcgaaccggtacaggcagtgcgctgatggccatgaaggatgccggggtgaacacgtatcgctggcagggcggagaacagcgaccggcaaccatcatcagtgaaccggaccggaatgtccgctatgaccggctggccggagattttgcggccagcgtgaaagccggagaagagagcgtggcacaggtcagcggggtacgggaacaggccatactgacacaggccattcgcagtgagctgaaaacacagggcgtgctcggacacccggaggtgaccatgaccgccctgtcaccggtctggctggacagccggagccgttatctgcgggatatgtaccgaccggggatggtgatggagcagtggaacccggagacacgcagtcatgaccgctatgttatcgaccgggtgacggcgcagagtcacagcctgaccctgcgggatgcgcagggcgaaacgcaggtggtgcgtatttcctccctggacagcagctggtcgctgttccggccggaaaaaatgccggtggcagacggcgagcgactgagggtgacagggaaaattcccggactccgcgtctccggcggtgaccgcctgcaggtggcatccgtcagtgaagatgcgatgacggttgttgtgccggggcgggctgaaccggccaccctgcctgtggctgattcaccgttcacggcactgaagctggagaacggctgggtggaaacgcccgggcattccgtcagtgacagtgcgacggtgtttgcctccgtcacacagatggcaatggacaacgccaccctgaacggtctggcccgcagcggtcgtgatgtccggctgtattcctcactggatgaaacccgtactgcggaaaaactcgcccgccatccgtcctttacggtggtttctgagcagataaaggcgcgtgccggtgagacattgctggaaaccgctatcagtctgcagaaagccgggcttcacacgccggcacagcaggccattcatctggcccttcctgtgctggaaagtaaaaacctggccttcagcatggtggacctgctgacagaggcgaagtcgtttgctgcagaaggaaccggttttactgaactgggaggggaaatcaatgcgcagataaaacgcggtgacttactgtatgtggatgtggcaaaaggctatggcacaggcctgctggtttcccgtgcgtcgtatgaggcagaaaagagcattcttcgccatattctcgaaggcaaggaggcggtcacgccgctgatggagagagtacccggcgaactcatggagacgttaacgtcgggacagcgtgccgccacccgtatgatactggaaacgtccgaccgtttcacggtggtacaggggtatgccggtgtgggtaagaccactcagttccgggcggtgatgtcagccgtgaacatgctgccggagagtgagcgtccccgggttgtggggctggggcccacgcaccgtgcggtcggtgagatgcgcagcgccggcgtggatgcacagacactggcgtcctttctgcatgacacgcagctgcagcagcgcagcggagaaacgccggatttcagcaacacgctgtttctgctcgatgagagctctatggtgggcaataccgacatggcacgggcatacgccctgattgcggccggtggtggtcgtgctgtggccagcggtgacacggaccagctgcaggccatcgcgcccggtcagcctttccgtctccagcagacgcgcagtgctgccgatgtggtcatcatgaaggagattgtgcgtcagacgccggaactgcgggaggcggtatacagcctgattaaccgggatgtggaaagggcactgtccgggcttgagagtgtgaaaccgtctcaggttccccgtcaggagggcgcatgggcaccggagcactccgtgacggagttcagtcacagccaggaagcgaaactggcagaagcgcagcagaaggcgatgctgaaaggtgagacttttccggatgtccccatgacactgtatgaagccattgtccgcgactataccggcaggacaccggaagcacgggagcagacgctgattgtcacgcacctgaatgaggaccggcgcgtactgaacagcatgattcatgatgcacgggaaaaggccggtgagctggggaaagagcaggtcatggtgcctgtcctgaacacagcgaatatacgtgacggggagctgcgtcgtctctccacctgggagaataacccggatgcccttgccctggtggataatgtgtatcaccggattgccggtatcagcaaggatgacgggctgataaccctggaggatgcggaaggtaacacgcggctgatttcgccccgggaggcggtggctgaaggtgtcacactgtacaccccggacaaaatccgggtggggaccggcgaccggatgcgcttcacgaagagtgaccgggagcgcggttatgtggccaacagcgtctggacggtgacagcggtttctggtgacagtgtcacgctgtcggacggccagcagacccgggtgattcgccccggtcaggagcgggcagagcaacatattgacctggcctatgccatcaccgcccacggtgcgcagggggcgagtgaaacctttgccatcgcgcttgaaggcacggaaggtaaccggaaactgatggccggctttgagtcagcctacgtggccctgtcgcgtatgaagcagcatgtgcaggtgtacaccgataaccgtcagggctggacggatgccatcaacaatgccgtacagaaaggaacggcccacgatgtgtttgaaccgaaaccggaccgggaggtcatgaatgcagagcggctgttcagtacggcacgggaactgcgggacgtggcggcaggccgtgccgttctccgtcaggcagggctggccgggggagacagccctgcacggtttattgcaccgggacgtaaatatccgcagccgtatgtggcactgccggcgtttgaccgtaacggcaagtccgccggtatctggctgaacccactgaccacggatgacggaaacgggctgcggggattcagcggtgaaggacgggtgaaaggcagcggggatgcgcagttcgtggccctgcagggtagccgtaacggagagagcctgctggctgataatatgcaggatggtgtccggattgcccgtgataatcctgacagcggtgtggtggtaagaattgccggtgaaggtcgtccgtggaatcccggtgccatcaccggtggtcgcgtgtgggtggatatcccggacagcagcgtccagccgggtgccggaaatggcgaaccggtcacggcagaggtactggcacagcggcaggctgaagaggccatccgccgtgaaacggaacgccgtgcggatgaaattgtccgtaaaatggcagagaacaaacctgacctgccggacggcaaaacagagcaggctgtcagggagattgccggacaggagcgtgaccggtctgccatatctgaacgggaagccgcgctgccggagagtgtgctgcgtgaatcacaacgggagcaggaagcggtccgggaggttgcccgggaaaatctgctgcaggagcgactgcagcagatggagcgggatatggttcgtgacctgcagaaagagaaaaccctgggcggagactga

SEQ ID NO: 15984 - DNA, 657 bp, Escherichia coli; identical to SEQ ID NO: 9853

SEQ ID NO: 15985 - DNA, 570 bp, Escherichia coli; identical to SEQ ID NO: 9851

SEQ ID NO: 15986 - DNA, 612 bp, Escherichia coli
atgaatatactatttacggaatcatcaccgaatataggtggtcaggaattacaggctgttgctcaaatgaaggccctgaagaaaatggggcattcagttctgcttgtctgcagggagaacagcaaaattgcttttgaagccagtaagtttggaattgatatcacattcgcgttatttcgaaacagtcttcacattcctactgtatggagattactcggaatagttcatagttttcagcccgatgcaatcgtttgtcacagtggacatgatagtaatattgttggtttggtacggttttttacctggaaacatccattcagaattatcaggcaaaagacatatttgacacgaaaaacaaaatttttttcaataaatcatttttgcgatgaggtgattgttcccggaacaaatatgaagacacatctggagcaggaaggatgtcgaactcgggttactgttgtgcctcctggctttgatttccaggaattatacgttgattcccgaaacagtttgcctccgagtgttctttcctggctggcgtcccgaagaggatgccccgtaattgctcaggtaggaatgttgcgcccggaaaaagggcacgaatttaggtga

SEQ ID NO: 15987 - DNA, 1017 bp, Escherichia coli
atgaaaaatgttggttttattgttacaaaatcagaaattggtggtgcacaaacatgggtaaatgaaatatctaaccttattaaagaggaatgtaatatatttcttattacatctgaagaaggatggctcacacataaagatgtctttgccggagtttttgtcataccaggtattaaaaaatattttgacttccttacattgtttaaattgagaaaaattttaaaagaaaataacatttcaacgttaatagcaagttctgctaatgccggagtttatgccaggttagttcgattactagtcgactttaaatgtatttatgtttcgcatggatggtcttgtttatataatggtggtcgcctaaaatcaattttttgcattgttgaaaaatacctttctttattaactgatgttatatggtgtgtttccaaaagtgatgaaaaaaaggcaattgagaatattggtataaaagaaccaaagataatcacagtatcgaattcagtgcctcagatgccgagatgtaataataaacaactccagtataaggttctgtttgttggtaggttaacacaccctaagcgccccgaattgttagcgaatgtaatatcgaaaaagccccagtatagcctccatatcgtaggagggggggaaaggttagaatcattgaagaaacaattcagtgaatgtgaaaatattcattttttgggtgaggtcaataatttttataactatcatgagtatgatttattttcactgatatccgatagtgaaggtttgcctatgtcaggccttgaggctcacacagctgcaataccactcctgttaagtgatgtgggcggatgttttgaattaattgagggtaatgggttacttgtggaaaatactgaagacgacattggatataaattggataaaatattcgatgactatgaaaattatcgggaacaggcaattcgtgcctccgggaaatttgttatcgagaactatgcttcagcatataaaagcattattttaggttga

SEQ ID NO: 15988 - DNA, 1020 bp, Escherichia coli
atggtgattttcgtaacaggcggtgcaggatatattggatcccataccatacttgagttacttaataatggtcatgatgtcgtttcgatagataattttgtcaattcctctatagaatcattaaaaagagtagagcaaataactaataagaaaattatttcttatcaaggtgatatccgtgataaaaatctacttgatgagattttttcaagacaccatatcgatgctgtaattcactttgcatcgttaaaatctgtaggtgagtctaagttaaagcccttagagtattattctaataatgttggtggaactttagtattacttgaatgcatgaagagatataacattaataaaatgatatttagctcttctgctactgtttatgggagtaacagtatccctccccatacggaagatagacgaattggtgaaactacaaacccatatgggacatcgaaatttataatagaaataattttgagtgattattgtgatagtgataataataaatcagtaattgcactgcgttactttaatccaatcggagcacataagtccgggatgattggtgaaaatcctaacgggatccctaataatctggttccttatatatctaaagttgcacaaaatcaacttcctgtattaaatatttatggcaacgattatccaactaaagatggtacaggagtaagagactatatacatgtctgtgatttggctaaagggcatgttaaagcattagaatatatgtttttaaatgatgtcaattatgaagcttttaatttaggtactggtcaaggttattctgttttagagattgtaaaaatgtttgagatagtcactaaaaagagtatacctgttgctatttgtaatagacgtgagggggatgttgcggagtcatgggcgtctgctgatttggcacataaaaagctttcctggaaagcggaaaaaaatttgaaagaaatgatcgaagatgtatggcgttggcaaacaaacaatccaaatggatataaaaaataa

SEQ ID NO: 15989 - DNA, 213 bp, Escherichia coli
atgactgacatttccggactgacgcagttgttgcatatctgtggcaatacgttgtatccagccaagttgcgttatttcgtcggttgtttcgtgggcgtagtgatgtatggggccttcgatgggaaagtaaaactagcggaaaataaaagtactcgcctgcctacggacctttttactcagggtatttttgttttccataacgttgcgtattaa

SEQ ID NO: 15990 - DNA, 780 bp, Escherichia coli
gtgatcgccgaagtatcgactcaactatcagaggtagttggcgtcatcgagcgccatctcgaaccgacgttgctggccgtacatttgtacggctccgcagtggatggcggcctgaagccacacagtgatattgatttgctggttacggtgaccgtaaggcttgatgaaacaacgcggcgagctttgatcaacgaccttttggaaacttcggcttcccctggagagagcgagattctccgcgctgtagaagtcaccattgttgtgcacgacgacatcattccgtggcgttatccagctaagcgcgaactgcaatttggagaatggcagcgcaatgacattcttgcaggtatcttcgagccagccacgatcgacattgatctggctatcttgctgacaaaagcaagagaacatagcgttgccttggtaggtccagcggcggaggaactctttgatccggttcctgaacaggatctatttgaggcgctaaatgaaaccttaacgctatggaactcgccgcccgactgggctggcgatgagcgaaatgtagtgcttacgttgtcccgcatttggtacagcgcagtaaccggcaaaatcgcgccgaaggatgtcgctgccgactgggcaatggagcgcctgccggcccagtatcagcccgtcatacttgaagctagacaggcttatcttggacaagaagaagatcgcttggcctcgcgcgcagatcagttggaagaatttgttcactacgtgaaaggcgagatcaccaaggtagtcggcaaataa

SEQ ID NO: 15991 - DNA, 660 bp, Escherichia coli; identical to SEQ ID NO: 9738

SEQ ID NO: 15992 - DNA, 288 bp, Escherichia coli
gtgttttttacctttgcactccccaaactcccgggcccagacgtaatgcagggttgtgggatgcacgcgtttaccttcccgatgcttacgtttctggtaagcgtcgattcgggctttcagggcattgatgaagcgggatatcacagctgcctccgttgctgccggtacatccgggaaacgcaggtcaacccgcaatgccgtcaggcggggatgaacattcagtgcgtgccgcaccgtctcacgaatacgttgctgccagaaggggttgtatttgtaggtcatggttaa

SEQ ID NO: 15993 - DNA, 492 bp, Escherichia coli
atggccgctccgtggatctcatcgccagaaatggcgatgcgagatccagggcagggcggccgccatcgtcagacctggcgatggtcgacgccggcgcgcatcgtcggatgtggcgatgcgagctcgaggtcggtggccaccgccggcgacctggtgccatcgtcggcaatggcgatgctgcagctcgacgtgcgcggcctggtcgtctcggcatcgtcggatgcggcgatgctcgagcgaggcgaaaaaaaaccgcctcggggtgtccgaggcggcaagtctgcatgcggttcagggaggaagaaaccgcgccggcgatcagggaggaaaaccgcgcggcctgatgtgcagctcggccactttagccggatttttcgacttatccgatgcgagcggcccgccgtgggcgctgctcgatctgctgttgctttttctcgacgtgcttctgctcctggtgctgctgctcgtcgcgcggcactgttgcaaagttag

SEQ ID NO: 15994 - DNA, 1494 bp, Escherichia coli; identical to SEQ ID NO: 13713

SEQ ID NO: 15995 - DNA, 237 bp, Escherichia coli
atgttgggtggagcggacaatccaaatggtgaattaccgtcttatatcactggcgctgacaatagcgtccaccatatttggtgtccactattctctcaggaatttcaggatctgccagacggtgctgagacgacgcttactgttcaccagaaagtttcatccattttcttccacccaagttgcggaagaaccacttttcatccgtcgttgacaatcctgacctgcccccagtattag

SEQ ID NO: 15996 - DNA, 252 bp, Escherichia coli; identical to SEQ ID NO: 8763

SEQ ID NO: 15997 - DNA, 867 bp, Escherichia coli
atgtcaggcatcacaatctcccgtccggaagtggtcaacgggcatacggacgttatctgctcagccagtatccgccacattctggctgtacgaaagaccacgctgctgcaaatcgacacacttatccggcaactggctgaaatctcagcaatgacagaaagtattggcggtaaaactgccccagactgggccatgaaacaggatattcgctgcggttgctggctgatggagaaacctgaaacggcaatgaaagccatcacccggaaccttgaccgtgaaatctggcgtgacctgatgcaacgttcagggatgctttccttaatggatgcgcaggcccgtgatacctggtaccggtcactggaatatgataattttccggaaatcagtgaagcgaacattctgagcacatttgaacaactgcaccagaataaggatgaggtgtttgagcgaggggtgatcaacgtcttcaggggactgagctggaattacaaaaccaattgcccctgcaaatttggcagtaaaattatcgtcaacaacctggtgaggtgggaccggtgggggtttcatcttatcaccgggcaacaggctgaccggattgctgacctggaaaggatgctgcacctgttcagcggcaggcccatccccgacaaccgggaaaatatcatcatccgtctggatgaccacattcagtccgttcagggtcaggagtgctatgaagatgagatgttcagcatcagatactttaagaagggctccgcgcacatcacgttcaggaaaccagagctggttgacaggcttaatgatattattgccagacactacccggaagccctggcaagcacagtgaacaaaagcagcaaggcataa

SEQ ID NO: 15998 - DNA, 615 bp, Escherichia coli
atgctgatcggatatgcccgcgtctccaaagccgatggctcgcagtctctcgacctgcagcacgacgccttgcgcgccgcaggtgtcgaacgggacaatatctatgatgatcttgcttccggcggtcgtgatgatcgccttggcttgactgcctgcctcaagtcattgcgtgacggcgatgtgctggtggtctggaagctcgatcgcctcggacgatcgcttgcccatctcgtcaacacggtgaaggagctgtcagaccgcaagatcggcctgcgggttctgactggaaagggcgctcagatcgacaccacgactgcgtccggtcgcatggtgttcggaatcttcgccaccttggccgagttcgagcgggatctgatccgagagcgcaccatggcgggtctcgcctccgcgagagcgcgcggtcgcaagggcggacgaaaattcgcgctcaccaaagctcaggtgcgtctcgcgcaagccgccatggcccagcgcgatacttcagtttccgatctctgcaaggaactcggcatcgagcgcgtcactctctaccgatatgtcggtcccaaaggcgagctcagagaccatggaaagcatgttctcggacttacgtag

SEQ ID NO: 15999 - DNA, 183 bp, Escherichia coli
gtgaacctcccacaagatggcatcaaattacatcgcggtaacttcaccgctatcggtcggcagatccagccttatctggaggacggcaaatgctttcgcatggtgcttaaaccgtggcgcgagagacgcagtctagactggccccctgaatctccagacaaccagtatcacttaaataagtga

SEQ ID NO: 16000 - DNA, 150 bp, Escherichia coli
atggcgggatttctaatggaagtgttattgatactggtggacatcaagaggtatctggtcatggctcttatcaggggcaggctaataatacagtcattaacggtggcagccagacaattagtgagggaggaatttctacagggacgataa

SEQ ID NO: 16001 - DNA, 132 bp, Escherichia coli
atgttgataaaaatcatagcccaccgcaaggccggcaccaaatacagtatcgttcttatcgctgcccttatacttataaacaacatccccaaagtcctgacggaagcgctggtcaatctgagtcacaactga

SEQ ID NO: 16002 - DNA, 1602 bp, Escherichia coli
atgaatatctatgccttaagtggtatactctacggcatggatatctccgctctcaccacaacaaatgacatcgaaaaactgcgcgcgatggcacttgccatggtgcaaaaagccatgtctgagaatgctgaaaaagagcgggaattacaggccaaaagccagcgtatccagcttctggaagaaatgctgaaactggtgcgtcagcaacgcttcggtaaaaaatgcgaaacactggccgggatgcagcgttccctgttcgaagaggacgtggacgctgacatcgccgaaatcactgcgcaactggataaactgctgccgccctctgttgaagaagacgacaaagcgccccgttcacgtccggttcgtaaacctttaccgtcccatcttccgcgtgttgaaaaggaaatcctgccggccattgatcattgccctgaatgtgacgaaccgctgcgccatatccgcgatgcggtgagtgaaaaactggagtatatccccgcgcacttcgtggtgaaccgctatgtgcgcccgcagtacagttgcccctgttgccagaaggtgttcagtggtgaaatgccggctcacatcctcccgaaaagtgccgttgaaccgtcggtcatcgcgcaggtggttatcaacaaatactgtgaccatgcgcccctgtatcgtcagaataacatcttcgcccgcgcggatgttgacctgccagagagcacgctgtcagatatggttggtgccgcaggcgcggctctgtcactactggcgaaactgttacacacgaaactcctgacccgcggcgtgatacacgccgacgagaccgggctgcgtatcctggacacgaaaaaaggcggtaaatcacgttcgggttatctgtggtgttatgccagcggagaaagaagtggtccacagatagtcagcttcgactgccagaccgggcgtggtcatgaacatcctgaaaactggcttcagggctggagcgggacgctggttgtcgatggttaccaggcttaccggacgatggcgggtaaaacgcccggtattatccttgccggatgctgggcccatgccagaaggggcttcgccgacctgtataaaatgaacaaagatccacgggcagccatcgcggtgaaaaagatcgccgggttgtacaggctggagaaaaagatcagcagccgtcccgtggagaaaatccgccagtggcgacagcgttatgcccgcccgatactggaagatctgtggtcctggcttgaggagcaggagcaaagatgccctccgggaggtgcattacacaaagcgatcgtctatgcgctggcgcggcgtgtggaactgagtctgttcctggaggatggcgcggtccccctcgacaataacccttgtgaaagagccatcaaaacggtggtcatgggcagaaaatcgtggctcttcgccggttcactgatggccggaaaccgcgcggcacagataatgagccttctggaaacggcaaaacgtaatggcctggagccacatgcctggctgacggatgttctgacgcgtctgcctgaatggccggaggagcgactggcagagttgctgccccttgagggatttaccttcggtgaatga

SEQ ID NO: 16003 - DNA, 495 bp, Escherichia coli
atgaaaaacaaaacgcttatgaccatgatactatgcgggacctttgttgggactacgcacgcagcggtggataaacacgcaacaggcacctacacactaaacgtgaccgaagaatgtgccgtgcacctaaccgacaacaccgaatcattacgcaagactgacttaacagaaggtaaactcctcgcaggcgttggcctttccgccacaggatgcgcaaactctaaggttgccttctcggtcgacgccgggaacctcaagggcacaaatatcctgctcaagggcgccgacaaaacgagcttcattccagtctcctgggaaaccgcgacggccgcaggagatgacagccataactggacagccactactgaagggattcaccgaaattccaacggtccatgggaagggactattcgactgcgcgtcattggcgaccaaacctcggccaaggcgcaagcctacactttagtcctcaacgggggcacgtggatcgaataa

SEQ ID NO: 16004 - DNA, 243 bp, Escherichia coli
atggtggtcaccatcctgtcggctgtggcacaggctgaacgccggaggatcctagaacgcacgaatgagggccgacaggaagcaaagctgaaaggaatcaaatttggccgcaggcgtaccgtggacaggaacgtcgtgctgacgcttcatcagaagggcactggtgcaacggaaattgctcatcagctcagtattgcccgctccacggtttataaaattcttgaagacgaaagggcctcgtga

SEQ ID NO: 16005 - DNA, 291 bp, Escherichia coli
atgaaatcacgcgcagcagtcgccttcgggccgggtttaccccttgaaattgttgaaattgatgtggcaccgccgaagaaaggtgaagtgctggtgaaaatcagtcacaccggggtatgccataccgatgcctacacgctttccggtgatgatccggaaggtctgttcccggtggtgctcggccatgaaggtgccggggtggtggttgaggtcggtgagggcgtgaccagtgtgaaacggggtctgacgctcagtggaacgaaaactcacgttaagggattttggtcatga

SEQ ID NO: 16006 - DNA, 1185 bp, Escherichia coli
atgaataaacccgctgtcatcgcgctggtgattacactgctggacgcgatgggaattggtctgatcatgccggtattaccgtcactgctgcgggaatatctcccggaagcggatgtggcaaaccattacggcattctgctggcgctgtatgcggtgatgcaggtctgttttgctccgctgctgggcagatggtcagataagctggggcgcagaccggtgctgctgttatccctggcgggtgccgcgtttgattacacactgctggcactgtccaatgtgctgtggatgttgtatctcgggcggattatctccgggatcactggtgccaccggcgcggttgcggcttcggtagtggcggacagcacggcggtcagcgagcgtaccgcctggttcggccgtctcggtgcggcctttggtgccgggctgattgccgggccggctatcggcggactggcgggggatatctcaccgcatctgccgtttgtcattgcggcaatactgaatgcctgcacctttctgatggtcttttttatctttaaaccggcggtacagacagaagaaaaaccggcggagcagaaacaagaaagcgcaggtatcagctttatcacactgcttaaacctctggcgctgttgctgtttgtcttttttaccgcgcagcttatcgggcagatcccggccactgtctgggtattgtttacggagagccgctttgcctgggacagcgcggcggtcggtttttcactggcgggactcggggcgatgcatgcactgtttcaggcggtggttgccggggcgctggcaaaacggctgagtgagaaaaccattattttcgccggatttattgccgatgccaccgcgtttttactgatgtctgctatcacttccggatggatggtgtatccggtcctgatcctgctggcaggcggcggaattgcactgcctgcattgcagggcattatctctgccggggcatcggcggcaaatcagggaaaactacagggtgtgctggtcagcctgaccaatctgaccggcgtggcgggcccgctgctgtttgcttttattttcagtcagacacagcagagtgcggacggtacggtgtggctgattggcacggcactgtacggtctgctgctggcaatctgtctgctgatcagaaaaccggcaccggtggcggccacctgctga

SEQ ID NO: 16007 - DNA, 657 bp, Escherichia coli
atggcacggctgaacagagaatcggttattgatgcggcactggaactgctgaatgagacagggattgacgggctgacgacccgcaagctggcgcagaagctgggaatagaacagccgacactttactggcatgtgaaaaataaacgggcgttactggatgcgctggcggtggagatcctggcgcgtcatcatgattattcactgcctgcggcgggggaatcctggcagtcatttctgcgcaataatgcaatgagtttccgccgggcgctgctgcgttaccgtgacggggcaaaagtgcacctcggcacccgccctgatgaaaaacagtatgatacggtggaaacccagttacgctttatgacagaaaacggcttttcactgcgcgacgggttatatgcgatttcagcggtcagtcattttacccttggtgccgtactggagcagcaggagcatactgccgccctgaccgaccgccctgcagcaccggacgaaaacctgccgccgctattgcgggaagcgctgcagattatggacagtgatgatggtgagcaggcctttctgcatggcctggagagcctgatccgggggtttgaggtgcagcttacggcactgttgcaaatagtcggtggtgataaacttatcatccccttttgctga

SEQ ID NO: 16008 - DNA, 1377 bp, Escherichia coli
atggacttagaaaataaattctcatatcattttctcgagggattaacgctcacggaagatggaattcttactcaaggaaatgagcagatttatattccaccgaaagagttaggagtattgatcgtattacttgaatccgctggtcatgttgtcctgaaagatatgatcatcgaatcagtatggaaaaatattattgtaagtgacgagtccctgacaagatgtatctattctttgcgctgcatttttgaaaaaattggctatgatcgttgcatagaaacaatctaccggaaaggttatcgtttcagtggacaggttttcaaaactaaaataaatgaagataacacttcagactattccatagctatatttcctttcaccacttcattgaatactctggatccattaatacttaatcaggaattagtgcaaaacatttcgaataaaaaaatcgatggcctttatacctatccgatggctgcgacaaatttttgtaatgatcacatatcgcaaaattcatttttgagaagattcaagccagattatttcgttacaggaagaataaaccagaataacgcggtgaaaactttatacattgaactgatcgacgctaaaaatcttttcctcatcgccagtaatcatcttcctgttgatgaactacataacacatcacaatttattatagataatatccttcaaacggtacataatccagagcgttctgtaagattagctaaaccggaccaaggttataagaatcattatttatcagatgaactgttggctggtaagaaagaactttacgagtttactcctgaaagcatttacagggctatggctatatttgatggattacaaaataaaagtgatatacagacgctaaaaatagaatgttattgtctgctagcggaatgccatatgtctttggcacttcatggaaagtatgaacttgaacttgctgctcaaaaagcattagagcttttacattatgtatcagacataaccaatgtcgatggaaaaattttagctattatgggactgataactggtctgtctggacaagcaaaagtatctcatatcttatttgaacaggctaagatacacacaactgatatagcctctctctactactatagagcacttgtcaattttcataatgaaagaattgaagaggcaaggatttgtatagacaaatcactacaactcgaacccagaagacgaaaagcagttgtgataaaagagtgtgtagatatgtatgtgcctaacccgctcaaaagcaacatgaaactctactataaagaaacttcgagtgaaagccatcgagttataattgacaacattttgaaactaaagcaactgacgagaatttgtatgcgataa

SEQ ID NO: 16009 - DNA, 1191 bp, Escherichia coli
gtggtggcaagtgaactgcacggcgagcagccgcaggcggtgccgggacgcaggggttcaggtaccacgctgaataaccactttgcggtaataccggcagacagaacatggcggccacagccgttgctgaaaccgctggtggacggcccgcagagcgccgtcgtgacgggaccggcaggagaagaaatcttctgtgatgaacatggccgcgtgcgggtgaaatttaactgggaccgctataacccgtcaaaccaggacagttcatgctggatccgtgtggcacaggcgtgggcaggcaccggctttggcaacctggcgataccgcgtgtgggtcaggaagtcattgtggacttcctcaacggcgatccggaccagccgattattatggggcgcacctaccaccaggaaaaccgcacccccggcagcctgccgggaacaaagacgcagatgaccattcgttcaaaaacctataagggcagcgggtttaatgaactgaagtttgacgatgcgacagggaaagaacaggtctacatccacgcgcagaagaacatgaacaccgaggtgctgaataaccgcaccactgatgtgataaacaaccatgccgaaaaaataggtaacaaccaggcgatcaccgttaccaataaccagatccagaacattggcgttaatcagatacagacggttggtgtcaaccaggtggaaacggtaggcagcaaccagattgtcaaagtgggttcaaaccaggttgaaaaggtggggatcattcgtgcgctgacggtgggcgtggcttaccagacgacggtaggcggcatcatgaatacctcggtggcgttgttgcagtcctcacaggtagggctgcataaatcactgatggtgggaatgggctacagcgtcaatgtagggaataacgtcaccttctcggtgggcaagacgatgaaggaaaacaccggacaaacagcagtttattctgccggtgagcatctggaactctgctgcggtaaggcaaggttggtgctgacgaaggacggaagcatatttctcaatggtacgcacattcatctggaaggagagtcggatgtgaacggtgatgcgccggtgattaactggaactgtggtgccacacaacctgtaccggatgcgcctgtgccgaaagatttaccccccggaatgccggatatgcggcaattttga

SEQ ID NO: 16010 - DNA, 495 bp, Escherichia coli
atggtaatatcaagaagtaattatagaaatatatgttcatatactttttttatggtgaatttatttatcttaattttatccgtaatcaatgaaggtttttgtgagattgcctatgtaataataagtgtttcttctgttcttttttgtgtaatcataatctgccttgaaaggcaagggggctttctcaacccaatgactttctgtattatatctgtctttttctttatcttaatcagacctgtctttttttcgcaaaatataacagagaatttaaacgaagtaataactgctggtttagaaattgatgagatatatgttttttattcgttagctgttgtaaacatttccttggcttttactgtattactgtattcagtacaaaaaggtactgtttccaagttagtagggcagttacctgatttgtttttttataataaacaattgtcaatgattttattatgggggggggcttttctctgctattttcttaattaa

SEQ ID NO: 16011 - DNA, 177 bp, Escherichia coli
atgaaacatatccctgaaggcgtgattcaggcaccagaatcacccgacgccccggaggcgctgccgggatgtcgttccatttctgatgatgacctgtgcagactgagtacaggcaatggcatccggccatccgtctacggctgtccggaatttcagccgaatatcattcatccctga

SEQ ID NO: 16012 - DNA, 354 bp, Escherichia coli
gtgtcagacacacttcccgacgacaatcacgaccgcccctggtgggggctgccctgcaccgtgacgccctgtttcggcgcccgtctggtgcaggagggtaaccggttgcattaccttgccgaccgcgccggtatcagagacctgttcagcgatgcagatgcgtaccacctggaccaggcctttccgctgctgatgaaacaactggaactcatgctcaccagcggtgaactgaatccccgccatcagcataccgtcacgctatatgctaaagggctgacctgcgatgccgacaccctcggctcctgtggttacgtttatctggctgtttatccgacccccgaaacgaaaaagtaa

SEQ ID NO: 16013 - DNA, 243 bp, Escherichia coli
atgtcagaagaaacagaaggcacaaatattgacccggatattgttggagagttccttgcgctgctggattcgcgctgcaggacaacggaagaggttattgccatactgagtatgcttagttacaacgcgctgaaacagagtggcttatcttctgtggacagccatatgctcaatggcgaagggatatcaatgaggctgacagggaccactgagtccggaataccgtattccggctttcactga

SEQ ID NO: 16014 - DNA, 432 bp, Escherichia coli
atggcaccgggtgagaagaaactgctgaaacattcgctggagcaggatgggttcacgcagcctgtggttgtctcggaagagaaggagcattatctggtcgtggatggttttcatcgtcagttgctgggcagggaagcaggcacaggaaaacgtctgaaaggctggttgcctgtagcctgtattaatccggagagaaagggacaggcagcacgcattgctgcgaccattcgacataaccgggccagggggaaacaccagataacctcaatgtctgatattgtcagggacctgtcgcggctgggctggacggatgaacgtattggttcagagctgggcatggaccaggatgaagtgctgcgactgaagcagattagcgggctgacggagctgtttcaggaagagaatttcagtccggcatggacagtgcgataa

SEQ ID NO: 16015 - DNA, 237 bp, Escherichia coli
atggttgcctccggagcagtttgcggtgatgcctttcccgggaatggattgccagtgcggggactgtggagcttaattccggtgttggtggcctttccgttgattttatgccaacagccccctgtgactgacaggctgcctcgtcattccattcgtatctccagtaacagggggttgtattgtattttattgtgccggttcaggtgtgcgtttcccggcgcgtctgcaccggcttaa

SEQ ID NO: 16016 - DNA, 402 bp, Escherichia coli
atgtacgcaaaatcctttatcgctcttgatggcaacggacgtctgacgggcgcccgtactgcacaggccgcaccttatgctaactacacctgccacttgtgtggcagtgcactcagataccatccgcaatacgaaactgaacttccctggtttgaacacactgacgacaggctgacagagcacggtcaacagtgcccttatgtcaggccggagcgcagagaaatacagttgattaaacgtctgcagcaattcgtaccggatgccttacccgtggtgcgtaaagccagctggcactgcagacaatgtcaccacgattattatggggagcagtactgcacacactgccagaccggaggattcagtattccccggacaactcaggaggaaatatgcgaattctga

SEQ ID NO: 16017 - DNA, 432 bp, Escherichia coli
gtgcgcaatatgcgtttagttatggaggctttagcattatggagtccacgggagaaagatataattacactcgtcgagcatgtacgaggtgcattaggtcgctacatttgccataagttttcatattctggagaaattaaagcaattgtgatttcgcctgaaatagaggacagaatcagagatggtgtcaggcctaccgctggcggtacttttcttaatctcgatgcatccgaagctgagatgattctggataattttaaactggcactttctggaatcaatattcctattaaagacattattttactgggatctgtggatattcgtcgttttatcaaaaaacttattgaatctagttatcgagacctcgaagtactttcgtacggggaactaacggaaaatgttcccgttaatattctgaaaactatttag

SEQ ID NO: 16018 - DNA, 966 bp, Escherichia coli
atgagtaaacaacgcatttttatcgctggccatcgcgggatggtcggttctgccatcaggcggcagctcgaacagcgcggtgatgtggaactggtattacgcacccgcgacgagctgaacctgctggacagccgcgcggtgcatgatttctttgccagcgaacgtattgaccaggtctatctggcggcggcgaaagtgggcggcattgttgccaacaacacgtatccggcggatttcatctatcagaacatgatgattgagagcaacatcattcacgccgcgcatcagaacgacgtgaacaaactgctgtttctcggatcgtcctgtatctacccgaaactggcaaaacagccaatggcagaaagtgagttattgcagggcacgctggagccgaccaacgaaccttatgccattgccaaaatcgccgggatcaaactgtgcgaatcttacaaccgtcagtacggacgcgattaccgctcggtcatgccgaccaacctgtacgggccgcacgacaacttccatccgagtaactcgcatgtgatcccagcattgctgcgtcgcttccacgaggcgacggcacagaatgcgccggacgtggtggtgtggggcagcggtacgccgatgcgtgaatttctgcacgtcgatgatatggcggcggcgagcattcatgtgatggagctggcgcacgaagtctggctggagaacacccagccgatgttgtcgcacattaacgtcggcacgggcgttgactgcactatccgcgagctggcgcaaaccatcgccaaagtggtgggttacaaaggtcgggtggtttttgatgccagcaaaccggatggcacaccgcgcaaactgctggatgtgacgcgcctgcatcagcttggctggtatcacgaaatctcactggaagcggggcttgccagcacttaccagtggttccttgagaatcaagaccgctttcgggggtaa

SEQ ID NO: 16019 - DNA, 528 bp, Escherichia coli
gtgggctatgatttttatcaacattacaatgttcctgtgcgcacggaagtggaattctatggccgcggagctgcagactcccattatacactggatacatggcattctccgatgggggatggtggtcgggaagacacacagaacaggctcagtgtgaataccctgatggtgaatacgtattatgacttcagaaacagcagtgcattcactccatgggtgtctgttggactgggttatgcacggatacatcataaggcaacatatactgatacctcctggaataaatctggtgaggtgagcgatatttctgcgttgcattactcgggatatgataacaatttcgcatggagcattggggccggtgttcgctatgacataaccccggatatcgctcttgacctcagctatcgctatctggatgctggtaaatcctccctgtcttacaaggatgcagaaggggataaatataaatcagaggctgacgttaaaagtcacgacatcatgtttggtgtgacttataacttctga

SEQ ID NO: 16020 - DNA, 660 bp, Escherichia coli
atggagaaaaaaatcactggatataccaccgttgatatatcccaatggcatcgtaaagaacattttgaggcatttcagtcagttgctcaatgtacctataaccagaccgttcagctggatattacggcctttttaaagaccgtaaagaaaaataagcacaagttttatccggcctttattcacattcttgcccgcctgatgaatgctcatccggaattccgtatggcaatgaaagacggtgagctggtgatatgggatagtattcacccttgttacaccgttttccatgagcaaactgaaacgttttcatcgctctggagtgaataccacgacgatttccggcagtttctacacatatattcgcaagatgtggcgtgttacggtgaaaacctggcctatttccctaaagggtttattgagaatatgtttttcgtctcagccaatccctgggtgagtttcaccagttttgatttaaacgtggccaatatggacaacttcttcgcccccgttttcaccatgggcaaatattatacgcaaggcgacaaggtgctgatgccgctggcgattcaggttcatcatgccgtttgtgatggcttccatgtcggcagaatgcttaatgaattacaacagtactgcaatgagtggcagggcggggcgtaa

SEQ ID NO: 16021 - DNA, 393 bp, Escherichia coli
  misc_feature (366)..(375): n is a, c, g, or t
atgggggaggcgatgctctatcagttgcatagtctgctggctgctacagcgctcggtttttgccgattggcaccaactttctatttgttaccatttttcgccagtgggaatataccaacagtagtccgtcatccaataatagtggtatcatgtgcattagttcagcattaccactatgaattatctaccctaaatgaaatagatatcgctttgtttgctgccagagaaattatcatagggttgtttattgcttgcttattagcatccccattttggattttccttgctataggcagctttatcgataaccaacgtggtgcaacgttaagtagtactttggatccggctactggtgtcgatacatcnnnnnnnnnnatagggcgctgtatctga

SEQ ID NO: 16022 - DNA, 741 bp, Escherichia coli
gtggaccaggacctgaagcagtatgcgtgtgatgcactgttcagtatgaagaccgtcagcggtgaggatggttatgtctactgccttgtggagcaccagagtaccgaaaacgcgtatatggccttcaggatgctcagatatgcggtggctgcgatgcagcgacactttgaggcgcataaggtacttccgctggtgataccggtgctgttctaccacggtgagcgcagtccgtatccgtacagcatgaactggctggatggcttttctgacccggatattgcggctaaaatctacaccagagcgttccatctggtggatgtgacggtgatggatgacgatgaaattatgcatcaccgccgtctgggggccctgacgctgctgatgaagcacagccgcagccgtgaccttatgttacagatggacagactggttcagctgatacaggactccctgaatgaagaactggcacaggtactgtttcactatctgctgaatggcagtgaacatgtgacggtgacgtttttgcagacgctggcgcagcgtctgccccagcacgaggacaacattatgacactggctgaacgcattgagcagaaaggtattgccaaggggattgagcagggtaaactggaagggaagctggaaactgcccgcaatatgctgaatgccggaatggaccgtcaggcggtgctgcagatgaccgggctttcaaatgaccagctgaatatgctgaaacactga

SEQ ID NO: 16023 - DNA, 294 bp, Escherichia coli
atggccccccgcctgctcatcattgatgaaataggctatctgccgttcagtcaggaagaagcaaagctgttcttccaggtcatcgctaaacgttacgaaaagagcgcaatgatcctgacatccaatctgccgttcgggcagtgggatcaaacgttcgccggtgatgcagcactgacctcagcgatgctggaccgtatcttacaccactcacatatcgttcaaatcaaaggagaaagctatcgactcagacagaaacgaaaggccggggttatagcagaagctaatcctgagtaa

SEQ ID NO: 16024 - DNA, 510 bp, Escherichia coli; identical to SEQ ID NO: 11377

SEQ ID NO: 16025 - DNA, 300 bp, Escherichia coli; identical to SEQ ID NO: 8718

SEQ ID NO: 16026 - DNA, 135 bp, Escherichia coli
atgaataatgcgaatgaggctgcggttgacgccagagcaataacacagcaaatggcaaaaaataaagaaatcaacgatgaattactgcagaaatggataaaaacttacctgaatcgtgaagtcgtcggaggatag

SEQ ID NO: 16027 - DNA, 516 bp, Escherichia coli
atgcagctaacagcgcacaggcggcagcggcctcgcagactgcatcggcaaactccgcaacagcagctaaaaaatcagaaaccaacgcgaaaaatagcgagacagccgcaaagacgagcgaaaccaacgcaaagtccagccagacggcagcgaagaccagcgaaacgaatgctaaagccagtgaaactgcagcaaaaaacagccaggttgcagcagcccaaagcgagagcgcggcagccggttctgcgacttcagcagctggatcagcaactgctgcggctaacagccagaaagctgcgaagacgagtgaaactaacgcaaagtccagccagacggcagcgaagaccagcgaaacgaatgccaaagccagtgaaactgcggcgaaaagcagtcaggatgcagcggcccaaagcgagagtgccgcagccagttctgcaagcgcggcggctgcttctgctactgcatcagctaacagtcaaaaagcagcaaaaaccagtgaaaccaacgcaaaggtga

SEQ ID NO: 16028 - DNA, 816 bp, Escherichia coli
atgaaagcgagtccacacaacaataatgtctggggggcgacgtataacacccgtaataatgtcaccaccgatgcgggtgccgggtttgagcagacgctgatcggaatgacagtggggatcgacagccgtaatgatattccagaaggaattgccacgctgggcgcttttatgggttattcccattcacatatcggttttgatcgcggaggtcatggcagtgtgggcagttattctctgggcggctatgccagttgggaacatgaaagtggtttctatctggacggtatcgtgaagctgaaccgctttgaaagtaacgtagccggtaaaatgagcagcggtggagccgccaacggcagttatcgcagcaacgggctgggcggtcacattgaaaccgggatgcgatttaccgatggtaactggaacctgacgccgtatgcatcgttaacggggttcaccgctgataaccccgaatatcatttatccaatggcatggaatcgaaatcagtcgatacccgcagtatatatcgtgaactgggcgcaacgctgagttacaacatgcgtctggggaacggcatggaagttgagccgtggctgaaggcggctgtgcgcaaagaatttgtcgatgataaccgggtgaaggtgaataatgacggtaatttcgtcaatgatttgtcgggcagacgtggaatataccaggcaggtattaaagcctcattcagcagtacgttaagcggacatctcggggtggggtatagccatggtgccggtgtggaatccccgtggaacgcggtggctggtgcgaactggtcgttctga

SEQ ID NO: 16029 - DNA, 492 bp, Escherichia coli
atgatgaaactggccctgacgctggaagccgacagcgttaacgtacaggcactgaacatggggcgaattgtcgttgacgtcgatggcgttgagcttgccgaactgattaacgtggtctgcgataatggctactcccttcgtgttgttgatgaatctgaccggacctcaacagacagcatacccccctctgctgccctgagcggtatacgctgtagtaccgcgcatatcacggaaacagacaacgcctggctgtactcgctgtcgcatcagacgaatgacaccggcgaatcagaatggattcattttacaggtagcggatatctgttacgtaccggtgcgtggtcatacccggttctgcggcttaagcgcctgggcctgtcaaaaacgttccgtcgtctggttgtcacacttacccgacgttatggcgtcagtctcattcatctggatgccagcgctgaatgcctgccgggtttacccactttcgactggtaa

SEQ ID NO: 16030 - DNA, 621 bp, Escherichia coli
gtgcatccggataaaatctaccgtgaaattatatggttctgctccggttacctgctgaaatccggaccagaggctacgaggacgatcatcaactcaatattctgtgactggggcagcatcagcaatgattactcctcccccttttcgtgggtggacagcagggacagtgaacagtgtgactggttatggaacgccatgcaggtccggtgtgtgggaaccccgctgaatccccttaccccggagcagaaatactggtttgcctgcgccacgtttgataactgggaaggctggaatgagcaacaggtacagtttttactgaaaagtaatcccagacgaaacagagcgaagtttacgataagtctcttcccggcactcagggttaaacagcataaagctgttcttcttgatgagctgaaaaatgcccgggagcaacaaaaaaggcgtgatgagcgtgctgatggttccgtcccgctgaaactgtccggaaaaatccacaaacagcttgaaagtattgcccgaagtcgtggtgtcccccccaaaaaaatgctgaatgaaatgattgagcaggcgcaccgggatttggaggcaaccaggcagaacagccagaacgattccagataa

SEQ ID NO: 16031 - DNA, 174 bp, Escherichia coli; identical to SEQ ID NO: 9772

SEQ ID NO: 16032 - DNA, 432 bp, Escherichia coli
atgataaacgatctgaagagcatattgttaaaatcttcagaggaagttgaagtttttatcaaaatttttgaaagttgggtaacaaaattaccgtcaatatcaggccctttaaatctctatatacctaccagtttcaaagataagtctattgaagtagagtcatattttgtcgacaagtcaatatggaatgtccatatttcatatcatgatgacaaacgttttattttttttacagatcaatttattgctgaatttagtccgcaggaatttgtggataattgtgagcaatatttaattagcaatcactgtttttcccctgacaaggttaatgaaatctgtgaacatgccagacattatttagttgaaagaatgtgtgaaatagattctttggctatgaataattctgatttgacgaatccagaggacttatag

SEQ ID NO: 16033 - DNA, 216 bp, Escherichia coli; identical to SEQ ID NO: 5123

SEQ ID NO: 16034 - DNA, 174 bp, Escherichia coli
atgggtaatctgccagtgggaagtcgtggtttatataaagggaaaaaacgcagcgccggtatgaatgaatcacgtcatccgggaagcacacagatgacgtgcactggtcaggcgcatcgtggtggcgaacaccggctgaacacggggccaccggactggcagaccgtggaataa

SEQ ID NO: 16035 - DNA, 405 bp, Escherichia coli
atgagtaaatcacacccgcgctggcgcttagcaaagaagatcctcacctggctgttttttatcgcggtgattgtgttgttggtggtctacgccaaaaaagtggactgggaagaggtctggaaggtcatccgcgactacaatcgcgttgcgctgcttagtgcggtcgggctggtggtcgtcagctatctgatttacggttgctacgacctgctcgcccgtttctactgcggtcacaaactggcgaagcgccaggtgatgctggtgtcgtttatctgctacgccttcaacctgacactcagtacctgggtcggcggcattggtatgcgctatcgtttgtactcccgactggggttaccgggcagcactattacgcggattttttcgctcagtattaccaccaactag

SEQ ID NO: 16036 - DNA, 762 bp, Escherichia coli
atgcccgatcaaacacaacaattttcgttcaaggtgctcaccatcaatattcacaaaggctttaccgcgtttaaccgacgcttcattttaccggaacttcgcgacgccgtgcgtaccgtcagcgccgatattgtttgcctgcaggaagtgatgggcgcgcacgaagttcatccgctgcatgtggaaaactggcccgatacctcgcactacgagtttctcgccgacaccatgtggagcgatttcgcctacggtcgcaatgccgtatacccggaaggacatcacggtaacgccgttctttcacgttatcccattgaacattatgagaatcgtgatgtttcggtcgatggtgcggaaaagcgcggcgtgctctactgccgcattgtgccgccgatgaccgggaaagcgattcatgtgatgtgcgtacatctgggcctgcgtgaggcgcaccgccaggcgcagcttgcgatgctcgccgaatgggtgaatgagctaccggacggcgaaccggtattggtagcgggtgatttcaacgactggcggcaaaaagctaatcatccgttaaaagtgcaggccgggctggatgagatttttacccgcgcccacggacgcccggcgcgcacgtttccggtgcaatttcctctactacgactggacaggatctacgtcaaaaatgccagcgccagcgcgccaaccgcgttgccgctgcggacatggcgacacctttctgatcatgcccctttaagtgcggagattcatttatga

SEQ ID NO: 16037 - DNA, 684 bp, Escherichia coli
atgaagaaggttaagtggctcaaattaaacatacggcttgaatttgaaaaagctgttaaacgtctttctcttgattcttttaccgaggataaggggaaagggtttatttttgataaaatacgtcatgattctgcacatggacgctttgttgagcgtattatttatcacgatcaagtttctaattttgacggaagcgaaactatcgtagaaagagtcgaataccgcactactaatttcagtgtatctttagatactcttcctataatgcaacttactaaccctccgcgaactttaaaaccgttttcacaggccttagtcagaaatcttggcttaggcgttagcctagaagagattgatataaatccgatggactggctcaacgaaatatcttcaaatgtgaatataaatctaacacaactggatatttctagagttagagtcgctgattacgctacagctaaaatgcaaataattggcagcagtgaccttagaaaatattataaagaagaattagaggggaagaaaataagaattgacaaacttgtttgctccgttaattcattagagtattctggtaaacttaaaattactaataacgctcttgcttacattgacgttaaaaatgaaaataattttacaaaaattgtatttgatacgttgagaaagattgctcttcaatcatag

SEQ ID NO: 16038 - DNA, 1080 bp, Escherichia coli
atggctaaaaaattatactttgcgactgacaagaatatttatgatgctttgcatcataaaagaataacccctgcaaaattacatgaattattgctaaatagaggtgtttttttatcaccagaactcgacaaggaaatacttatcgaggaaatatcaaaactcccccatggctttaatgaattagagcatataaaaaagatggtcaaaacatatgatccaagagaaagcattaccagtgtgagttttcagaccacaacaaatcaggccgaattaaagagcgcagctgaagcattgaaaaaaacatgttcacccagtaaagggcaaagcttgaatatcgtagcgaaaaaagatggttctctgacagtagaatataactatgaagaaatagacttatctaaaaccgctctgcgtcaaatagataaacggaatgtcataatagaacttcgccctggtgttgacaaggttgaagtacgtatgccacagaatcctgaggcaaaaaaagttattgagggtctgcaaaacgagctgtctaaaatcaaatctgagcctattgaacgttttgaaatttctttaatggcaatcactgaccctacattgcgaagccagttctttcaagagttaatgaatggactacatggttatgagactgatgatgtaacgaaagtagaattaaatcgcagtattgacgcaagtgaagatgaagacaaagaagaaacaatcgataccggattcgtcaagaaagctgttttgaatggtgaaggtgttaatagttcgcctatattttctcaactacacgagaaaggttattatataggccgtatcgcatggtcttcaaaaccgacaagtggagttggtgacagaattaacgttgaagcatttttcaaagactctgaaaattgctgtgactttgcctatcaaattaaagggataaataatcaaaaagaagacggattcaatgtgacaattcgtgcggcaacggcacaagagaaaagacatattagtgaattaattgagtcagccgctgaaaatgcctataatataataataggaccagaggtaaacgaacatgaagaaggttaa

SEQ ID NO: 16039 - DNA, 1002 bp, Escherichia coli
atgggtggagaaacttcggctatacaacgagtcgcaggtaaaatttctgatgatattttctctgtattcaaatgggatcgcgccgctagagcggacatgaattgggaatgttgccaagaggtacattccaagaaaacccatccaagtgatgttgtatttttctacacagacccttatgaagaggaaatggtctatctcaatacagatctaaagagctatgcggtgggatctattggtaaaaaaatggtcgaaggtgccttaacctcacttgctttagctaccgagtgtgcgaatgtaagtgaagagtggcgattgaaatacgttcatgatgattctttaggttataatgtaagaggtttgttatttttgtataatcatgataatctatatgataaagatttctatgaaaatattacaaaaaaattagatcattccgttataaattgtcctccaaacataaaactacacttacttgacccctataaaatatctgatttaataaatatatcctctgacataaccaaattaataggctctggaaaacttccacagcctgataagtttacttactattacccagatctttctttaacaagaataaaacaccccatcaaccaaacaacacctgcgacaattgaattattaacatcgccatacatcataattaaacatgaggcttttagctggcttaaaaaagatatcccagaagggtatgttgtttattacaatcaacccggtgattcattagatgaatttgtgtacttttttgacatgctatcaacttatcagatactcactgaaggcaaaccaattttattacgtcattgtcatatccatccaaatgaaaatgctattcatcattttgaaaaagctaaaaagaaatacagtacagactggctgttaggtgaggatgaaagactttttcttaaatttgacttcgaaaagacagacaaagttgtagttgaatataatcttgaaaaaattgggatggagcaacgataa

SEQ ID NO: 16040 - DNA, 294 bp, Escherichia coli
atgaaaaccatatacaactatgactttcaatacttacgtaaaggggatacgcgacctcttgatgatggagagattgtaggatgttcttcggaagacaatccactcctgatgcttccgaatgttggggattatgtcgacattaccaacaataaagaccgtgagtcgtttggtgggaaagtgaaatcaaggttattcagatatactcgagtaagtgaagaccatgttatttgcaacatcaatattgttgttgaagaggttgaagactcggtatggggcacacttgttaaagagtaa

SEQ ID NO: 16041 - DNA, 411 bp, Escherichia coli
atgacagtgaaagcaaagcgttttcgcatcggggtggaaggtgccaccaccgacggacgcgaaatccagcgtgaatggctggaacagatggcagccagctacaacccggcggtgtataccgcgctgattaaccttgagcacatcaagtcttatctgccggacagcacctttaaccgctacggcaaggtgacggcgctgtttgctgaagaaatcacggaaggtccgctggcaggcaagatggcgctgtatgccgacgttgagccaacagagtccctggtggagctggtgaaaaaagccagaaattattcacctctatggaagtcagcccaaagtttgctgatacgggcaaagcctacctggtcgggctggctgccactgatgaccctgccagtctgggcactgaaatgctga

SEQ ID NO: 16042 - DNA, 867 bp, Escherichia coli
atgacacaaatcgcaatttatggatttaatttcactaaaaaaatcacatttgacggtggtgagttaactcctattttcagttcatggagtgagttaaaaaaaaatggctgggctaatgataggtacatcctcactggttttttcaaaccaaactcgaataactacgccactcaacagcagcttatttttgatttacaagcagttcttagttttattgaacaaaaaaatgtaatcatttcaggagaacttgaaaatgatgaaacccctttcaatttcaaaccatccctacccaaaaagcttgacaaaaaaagagataagggtgctggcattatcatcatggaagattattttgcaccaaacagccgagaaaattttatttgcttagccatggaaaaactaaatagtaaagccatgctaaaacaagatgcctttagaacatcattttttaaatcaatgctagctttccgcgactcaataaattatatcgacgtcagatattatttattattctcggcactagaagcactttgcagatttattaaaaatgactactcccctgccaaaacgccacaaataatcactcaggttttaaaagaatatggttttaatgtcgaaaaaacaggacatacattagctcaaagaaacattatgcattactgcaaactccgtcactcgctgttccacaatggtaaatacattgcctatcttgatgaaaaaaactcagatggcaaaattgaaattcaagattactcatcaaatttgaatttactggtgccacttgtactaatgaaattcataggatttgatgacaattatataaactgggactcatggattgataggaatccatttatcagtaaaaagtaa

SEQ ID NO: 16043 - DNA, 603 bp, Escherichia coli
atggataatgccgtattaaatagcgagtttattgccacgaaggcgggggatattactgtctataattataatggtgaaacacgagaatatatttccacatcaactgaatatcttgctgttggtgtcggtattccggcatgttcctgtttagatgcaccaggaacatataaagctggttatgccatctgccgctctgcggatttaaactcatgggaatatgtgccagaccatcgcggtgaaatcgtctataacaccgaaacgggggactcaaaagaaatcacagtgccgggagattaccctgaaaagacaaccactattgctccgttaacaccatacgataagtgggatggtgagaaatgggtgacggataccaaagcgcaacataacgcagcagtggatgcggctgaactgcaacgccagtcactgattgatgatgccatgtcttccattgttctgattcaactaaaattgcaggccggaagaaaattaactgcggaagaaacagtaaagctcgattccgttcttgactatatcgacgtggtagcagcaatagatatcagcacagcccctgatattaactggcccaaactaccagaaatttaa

SEQ ID NO: 16044 - DNA, 450 bp, Escherichia coli
atgaaaaacagtaaggcattttaccgcagcacattagcgacagctattgttatggctctttctgcaccagcattcgctgctgataacgcggtatcaactacaccggttacattggataaagataagacaactctggaacaagatgttgttattagtggtactacacagattacagccgcaacaattaatgcgaaagataaagaccttaatgttactttgggtggtcatgatattaccgccacatcaacggtagaccaaggtttcgttgaaggtgtaaaagttagcggtgacaaaaatgttgtgattaatgctacaggctccaccatcacagctcaaggtgaaggtacctatgtccgaactgcaatggtcattgattcaactggcgatgttgttgttaatggcggtaactttgttgcaaaaaatgaaaaaagtagtgcgacaggtaggtga

SEQ ID NO: 16045 - DNA, 795 bp, Escherichia coli
atgaagaagcctctggttattatcagtgcctgtcagttcaccaggctggcactggagtctctcatcccaacggacaggtatatcgtgcgggtgtacagcaacgtcactacagaggttgaattcgttttaaagacctcctgtggctacctgttagctgatatcccttcgcttccttcgggggagttggttcttctggcttgtctcgcccgtttgcggagtgatgccgggcaatggcaggtctgcctgaccggtgactccgactggttcgataatgctcctgctgcaagtctgtataacggcttcccacgcatcggcaccatgctgacagcgagtcgttatcagaatcaaattatccgctggttactgcgtcctttgcccggcgatatgagcgatttctggctcctgactgcacgggagttgagcgtgcttaagattctgatgcagggcatgagtttcagtgagattgcccgttatgaacaacgcagttcaaagaccctgcatgcgattgccacacgggctttaatgaaacttggactgagaacactgagcgatttcaggctgctctatacgggatgcggtgacagcagagtgaaacggaatatacggctacatgcaaaatatatcggacaacattccgctcatcgactcactcagtatgtgcagaacatggtatccggaatcctttatccagagaaagttgccgttggtgaatcaataaattctgacgccatttccggaaaagtactttccggacaaagaaaaaatatatctaaaaaaagaccaggattgttatga

SEQ ID NO: 16046 - DNA, 567 bp, Escherichia coli
gtgaccgccgccgctgacatccagcgtgccgtcctgattcaccaccgcgttgttacccgcgatttcggtaccggtcgaatctttgccgtcgacaatggttttgccgttgttgttcgcggtcgcatcgtcaccgttgatctgtgtgccggtgccgccgttgctgatggcattgtcgccgtcattgttgacgatggctttgtcgccgtcgatcagaataccaatggaatccggatcggtaaccgtcataccgcccttgttgtccaccgtggcgctgtcgccggtgatatcaatcccgtgaccgccgccgctgacatccagtataccgtcctgaataactttcccgttattaccggcgatctccgtgccagtggaatctttaccatcaacgatggttttgccattgttgtttactgtggcattatcacccgtaataacaagctcaccgttatgattatattgccacttcgttgcgccatctgcgctcaccccgtcaagggcaaccgtgttattcgcttcatcaatttgccaaatattaatagttgccttacggccattgctatcttgtag

SEQ ID NO: 16047 - DNA, 273 bp, Escherichia coli
atggaaatacgcgaaggccacaataaattttacattaatgacgaacagggcaagcaaatcgctgaaattgtctttgtgccgaccggagagaatttagcgattatcgaacataccgatgtcgatgaaagcctgaaagggcaagggatcggtaaacagctggttgcgaaagtcgtggaaaaaatgcgttgggaaaaacgaaaaattatcccactatgcccatttgcgaaacacgaatttgataaaatacgggagtatgatgatattcgcagttga

SEQ ID NO: 16048 - DNA, 165 bp, Escherichia coli
gtgctgccggtggttgaaggtaagttgggttacatcgcggcagtggctgtcggggcggttgtgacggcagtctgcgtgaacgtgctgaaaagtctggcgcgtaaaaatgggtcttcaactgaagagaaggaagacgacctggatctggattttgaaattaattaa

SEQ ID NO: 16049 - DNA, 303 bp, Escherichia coli
  misc_feature (209)..(218): n is a, c, g, or t
atggagtggagcgatatcgtttcagagttagaaaaacatgcgcaaagttatgataaaagtttactccctaatgcggtcttcattctttcgaaaggctttttcctatatggcgatgaacgctttggaagtgtctataattctgatatgaagaactttggagacattgttgtatatggtaaccctgattatcaagggtgttgcctttatcnnnnnnnnnncaactttatgatattgtctttaatttacttaatagcacaaaaactaaaaatgtattgccaaaccagtattttaggctccccttga

SEQ ID NO: 16050 - DNA, 459 bp, Escherichia coli
ttgactgcgggggattactcttacgaatataacttaggctactttgcagaatatggtcattgtgaagcgcatggagactttgcaagaacatatactccagagaaacttgaacgactaattagttggtgccaaacagcagaactaattaattgggtgaaagccacggatatagcttatggtaatgcaggtgacaactatgaggcttatgaaaggcattcaggcgatgtaataatttacaatccagaacacttgcctcttagcgacattttagtcagcgataggaaaataattgttgaaggaaaggaaatgctaactaaagcacttgcttatgatgcgataaaatgtggtggaatgaatattttaattccttattattatcaaatcaccgaggacttagttcaaagttgtcccaagtgtaaaaaaaacgcacttaataaaaattcaactgataagaactaa

SEQ ID NO: 16051 - DNA, 1413 bp, Escherichia coli
atgattgaattgccgttgtatttgtatgttgtgtattgttttgcttttggaatgacattttttgtcattggtaatattgtattgtcatctttttttaaggagggggtggcaggacttaacaaattttctttatttttttattgcctatgcatagggatgtctttaagtattttgataatttactttctgggcatggtcgggcaatttaataagattgctatctttttaatttttacggtgtgttgggttttaagcattattaaacgtcagcaatttagatggctggcaataaataatattgagttcagtacgctgtttgttattttatttcttgttttgatttttgcggttacattgttatcgtccctgcgagctcccggtgattgggatgatactatgtatcacttacctttggctcgttcattagttgagcaccatgcaattgttgttgaacaatatttgcgttttcctctgttcccgcaaaatgcagatcttttaatggctttaggtttacagttaggagatgtaaggttagctcagtttttagcaaatatctgttttttcgtaatagcctgtggacttgttggctgttcatgggaaattacgaaaacttattatcctggcattattgctacaatcctactatttactatcaatccacttaaagatcatcttggttatgcatatattgatttaacgctatctttgttttgttttgctgcagccagtattcttatatatattcgctcagaaaacaataaaacacaaaatgaattaatttttttatgtggtttttttattggaattgcttgtggcgtaaaactatttggtgccatatatggagctatcatatttgttatattgatagcgaaaaagagaaacatacagacatttcttatttttagcttggcaacaattcttggtggcatttattggtatgtgcgtagtttttggatctctggtgatccttttagtcctgctggaggaaatatatttggtcactacctatggaatgaaattgatctacaagttcaaacagcagaacaagctcgacatggtataagtcctgccacattagatttgcaacaagcaattaataaagttggcagtgatgttgttttttatgctatactgtctgtctttacacttaggaataataaaatactttgggtatttttctcgattgttttaacatatgtcttattttggttttctgttacgcaagttgacaggtatttatcacccatttacccattgtcagtattgctggttgcgatctcaattgcaagtttaataaaagatatcaacattacaaattacaagttgggacgatattttatccttgcgtgtattattttttttcggggcgatcgttgtattttgaattcaaatatttttattctgaatacttga

SEQ ID NO: 16052 - DNA, 249 bp, Escherichia coli
atgcacctcccaccgcaagcggcgggccccgaccggagtcactttagttacaacacccaaaaacaaccaccggaaaaaccccagtttcgcgcagaactgaaaccgcaaagcccctccctcataactgaaaagcgaggccgccccggcccaaagggccggaacagagtcgcttttaattatgaatgttgtaactatacagcatcatcgctgccagtcttctggctggaagtcctcagtacacgctcgtaa

SEQ ID NO: 16053 - DNA, 627 bp, Escherichia coli
atgtggcgttaccggataacgcggttgctgtcacggaaatatccggacctggcgataccggatgcgctggcagcagaaggaagctgtaaacgggactggaatcgcttcctgaacacgcattaccgccgtggctggaatgtcaacgtatcccgggtgatggataacgccacacatgtggcggtgtacttcggctcttacctgaaaaagccacaggtgccgatgagtcgtctggagcattatgccggtcaggatgaagtcggtctgcgttataacagccaccgcacacggcgggaagagtaccttgtgatgagcggtgatgagtttatggaaaggttctcgtggcatatggcagataaggggttccgtatggtgaggtactacgggttcctgagtccggtgaagcggcgcttactggaagaggtggtatacaccataacggagacagtgagaaaaacagcaaggcaaataacatggagggggatgtatcagcggttactgaaggttgacccgctgaaatgcgtgctgtgcggaagtcagatgcgttttacggggctgaagcggggataccgtctggcagagctggttatgatgcatgagccactggccaggatgcggtggtgcggctga

SEQ ID NO: 16054 - DNA, 192 bp, Escherichia coli
atggctgatatagcaacaatgagaatgaaggctctgcacttctgggataaacacggtatttctgcagcttctgaagcctttggcgtatcctgccgcacgctttactggtggcgtcagttactgaacaagggaggacctgaggggctaatcccgcacagtaaggcacctctggtgcgacgaaaaaagcactga

SEQ ID NO: 16055 - DNA, 519 bp, Escherichia coli
atgcttgtgactatgttagataaagagctcagccggatcaacgtcattcagtcagttgtcgaaaagcgtatgcgccgtcgtgatgctgcgcaccaacttgctctgaccgaacgtcagacgcaacgtctgatgaaccgctttcgtgaatcaggtgccgctggcctggtaaaccttcgacgtggacgccctggtaatcacagactccctgagtcactgaagctgcgtgtactttctttacttcacgatcactacagcgactttggaccaacgcttgccgcagaaaaattgcgcgaacgccataacatcacggtgtctgttgaaacgctcagaaaatggatgactgccgatggactctgggttccatactcacgtcgcagaccccgtgttcatcaacccagataccggcgtgactgtctcggagaatttgttcagattgatggttctccacatgactggtttgaaggacgcgccccaaatgctgcctgcttgtcttcattgatgatgctactagcttcctga

SEQ ID NO: 16056 - DNA, 456 bp, Escherichia coli
atgcacctccgcttcggcgaaactgaatcagcctttgattacatgatggctacccgagagtatcttgaacaacatggcaaaccacttgcgttttacagcgataagcacggcattttcagggtaaataagggtggctccactacgaccggagtaacccagtttggccgtatgctttctgaactggggatcgagttgatttgtgccaacagtccacaggctaaaggccatgtggagcaagcaaatcagacacttcaggaccggcttatcaaggagatgcgtctcgagggaatcagcagtatcgaagcagccaatgcttggctggataccttcatcgctgacttcaatcgtcgcttcgcaagaccagaaaaataccccaaagatttgaggctgaaatcaacgaagagctcgatgatatttttgcctagcaggaacagcgtaagctgtctaaaacgctga

SEQ ID NO: 16057 - DNA, 252 bp, Escherichia coli
atgtctgacaaacactaccgccgtctgcatgaatgttaccgcgaacacggacctcttttgctggtaaatcgccgtggacagccaggtaatccgcaactgatgccgggcctcgctgagcgtgcactgcttattatccatgaacactacgctgattttggtccgacgttagcctgtgagaatctcgccgagctccatagtctatatctgaccatagaaacggtacggaatctgatgatacagactggtttatag

SEQ ID NO: 16058 - DNA, 372 bp, Escherichia coli
atggtgattattttaagtatgcatcatatatttgaatcatctcctttattgtgcataggggtgatttcaaattattatttgaaaaatatcatgttgaatgtaaaacatcttcctgttcttatgtatcatcacatcagtcgttgtccgagacttgttactctttcaccgaaaatattttgtgaacagataaaacggctcgcaaaaaataactggcgaacggtgacatctgtagaactcgagtctttttatcagggagaaaagctccccagaaaaagcgtcatgataacatttgatgacggttatcttgataactggctccaggtctggccgattcttaaggaatataatctgcatgcacatatttttttataa

SEQ ID NO: 16059 - DNA, 528 bp, Escherichia coli
atgatgaaatcggttcttggcatagctgttgcaattgctttctgttcagcagcaaatgcggcggatcagggacaaggtaaagtaaattttaaaggaaccgtaattgatgctccctgcgggattgctccggaatctgccgatcagtccattgattttggccagatttccaaagctcatctggaggctaatggtatttcggtgaaaaaggatctggatattaaactggttaattgtgttcttgacgccaaaaaaccgacagtaaaagtggccttttccggcaccaatgtgaatgggcatacaaacgagttaggtactgctggtgataccggtacagcaattgttatttccagtgaggatggctctctggtgacttttgatgggaagactcctgctggtgcaacgacttacaaagctggtgacaacactctgcactacagtgcttgggtcaaaaaatccagtgctgataatgcagcgattaaagaaggtgagtttactgcggttactaacttcaatctggcctacgaataa

SEQ ID NO: 16060 - DNA, 1074 bp, Escherichia coli
atgttaccaattaaacccgtttgtctcgcactggctttattttcactcaattcaatagcctgctccggcgtaccatctgcctctttttattaccaaccgtgggggcaaggaacaaaatatattgttgaagatagcgatggttacggactctattttccggatattcatttaccgcaggtgaggttcaaacaactgcgccgtgtatctgacggcactgatgatgaatatgattctcctgatgatatcaataatgattttgtgcgggtggatggtggcgcttatatcagaaccaacggtggttggcgtttcgactggttgactgatggccgccatattttatgggcagggaaaatagttcagaacccgccgggaacaccgaaagtcgatgccgcaacattccgcgcatgggggcgttttgctgccgataaagacagcctctattttgatggcgaacgcacggatgataatcacggcgaaaagcaggtcgatatggattcgctgcaacaggtagggggaaggatgaattcacttgattccgcggatgtgctgaaagatcgtcgcaatctttactttcaggggcgctggttaggtagtgcgcaagggtattctattcttgacattaaaccctggacacgtcgtcccattatttattcacctaatagctgcgaaagcaaaagtaatccgggaccctgggatacaatctggcggactaaatcgcatgtctttgtgaatggagatgccatcaacgccgatccggattcctttcatattgtgcgctggatagccggttcactgctgatttatcgcgataaagacggggagaaaagttatgcgttcggtaaaaattgccggagtacgtttgacctacagcgggataaagtaacatggctgacgcgtgatgcttcccggcacgctaatgattgccgggttgcgactattcctgatgttaatccggaatattttcgcccgctgacggagaatgtggcgcaatataaagattcgctctatctggtgaaatatgtgtctgcggttgaaaaaacgctgtcggtcattcatttaccggacccacggtaa

SEQ ID NO: 16061 - DNA, 1059 bp, Escherichia coli
atggttaaagaattgaacgatgtttttagaactgcattcatgaagttgatgtttttgtgtttagcagttattttaattaatatgtttacatttaaaaatcagacttttaatttgtatatgtcaaaagggtttttcctttttgcttctctaatgctatcagttccgttatttcatgctgcaaaagaattgtttccccatgtattaaaaatcgtcaagattaagtcatggagaatggcaataaacattagaagatattacaagttaacagtagtcaacaactttctcctccatattggagctattggaatttttgcaacaacaatatttttaatggtttttggtatggaaatctcatctttaacatattttactatgtttgtgctgagtatttcatttttatgggatgtgtataatagagtgagatttataacttctcgaatatggaaggggattcttggcaaggtggtgattatattatgtacgggagtttcatttataatttctaattttctaatgagacattggattgcttgtacaacaggtttggaacctaagttttttggtgaattcattaacatgtttagtgttttctttgctcctgtagcgtatttgatatttacgctcatgctttgcattataatcattatgcctgaaattataggacttctgcttttaatgttatttaacccattacgagaagggtttattaaaagaaagtttccttcgttggttgaactatcagtaagaatacaaactggtaagcgaacaaaacatttaacaaatttagaattagctttaattaaatctaagataatgatttttagaatattggcggccccaatgttcctggcttcaattggctatttggttgttcagataaataatatatcaagtgatttttttgatgggaaaggtcggttgttgctggttaattattactatgatttagagaatgttaatcagaaaagtacaatgcgatattataaagttgataattctaaaacgtcggtggcagttctggtggatgggaaatggcagttttttagtcttgatatttaa

SEQ ID NO: 16062 - DNA, 1182 bp, Escherichia coli
atgtcgaaaagcaatccgtctgaagtgaaattagccgtaccgacatccggtggcttttccgggctgaaatcactgaatttgcaggtcttcgtgatgattgcagctatcatcgcaatcatgctgttctttacctggaccaccgatggtgcctacttaagcgcccgtaacgtctccaacctgttacgccaaaccgcgattaccggcatcctcgcggtaggaatggtgttcgtcataatttctgctgaaatcgacctttccgtcggctcaatgatggggctgttaggtggcgtcgcggcgatttgtgacgtctggctaggctggcctttgccacttaccatcattgtgacgttggttctgggactgcttctcggagcctggaacggatggtgggtcgcgtaccgcaaagtcccttcatttattgtcaccctcgcgggcatgttggcatttcgtggcatactcattggcatcaccaacggcacgactgtttcccccaccagcgccgcgatgtcacaaattgggcaaagctatctacctgccagcaccggcttcatcattggcgcgcttggcttaatggcttttgttggctggcaatggcgcggaagaatgcgccgtcaggctttgggtttgcagtctccggcctctaccgcagtagtcggtcgccaggctttaaccgctatcatcgtattaggcgcaatctggctgttgaatgattaccgtggtgttcccactcctgttctgctgctaacgttactgttattgggcggcatgtttatggcaacgcggacggcatttggacggcgcatttatgccatcggcggcaatctggaagcggcacgtctctccgggattaacgttgaacgcaccaaacttgccgtgttcgctattaacggattaatggtagccatcgccggattaatcctcagttctcgactcggcgctggttcaccttctgcgggaaatatcgccgaactggacgcaattgcagcatgtgtgattggcggcaccagtctggcaggcggcgtcgggagcgtggccggagcggtaatgggggcattcatcatggcttcgctggataacggcatgagtatgatggatgtaccgaccttctggcagtatatcgttaaaggtgcgattctgttgctggcagtatggatggactccgcaaccaaacgccgttcttga

SEQ ID NO: 16063 - DNA, 1266 bp, Escherichia coli
atgcgtttaaacgtgtttcatcaaaaagcgggtattcatgcggggattaaaacaatgggtaagttgaaccagggaaaaatcgacgccatcaggcgcggcacattcgaaccaggtaaaactaaattcgcggacggcgacgggttgttcttgtaccgcaacgcgaagacaggcgcgtgtagttggcgcttccgctatcgctacgacgggaaagaagtcgaggttacgtttggtcagttgaaagacattatgctcgccgatgcgcgggaaatgtgccgtaaagcgcggggattgataacccagggagttgactaccgcagctaccagaaagttgaacaacgccgtagggcggaatcaacattcgcagcaatggcggaagcgtggataaacgaccacagatggacggaagcgtatacaaaacaggtgcggttaaatcttcgtgatgtactgaaagagataggcgcatttactgccgaccaaatcacttacggcgtgctgattgacgtcattaagcggattggtcacggcgaccgcaatcatcagggccgtccggtcacagccttaaaagccgccgcgcacattgccgccattcttgcccgcgccgcagagcgtgacatcatcgcaaaaaacgtagcggtgacactcgttaaaaatgcgcgtgaactcctgaaacacaaagaaatcagctttaaccacttgcaaggccagggtgaaattaaccgtttctggtgcgatttaggcgcactggcgaccactccggcagtgaatgcaacgaaactcttgctgttaacaggcgttcgcactaaaaacatccgccacatgcggtgggaagatgtcgatgtgtgcgcggctatctggaagattccggctgagaacatgaaaaacggtgaagcgcacgaagtcccattaccaccagcggcgatgaaaatattaaccgccattcgcccggatgatgccagcggatacgttttcaccagcaaaggccaccagccgttacacgtcggtgcggtgatggatgttatccggcgtgctggttacgaaggcaagttaacggcgcacggcttccgccattgtttgtctacggcactcaacgaacatggattcgatagcgacattgtggaattaatactggcccataagcgcacgggtatcgccggacgctacaaccgcgccagacgcgaagccgaaaagcgccgcgcattgtgctggtgggcggactacgttatgcagacagaagcgaaggttatcccgttacacgcggcacggtga

SEQ ID NO: 16064 - DNA, 639 bp, Escherichia coli
atgaacattcatgatttgcttaaagatgcagctatcaagcatggttatacgcgcggtcaatgcggcatagacaacatgcggatagcgaaagcggcaaaggttagctcggatgatgtaaaaacgttgttgggtacactgaaacgcaagatgccaccgttaatggtgctggcgaaagtagcggcgctattgcatgtcgacagtgaaatcatggactatcttgtcgcgggtagtttacaaaatgtgacaccggacaatcaccagccggatagctgcggcagcggtgacagcgtgattaaacctgcggtgacagcgaaaccacggaagaagaaaacggcattcgatacgcgcaaatacacatgcaacattctgctacgccgactacgccagcacggggcgtttacgggaacgaaagcggaactgattgcactactgaccaacggcaaaaatgacatttcggagccaacgctgcgtcgctatcttgccgaactgaaacgcgaaggattgatacgttatattgtaacaattggtaaggttgagatttcattccctgggcaagtgccggacaacggaaaagattacggttatttgtatgtacaacaacgcaaagacagagctaatttttaccgttcattacggtga

SEQ ID NO: 16065 - DNA, 186 bp, Escherichia coli
atgaaagacgatgtggaactaatgacagttaaccaggtggcccgattattcggagttacgcgttggtcaatattcaagtggatgcaacgaatcccggactttccgaaaagcgtaactccggcgggctgccagattaaattcatcaagcaagaaattctggacttcttttataaacgaggtaaatag

SEQ ID NO: 16066 - DNA, 531 bp, Escherichia coli
atgccgaagccaagtccacgtattccgccattggaatatcagcaagaaattaaacgcagattcacagtaaatgaaaaatctcaaacaggattggaccgcgacgggcacgaattatgtctgaaaccaattgagagcaaatacggctattgtaaaggtcgcaaatataaacgtcacaataaagcacgctattacagggtaagcgtgacagttaacggtaaagagaaactgtttcgcgtacacaatatcgttatctggttgacctacggatttgatgccattccgccgggtttttgcgttgaccatatcaaccgtgacggcactgataaccgactggttaaccttcgaattgtcgcgtggaatgaaaatatgggtagccagccgggtgagaaattcggcgctatccgtccattccgcggcagaaaagccagtacgaagcacaatcagcgctggtgtcttcgcccggtaacggcagcggtactattcgccaccagccaccacgtaaatcataaattatggcgtattgcacaataa

SEQ ID NO: 16067 - DNA, 324 bp, Escherichia coli
atgccacacattggaaacacctacgcagacatcatgaatcaggccaacggctataaaccttcgccagaagtccaggataaacgggatttcgataaaaagatggcagccgccgttgatgaattaatcgcagcattacgcactttgccggaataccagcaattaatcgccagtcatgccgacgaattatatagccagttacctgactgcatgaaaacccctgacagggttacccatcaggaaatgggccggaaagaagtagaattcatgctgcgcggaaaacttggaagcgcattaaaactcggattcggtttcttcaaacaataa

SEQ ID NO: 16068 - DNA, 378 bp, Escherichia coli
atgaatgatgagattaaaaggctggtaacgcaattccagattctggaaagtgctgccgctgagaagaccggatccgaacgccaggcattgcagaaacgggcagctgaaatcaagatgcagattatcaagttattaccggaacagggtaagcctgaaagtaaaatcccggacttatcctacttcgacaataagctcgacgccgctttcggtgattatttttccggtgactatctgacgaaagaccagcgggattacttcaccgttcgtgtgccggataacgtgccagacgagcgccagagcaccgaaacgccgaagtcttacgaaatggatgccgacgtaagaaaacgcattctcaatgcgctgggtatcccgtgctga

SEQ ID NO: 16069 - DNA, 288 bp, Escherichia coli
atgctggcattacgcatagtttttggtatcgcccggacggtagcagaaagggtaagcgacctgaagcaatcgccgctgagtgaacagccactaaagcgccagatgttacggctatgggctgagcattcccttaataccatcaacacgcttatcaatatgaaactgaaagatggtcatagcctgcatgaatgcagtgatgcggaaaagcaattcgtaaaacggttaaaactaatcagggccgatatacacagccagcttgaaagcgtgggcgctgatattgatgattaa

SEQ ID NO: 16070 - DNA, 306 bp, Escherichia coli
atgagaataaaattaaccccggcagaacgccgtttactacaagatgtcgcagcgatgaaaggtgaaatcgagctaccgcgattaggtgagattcatcgactggtcagcagttccaatctgttattgcgccagcgcctgaacgaagtagccgttttgctggttatccgcttgctgcgaaacacagaagatatgcacacaatcaactgcggtgtagctggtttgctaaatgccatccagtcagccagtctgcccgtcggtggaatgccggagcagttcccggaagatggcgaatggtttaatgattaa

SEQ ID NO: 16071 - DNA, 762 bp, Escherichia coli
atgacagaactattgaacggcccaggtcgcccggtcgagtacgatgaagctgattgggaaagcgtgattgatcggatggcggaaggaatgagtatgcgtgctattggtgaattgcctggttatccagatgtatcaacaatcacgcgcaaaattgaacaggatagagatttcgccgcacgcgcttatcgcatccgggtaattgctgccagtgacaagcttacgcaggcgacggaagaaatacgtaacgcaccgctggaccccgtagcaatcacaaaagcggtaaaactggcggatagccttgcccgtgaggcaatggcggtgatgccgcgcaaacagccagccgggatggcgctgtcagtgcccggaacatccggcgggggtaacgaaacagccgacggcgtagcaatcgacccggaaacattgcagcttcaatacgacgaaatcggtaaagcgcggggtgttgcggtcgagtggtcagaaaaacccgttgagcacttcaccgaacgtgatttacgcagttgtcagggtgctgatattgcagccgcctacacaaacggcaagtcgattgcctattgcgaagacctggaagtatcctggtcctatcaaattattggtcgcggtgtttaccgtactcgtcacacggagccagtggagaatatccctgattcgccagacgagcgcaacgccgtgggttacacagaattagtatttggggaagataatgaaaaacttcatcaatctgttagcgatgaactggtctaa

SEQ ID NO: 16072 - DNA, 372 bp, Escherichia coli
atgaaaaacttcatcaatctgttagcgatgaactggtctaaagctaacattcaggaatggcgcaacgcttacattaatgcacatgtcgatgcgggctactacccggaggaaattcaggatctggcccaaaactttaaattccacgttgacggtcgcggacatctggttatcactcgcgtgcgcgaaccgtcaccggagcaaaccgacatgatgttgcgacgccgcatgattacgaaaccagctctcgaagcgttcgagatttacaaagtcggctttcagatggattggggccgccgtcccggtgattattcgtatttccgtcgtgacggcaaatggcgcagacggaaagaaccgctatttgacccgtattaa

SEQ ID NO: 16073 - DNA, 1140 bp, Escherichia coli
atgaaggtttggcccgtaaaacatagtccattattgcgtcaaccagagcgtttaattacgcagaatgagttgcaggcactgatccgaaaaataactaacaatctggttaatataaaagatgaagcggggcaatttcttctgcggttagatgatggacgggtgattgatacaaaaggatgggatggttgggaatggacccacggtgtgggtttatacggtatttatcagtattatcaacaaacaggtgattctgtaatgtgcgatatcattgataactggttttcagatcgctttgcagaaggcgccacgaccaaaaatgttaatactatggctccatttctaaccctggcttatcgctacgaagacactggcagaccggagtatttgccctggcttgatagttgggctgagtgggctatgcatactatgccgcgaaccaaccataacggtatgcagcatattaccctggcggaagagaacgatcagcaaatgtgggatgacacgttgatgatgaccgtcctgccgctggcgaaaatagggaaattgctgaaccgtaatgaatatgttgaagaagctgtttatcagtttctgctacacgtgcaaaatttacaggatagaacaacgggcctgtggtttcatggctggagttacgatggatgccataactttgccaatgccagatgggctcgtggtaacagctggctgacgattgtgatccctgactttttagaattgcttaatttgccggaaaacaactcggtacgtcggtatcttattcaggtattacatacgcaaatagaggcgctggcaaaatgccaggatgagagcgggttatggcatacgttgctggacgatccaaattcatatctggaatcatcggctaccgcaggttttgcctatggcatcctgaaggcggtacgtaagcattatgttgcccccctgtatgccgaggtagccgagaaggcaattcgcgggatcgtgaaaaatatttctccggagggggagcttttgcagacatctttcggtaccgggatgggagcaaatcttgatttttatcgcgagatcccgctgacatccatgccctacggtcaggcaatggcagtgttgtgtctgacagaatatctgcgtaaatatttttaa

SEQ ID NO: 16074 - DNA, 984 bp, Escherichia coli
atggaacgatctctgtttatacgcacagtaatgctaactttgctttttacggtttctttcttctccagaggcgaaacaacactccgactggcttatgccgaaaacagtcagccagttaaagatgctctgcactttttcggtcaacaagtagaagagaaaaccgggggtgaaataaaagttgcttactttcctgacggtcaactcggtggtgagcgcgaactggttgaactaatacaagccaatgcagtagatatcacaaaagtttcatcagggctgatggaaagtttctctcctctgtacggtattttttccttaccgtatctttttagtaatgccgatgaatattataaagtaatggataaccccaaaataatggacccagtgtatcagtcaacggcagctcaaggatttataggtatcggttggtatgattccggcgcacgtaacttttatatgagtaaatcaccaatcaaaagtattgaagatttacgcggaaaaaaaatccgcgtcatgcagagcgacacgtctattcagacacttaaactcctgggagcatctcccattgcaatgagtcaagctgaagtttatacctcccttcagcaaggtattcttgatggagcagaaaataacgaatttgctttaacgattgcccgtcatggtgaggttgcacgttactatacttatgatatgcacacccgtattcctgacgttttactaatgagcactgcaacattagcaaaactgacgcctgaacagcgtaccattgttaaagatgccatacgcgcttccatcgaatttgaaaaagcagcatgggataaagaaattgaaaaaacaaaacaggcagcagtaaaagactttaacgttgagtttttcgagattgataaaaaacctttccaggatgcggttcagcctatttatgacaatcttaagaacaaacctcagctttataaactatatcagcagatacaatcagcaaaacattaa

SEQ ID NO: 16075 - DNA, 522 bp, Escherichia coli
atgataatgaatactttcagaaaaggacttgatttacttctcggcagcatttgttgtttaatgctggctattatggtcggtattgcttgctggcaagttattagccgttacatcctggatgtacccagtacccttacagaagaaatgctgcgattctcactggtatgggtatctatgctaggaatggctttcgttgttgggaaaaaacagcatattagtttaacaatattactggataaagctcccacaacattacgcaggtggtgggagattattctacaaattatttttattgccttctctgtttgggtattaattatcggaggcttaaggatatcggtggtttccgcattacaggtatctcctgccctaggcatttcaatgtccaaaatttattacgcactccctgtttcaggagtgctaattattatctatagtttgttaaatattattgagccgctaaaagataaaagttcaacaacggatgctactttacattatttagagaaaccacatgactga

SEQ ID NO: 16076 - DNA, 1308 bp, Escherichia coli
atgactgatcctatccttgcttcttgcatattaattgccgtttttgttgttttactcgcaatgggctcaccaatcgggatatgcatcgttattgcctctttcagtacaatgatgctggtattacctttcgacgtcgcaatgttttctaccgcacaaaaaatgttctccagcctggacagttttgctttattggcggtaccgtttttcgttctttctggcgtgattatgaatagtggtggtatcgcttcacgcctggtaaattttgccaagctgtttacggggaaattacccggttctctttcctacacgaatattgttggcaatatgatgtttggcgctatttccgggtccgcgattgccgcttcaacttctattggtggcgttatggtaccaatgagtgctcgtgaaggttacgatcgtagttttgctgctgcggtaaatattgcctctgcaccaacaggcatgttaattccgcccacgacggcttttattctctatgcattggccagtggtgggacgtctattgctgcactttttgctggagggttagttgccggcttactttggggcataggatgtatgctggtaacgctgattgtagcgaaacggcacaactatcgtgttttttttaccgtacaaaaagggatggtgctgaaggtctcggttgaaacaattccaagcctgatgttaattgttattattgtcggtggcatcgtgcagggaatttttacagctattgaagcctcagccattgctgttgtctatacgctgctactgactgtggtgttttatcgtacactgaaactaaaagatcttccttctattttactccagacagttgtgatgactggggtgattatgttccttctggcaacgtcttcagcgatgtctttctctatgtcgattacaaatattccgacagcgttaagcaacatgattttaggaatttctgccaataaattagttatcctgctggtaatcactgtctttttgcttattatcggtgcatttatggatattggcccagccattcttatatttacgccaatcctgttgccaattatgattaaactaggtgttgatcccattcattttggtattatcatgatttataacctggctatcggtacgattactccaccagtaggcagtggtttatacgtcggtgccagcgtcggaaaggtaaaggttgaagaagtaatcaagccgttactccccttttatgccgttattattggtgtattactactgataacttatataccagaaatgacgttattcctgcctcgccttctcggcgttatgtaa

SEQ ID NO: 16077 - DNA, 672 bp, Escherichia coli
atgaaaaaatctctttttctattattgcctttagttgtgacaaatgcacatgctgtatatgttgatgttcggcatgaataccttgatgatagtaaagctaattatgatcgtgcgtatatctctcatcgttttgctaacggttttggttttgctattgaggcaatatcaaaatcgggtggtgatgatactgatagaccatttaatgatcttgaagttcaggggaatgaatatactgtcagctatcagttcaaaacaggagaggttgcctggcagccgggatttgtgctggaaacaggtaatggttattcaaactataaaccttacctccgagcaacatggacgttaaatgaaagttggtgggttggcgctcgctatcgatttgaatatgtccggcgctcttcagatgcccgtgaagatgatactgttaaccgtatggatgcttgggtagactataagtggaataattttgactggacgatagaaggtatttataagaaagccgataaatataatctatatgatggcggcaaagataattatgagtataacttcagaactgcatacgctattgggcagtggactccatttgttgaagttggtaacgtttcagttaatagcaccagcgatgagcgccagactcgcttccgtgtcggtttaggttataccttctaa

SEQ ID NO: 16078 - DNA, 1248 bp, Escherichia coli
atgactgatcaatcagaaaaaaaacactctgcattttggggtgttatggttatagccggtacagtaattggcggtgggatgtttgctttacctgttgaccttgccggagcctggtttttttggggcgcttttattcttattatcgcctggttttcaatgttacattcagggctattattattagaagcaaacttaaattatcccgtcggttccagttttaacactatcaccaaagatttaatcggtaacacctggaacattatcagcggtattaccgttgccttcgttctctatatcctcacttatgcctatatctctgctaatggtgcgatcattagtgaaacgatatcaatgaatttgggctatcacgctaatccacgtattgtcgggatctgcactgccattttcgttgccagcgtattgtggataagttcattagccgccagtcgtattacctcattgtttcttgggctgaagattatctcctttgtaattgtttttggttctttcttcttccaggtcgattactccattctgtgcgattccaccagcaccactgcggggacgtcttacttcccgtatatctttatggctttgccggtgtgtctggcgtcatttggtttccacggcaatattcccagcctgattatttgctatggcaaacgcaaagataagctcatcaaaagcgtggtcttcggttcgctgctggcgctggtgatttatctcttctggctctattgcacgatggggaatatcccgcgagaaagctttaaggcgataatctcctcaggcggcaacgttgattcgctggtgaaatcgttcctcggcaccaaacagcacgggattatcgagttttgcctgctggtgttctctaacttagctgttgccagctcgttttttggtgtcacgctgggattgttcgattatctggcggatctgtttaagattgataactcccacgccgggcgtttcaaaaccgtgctgttaaccttcctgccacccgcgttgttgtatctgatcttcccgaacggctttatttacgggatcggcggtgccggactgtgcgccaccatctgggcggtaataattcctgctgtactggcaatcaaagcccgcaagaagtttcccaatcagatgttcacggtctggggcggcaatcttattccggcgattgtcattctctttggcataaccgtaattttatgctggttcggtaacgtctttaacgtgttacctaaatttggctaa

SEQ ID NO: 16079 - DNA, 618 bp, Escherichia coli
atgcagtggcaaactaaactcccgctgatcgccattttgcgcggcattacgcccgacgaggcgctggcgcatgttggcgcggtgattgacgccgggttcgacgcggttgaaatcccgctgaattctccacaatgggagcagagcattcccgccatcgttgatgcgtatggcgacaaggcgttgattggcgcaggtacggtactgaaacctgaacaggtcgatgcgctcgacagaatgggctgtcagctcatcgttacgcccaatatccatagtgaagtgatccgccgtgcggtgggctacggcatgaccgtctgccccggctgcgcgacggcgaccgaagcctttaccgcgctcgaagcgggcgcgcaggcactgaaaatatttccgtcatcggcttttggtccgcaatacatcaaagcattaaaagcggtattaccaccgaacatcgcggtctttgccgttggcggtgtgacgccagaaaacctggcgcagtggatagatgcaggctgtgccggagcgggcttaggtagcgatctctatcgcgccgggcagtccgtagaacggactgcgcagcaggcagcagcatttgttaaggcgtatcgagaggcagtgcaatga

SEQ ID NO: 16080 - DNA, 204 bp, Escherichia coli
atgaagttgaatcttaagggatttttcaaggctgccagtttgtgttctttggcatttgcgttgaccggatgtatcaccgcaggactggtttttaataccgcaagccctccacatgccgagcaatggcggtcagatacgattaagggtttatcgctggctgaagacagtaacggtacgaaaggctatgtttttgttggtgaatag

SEQ ID NO: 16081 - DNA, 1365 bp, Escherichia coli
atggaaaactttaaacatctccctgaaccgttccgcattcgtgttattgagccagtaaaacgtaccactcgcgcttatcgtgaagaggcaattattaaatccggtatgaacccgttcctgctggatagcgaagatgtgtttatcgatttactgaccgacagcggcaccggggcggtgacgcagagtatgcaggccgcgatgatgcgtggcgacgaagcctacagcggcagccgcagctactacgcgttagccgagtcagtgaaaaatatctttggttatcaatacactattccgactcaccagggccgtggtgcagagcaaatctatattccggtactgattaaaaaacgcgagcaggaaaaaggcctggatcgcagtaaaatggtggcgttctctaactatttctttgataccacgcagggccatagccagattaacggctgtaccgtgcgtaacgtctatatcaaagaagccttcgatactggcgtgcgttacgactttaaaggcaactttgaccttgagggattagaacgcggtattgaagaagttggcccgaataacgtgccgtatattgttgcaaccatcaccagtaactccgcaggtggtcagccggtttcactggcaaacttaaaagcgatgtacagcatcgcgaagaaatacgatattccggtggtcatggactccgcacgctttgccgaaaacgcctatttcatcaagcagcgtgaagcagaatacaaagactggaccatcgagcagatcacccgcgaaacctacaaatatgccgatatgctggcgatgtccgccaagaaagatgcgatggtgccgatgggcggcctgctgtgcatgaaagacgacagcttctttgatgtgtataccgaatgcagaaccctttgcgtggtgcaggaaggcttcccgacatatggcggcctggaaggcggcgctatggagcgtctggcggtaggtctgtatgacggcatgaatctggactggctggcttatcgtatcgcgcaggtgcagtatctggtcgatggtctggaagagattggcgttgtctgtcagcaggcgggcggtcacgcggcattcgttgatgcaggtaaactgttgccgcatatcccggcagatcagttcccggcacaggcgctggcctgcgagctgtataaagtcgccggtatccgtgcggtagaaattggctctttcctgttaggccgcgatccgaaaaccggtaaacaactgccatgcccggctgaactgctgcgtttaaccattccgcgcgcaacatatactcaaacacatatggacttcattattgaagcctttaaacatgtgaaagagaacgcggcgaatattaaagggttaacctggtga

SEQ ID NO: 16082 - DNA, 363 bp, Escherichia coli
atgcgcatgaatgttttcgaaatggaagggtttcttcgtgggagatgtgtaccgcgagatctgaaagtgaatgaaacggatgctgaatacctggtgcgtaaattcgatgcgcttgaagctaaatgtgcagcacaggaaaacaaagtaataccagtgtcaactgaactgccaccagcaaatgaaagtgttttgttattcgatgctaacggagaaggctggctaattggctggcgttctctctggtacacctggggacaaaaagaaaccggagaatggcagtggacatttcagatcggggaccttgaaaacgtcaatatcactcactgggcagtaatgccaaaagcaccggaggctggagcataa

SEQ ID NO: 16083 - DNA, 378 bp, Escherichia coli
atgcgtgatattcagatggttctggatcgttggggggcatgggcggcgagtgatagttctggggtagactattcgcctatagctgctgggtttaaagggcttcttccctatacaagcaaaacacgtcaggcttgttcagatagtgatgcattaattattgaaggttgtcttgctcgtctaaagcaaaaaagacctgaagaacactcgcttcttgttgcccattacctatacggtatctctaaaagaaagctcgccaaggctcgtaaaaaggatgagaaactaatacgcattgagatacagatggctgaggggtttattgatggctgcctatcgatgttggaaattagtctagagatggaccccgaagttaaagattga

SEQ ID NO: 16084 - DNA, 1020 bp, Escherichia coli
ttggataagtttgatgagattcatgtagacattgaatctgagcagcaagccttcgatttgcttgaaagctatcttgatggttatggtttacctgacagtttaagtttcaacggatggccaaaccttaccatcagattaaccggtgaaaaattcaacagatcgctaacaccttcagttatgaagggatttgttgaaatgcaagctcaaatcaacaaatcatatgcccttgccaagtacggtgtccctgacgtccgcaaactgaccaaagaagaacttgatgccctagaaatagaagttacggtagaacagggttcttcaatagtagaaatcaacattgatggctttttaaccaaactcacacaggaacttgttggtaaaatgaacgcaactgagatcatgtttactgttctcggcgcagcagtcatctggggcggagtaacagtatttaaacggttcttggacaaccgcaaagatattcgccttgcagaaattgctaaggatggagagaaagaacatctccggactatgcagatcatgagcgagcaagaaactaaacgcctgcgggttatttcagaaatgattgcggaaaaaccacttctcgataacatggaccgtatgtcgtatgacgctaaaacccaaatggtcaaatcctttgtgcgttcagataacgctcaaattgatggcgttactattgattctgaaatggcgaaagagttggttacgaatgctcgtagacgttcatcagaaatgaggattgatggtatttaccgaattgaagaagtcaataatactgacccagagagtttcaaagttaaggtccgacgcgtagataccgaccaacgtctaacctgcgtagttcaggatgttttccttgatgaatccggaaacaaagaagcattgcagcgagctgagtgggaaagaaagcctgtacatttgagcattaacgcaaaacacgtcgatggtgacattaagtcagcagtaattctctatgttcgagatgtggaacaaaagcccgagtaa

SEQ ID NO: 16085 - DNA, 393 bp, Escherichia coli
atgaggctgagatataagctggttattgttgccttcgttgttagcgtcattggttccttcatctggtctgctggacattactacagcaaatatcagcacgaaaaggagcgtgctgatgaggctgtacgaaatgctgaatcagcaactgccattacccgtaacgttctgcaatcactgcaaatcatcaatacagttatagaggctaaccagcatgcaaaacagcagatcgcactggagtcacagagaacccaggaagatatcaaagtggctgttgcggatgatgattgtgcttcacgtcatgtgcctgctgccgctgctgaccggttgcggaagtacgcgaacagtttacgtgccggttccggcggtaccgctgccaacaagcctgaccactga

SEQ ID NO: 16086 - DNA, 300 bp, Escherichia coli
atggtcataggacaagaagatcagaaatgctgcccggcttgcaattcagatgcgacctggcagaaccgtgataccgcttggttaattagatgcccgatgtgtgaaacatttctcatcaggaattccaccattgaaattttgcgaagtgacgttgtgtatcggacattagctggtgaccttctcaaacaagaaggtgggtgtgactacatgcttacaagaggaaggcttgcgaacttcgcgaaaacccagctcccaaaatcaaagtttcaggaatacttccctggtgacaactacgaataa

SEQ ID NO: 16087 - DNA, 483 bp, Escherichia coli
atggcaacagtactgacaaagggtgagatcgtcctttttgcgcttcgtaagtttgctattgcttctaatgcatcgctgactgatgttgagccgcaatcaattgaagatggtgtaaatgatctggaagatatgatgtccgagtggatgattaaccccggcgacattggttacgctttcgcaactggagatgagcagccattaccagatgatgagtcaggtcttccaagaaaatacaaacacgcagtaggctatcagttattgctgagaatgctatctgattacagccttgaaccaactccgcaagttctcagtaacgcccaacgctcatatgatgccttgatgaccgacactctggttgttccttcaatgcgacgacgtggagattttcctgtaggacagggtaataaatatgacgtgttcacatctgaccgatattatccaggcgatctccctctgattgatggcgatatcccaaacgcatag

SEQ ID NO: 16088 - DNA, 186 bp, Escherichia coli
atggatcgcatgagtgtattccttgccgcagataacgaatccgggcatgtacaggccgttatcgcagaaaaagacttccagtttttcgaaaagttgggctttgttgcctcagttgatgaattgaaaccgaccagtaagcgaggtcgtaaggcggcagacaatggcaacagtactgacaaagggtga

SEQ ID NO: 16089 - DNA, 1272 bp, Escherichia coli
atgcctaacaatctcgacagtaacgtcagtcaaatcgttctgaaaaaattccttccgggttttatgtcagatttagttctggcgaaaaccgtagaccgtcagttgctggcaggtgaaatcaactccagcactggcgatagcgttagctttaaacgtccgcatcaattctcatccctccgtactcccactggtgatatttcagggcaaaataaaaacaacctgatctcaggtaaagctacggggcgtgtaggtaactacatcactgttgctgttgaatatcagcaactggaggaagcgatcaagcttaaccaactggaagaaattctcgcgccggttcgccagcgaatcgttaccgaccttgaaacagagcttgctcacttcatgatgaataacggtgcgttgtcacttggtagccccaatactccaatcaccaaatggtctgatgttgcgcagacggcatctttcctgaaagacctcggcgttaatgaaggtgaaaactatgctgtaatggatccatggtctgcacagcgacttgctgatgcgcagactggtttgcacgcttcagatcaattggttcgtactgcatgggagaatgcacagatcccaaccaattttggcggcattcgcgcactgatgtctaatgggcttgcctctcgtactcagggggcatttggcggaacactgacagtcaaaacacagccaactgttacctataacgcagttaaagactcataccagttcactgtaacattgaccggagcgacaaccagcgttacaggtttcctgaaagctggtgatcaggttaaattcaccaatacctactggctgcaacagcagaccaaacaggcgttgtataacggagccacaccaattagcttcactgcaacggttactgctgatgctgattcagacggcagtggcgatgtgacggttacgctttctggtgttccgatttatgacactacaaacccgcagtacaactctgtaagtcgtcaggtagcggcaggcgatgccgtatctgtagtaggcactgctagccagacaatgaagccaaacctgttctataacaagtttttctgtggacttggctctatcccactgccgaaactgcacagtattgattctgctgttgcaacatatgaaggtttctccatccgcgtacataaatacgcagatggcgatgccaacgtgcaaaaaatgcgcttcgacttactgcctgcatatgtgtgctttaaccctcacatgggcggtcagttcttcggtaatccgtaa

SEQ ID NO: 16090 - DNA, 885 bp, Escherichia coli
atggaaaacgaactgatcatcgacggtcaggttattgacctgtctgaaacacaggaaaatgcagaagaaaccatcatccaaacagagtcacagcctgagaatgaaagccaggatgacaacggaaaagagatggcaactgatcctgaaaaaaccgaagagacaccagaagattacgccttgcgtattggtgatgaagaaattcagcttaacgctgacgatgatgatcacattgacgggcaacctgcaccgcaatgggtgaaagatcttcgcaaaggcttcaaagaaacacagaaagaaaaccgtgagttgcgccgccagcttgaggaagcattagccaagcctgcggaacatcagcaaccacaaccagacgctattccaccaaaaccgactcttgagtcgtgtgattatgacgaacaggcgtttgaacaggcattgactgattggcatgagaaaaaaggccgtgtcgaacagcagcagcaacaaaaactacgtcagcaacaggaataccaacagcgtttccagcaaagggtagaagcgcataaacaacgggcagccaaacttcctgtgaaagattatcaggaaatggaggccattgttcttagtgagctaccaccaattcagcaggaaatcatcattcactgtgcagacgaaggctctgaactactcgcctatggcttaggtaagagccagcaattacgccagcgtgtagccgctgagacagatccaattcgcgcagcattcctcttggggcagattagcaaacaggtaagccttgctccaaaaccaaagaaagccatcaagccagagccggaagtacgtggtggcggtgctgatgcgaaacaagacgaattcaacaaattatgccccggcgcaaaaatcgaataa

SEQ ID NO: 16091 - DNA, 2091 bp, Escherichia coli
atgctcaggtttgaccgcgcctattctccacagcaggaagtgcgcgaaaagtgcattgaagctacgaggtttgctcgtgtccccggaggtcaatgggaaggagcaacggcggctggaactaagcttgatgagcagttcgagaagtatcctaagtttgaaatcaataaggttgcaactgaacttaaccgcatcattgcagaataccgcaataacagaatcaccgttaagtttcgtcctggtgacagagaggcaagcgaagagttagccaataaattaaatggtctgttccgtgctgactacgaagaaactgatggcggtgaggcttgcgataatgcatttgacgacgctgctactggtggtttcggttgcttccgtttgacgtcgatgctggtcaatgaatacgaccccatggacgatcgtcagcgtattgctattgaaccaatatacgacccgtcgcgctctgtgtggtttgaccctgacgctaagaagtacgacaaatctgacgcgttgtgggcgttctgtatgtattcgttgtcacctgaaaaatatgaggctgaatacggaaagaaacctcctgcttctctggatgtaacgtctatgaccagttgggaatatgactggtttgatgcagatgttatttacatagcgaagtattacgaagttcgtaaagagtctgttgacgtcatcagttatcgacatccaatcactggagagattgcaacatacgacagtgatcaggttgaagatattgaagatgaactggcaatagctggatttcaggaagtggcaaggcgctcagtgaagcgccgtcgtgtgtatgtatccgtagtggatggtgatggtttccttgagaaacctcgacgtattcctggtgagcatatccccctcatcccggtttatggaaaacgctggttcattgatgacattgagcgtgtcgaaggacatattgcaaaagcaatggatccacagcgtttgtataaccttcaggtatcaatgctggctgatactgcagcgcaagaccccggtcagatccctatagttggcatggagcaaattcgtggacttgagaagcactgggaggctcgcaacaagaaacgcccagcgttcttgccgttgcgcgaagtgagagataaatctggcaatattatcgctggagctaccccggcaggatatacacagcctgcggttatgaatcaggcattggctgcattactacagcaaaccagtgcagatattcaggaggttacaggcggcagtcaggccatgcagcagatgccaagtaatattgctcaggaaacggttaacaacttgatgaacagagcagatatggcttcgtttatctatctggacaatatggcgaaaagtcttaaacgcgctggtgaagtatggctgtcaatggctcgtgaagtgtacggttcagagcgtgaagtgcgcatcgttaacgaagatggaagtgatgatatcgctgtcctgagcgcacaggttgttgacaggcaaacaggggcagttgttgcgttaaatgacctttctgtcggtcgatacgatgtgacggttgatgttggaccaagctacacagcacgacgtgatgcaacggtttctgtactgacaaatgtccttagctctatgcttccaacagacccaatgcgcccggcaattcagggtattattctggacaatatcgatggcgaaggccttgatgacttcaaagagtacaaccgaaaccaactgctgatatctggcattgcaaaaccacgcaatgagaaagagcagcagattgttcaacaggcgcaaatggcagcacaaagccagccaaatcctgaaatggttctcgctcaggcgcaaatggtagcagcgcaggcagaagcgcaaaaagcaactaacgaaactgctcaaactcaaatcaaagcatttactgcccagcaggatgcgatggagagtcaggcaaacactgtctataaactggctcaagccagaaacatcgatgacaaagcagtgatggaggcaatacgccttctgaaagatgtcgccgagtcacaacaacagcaattccagtcaccaccacagtcaccggcagacttaatgccgagttaa

SEQ ID NO: 16092 - DNA, 1413 bp, Escherichia coli
atgacctcgattaatcctatctttgaaccgttcattgaggcgcatcgctacaaagttgccaaaggcggtcgaggtagcggtaaatcatgggcaattgcgaggctgcttgttgaagcggcgcgtcggcagcctgtgcgcatactctgcgctcgtgaactgcaaaacagtatcagcgattcggtaatccggttgcttgaagataccattgagcgggaagggtattcggctgagtttgaaattcagcgttccatgattcgtcatcttggaacgaatgctgaattcatgttctacggcatcaaaaacaacccgacgaagattaaatcgctcgaaggcattgatatctgctgggtggaagaagcggaagcggtaacgaaggaatcatgggatatcctgataccaaccatccgcaagccattttccgaaatatgggtgagcttcaacccgaaaaacatcctcgacgatacctatcagcgattcgtagtaaaccctcccgatgatatttgtctgctgacggtgaactacaccgacaacccgcactttcctgaagttctccgtctggagatggaagagtgtaaacgcagaaacccgacactgtatcgtcacatctggcttggtgagccagtaagcgcaagtgatatggcaatcatcaaacgtgaatggcttgaagctgcaacagatgcgcacaagaaactcggatggaaagcgaaaggcgcggttgtctctgcgcatgacccgtcagatacagggccagatgctaaaggttacgcatcgcgtcacggttcggtagttaagcgcattgccgaaggcctgctgatggacatcaacgagggtgctgactgggctacttcgctggcgattgaagacggcgctgaccattacctgtgggatggtgatggtgttggtgccgggctacgcagacagacaacggaagcgttctccggtaagaaaatcaccgccacgatgttcaagggcagcgaatcgccattcgatgaagatgcaccgtatcaggccggggcatgggctgatgaagtcgtgcagggcgacaacgttcgcactattggcgatgtattccgcaataagcgagcgcaattctattacgcgctggctgacaggctgtatctgacatatcgggcggttgttcacggtgagtatgcagaccccgacgacatgctgagtttcgacaaagaagcgataggcgagaagatgctggagaagctgtttgcagaactgacgcagattcagcgcaaattcaataacaacgggaagctggagcttatgactaaggtcgaaatgaagcagaagctcggtattccatctcctaacctggctgatgcgctgatgatgtgtatgcattgcccggcattggtccgcgaagaaactgaaatatacgttccctcatcctccggttggtaa

SEQ ID NO: 16093 - DNA, 486 bp, Escherichia coli
atgaataactttgttgaaattacctcaagaattggtcgcatgtaccaagattttcttataagtggaaaggggtctggcgacatcatagaggaaattgacaagctaagtgcagagctgagaaggaatgggtgtgttaattctatcttttttgaaactttgctaaagcaaggcttcatgtttgacatgattaattacaacaaagtcgcacctagtgcttcgcaaaaatcatatgtgtacgttctgcatgctgaagatagtgggctaacaaaaatagggtttagtcgcagggttaataaacgaatttcagagatatctcgcatgagtggtgggaagctaaatctaattgcaaagattccggccgatagagagcttgaaaccaaattgcaccaaaaatattacaactataggtcgcacggggagtggtttagtctcaatcgttgtcatttgaaagagctaaaagaaatgcctggtaacgaactgaaataa

SEQ ID NO: 16094 - DNA, 165 bp, Escherichia coli
atgagcgcatacgaagaaatcatgttagccctgcgattctttttcgatgtggaagaagatgaaaacgtaaatgagattatcgggcaagaccatgacccgatagggactattgcagctgcacttgacgattacaggagcgtaaatggtgaggaaactaacgtttga

SEQ ID NO: 16095 - DNA, 267 bp, Escherichia coli
atggacgaatcaagaaagcagtttgaagaatggtttgaaaattacaccggatgtgatcctaaaaataaaatatacgccaatatggttgagatgtattggcaagcgtggcaggcatcgcgagcagctatcgagattgagtgtcctggaaaaagagagcgtgaggcattttctaccgatttcgaggatggggtcacatttggttataacgacgcaattagtgaatgcgaaggacggattcgcgccgctggaatcaaagtgaaggagtga

SEQ ID NO: 16096 - DNA, 264 bp, Escherichia coli
atggacgagaaaattaaatcattgaagccaggaattgttatcagagacataagtggttattacgatacagagacatatgatattttatatgtgcatgcagatggaaaatgtcagtattcgaacgacatttttaataataaaggcgatgccgaaattgctgccaccacagttaataaagagctcgtagctaacgagtcgtgggattattttatgccatcatccacttctatgaactggaaagtggttttgtacattccatcataa

SEQ ID NO: 16097 - DNA, 399 bp, Escherichia coli
atgctttgtggaaaagtgtcaaataatatcctggatgatattggtggttataaagaaagaaataaaaaatccgaaatggtagatttacttatattaattagtaatgacgaacctaacggtgtttctgagaccaaagtgatttctaatggtgaaatacattttaagggggaaagtagtataaacttggatgcctcattcattatgacaataaatggtggagttcatactgacactgtcacttatatatcaaagaagaataaaattatcgggggatacttttataataatgagagtaaaactgataagcttaaggaagtatatatctcaaacacaggaactgtatatcatataaatattgaaagtgtcagcgatgataaatgtcttgataaattcaagtaa

SEQ ID NO: 16098 - DNA, 432 bp, Escherichia coli
gtggacatcgtcgggccgaaaatcaatctcaatagcggcggtagtccgggaacgccggtgacgacgctgcaaccggcggtactgaagacaccggggggggagaagagtggtgatggcagtgactccggagaagaaaatggagactctggggggagctgcgtgaccggaagtggtggtggtgatgatcgatgtgacgatgaggatgagcctgaaaaatatactctccagttccattttacagacgatgacgggataccgtattcagaaatacgttacattgccttctttgaggacggtgcgcagattcgcggtgaaacggacaaggacgggtatacagaagttttctctagaaccaatgatgcaaatgtagaaattaaactgttaactaatgattattatatatttgaggtgaattgtaatgagcaccagtaa

SEQ ID NO: 16099 - DNA, 174 bp, Escherichia coli
atgacgagaaatagcggtgattacactgctggagatattaaaggtatgaaccataccgatgttgctattaattatttcagtatcaatggctatggcgggaaaaatatagttccgttcggggagcggggggggattgttgcgttatgttgccagataagtggcattctggattaa

SEQ ID NO: 16100 - DNA, 1161 bp, Escherichia coli
atgtcaatcaaactacgcggtggcacgtggcactgcgatttcgtcgcgccagatggatcaagagttagacgctctcttgaaacatcggacaagaggcaagcgcaagaacttcacgatcgtctgaaagcagaagcgtggagagtaaaaaatctcggggaatcgccgaaaaagctattcaaggaagcctgcatacggtggctgcgtgagaaatcggataagaagtccattgatgatgacaagagcattatatcgttctggatgttgcacttcagagaaaccattctctctgacataacaacagaaaaaataatggaggcggtagacgggatggaaaaccgccgccatcgcctgaactgggaaatgagccgggacaggtgtttgcggcttggcaagccagtgccggagtataaaccaaagctggcaagcaaaggaacgaagacgcgacatctggcaatacttcgcgctattctcaatatggctgttgaatggggatggcttgacagggctcccaaaatatcaacaccacgcgttaagaatggacgcattagatggcttacagaagaggaatcgaagcgcctgtttgcagaaatagctcctcatttcttccctgtggtcatgttcgcaataactacaggccttcgccgttccaacgttacagaccttgagtggtcacaggtcgatctggataagaaaatggcatggatgcaccctgatgaaacaaaagctggcaatgcgatcggagttcctcttaacgaaaccgcatgccagatattaagaaaacagcaggggctccataagagatgggtatttgtccacaccaaacctgcctaccgaagcgacggaacaaaaacagctgcggtaaggaagatgagaaccgatagcaacaaggcatggaagggagcgttaaagcgggcaggcattagcaacttccgcttccatgatttgaggcatacctgggcaagctggctggttcagtccggtgtctctcttctcgcacttaaagagatgggaggatgggaaactctcgaaatggttcaaagatacgcccacctttcagccgggcatctcaccgagcacgcgagcaaaatcgatgcgattataagtcgcaatggcacaaatacggcacaagaggagaacgtggtttacttaaatgcgaggtaa

SEQ ID NO: 16101 - DNA, 168 bp, Escherichia coli
atgcacttccgagtcacaggtgaatggaatggagaaccattcaacagagttatcgaagcagagaacatcaatgactgctatgaccactggatgctgtgggcgcagatagcacatgcagacgtaaccaatattcgaattgaagaactgaaagaacaccaagccgcctga

SEQ ID NO: 16102 - DNA, 2526 bp, Escherichia coli
atgcctttacgacggttctccccaggactgaaagcccagtttgccttcggcatggtctttttgttcgttcagcccgatgccagcgctgctgacataagtgcgcagcaaataggtggggtgattattccgcaggccttcagtcaggcgctccaggacggcatgagcgtcccgctttatattcatctcgccggtagccagggtcgccaggacgatcagcgaatcggcagcgcttttatctggttggatgatggacagttacgcatccgaaaaatacagctggaagagagtgaagataacgccagtgtcagcgaacaaactcgacagcagctgatgactctggccaacgccccgttcaatgaggcccttaccatccccctgactgacaacgcgcagttggatctcagcttgcgccaactgctgctgcagctggtggtcaagcgcgaagcgctgggcaccgtactacgctcacgtagcgaagacatcgggcagtccagtgttaacaccctcagcagtaatctgagctataacttcggcgtctataacaaccagttgcgtaacggcgggaacaacacatccagctatctgtcgctgaataacgttactgcgctgcgcgaacatcacgtggtgctcgacggctcactgtacgggattggtagcggtcaacaggacagtgaattatataaagcgatgtatgaacgcgattttgctggtcaccgatttgccggtggaatgctcgacacctggaacttgcagtccttagggccgatgaccgccatttcagcagggaagatttacggcctttcctggggaaaccaggccagctccaccatcttcgacagcagccagtcggccacgccagtgatcgcctttttaccggcggcgggcgaagtacatctcacccgtgatgggcggctactaagcgttcagaacttcaccatgggcaatcatgaagtggatacccggggtctaccgtacggtatttacgatgtggaagttgaggtaatcgttaacggtcgcgtgatcagcaaacgcacccagcgggtcaataagctgtttagccgggggcgtggcgtcggtgcaccgctggcgtggcagatatggggcggtagctttcatatggatcgctggtcggaaaacgggaaaaagacgcgaccagccaaagagagttggctggcaggtgcctcgacctccggctcactgagtacgtttagctgggcggcaacgggatatggatacgataatcaggcagtgggtgaaacccgtctgacgcttccgcttgggggggcgatcaacgttaacctgcaaaacatgctggccagtgacagctcatggagcaacatcgccagcatcagcgccactctacctggaggcttcagttcgctgtgggttaaccaggaaaaaacccgcattggcaatcaattgcgacgtagcgatgccgacaaccgtgcaatcggcggcacactcaacctgaactcactgtggtcgaagctgggtacgttcagcatcagctacaatgatgaccgccgctacaacagccattattacacggcagattactatcaaagtgtctacagcggtacctttggttcgcttggcctgcgggccggtattcagcgctataacaacggcgacagcagcgccaatacagggaaatatatcgctctcgatctctcgctaccactgggcaactggtttagcgcagggatgacccatcaaaacggctacaccatggcaaacctgtcagcacgcaaacagtttgatgaaggaaccattcgcactgttggtgccaatctgtcacgagccatctccggcgataccggtgatgacaaaaccctcagcggtggggcgtatgcacagttcgacgctcgttacgcaagcggaacgctgaacgtcaatagcgcggcggacggctacatcaatactaatttgaccgccaacggcagcgtcggctggcagggtaaaaacatcgctgccagcgggcggaccgatggcaacgctggggtgatattcgacactggcctggagaacgatggtcagatcagcgccaaaatcaacgggcggattttcccgcttaacggcaagcgtaactatctcccgctctctccctatggaagatatgaggtggagttacagaacagcaaaaattcactcgacagttacgatatcgtcagcggtcgcaaaagtcatctgactctctatccaggcaatgtcgctgtcattgagccagaggtgaagcagatggttaccgtctccggtcgtatccgtgcggaagacggcacactgctggctaacgcacggattaacaaccatatcggccgaacccgaaccgatgaaaacggcgagtttgtcatggacgtggataagaaataccccactatcgattttcgctacagtggcaataaaacctgcgaagtggcactggaactcaaccaggcgcgcggtgccgtctgggtcggtgatgtggtctgcagcggcctctcatcgtgggcggcggtgacgcagacaggagaagagaatgagagttaa

SEQ ID NO: 16103 - DNA, 930 bp, Escherichia coli
atgaaaatatctcttgtcgttcctgtcttcaatgaagaagaagcgatacctgttttctataaaacggtacgtgaattccaagagttgaagccatatgaagtagaaattgtattcataaatgacggaagtaaagatgccacagagtcaattattaacgcgctggctgtttcagacccgctagttgttccgctgtcatttacacgcaactttggtaaagaaccagccttatttgcagggttagaccatgcaagcggcgatgctgtaattcctattgatgtcgacctgcaagacccaattgaggttatccctcatcttattgaaaagtggcaggcaggtgctgacatggtgcttgctaaacgttcagaccgatcaactgatggacgactgaaacgtaagacagctgagtggttctataaattacacaacaaaataagcaccccaaagatcgaggaaaatgtcggagattttcgactcatgtctcgtgaggttgtggagaacattaaactgttgcctgagcgcaatcttttcatgaaaggcatactgagctgggtgggtggtcagacggatgtcgttgaatatgtacgcgcagagcgtgttgctggcatctcaaaatttaatggctggaaattatggaatctggcactggaaggtatcacaagtttttcaacctttcctcttcgcgtatggacttatataggcttgtttgttgcaagcatttcatttttatatggtgcttggatgattatagacacccttgtatttggtaacccagtacgcgggtatccctccttgctcgtatcaatacttttcttgggtggcgtgcaactgatcgggattggtgttctcggagaatatataggcagaatatatattgaagtaaaaaatagacctaaatacatcataaaaaaatctcatcgaggtaacccatga

SEQ ID NO: 16104 - DNA, 252 bp, Escherichia coli
atgaataagctggtttctgatggcagcgtcaaaaaaataaattatccggtgctgtatgagtccggaataacacctccgttatgtgaagtcagtgcaccagaacctgatgcggggggaaaacgcattgtggcatatgtttataaatcatcacggagtacggtttttgaaaatcctgacattgtaaaaacctgtacggtcagggatttgaagaaggattttgtgaactgcgatgagaaaggtgagggacaatga

SEQ ID NO: 16105 - DNA, 744 bp, Escherichia coli
atgaataaagcattactgccactgttactctgctgctttatttttccggcgtcaggaaaagatgcaggctggcagtggtataacgagaaaataaatccgaaggaaaaagaaaataaaccagtacctgcagccccccgtcaggagccggacattatgcagaaactggccgcactgcagacggcaacaaagcgggcgctgtacgaagccattctgtatcccggcgtggataattttgtgaaatatttccggctgcaaaattactggactcagcaggccgggcttttcaccatgagcgccaaaaaagccatgctggcgcatcccgaactggactataacctgcagtacagccattacaacggcacggtccggaaccagctggcggcagaccaggtgcagcagcgacaggccattgcgaaactggctgaacactacggcatcatgttcttttaccgggggcaggaccccatcgacgggcagctggcgcaggtcattaatggcttcagggatacctatggtctgagtgttattcccgtttccgtggatggcgtgattaatccgctgttgccggattcccggactgaccaggggcaggcgcagcgcctcggcgtgaaatatttcccggccatgatgctggttgacccgaaacagggcagtgttcgcccgttatcatacggttttatttcgcaggacgacctggcaaaacagttcctgaacgtttctgaagattttaaacccaatttttaa

SEQ ID NO: 16106 - DNA, 882 bp, Escherichia coli
atgtctgaaacatcaaaatttatagatgcagttaagaagtactattcagatgataaaaatacgcttgatttttattcagaactgtttcgtgaaatggaacaaaaggacctattagatagtaactttatctcacaaatgaataataatgagaattcccgacagagattatcagaattactgatgtttaaatattgtttgacatcttctgtaggggcgatatcgagcgaagatagtggacctgacattaagtttaattttaacgacagaaaagtaaatattgaagttgttacgccatttataactaaacaagaggaggcttcttggagtgtttttgaattttctttgacagaaagcaaaggctacaaaaggagtcaaaatattcccagtatagatactttacatcccaggataacaggttctttgaaggaaaaactaataaaatataaaaaatattttgctgcgaataaagtcaatgatgatgatataaatatcatctgcataaatgttggttttattgaaaatatagattgtgtggatttccctaatttaaaaaatttgttctataagcaagaaataatccgtccagaacgtaatagtgaagggggtatatcattgtcgatagaaaaacatgatttcatagtaaaaaaagataacggtgaagcttttagaacaagttacattgataatgaagaggaatgtttgcatatagatggagtttggcttataaactgcaatgaaagaagttttaaggagattaaaaaatttaaatatgatgattttaaaatatatgaaaatgttatttatcaaaaaagtaattcaaaaataccagatgaattgctgacttctctgagcataaataaacccaaacgagtttgcgtataa

SEQ ID NO: 16107 - DNA, 336 bp, Escherichia coli
gtgctgtttggattttcgcgtatccagtgccgccacatcccgggatttcaacgaggcgtcctccccgacggcctcccggatagtctgcgagcgtccggaaaaggcctccaccggtacgcccggcatttcccacataccgtgcttaccgaccacttcagtttcatagcccagcgcctcaacctgctctttcagtttttcccggtagagcctgccaaaggcaatctgattagcgtacacattctcaatgaaccccgttttccccactttgtcactgctcagtgtcttccattcgccgttatgctgcgtgacattagccaccaccgcatgcgtgtgtaa

SEQ ID NO: 16108 - DNA, 663 bp, Escherichia coli; identical to SEQ ID NO: 3975

SEQ ID NO: 16109 - DNA, 453 bp, Escherichia coli
gtggcaaacctgcaggtggccacgtcagaaagctggcgtgacaaacagacgggggagatgcgggagcagacagaatggcatcgcgtggtgctgttcggcaagctcgcggaagtggcaggtgaatatctgcgcaagggcgcgcaggtctacatcgaggggcaactccgaacccgtagctgggaagataacggtatcacccgttacgtcaccgaaattcttgttaagaccacgggcaccatgcagatgctgggacgtgccgcaggtgctcagactcagccggaagaggggcaacagttcagcggtcagcctcagccggaaccacaggcggaggccggtacgaaaaaaggtggcgcaaaaacgaaaggccgtggacgtaaggccgcgcagccggagcctcagccgcaaccgccggagggtgacgattacgggttttcagacgatatcccgttctga

SEQ ID NO: 16110 - DNA, 699 bp, Escherichia coli
atgatagattcatgggcatattttggtgagcaattaaaaaacagattgctagacaaggaaactcttattgattatttccaaagaaatccaaaaacaatcaaagaattacttcaaaatgagttaaataaactaccaatactggcaagtctacatgagcaatataactccatgttttttgataacgttcaattatggctaccaaatgctgcagaaaagatgctatcaacattagttccgaagtttgagcaagaaataatatcaaaaatacctgaaatagtaaaaaaggttcagttagatgttttggtttcatctgaggataagaaaagtaatatttataagaatatgcattacaaagtattgaaaacaaatcaatctttgattttaggagatagtattgtaatctttgaagtgtctggggaacgaaagtttaagccattctatgaaagtaatgatgatttaaaatgtatatatattccattagattcatattcgctactttatgcaacgccaaatccagaagataaaccaaacgtggatggtattaataaggctatagcacagtgttcatttgattttttcattagtaaatttcatagtgatgaatgccaaatatttcgaagtgagattggtaaaaatgtgtttatagttacaaccgaatatattgacgaaattctaagcaaaataatagcaggaaattaa

SEQ ID NO: 16111 - DNA, 378 bp, Escherichia coli
atgaaaaaattattatttgctatttttatcatacttccgcttggtggctgtaccgttcatggtaataaatccctagctgatgaaaatcatcagacggttaaattaaaaatcgtcaagggtaaaactacccaacgagaaattcttgctgcctttggagagcctcagacacgcgctacgaatgatggacaggagatgtggaactactcaagtatgaccggagaaagccaactatctaactacataccgggccttgctctgttgaccaatagcagcacggcacacattaaatcactggatatctggtttaagggtgatgttgtagaacgttatgattttcgtcagactgcaagtaagacttctcgcggtttgatggattaa

SEQ ID NO: 16112 - DNA, 255 bp, Escherichia coli
atgatagataaaaactatcataaggttgtttttgatcgttttaaacgatatgacgagcctcaaaaagaattgaatcctatcaattggttaggcggtggttttgttgtgtcatatctgtctgaacacgcagaaacactacagctaaccagaaaagcatcaacacataacagtatttttgattatcaggatggatacgcagatgaagaagattttactcgttgctggcgtagcaatggcgctggcgggatgtggtga

SEQ ID NO: 16113 - DNA, 522 bp, Escherichia coli
atgaagaagattttactcgttgctggcgtagcaatggcgctggcgggatgtggtgagaaaggtgattttgaaaaggcgattaacgcgaagatatcaaaatctaaggtgtgctatgcactacaggataatgatcgcgtgtttaataaaggttttcctgttcgggtcaatcgtggttatcgttctgccggatacaatgaaaatgatgaaatcctaaaaggtctgtctgagcaggggctgtttgatgtttcgcaggagtctaacagctttagcaacgttgatgttctggaagtaacggataagggacaagaggttgagttctgggatcgcaaggatggtgtctgtattggtcatcgtgccgtagctgaaattaaagaatggacagaagccgatgcaagtggcatgaagattgttcgcgtatcgtatacgtggaggctggctggtgttccttcgtgggtagataaaagtgcattcgctggcgtcaggggaatgactgaacctgctgaaggtcttattctcttgtaa

SEQ ID NO: 16114 - DNA, 930 bp, Escherichia coli
atgccccaaggaatttatccggcaaaaatgatcggtaatgagtttctaaaattcgttgatttacatggtcgcctaaaatctgctcaaatagtaagatttatggatgactttactatttttgacaatgacattgaaacactaaataatgatttcatcagaatacagcagttattagggcaagtatccttaaatataaatccgtcaaaaaccacatttgacaatgtgatgggagatgtgaatgaaaccttaactcagatcaagtcatcacttaaagaaatcattacggaatatgaacatatacctacagcctcaggggtagaggtagtcgagactaatattgaaatcataaagcaccttgatgatgaacaagttaacaaattaatagacttgctaaaagatgaaaaaatagaagagtctgatgccgatttaattcttggttttttgagaactcataatgatagtttactttctcagatgccaatgctattaggcagattcccaaatttaataaaacatatttatacgatctgttcaggtattaccgataaatcaggattagtaaaaatattgctcagctatttaaatactaataataactttttagaatatcaattgttttggattggagcaatagttgaagactatctattaggtgtaggtgagtatggctccgttttacacaagttatatgagttatctggtgattttaaaattgccagagcaaaagtattagagataccggaacagggttttggtttcaaagaaataaggaatgaataccttagaaccggacaatcagattggttatcatggtcttcggctatcggtacgagaaatcttaaatcagcagagagaaactatattcttgattatttctcaaaaggctcaccaataaattatcttgttgcatcttgcgtcaagaaactttaa

SEQ ID NO: 16115 - DNA, 141 bp, Escherichia coli
atggaaggtaagttaattttttgttccgatgtaatactacggtttcagtccgattacgaagaaaccgctgctgttccattgttcccattcgctgagagagaatccttttgttcctctgttttaatcattgatgatagttag

SEQ ID NO: 16116 - DNA, 204 bp, Escherichia coli
atggcagggaataggcaacattttatcccacgttttttacaaagaggtttttctaacgaaaaaaatgggaagtattttactaactggtatagaaaagattgtttcaaggaaaacatgatagtagagaatattggtttggaaaacaagttttattctcactatggcgattcaagcgttgataaaaaaataacagaaaacgggtga

SEQ ID NO: 16117 - DNA, 507 bp, Escherichia coli
gtgaaaacagagcccctgcagcagcgcatcaatggcccggcgacgcagtaccggtggcatgcgccgacgcagaccacgcgaacgggcatgcgccacatgaatggcgaaatcaaaacgggaggtgaagcccaccgccttttccatcagtttttcgcagaacttcagcgttccggcaccttcacggggagtgaacaccggattcgggttctttacctggcggtaatacgtttggtgaagatcagtcacaccatcctgcacttacaatgcgcagaaggagcgagcacagaaagaagtcttgaacttttccgggcatataactatactccccgcatagctgaattgttggctatacggtttaagtgggccccggtaatcttttcgtactcgccaaagttgaagaagattatcggggtttttgcttttctggctcctgtaaatccacatcagaaccagttccctgccaccttacggcgtggccagccacaaaattccttaaacgatcagtaa

SEQ ID NO: 16118 - DNA, 459 bp, Escherichia coli
atgaaatatattccactggtattatttatcttttcatggccggtattgtctgcagatattcatggacgggttgttcgtgtactggacggtgataccatcgaggtcatggactcacggaaggcggtgcggatcaggctggtaaatattgatgcaccggaaaagaaacaggattatggccggtggtcaacagacatgatgaaatcaccggtcgcaggaaaaacggttaccgtcacatattttcagcgagatcgttatggtcgtattctcgggcaggtttatgcgccagacggaatgaatattaatcagtttatggtccgggccggggctgcctgggtatatgagcagtacaacacagatcccgtgctgcctgtccttcagaacgaagccagacaacaaaaacgtgggctctggtcagatgctgatccggttcccccctggatatggaggcaccgtaaataa

SEQ ID NO: 16119 - DNA, 663 bp, Escherichia coli; identical to SEQ ID NO: 3975

SEQ ID NO: 16120 - DNA, 924 bp, Escherichia coli
atgacgattgaaagcttttttattggcacccgccgctctgataaacgttacgggcctcagagcaaggatatgcaggtttctgaattcatttctctgatttctcccaaaaatgcccctcataaggttgtgttacctgattttactggtctggcaattcggcttgatgcacaaatcaggaaccagtttcatcaactgaaagaggatgagcacttccttcgatatcggcagttgtcggaaaggtggtatcaggcgggctctattagtgacagaaacaaccgcagtaagcgttttgagaagatcatggatgactcacttgattttttgctttacagccaagacgtcatgcctaacatcaatccagatgatctccaatggcatgattacgaaaaggctagcagtaagggtaaaatgtactgtgtagcgcttctgttccatgtcattgcacgggctgcatatgaacccgaatctgtgggtaaagatccgacacttccagaatattgccggtggatgaaaaattggatagagaaaacattaggtcatgattttttagatagaatgatgatctattgtgcgctgtttgccccagcgtattttcccgcgttacaacgtctgagcggagagaaagaaacgcgtgatgtccatgaattcctggctgagcatgttcgcactttagctcaaaaaaattcttcagaggtaaattatagagatcaacggcaattcacgtttggctacaccatgttcacgaagcaacaatttgaatttctggacatgatgcgcgatgtccattaccggattgattgtattgaacagctccttctggaccttatagaacgtaaggttgtggatttcactgatgcatctgttgcaggcacgtggattgagaagcaaattcagcggcttgaatcaaacgacgtaaagcagtaa

SEQ ID NO: 16121 - DNA, 150 bp, Escherichia coli
atgacgaaatatgcccttatcgggttgctcgccgtgtgcgccacggtgttgtgtttttcactgatattcagggaacggttatgtgagctgaatattcacagaggaaatacagtggtgcaggtaactctggcctacgaagcacggaagtaa

SEQ ID NO: 16122 - DNA, 216 bp, Escherichia coli
gtgagcagagggagaaccagagccgcaccaggtaacaaagtcttattaatactggatgagacaactaatcagaaacttttagcagccagggatcgtagcggaagaacaaaaactaatgaggtgttcattagactaaaagatcatctcaatcgttttcccgacttttataatgcatctttagtaaaggaggaagctgaagacatcgacgatatataa

SEQ ID NO: 16123 - DNA, 648 bp, Escherichia coli
atgtgtgcgatggatcgtagagaaagagcactcatcagtcaattgcatttccctcatagtcttggagaggctatttcgtttttaaaatatcctgtatgtgtccgcttcgaggatggttcttttattaaggaaaataactgttttgaaaaacttatcagatcgtcatttaattcatgtgatgaatggtttgatagtttaacgttggaatgtaagttacagttatctagagcagagattgtatcatcctcttctatttatggtgtaaattgtaataatgacatattacttaataatacgttatggagtgtgatcatagaaagtgttataacaccatgcggctatttctttatctggaggtttattggggtagcaaatgataatctgtcatcgtttgttgtgtctaaatactccaatgaattaattgtaccctctgatgaatatgtaggtattgagccatatctgatagggtttagccatcattattcatcagcaaagatgaacatcactgtgtctaaatcaaagaagaaaaccatgaaattatttaaacgatatggatttagttctagagatctctggttggatgaaatgattagaacggaaaggatacttcctttatatgctaaagtaaaagaaatattgggaagataa

SEQ ID NO: 16124 - DNA, 288 bp, Escherichia coli
atgagtacccgaaatatccacgttaacaccgcgtcgtacacgcttcttgttgccgggaagaaaaaaaacaccggggaagagtgggacgtcctggaattcagcagcctgactgagctgaaaaaatatcgcaaaagccacccggaaaagatggccttcagttatagctacgcgctcagtcagggtgtggataagcagttccgccatatcaacattgcggaagccgatcacttcaaacagttcctgcgtcagattaagcgtgccggcctcgatatccgggcgatctgctga

SEQ ID NO: 16125 - DNA, 321 bp, Escherichia coli
atgaaaacatacgcaattactacactcattgcctcaatttttttactgagtggctgtaataatgagccctccgagcaagaactttataatgcaatgaataaggtcgtggagcagacgaatgccatcgtcacatccatagccggtaaagatgtcccaaaagacgcactgcgggaattaaaatcagtcaaaaagcatgactgtgtgaaagtatcggataaaagctataaatgtaatgtgacggttgttgtcaataacgacaaggccaccgcagctgtcacaatggtcaaaacggatgatggctggcaggtcgtagataagtaa

SEQ ID NO: 16126 - DNA, 387 bp, Escherichia coli
atgaacagacttattgcttctgtattttttatttccgtttcctttacttctggttgctcaacatcaggcaatcaacatctcaaaaacgaaacatcacaaagtctacagtcgcaaattactaaaaataagacaacgaaatcagaaatcaccgccctcctgggcgagccagatacaagaaccgctcttgataacggtaatgaagaatggacttactttatgaataacaatcagtttgacgccaccacattcatcccgatcgttggattactgacgggtggttcacagacacaggcaaaaagactcgaaatcgaatttaaagacgaaacggtcacaaagtggacgttctcagaaaataacagcaagatgaaaaccggtcttattcaataa

SEQ ID NO: 16127 - DNA, 279 bp, Escherichia coli
atgagtaagcaaactgttcagtgccccttttgttttaaagaaagtccccacggcgtaaaaatatgcaccggatgccatgcaaaagtggcctatggtgaaagtccgctcagtgtggccttcctgtttcaattcgtggccttcggtctcgcatggttagtatattcattgaccgatagcacttctgtttcagtcattacgttttttgccagcatcattattcttatctgtataattaaaaagacatatgcaaacagagttgtttttattcaacgaaattaa

SEQ ID NO: 16128 - DNA, 1257 bp, Escherichia coli
atgagaacaaaaattattgcgataattccagcccgtagtggatctaaagggttgagaaataaaaatgctttgatgctgatagataaacctcttcttgcttatacaattgaagctgccttgcagtcagaaatgtttgagaaagtaattgtgacaactgactccgaacagtatggagcaatagcagagtcatatggtgctgattttttgctgagaccggaagaactagcaactgataaagcatcatcatttgaatttataaaacatgcgttaagtatatatactgattatgagaactttgctttattacaaccaacttcaccctttagagattcgacccatattattgaggctgtaaagttatatcaaactttagaaaaataccaatgtgttgtttctgttactagaagcaataagccatcacaaataattagaccattagatgattactcgacactgtctttttttgaccttgattatagtaaatataatcgaaactcaatagtagaatatcacccgaatggagctatatttatagctaataagcagcattatcttcatacaaagcatttttttggtcgctattcactagcttatattatggataaggaaagctctttagatatagatgatagaatggatttcgaacttgcaattaccattcagcaaaaaaaaaatagacaaaaaatactttatcaaaacatacataatagaatcaatgagaaacgaaatgaatttgatagtgtaagtgatataactttaattggacactcgctgtttgattattgggacgtaaaaaaaataaatgatataaaagttaataacttaggtatcgctggtataaactcgaaggagtactatgaatatattattgagaaagagctgattgttaatttcggagagtttgttttcatcttttttggaactaatgatatagttgttagtgattggaaaaaagaagacacattgtggtatttgaagaaaacatgccagtatataaagaagaaaaatgctgcatcaaaaatttatttattgtcggttcctcctgtttttgggcgtattgatcgagataatagaataattaatgatttaaattcttatcttcgagagaatgtagattttgcgaagtttattagcttggatcacgttttaaaagactcttatggcaatctaaataaaatgtatacttatgatggcttacattttaatagtaatgggtatacagtattagaaaacgaaatagcggagattgttaaatga

SEQ ID NO: 16129 - DNA, 600 bp, Escherichia coli
  misc_feature (339)..(348): n is a, c, g, or t
atgacagtaagtaatatcataagtccggtcatggtgtattttgatcgatttatagtgtcaaatattatgggggcagataaagttgcattttattctgcaccagcggaggttattctaaaattaggaataatacctgcagcaatcgggagagcagtgtttccaaggttaagtaacatcaaagactttaaagaatttaaacgtaatgtaaataaatcattgcttttaatgtttctaatctgtttgccggtgataatcataggcttgttatattcagggcttgtattgaaaatatggtttggtgagaattaccaaattaattcctttaatatattaaatgtnnnnnnnnnngtgttattgatcggttttttcttcaatgcgctggcaatgataccattctctgcaatccaggcattaggaaaatctaaaattactgctttgattcattgtgctgaattggttccttatttagcccttttgtattttatggtcgaaaaatatgggttgctgggtgccgcaatatcctggagcatacgtgtaattttagatgctctgttattacaatggctttatactagaatgtgttctgtatatgaaaactaa

SEQ ID NO: 16130 - DNA, 762 bp, Escherichia coli
atgctgattgaaggggcggatgccaatgcctcagtcaccggtaatgaatccacggtgccgatgcagctgcgtatcaccggtctggtggaaatgccgaacagcaagacgtatgacgcaacgggatgttttgtggggctggaagcctggggggatgtgtccagtgagcgtgccattgtacgcacccgtaatatcagctgcctgaagaatggcaaaaccattgatatgccgattaaggggcatgtcagcttccggggtaaaaacggtatcaagggcgaagtggtgatgcgtaacggcaaaatcctcggctgggcatggggcgcgggatttgttgacggtatcggtcagggaatggagcgcgcctcccagccggctgtcgggctgggtgccacagccgcttacggggctggtgatgtcctgaaaatgggtatcggtggcggcgcatcgaaagccgcacagacgctcagtgactactacatcaaacgtgccgaacagtatcacccggtgataccgattggtgcgggcaacgaagtgaccgtggtgttccaggacggcttccagctgaaaaccgtggaagagatggcgctggaacgcacgcagagcagagcggaagaagacaatccggaaagtccggttcctgttccgccatcggctgaaagtcatcttaacggctttaatactgaccagatgctgaagcagctgggcaacctgaatccgcagcagtttatgtccggcagccagggagggggcaacgatggcaaataa

SEQ ID NO: 16131 - DNA, 312 bp, Escherichia coli
atgtcgggagacgagaataaacttaagaaatatcgtttcccggaaacactgaccaaccagagccgctggtttggcctgccactggatgaactgatccccgcagcaatctgtattggctggggtatcacaacatcgaaatatctgttcggtattggtgccgcggttctggtttatttcgggattaaaaaactgaaaaaagggcggggcagttcctggttacgtgacctgatttactggtatatgccaacagccctgctgcgcggtatttttcataatgttcccgattcgtgtttccggcagtggattaaatag

SEQ ID NO: 16132 - DNA, 234 bp, Escherichia coli
atggtcacagaatataaagggaatataggtgatactcagaacagcatacgtggcgaggaaaatattgtaagagggcagtattctgaactgcagaatcaccataaaacagaggcattatctcagaataataaatataatgaagaaaagtcggctcaggaaagaatgcccggggctgacagtccacaggaacttatgaaaagggcaaaggaatatcaggataagtataagcaataa

SEQ ID NO: 16133 - DNA, 747 bp, Escherichia coli
atgacaacggataacacgaacacaacacgtaatgattcactggctgcccggaccgatacctggttgcagtcgttgctggtctggtcacccggacagcgggatatcatcaaaacggtggcactggtgctgatggttctggaccatgcaaaccgcattctgcatctggaccagtcgtggatgtttctggtcgggcgtggggcctttccgctgtttgccctggtgtgggggctgaatctgccccgtcatacgcatatccggcaggaggccattaaccggctgtggggatgggcggtgattgcccagttcgcatattatctggccggttttccctggtatgaggggaatatcctgtttgcctttgcagttgcggcacaggtgctgacatggtgtgaaacgcgcacctggtggcgttccgcagagaccatgttgcttctggcaatgtggttgcctttctccggcaccagttacggcattgccgggctgctgatgctggcagtcagccacaggctgtaccgggcggaagacagaatggaacgtctggcgctggtcgcctgcctgctggctgttattccggcgcttaaccttgccaccagtgatgcagcggcggtggccggccttgtgatgacggtgctgaccgttggtctggtgtcgtgtgcaggaaaatcattaccccgtttctggcccggggattttttcccgacgttctatgcctgtcatctggctgtgctgggcgttctggcgctgtga

SEQ ID NO: 16134 - DNA, 237 bp, Escherichia coli
atggtcacagaatataaagggaatatcggagatactcagaatagtattcatggcgaagaaaatattgtagacagacaatattcagagttaaaaaataatcacaaacaggaagaaattcaacaaaacaacagatataatgaagaaaataaacgacagaaattaatgccaacaccgtctgaagatgcgttaaaacagatggtggatgataagaaagaacgattgaaggggccattatga

SEQ ID NO: 16135 - DNA, 276 bp, Escherichia coli
gtggcttctgtttctatcagctgtccctcctgttcagctactgacggggtggtgcgtaacggcaaaagcaccgccggacatcagcgctatctctgctctcactgccgtaaaacatggcaactgcagttcacttacaccgcttctcaacccggtacgcaccagaaaatcattgatatggccatgaatggcgttggatgccgggcaactgcccgcattatgggcgttggcctcaacacgattttacgtcacttaaaaaactcaggccgcagtcggtaa

SEQ ID NO: 16136 - DNA, 378 bp, Escherichia coli
atggacgaacagtggggctatgtcggggctaaatcgcgccagcgctggctgttttacgcgtatgacagtctccggaagacggttgttgcgcacgtattcggtgaacgcactatggcgacgctggggcgtcttatgagcctgctgtcaccctttgacgtggtgatatggatgacggatggctggccgctgtatgaatcccgcctgaagggaaagctgcacgtaatcagcaagcgatatacgcagcgaattgagcggcataacctaaatctgaggcagcacctggcacggctgggacggaagtcgctgtcgttttcaaaatcggtggagctgcatgacaaagtcatcgggcattatctgaacataaaacactatcaataa

SEQ ID NO: 16137 - DNA, 378 bp, Escherichia coli
  misc_feature (266)..(275): n is a, c, g, or t
atgatggatgaggaactttttattgattatgtcgatacagaatggtgtcttagatgcttaaactatggcatattagttcatatcattcctgatatagaaatggttcatgctattggggataagtcagtaaaaatctgtgggattaacataccaattcactcgccagtacgtcgttattatcgagtaagaaatgcatttcttttgcttagaaaaaatcatgtgcctcttttactctctattagggaagttgttttttctttaattcnnnnnnnnnntatcgcaactcaaaaaaataaaattgaatatatgaaaaaacatattttggctacgctggatggaataagaggaattactgggggcggtcgttataatgcatag

SEQ ID NO: 16138 - DNA, 213 bp, Escherichia coli
atgtctagtccacatcaggatagcctcttaccgcgctttgcgcaaggagaagaaggccatgaaactaccacgcagctctcttgtctggtgtgtgttgatcgtgtgtctcacactgttgatattcacttatctgacacgaaaatcgctgtgcgagattcgttacagagacggatacagggaggtggcggctttcatggcttacgaatccggtaa

SEQ ID NO: 16139 - DNA, 510 bp, Escherichia coli
atgcaggatggtgtccggattgcccgtgataatcctgacagcggtgtggtggtaagaatcgccggtgaaggtcgtccgtggaatcccggtgccatcaccggcggtcgcgtgtggggggatatcccggacaacagcgttcagccgggagccggaaatggcgaaccggtcacggcagaggtactggcacagcggcaagctgaagaggccatccgccgtgaaacggaacgccgtgcggatgaaattgtccgtaaaatggcagagaacaaacctgacctgccggacggcaaaacagagcaggctgtcagggatattgccgggctggagcgtgaccggtctgccatatctgaacgggaagccgcgctgccggagagtgtactgcgtgaaccacaacgggtgcgggaagcggtccgggaggttgcccgggaaaatctgctgcaggagcgactgcagcagatggagcgggatatggttcgtgacctgcagaaagagaaaaccctgggcggagactga

SEQ ID NO: 16140 - DNA, 468 bp, Escherichia coli
atggccctgatggctctgtttgttttatggaaggacaacaccacaccaggaaaattactggttcaggaaattgacttcgtaagacaaacagcccctgccgggcagtttcctgtaagagaatgtttgccttctctgcatgatcttccaggagcagaagagaaaatctgccgttaccgtgctgctgatgctgcagattatgtcagggagactgaccagtcactgatgcaacttgtcaccgcattctgggcaacgctggcacttatgtatatgtcgtttgcggcaggcaccgggaaatatccggtgcgacccggaaaaatgaaatgtgtccgtgtggcaacagcagatgagcgtctgaaggaagttcttgcagaagacacttccctgccgggaaaaatcagggaatgccatgtttatttccctgatgacagaacaatcagaaacaacggagataaaaatgaacatgcgtaa

SEQ ID NO: 16141 - DNA, 321 bp, Escherichia coli
atgaacatgcgtaatattaatgttattacagccctttctgtgccgggtaaaaccgtgtcagatgattttatgcatgctgttctcagtaactgcaccacaagaatcgtccttcctgcaccgaaggaattcagttctgaatcattgccgcacaattttaatatggctgctgtcggtgtgatgaagaagggaatgtcgatgagcttattctcttctccggggcatattgtggttgccggacaatccggtggaggaaaatctgttccggtgaaagaactaatcgacagaattattcagaaatataaggaacccttcgatgaataa

SEQ ID NO: 16142 - DNA, 252 bp, Escherichia coli
gtggtggatcttaatgagtttgattcacttagtagtggtgcagtacttgtatcaaaacatggctactgcaagcactcatatgcgtttacgccgtgtgaacattatccgattgagaattctggtttagataacgaaacgatttcaaacattcacgataaaatttcaaaaagaacactgtatgataaaaatgatgggaacataaatgctgatagatggtatgaattccataagagaataaaaaaaggagaataa

SEQ ID NO: 16143 - DNA, 198 bp, Escherichia coli
atgaacatgcgtaatattaatgttattacagccctctctgtgccgggtaaaaccgtgtcagatgattttatgcatgctgttctctgtaactgcgccacaagaatcgtacttccagcaccggagaaattcggttctgagtcattgccggacaattttaatatgactgctgtcggtgtgatgaagaattcagaaatataa

SEQ ID NO: 16144 - DNA, 414 bp, Escherichia coli
atggcattaaccgccgcgcttaaagcgcaaattgccgcctggtataaggcgcttcaggaacagatccccgactttattccccgtgcgccgcagcggcagatgattgcggacgtcgccaaaacgctggccggagaagaagggcggcatctggcgattgaagcccctaccggcgttgggaaaacgctctcctatttgatccccggcatcgccattgcccgcgaagagcaaaaaacgctggtggtaagtaccgccaacgtggcattgcaggatcagatctacagcaaagatttaccgctgctgaaaaagatcattcccgatcttaaattcactgccgcttttgggcgtgggcgctacgtttgcccgcgtaatctgacagcgcgagcccacgcaacaggatctgctggcgtttcttga

SEQ ID NO: 16145 - DNA, 324 bp, Escherichia coli
atgttggaatcaagcaaagttcccgccctgacacgggctattgatattctcaatttgattgcccgcattggcccctgtagtgctgcgacgatcattgacacattgggaatccctaaaagcacggcctatttgctgcttaatgaactcaggcgtcagcgttttcttagccttgatcaccaggaaaatttttgtttgtggaccaggctggaggagctttccggtcatgcgttaagcaagatggatctccgggaactggctcgaccgcgtttgacgcaactgatggataccaccgggctgttatgtctgtcacctggggattattga

SEQ ID NO: 16146 - DNA, 1176 bp, Escherichia coli
atgacatcccggaatgtaccaccagttatgactagaaaaaaagtgctttgttttgtctttcgttatgattctcattttttagctttgaaaaatatttttgagcagatagatgttgattcatatgatttatttttttgctgcttggataattctctacaagagtttgtaaaaaaaaatttagatgaaaagatagttgtattctatcctgatgactttgtttgttttttcacttttattaatattgagtttattttttgttcaacaggagggaaggaccttcatgaaattgttaatactgtaagaacaaaagataccataattatatcttgttttcctggcattgtccttacttctcagatagaagcttttatttcaaaatctaatagtcactattcacttattaactccccaaaagatattaaaacgtataaaaaaatttgtaaaataataggggttccttttaatggaattctttttggtccaccatggattaaaaatgtcaatatcaatgcaaaaagtgagaattcttgtcttatcgttgatcaagttaatgagcccttgacgccaataaagaggatagaatatgcacgttttttgattagagtaattcagaaacatccacatatgaattttatttttaaaactcgaaatcctcttatatcaccagactcaattgtttttgatattaaggaatacattgaacgcttcgatttgaaaaatataacatttagcgatgataatattgattctttaatttctaaagttgaatattgtattacaatatcttcttcggtcgcaatatattgtctggctaataaaattaatgtttatttaataaatggatttaatcatacttgcaatggacaatgttatttttcaagatctggacttattgttgactataataagtttaattttaaacacattccacgtattaaaaaaaaatggatggaggagaacttttattactctagggatattcaacataagattttgaatgatattttaaaaatgccgccaaatgttaatgttaggacttttggaattaaaagatctacattgattatattgtttttgatcttttttaatttctttttctcattaggaccaaaaaaaataaaaacattgaaaaaaatccataaagttttattaaggtataagaaagatgatatttga

SEQ ID NO: 16147 - DNA, 1497 bp, Escherichia coli
atgacgcaatactggctggggttagattgtggcggtagctggctgaaagccgggctgtatgaccgagaaggccgggaggcgggcgtgcagcgcctgccgctgtgcgcattaagtccacagccaggctgggcagagcgcgacatggcagaactgtggcaatgttgcactgctgtcattcgcgccctgcttacccattctggcgtcagcggggaacaaattgtcggtatcggcatctccgcgcagggaaagggcttatttctacttgataaaaacgacaaaccgctcggtaacgccattttgtcctcggatcgccgggcgatggaaatcgttcgtcgctggcagaaagatggcatcccggaaaaactctatccgctgacccgacaaaccttatggaccgggcatccggtgtcgctgttacgctggctgaaagagcacaaaccagaacgctacgcgcaaattggctgcgtgatgatgacgcacgactacctgcgctggtgtttaaccgacgtcaaaggttgcgaagagagcaatatttctgagtccaatctctacaacatgggtcgcggggaatatgacccgtaccttaccgactggctggggatcgctgaaatcaatcacgccctgccgcctgttgtcggatctgccgaaatctgcggggaaatcaccgctcagacagccgtactgaccggtctgaaagcgggtacccccgttgtcggcggcctgtttgatgtggtttccaccgcactctgcgccgggctcgaagacgaattcaccctcaatgcggtgatggggacctgggcggtgaccagcggcataacccacggtttacgtgacggtgaagcgcatccgtatgtctatggtcgctacgttaacgatggtcaatttatcgttcacgaagccagccccacctcttccggcaatctcgaatggtttaccgcacagtggggagaaatctcatttgctgagattaatcaggccgttgccagtttgccgaaagccggtggcgatctctttttcctgccgttcctgtacggcagcaacgccggactcgaaatgaccagcggtttctacgggatgcaggccattcacacccgtgcacacctcttacaggccatctatgaaggcgtggtgttcagccatatgactcatctcaaccggatgcgcgaacgttttactgatgtgcacaccctgcgcgtcactggcggcccggcgcactccgatgtctggatgcaaatgctggcggacgtcagcggtctgcgtatcgagctgccgcaggtggaagaaaccggctgctttggtgcggcacttgccgcccgcgtcggtaccggggtttatcgcgatttcagcgaagcccaacgtgacttacagcacccggtacgcaccctgctgccggatatggccgcgcatcagctttaccaacaaaaataccaacgctatcaacatctcattgccgcacttcagggttatcacgcccgcatcaaggagcacacattatga

SEQ ID NO: 16148 - DNA, 315 bp, Escherichia coli
atgctgattccgtcaaaattaagtcgtccggttcgactcgaccataccgtggttcgtgagcgcctgctggctaaactttccggcgcgaacaatttccggctggcgctgatcacaagtcctgcgggctacggaaagaccacgctcatttcccagtgggcggcaggcaaaaacgatatcggctggtactcgctggatgaaggtgataaccagcaagagcgtttcgccagctatctcattgccgccgtgcaacaggaaccaacggtcactgcgcgatatgtgagacgatggcgcaaaaacggcaatatgccagcctga

SEQ ID NO: 16149 - DNA, 366 bp, Escherichia coli
atgaatgcacaactggcctatgtttttactattgatactcgtattcttcagaacagtaatgaaaggattactgaaattttcattgcgaaatataaagaaggaataacgtatcattttggccctgatatggaacgatttgagtcctgctttgaagcagcgctttttgctattggtgaatggcaaataaaagttgatgcgatgacacgataccatgaggaagatgaagtgatggagttctttagctctataccatcagatgaagcgggaaatctggcgacgtccattttgctgttcagtgatgttcttgccatgaaaggcgtggatgaggtatttggctattttttgggtaaggataatgttgtatga

SEQ ID NO: 16150 - DNA, 1092 bp, Escherichia coli; identical to SEQ ID NO: 11236

SEQ ID NO: 16151 - DNA, 282 bp, Escherichia coli
gtggctaacctgcaacttgccgttaaaggtgaatacttcgatgccatgattcgcggggagaaaacggaagagtatcgcctgtgtaatgactactggaataagcgcctcgttaaccgtaagtattaccgcctgattatcacaaagggatatccgaagcgcgaagacttcagtcgcagaattgacgtcccgtataacggatatgaaataaagacaatcacacatccgcacttcggtgataaaccggtaaaggtgttcgcgataaaggtaaatattgatggctaa

SEQ ID NO: 16152 - DNA, 297 bp, Escherichia coli
atggatattaaagagtttagtgagttagagagacgctatgagcaagctaaaacgaaccgagctataggggcatttattggcggcggtggggtatttgctctgttagccgattttttatgggatgttgcgaacccaatatcaataggggtattaataggcggcggacttgttttttttgctgtatgccacgaacaggttcgaagttcattaagaaagttggatgaagaatgttatttgaagtatggcaagtcttactctcaatcattccatgaaatttttaaagacaaatataattag

SEQ ID NO: 16153 - DNA, 696 bp, Escherichia coli
atgacagctacaaaaagcacgtccattttttctttcgaatctcaagccgatatacgggtaatcgtcattaatggtgagccatggtttatcgcttcagatgtttgtcgggctataggcatagcaaaccatcgagatgctgttcgaaaacttgatgatgatgagaagggcgtcgcttcaaccgacacccctggcggtgagcaagaatcgatcattatctccgagtcaggcctctacacactgatcctccgctgccgcgatgcggtgacaccaggcactatcccataccgctttcgtaaatgggttacaggtgaggttcttcctcagatccgccgcaccggaagttacattaaaaactcgctcccgcaggaagaacgcataaagatggttgccgaccaggtagccaacgccacggcgtcagcagtaatgcaggcgatgaagatagagaacaaaacctacagtgccccgctgaagcccggctaccgcagcctgattcattcgccgtcgggtgttctcggcctgacggagaactcactgctgatgaatctgctgaaccagttacaggaagacgggcacgacgtatcgggcgcggcggcggaactgaccaccatgttctgctacatcgtcggtgtgagcaaatgcctgcgtgatatccagacgcacgcggagtacatcaacgacaaggcagggttcttctga

SEQ ID NO: 16154 - DNA, 498 bp, Escherichia coli
atgatctgggcattcgcaaaagcatactggaaacagttggttatcatggcgatgcttgctgttctggtcatatcaggagttgtagcctggaatgcacacggcagtcgtcagtacgacgccgggtatgcgcaggcacaggaagatcagaaacaggctgatgataaggccaggtcacaacgtgatcaggagaaaacacaaattgaacgtgaagcacagtcccgtatcgatgtggcgcgtgttgatgctgagcatgctaatgccgctgctgacagcctgcgcgccgagcttgacaaaaccaagcgactcgccgaacactataccggatctttccccactggcacgccagccagcaaggtcatcggtgtgctcgccgacatgcttgaagaaagcaaccgagtttacaacgcaacagcagctgaggctgaaaagtatcggattgcaggagaatcctgcgaacagcaatacgattcactgaagaagcaaaaatcgtggcactga

SEQ ID NO: 16155 - DNA, 363 bp, Escherichia coli
atgaaattttccaaattttctgagttggtgaatcgtattttgtccaacaaccacagccatcgtcgcgatatggatgtaacaatcgttgttcattcgcctggcagcattggttcaacaccttcagttgaggttcagtcaattcacgctggttttgattgggattccgggaaagtgcttattttcccatcacagccactgaccacgctaacaccagaacagattactgatatcactgatagtgtgcgcaaaggtcagtcttggcacgcatatcaggaatacaagaagcatcaagagcagttggaaaaattgtcgattgaactggatgctctctgtggcgaaaagagaaaccagactggcagatga

SEQ ID NO: 16156 - DNA, 291 bp, Escherichia coli
gtgaatatcgacacgacaataacgatcgatacgctcctaaataccggtctggcacttctcggttggctttacatcatgtcccgtacatggcgatggctgggttccattttcctaaaacagtggaaaaaacggcgcaaacaggaactacgccagaaggcattagaagcgttctatgacgcatttgagcttagccgcattgaaccaggtacaacagccaggatagcgacaaaaggcgacctgatgatagtgatgttccgacaggagagagcagagaaaggggaatcagcatga

SEQ ID NO: 16157 - DNA, 750 bp, Escherichia coli
atgattataaatgacatttttaaaatatctgaaacaattacatccccatttcactatatattcaagagaaaactttcacattatttatatcagaaaaatattattgaaattctcggtagagttaatgaaaataaactgcgcggatggtatagtccatgtgatttgatgaatgccagagaattcagagggatgattaattcgcttttccaacccggtgactatcatttttccactatggatattgctgctgcaattagtattgcaacaggtcattattctgataacgagtttaacaaatttagcaacgagattattgatttctcatatcatatatcacatgaaataaaggaatcaataattaaaaataaagtaattcgagatggcttggttgattatggtaaaaatattagtttaattgatatcaaatcagatcgcaaagcaattgaatgcctatttaaggataaaaaagagttatttcgacattacttttccacgtttaataatactttctataatcatagcattcagatttggcatcaaggtaatgataatacgtggattgactggaccgaaaaaaattctatacgcataaacattaatccctataaaatccgagaaggtttctttttaatcggatttgactatcgtgatattacaaatggtgaaaggttgcatgttgccagtaataaagatggacatgaatactttaataaatgcttgaaaaatagttcgcgtgtgtggatgcagtaa

SEQ ID NO: 16158 - DNA, 870 bp, Escherichia coli
atggctaattcaggaagagaatatgaagaacttgtcagagatatacaatattctttgtttaaagccgaaaatattcctagccttaaaaacattaatatcgagaaaaataagaagataaaagatcgttcgggaattgaacgagaatttgatatatattgggagttcgaaattggaggtcatacctatcgttcggttatcgagtgtaaggactattcctccccggtatcgattgagaagatagatgctttcattggtaaaactaatgatattccgggacttaaactaatctatgcgacgcgaacggggtatcaaagtggtgcaaagataaaagcagagcagcataacattcaactgcttgttatcagggatcagcaagaacaagactgggttgatgaagatggcactccgtatctaaaaacaattcattttaaaatgatcgcaaaaactctccctcaaataataagttttaatacagatatcgataagcaatggtttcaatctcaagaaacttatacagaagaaatgatatttaatgttttcggttgtgcattaaataatagcgtatttatcaataatattacagataatgaaagatatagcatatacgatcttcaggaattactccttacaaaagttaaaaatattgaatatggaacatacaattatgacgaaacaatagaaaatggttatattgaaaatgaagatgcttctattcagataaaaatatcaggatatagctgtacttacgtctatagaaaaccaatggaaacgacttctatcgttgatttttcagagcaagtcaaagccattgtagaagattttcaaactggcagaaaaaaatgggttttcaatgatggaaatgtaagataa

SEQ ID NO: 16159 - DNA, 504 bp, Escherichia coli
atgaatagaagaaaatatattttattttcactgtttttcatcgcagttatgactacaacagcaaacgctgctgtttgcacacccgctatggaaaccgcagtaaaacaggctcaatacaacgcaatgaaaatcgatgcagctcaactggaacccatagccgaagggtttatggcaaacataaatagtacattagatactattggttgcaccgatgtatggcctactggaagcatcggcataaatctgccaagtttcgatactataatcagaaaagcaaaagaagcagcaataagtaaagcctgttcgattgccagagaaaaaatgaattctgttatggggaatatatcggaaagcgtttcttttgatgttccgggtatggggaatattgctgggggtagcatttcaacaggaacaggatcaactgcgggaggaagcattaatgttaatggaaactccacaacaggttctgatgtatggaacagtatcagtgatgtgatgaagtaa

SEQ ID NO: 16160 - DNA, 735 bp, Escherichia coli
atgttaagaatcaatcaaatagtaaagatccttggtgaaatgaaggcatatgccccttatacatacaaaagtaaaacagataaagtggttgataaaatacatggtagattagtcaggctcggggtttttatcatcgctttacttgctttatgcattgctttgtataaattcaatagttgttttagaaccgagacagttgtagatgttatttttgggttgtattttacaggggtgctaataggattagtaataatggcattgccacctatcttaggaataaaacatttgattgattggaagaaagaagcttttaatgactttatttgcgaaatatcacatgatgaagataacgcaaagcgtcttttagattattcagaaaaagaattattgtatgcgattcactggatacaacttaagattaatagaataacgatgagagttagtagcttttttggcgaaaaaacagcagtactctcggtattgggtctctgctattcggcagtacaggcatcaattggctttgataaattaagtcaaacatttattggagacttttctaatgcggattctactaatactattatcatgtttggattagcacttttgctgggtatgtcattgggggcattaatgttgaaaaaagttgccagccaccagttatatctgaaagaaattgttgagttggcaataagaatcaagaaagatgtcgaaaacaaaggagaaatatcggaataa

SEQ ID NO: 16161 - DNA, 2742 bp, Escherichia coli; identical to SEQ ID NO: 6507

SEQ ID NO: 16162 - DNA, 357 bp, Escherichia coli
atgccggcctttgaatgggttcatgtgcagctccatcagcaaaaagggatgataagtttatcaccaccgactatttgcaacagtgccctggaaagtcagggcgaatatgactcacaatgggcggcaatttgttccattgctccaaagactggctgtacgccggagactctgcgtgtctgggttcgccagtatgagcgggataccgggggcggagatggagggctcaccagtgctgaacgtcagcgtctgaaagagctggaacgtgaaaatcgtgaactgcgccgcagcaacaatatccttcgccaggcttccgcttattttgcgaaggcggagttcgaccgcctctggaaaaagtga

SEQ ID NO: 16163 - DNA, 540 bp, Escherichia coli
atggcagttcgtggcattaacaaggtcattctcgtaggacgcctgggaaaagatccggaagtccgttacatccccaacgggggcgcagtggcaaacctgcaggtcgccacgtcggaaacctggcgtgacaaacagacaggggagatgcgggagcagacagaatggcatcgcgtggtgctgttcggcaagctcgcggaagtggctggcgaatatctgcgcaagggcgcgcaggtctacatcgaaggtcagcttcgcacccgtagctgggaagataacggtatcacccgttacgtcaccgaaattcttgttaagaccacaggcaccatgcagatgctgggacgtgccgcaggtgctcagactcagccggaagaggggcaacagttcagcggtcagcctcagccggaaccacagtcggaggccggtacgaaaaaaggtggcgcaaaaacgaaaggccgtggacgtaaggccgcgcagcccgagcctcagccgcaaccgccggagggggaggattacgggttttcagacgatatcccgttctga

SEQ ID NO: 16164 - DNA, 138 bp, Escherichia coli
gtgtttgattttagcaaactgattcgggagattcgagtgatggctgaaaaattatccacctggaagttcattcttatctggctggtgtttgtgattatggcctccggttatttcatcggtcagatacgctggtggtga

SEQ ID NO: 16165 - DNA, 1134 bp, Escherichia coli
atgcacttttatgtggatgaaacaggccagactggccgaaacctttttgacaaaacccagccagtcctctcctacggagtgctgtcgtctgatgctaatctggataaggttgctgaagcggatctagccgtaatacgcaaaacgcttggcgtgcagcgcctgcacgctgcggaactgggcttgcaccgcctttctgaccttgtagatacgctgctggttctgcagaaaaagcaccggatacggtttgacatctggcaggtagtaaagcgcgatcatgccattatttcgttcttcgaccaggtatttgatcagggaatgaatccagccgtaccctggtctgcatactggacccctctgcgctaccccctgctgctgaatctggccagcctgtttgatgatgaacttgcttcaaacgcatggacggcaaggctggaggcgcatgatgagcgtgcgtcggaacttttttgtaccgtcagtgatgaactgatcagcaggacggcagccagcgcgctggaccaccggtcgaagcagctgatcaccgatgccctgaactgggcgtcagccaattttgaacagttgggctataactgtaaaaccaacaaggaaaggctgcggattatgcccaatatgattggctttcagtccgtattgcacgggatctgttcccgactgggggcaccagaaagaaaggccagtatcattgttgaccagcagtcacagttcaacaccacccagcgtgaacttaacgagttttactaccagatacgggatatgccctgggaactggggcccggattacctgttatgaacatgaaaaatatgccggctgaaccacttgtattccagtccggtaccaagagtgcaggtctggagttggtagatatttatctctggacattcaagcgattcatggaagacaaggcgctgacaaagccactttcccgccttgtttataccaatctgaaaacagccaggaccaacagcgtgtcaatccagtcggttgccagtcgatttaaggaactcctgggtaaactcccggtaccaagcgcagagatcatgaggctggcgcaggagctgcgggactttgatgaagccagacgcatgccatatgtggtgtcgggatcacccgactga

SEQ ID NO: 16166 - DNA, 3693 bp, Escherichia coli
atgggaaaaggtggcggtaaggcacacacgcctcgtgaggcgaaggataatctcaaatccacgcagatgatgagtgtgattgatgcgattggtgagggaccgatagaaggtccggtgaagggactgcagagtattctggtgaacaaaaccccactgacggacacggacggcaatcccgtgatacacggtgtgacggcggtctggcgtgccggggagcaggagcagacaccaccggaaggctttgagtcctccggagctgaaaccggactgggtgtggaagtgacgaaggcaaagccggtgacgcgcaccattacgtccgcgaacattgaccgcctgcgggttaccttcggggtgcagtcactggtgcagaccacgtcaaagggcgaccgtaacccggcatccgtccgcctgctgattcagttacagcgtaatggccgctgggtgacggaaaaggatgtcaccattaacggcaagaccacctcgcagttcctggcctcggtgattctggataatctgccgccccggccctttaacatccggatggtccgggagacggcggacagcaccacggaccagttgcagaacagaacgctctggtcatcgtacactgaaatcatcgatgtgaaacagtgctacccgaacacggccattgtggggctgcaggtggatgcggagcagttcggcggccagcagatgacggtgaactaccatatccgcggtcgcatcattcaggtgccgtcaaactatgacccggaaaaacgcacgtacagtggtatctgggacggcagtctgaaaccggcatacagcaacaatccggcctggtgtctgtgggacatgctgactcacccgcgctacggcatgggaaaacgtctgggggcggcggatgtggacaagtgggcgctgtatgccatcgggcagtactgcgaccagacggtcccggatggtttcggggggaccgagccgcggatgacctttaatgcgcacctggcacaacagcgtaaggcgtgggacgttctcagtgatttctgctctgcgatgcgctgtatgccggtatggaacggtcagacgctgacgttcgttcaggaccgcccgtcggatgtggtgtggccgtacaccaacagcgatgtggtggtggatgataacggcgtgggattccgctacagcttcagtgccctgaaggaccggcacacggcggtggaggtgaattacaccgacccgcagaacggctggcagacatccacggaactggtggaagacccggaagccatactgcgctacggacgcaacctgctgaagatggacgcgttcggctgtaccagccgcggtcaggcccaccgtgccgggctgtgggtgataaagaccgaactgctggaaacgcagacggtggatttcacgctcgggtctcaggggctgcggcacacacccggtgacatcattgaaatctgtgataacgactatgccgggaccctgaccggcggacgtgtcctgtccattgatgctgccacccgcaccctgacgctggaccgtgaagtgacactgccggagaccggtgccgccacggtgaacctgattaacggcagtggtaagccggtgagtgtggacatcaccgaacaccccgcgccggaccggatacaggtcagtaccctgcctgatggtgtggagacatacggggtgtggggactctccctgccgtcactgcgccgtcgcctgttccgctgtgtctccgtccgggaaaacacggacggcacctttgccatcacggcggtgcagcacgtaccggaaaaagaagccatcgtggataacggtgcccgctttgagccgcagtcaggttccctgaacagcgtcatcccaccggcagtgcagcacctgacggtggaggtgagcgcagctgacggccagtatctggcgcaggcgaaatgggacacgccgcgggtggtgaagggtgtgcgcttcagtctgcgcctgaccagtggtaagggagcggatgccagactggtgaccaccgccatcactgccgatacggagcaccgtttcagtggcctgccactgggggaatacaccctgacggtcagggcgattaacagttatggccagcagggcgaaccggccaccaccaccttccggattaacgcgccagcaaaacccgccaccattgaactgacgccggggtattttcagataacggcggtcccgcgtcttgcggtgtatgacccgacggtacagtttgaattctggttctcagaaaaacgcatcacgaacacagcacaggtggaaaaatctgcccgttatctggggaccggcagtcagtggactgtccaggggagccggattaagccggggacggatttctggttttacgtgcgaagcgtcaacctggtgggaaaatctgcttttgtggaagccagcgggcagcccagcaatgatggtgaagggtatctggaaattttccgggggctgatagatgagacgcttctgggccaggcactgaaagagcgcattgatgcttcagcgctgcgtacggaggtcacgcaactggaagaagatatccgtcagcggatggacacggatatcgcagaagtgacccggaaaatcgggaaggcggaaaacagcctcacgcagctggttgcgaaaaagaatgaggaccagacactggccatcgcgcaggtgagccagaaagtggaccgggtgagcagtgaaatctcacagactgtcagccaggggcagtcagaaaacgcccgacagatagcacaggtccgccagtacgtggataaaaaagggagtgaaattacctcgaccacggataaaaagctgggtgaccaggccgtgaccatacagcaaatccagcgggttcagtcagacacgcgcaatgagctgaatgccatgtatatgctgaaggtgcagaaaacaaaaaacggtattccctatgtggccgggattggcgcggggattgaggatgttgatggtcagaccctgagtaacattctgctgcaggccgatcgcattgcgatgattaccccggagaacggcaacaccacgccgctgtttgtggcgcaggggaatcagctgttcatgaacgacgtgttcctgaagcgactgtttgcggtgagcatcacgtcatccggcaatcctccgacgttttccctgacgccggatggcaggctgacagcccgcaatgcggatatcagtggagccatcacggcgaataccggcacgctcaataatgtcaccattaacgagaactgtgtcatcagagggaaactgtctgcaaaccagattgaaggcgatctcgttaaaacagtgggtaaggctttcccccgtgactcccgtgcaccgaagcgttggccatcaggaaccattaccgtcagggtttatgacgatcagccgtttaaccggcagattgttattccggcggtggctttcagcggtgccagacatgagcgggagaacagcgatacttattcgtcatgccgcctgatagtgaagaaaaacggtgctgaaatttataaccgtaccgcgatggataatacgctggtttacagtggtgttattgatatgcctgctggtcgcggccacatgacgctggagttttctgtatcagcatggtgggtaaatggctggtatcccacagcaagtatcagcgatttgctggttgttgtgatgaagaaagccactgcaggcatcacgattagctga

SEQ ID NO: 16167 - DNA, 876 bp, Escherichia coli
atggacaattcatataaaaacgttcatggctcggaggataacacatacatcacttctaattacaaatattattatatcggtgctttattgtttgaaaattatatgaacatgaaaaacaagtcagccattatcgacatgaaaaaggccaaaacaattgaaaagaaatataatgaaattaaaataaacattaataatgttgattctcaatttaaaagatacaagttattaagcttaaacgaaaacatttcaatatgtaataataaagatagtcaaacaatagtagacaaacgaataggtgcccatttttggatacctgttccacgaaaattattaactacacttcaggctttaatagatttagagcttatcactaacatttcatttagaatagataacataaccgactacattccattttttgaagacatggagtttggttcacctctaaagttggatgtggcagatctcccctcagtttcaaaattttattctattgataactacgcgaatagcttttgggttcatcatgattcaagagagggaagtatcacctttgaagaattaagagatgactttcagatggtaaataatgatgtcattacacaggttattcaccttgagtatttcaaccttaataatgcgttttatatacaacatttagaccatgaattcatatcctatacgttagaacaatatgagaaaaaattatcagattccaaaattaaaggctataaaaaaacaaagtcatttaaaattgataatgccaaaatcccttttatgtttaagaacaataacgagtttttattatttcagattctagactcatattttaaaaattccgacttaatttcagaatatttcaacaacattcaataa

SEQ ID NO: 16168 - DNA, 342 bp, Escherichia coli
atggaagtcatcgtcaaggaaaccgacagcattcaagcaatgtctgacagtgctgttttatcatatgtctatgaacagtctggattctctattgatctgaataaatgttttgtgcggctattcaataatgcatctggcattaatgccgtatatgactacaaccaaatccgggaaatcaattacacattaccaaacactgatttcggtgatgcagagatctgtattctcacatctggaagcaacaatgctttatggaaatttactgttaagtcggaaggcagcgaaagagtttgtgagagatggattaacatatttgatgagcagatatttaacagaatataa

SEQ ID NO: 16169 - DNA, 477 bp, Escherichia coli
atgtctggaaaaaatccattctggaattatgattataatgcagcacaacgcaacagagagatagtagattcatatcaacaggctaatgaggccagactgaactctcagcaagctcagtttgaagcatctatggctaatgacagggttagtagaatacaggtgcagttgaataatacaatcaacagtcataaaaaggctattgctgattatgagcagcgtctggaagaacaaaaagcaatttcttttaaattgatcatgaaggtaaatatatttgagagaacgttaaatcgccttcaagagcaatggcctgaaaaaaaagaaagcatcttagacgaaattcagcaccagaaagattactgttcggttgaagaatacaaagagaaatggtggaaatgggtcaatgatggtggccttacaccagaagctaattgcttaaaattcccttacccagagcgcgagataaagaacaagacataa

SEQ ID NO: 16170 - DNA, 435 bp, Escherichia coli
atgaccatcgtttctaatcctcggtatgttgtacagctaatcgtccttccaaaatatcttatgagcaatattgctcccagtgaagttattaaaggaaaaatagataaatcagaaatgatctatatgtatattatttacgacactgtaggtttaacatacaagaacagctttcctgatgatgaaaaagccgctattctggaatgctataagttgaactacagtaatattcccatttacaaggcagaagtagccaaattcaaagacggctcacccgataaactcaaggacatatccccataccaaaaaattgaagattctaatgaggaatacgacaaccttcacgacgaggaaaaagtgaaattattcgaatatttagagaaagagcatggtgtagaaaatatctctccagttaagctaagaagaccgagaccttaa

SEQ ID NO: 16171 - DNA, 282 bp, Escherichia coli
atgaaaataacaagcgaaaatattttttatgttagtggtaatgctaaagaagctgtaatttcaagatatttttatttttcacttgaagataatgtatcatcttatgatgacgatagtgactattttatgttgtataaatatatttccttttcttatagtgaatgcaacagattagatgcttttattcattcattaatatcaaaaagtgatcttaattttattcgagcactagaggattatacggcttatagatccagaaaagattttaaagttattttgtaa

SEQ ID NO: 16172 - DNA, 243 bp, Escherichia coli
atggaaaataaaaaatgtaaaaagatgatctcaataaaaacaatactcatgaagaaaaaactatggatgaaatttacgtttttaccttgtttttctacctgttatctgcgtgatgataaccatcatcagtggaaaactgtgttatttctattgggtgttttttggataaatatcgtaaaaaaagtaatgttaagtcagagaggtttgtatgaaaataacaagcgaaaatattttttatgttag

SEQ ID NO: 16173 - DNA, 924 bp, Escherichia coli
gtgataccggcggaccggacgtggcgtccacggctgcaaagcaaaccgaaggtggacgggccacagagcgccattgtcaccggtcctgcgggagaggaaatcttctgcgacgaacacggacgtgtgcgagtgcagtttcactgggacaggtataacccggcaacggaggcgagttcgtgctgggtgagggtgtcacaggcgtgggcggggccgggtttcggcaatctggcgataccgcgggtgggccaggaggtgattgttgatttcctgaacggagacccggaccagccggtggtcatggggcggacgtaccatgaagataaccgctccccgggtgacctgccgggaacgaagacgcagatgaccatccggtcaaaaacctataaaggaagcggatttaacgagctgcggtttgaagacgccaccagtaatgagcaggtgtatatccatgcgcagaagaacatggatacggaggtgctcaacgaccggacaacggatgtgaaacatgaccatacggaaaccatcggtaacgaccagaagataacggtggggttggggcagacggtgaatgtggggagcaaaaaggaaggtggtcatgaccagaaagtgacagtggcgaatgaccagaccattacggtacaaaacgatcagcggctggatgttacccacgatcgtcacaaggatgtagggaacgatcaaatcagtaagataataggaaaagataccgaagaagtcgtgaaatcccaggatattaaagttggagaagattacagcctgacagttaccaacagcctcaccattaaagtcggtgaatgcttactgaaaatgaataaggacggtactatcattctcaatggtaaaagtatccagattgaaggaaaagataaaataaatattttcggcgcagatattgatctggattaa

SEQ ID NO: 16174 - DNA, 672 bp, Escherichia coli; identical to SEQ ID NO: 4505

SEQ ID NO: 16175 - DNA, 372 bp, Escherichia coli; identical to SEQ ID NO: 4506

SEQ ID NO: 16176 - DNA, 432 bp, Escherichia coli; identical to SEQ ID NO: 9330

SEQ ID NO: 16177 - DNA, 1059 bp, Escherichia coli
atgcttaatactgtaaaaatatccagttgtgagttaatcaacgccgactgcctggaatttatccggtcgttacccgaaaattctgttgacctgatagtcacggacccgccgtactttaaagtgaagcctgagggctgggataaccagtggaagggcgacgatgattacctgaagtggctggaccagtgtctggcgcagttctggcgggtgctgaaacctgccggaagtctttacctgttctgtggtcatcgcctggcatctgatatcgaaatcatgatgcgtgaacgcttcagtgtgctgaaccatattatctgggcaaagccgtccggacgctggaacgggtgcaacaaggaaagcctgcgggcgtatttccccgccacagagcgcattctgttcgcggaacattatcaggggccgtatcgtccgaaagatgccgggtatgaggcgaagggcagggcactgaaacagcatgtgatggccccgctgattgcttactttcgtgatgcgcgcgctgccctggggataacggcaaaacagatagtggatgccacaggaaagaaaaacatggtgtcgcactggttcagtgccagtcagtggcagctgccgaacgaaagtgattatctgaaattacaggcgctgtttgcccgggtggcagaagagaagcatcagcggggtgaactggaaaagccccaccaccagctgctggagacgtatacttcactgaaccggcagtatgcggaactgcagagtgaatataagcatctgcggcggtattttggcgtgacggcgcaggtgccgtacacggatgtgtggacgcataaaccggtgcagtactatcccgggaaacatccgtgcgaaaaaccggcagaaatgctgcagcagataatcagtgcgagcagtcgtccgggtgacctggttgcagatttcttcatggggtcgggttcgacagtcaaagccgcgatggcgctggggcgtcgtgctacaggcgttgagctggagactgaacgttttgaacagacggtcagggaagttcaggatttagccagtcagaacggatga

SEQ ID NO: 16178 - DNA, 1026 bp, Escherichia coli
atgaccgaacagcgcaaaggctatgagaactttgtttatcagaacggcgtttacgatctcggcaccaaaggtgatatgcgacgtaacgaacgtaacctgatgtggaacctcgatccctacattcaaacgcactggcagctcacctcagccctggggctggacgccggggcgcgctatagctcggtatggtttgattccaacgatcgttatgttgtaggtaaaaatggtgatgatagcggcgaagcgagctatcacaagtggcttccggcggcagcgctgaagtatgccatgacgccgcagtggaacgtttacctctctgccgggaggggatttgaaacgccgaccattaacgagctgtcctatcgtcccgatggtcagtccgggcttaactttgctctgcaaccggccactaacaccaccgttgaagcaggcagtaaatggcaggtgggcaccgggatggcgagcctgagcgtcttcaatacggacacgaaaaatgaaattgtcgttgccgccagcgacaatggccgtacgtcctatcagaacgcgggcaagacgcgccgccgcggggtcgaactgggatgggatcagcaatttgcgcccgcctggcgcgccaaactggcgtggacgctgctggatgcgacctaccgtgaaaacgccggcgatgctattcagagcggcaatcggatcccggggattgcacgtaatagcgcctatgcctcctttggctgggtgccggaagagggatggtacgctggcgctgaagtccgctatatgagcgatattcaggtcaacgatgccaatagcgagcaggctccagcctatacggtgacggcactgaataccggctataaatatgtgctagataactggaccgtcgacctctatacgcgcgttgataacctgtttgataagcgctacgtcggctctgttatcgtcaacgagagcaacggacgctattatgaaccggcgccgggccgtaactatggcgttgggctatcggtcagctatcagtttgattcgctgtaa

SEQ ID NO: 16179 - DNA, 876 bp, Escherichia coli
atggtgacaaagagagtgcaacggatgatgttcgcggcggcggcgtgcattccgctgctgctgggcagcgcgccgctttatgcgcagacgagtgcggtgcagcaaaagctggcggcgctggagaaaagcagcggagggcggctgggcgtcgcgctcatcgataccgcagataatacgcaggtgctttatcgcggtgatgaacgctttccaatgtgcagtaccagtaaagttatggcggccgcggcggtgcttaagcagagtgaaacgcaaaagcagctgcttaatcagcctgtcgagatcaagcctgccgatctggttaactacaatccgattgccgaaaaacacgtcaacggcacaatgacgctggcagaactgagcgcggccgcgttgcagtacagcgacaataccgccatgaacaaattgattgcccagctcggtggcccgggaggcgtgacggcttttgcccgcgcgatcggcgatgagacgtttcgtctggatcgcactgaacctacgctgaataccgccattcccggcgacccgagagacaccaccacgccgcgggcgatggcgcagacgttgcgtcagcttacgctgggtcatgcgctgggcgaaacccagcgggcgcagttggtgacgtggctcaaaggcaatacgaccggcgcagccagcattcgggccggcttaccgacgtcgtggactgtgggtgataagaccggcagcggcggctacggcaccaccaatgatattgcggtgatctggccgcagggtcgtgcgccgctggttctggtgacctattttacccagccgcaacagaacgcagagagccgccgcgatgtgctggcttcagcggcgagaatcatcgccgaagggctgtaa

SEQ ID NO: 16180 - DNA, 201 bp, Escherichia coli
atggaaatcaatgagtggtttgacaaaataaacaatcttccattagagaaaagcaaatggtgttccttggggactttttatcgagcattcattgaacggtccaacttactcactgatgagttattcccccacataagtatctcattagaaaagtcatcctttcagttatatatcatttctatctttattattacatattga

SEQ ID NO: 16181 - DNA, 1467 bp, Escherichia coli
atggcgatttttcatctggattttaaaattgtgaaacgaagcgaaggcatgacttctgttgcgaaagctgcctaccatgcccgtacacgtattacggatgatcgcattggagaaacatttgatttcagccacagaactgatctacatggtcatattatattagcccctctttccacacctgctcatattattgaaagctcctcagcactctggaatgaagttgaaagagtggaacgccagaacaatggtcaaacagcccgttattttgatgtcgctataccagtagaactcaacaacgatgacaagaaaaaattggttgccgaatactgccaaaagaactttgttgataaaggaatgattgctgatatcgttttccatgatttagacagtaagaacccacatgctcacgtcatgttaaccctgaaaaccattggtcccgaaggcttcggtaaaaaagacagaagctggaatgataagaagataatgatccaatggcgtgagtcatgggccacgatgtcaaacagctaccttgaggctgcagggagtgaagaacgtatcgatcaccgttctctcaggacacaatgtgctgatgcccttgctcacgcagaagaagcattcagtgccgaagaaaaagcattctggcttgccaaagcaacggaaacaaaccgcccagcaatgcaacgtgttcatcgtgctaaatggaatgacgaagagtctcaggaacagcgagctactgaacaagctcaacgcgatcatcaaattgaagaggccaagaaggtctacaccacattcagtgagctaccactggaaatcgttgttgatgtcagaagctttacgattacacatcttgctgaacccgaagagattgttcttccagactacccggcaacagtagaacagcagccgattgtggcaacagcaactacaagcagaagaccagcagcaaaatcttaccgtgatcccaataaggtcagtaaagtaaatgtttcagggaagaaatcccctgttctggttgcgcctgaaccaaatacatccactcaattgaaaaccccatctcttcaaaacaccagagcgatgaaccgcgctcctatgaagagtaggaaacagaccaagccccgccagaatggtttatttaagcgtttcacactactgatagtaggatatataagagagaaatttatatgggccagaaggaaacccgataccattgatgctgaccatgataagcgtatcgcagagaactatatctatgatgaagtgctgggtgtcaatgttccacgctcggagtttgaaagacgcgccatatttaacaatggtgactataaattaaaacctgatgaaatcaagcgtttcccaagccgtcctaatcaggaacagccggaagtcaatagaagcatagatctcacaccttcaatgccaccagaacacatgaggcaaggaagcgcgccaaaactgagtccaccgtaa

SEQ ID NO: 16182 - DNA, 159 bp, Escherichia coli
atgtttttggttagtaattactatcacatgcgttgcactattttatttttatggcaatcaaatttaatctatgcggcaaaaacactttatttggatagttttactgctaagtgcgtagatcttatctatagacattatttcattgcattgacaaactga

SEQ ID NO: 16183 - DNA, 132 bp, Escherichia coli; identical to SEQ ID NO: 6019

SEQ ID NO: 16184 - DNA, 534 bp, Escherichia coli; identical to SEQ ID NO: 5124

SEQ ID NO: 16185 - DNA, 177 bp, Escherichia coli
atggctgattttggttcaactaaatataacgccagttttgaagaatggcatgaactgttaatggattatgcagagttacgcggtggaagtgccgctgatgctgaagcatggcgtgatgattatgaagcagggaaaacaccggtcgaagcatattgtgatgagtggggcgatgaatga

SEQ ID NO: 16186 - DNA, 309 bp, Escherichia coli
atggagtttagaaaatctagatatgaagacggaacatattttcaggaatttactttttgggaaaatgcaacacttagagcattatttgaatatcaaaagttactggatttaggattgattgaaaaaccaaaaacagatcaagaattttgtgatattctgggaaagataatggggaatataaaagtggtcggtgatttaccttttgcagagtatgagttggaacaatttgatacatcatcaatatctatcgacttgataaagctggtattaaaccagccgttatcaaaaataattagcattccagaataa

SEQ ID NO: 16187 - DNA, 129 bp, Escherichia coli; identical to SEQ ID NO: 9233

SEQ ID NO: 16188 - DNA, 378 bp, Escherichia coli
atgaaaaacgaaactgaagaaggttctgtaacaaataataacgagggaagttttaatggaaccaatattgaagatggaaacaaaaaatcagatctcgggattaaaaaagagaaaaaacaaatggataaaaatatgaataagcatggacgtttaagaagcgtgacagtatcggaaaagaaatttcttgatgatgcagtgtgtgaggcaatgaaagtgaaaggtaagaatcttaccaaagaagagagaagaaaagttctgggtgttgctcgtgaacaaatatgttctcagcgtaaagctaatcagattaaaagtgaaagaactaaagcaagacatgctgcagtgtttgaatggaaacgccctgattcttttcgtcgctaa

SEQ ID NO: 16189 - DNA, 309 bp, Escherichia coli
atgcaggtgcgccagcgcgatgttgctgcgctcgatgcaaaatactcgagggaattagccgatgcgagagctgaaaatgaaactcttcgcgctgacgttgccgctggtcgtaagcgcctgcggatcaacgccacctgtccaggctccgtgcgtgaagcccccaccacctccggcgtggataatgcaaccggcccccaactggcagacaccgttacacgggattatttcaccctcagagagcggctgatgacgatgcacaagcaactggaaggggcacaggactatatccgcactcagtgcctgaaataa

SEQ ID NO: 16190 - DNA, 156 bp, Escherichia coli
atgaagcagcaaaaggcgatgctaatcgccctgatcgtcatctgtttaaccgtcattgtgacggcactggtaacgaggaaagacctctgcgaggtacgaatccgaaccggccagacggaggtcgctgtcttcacagcttacgaacctgaggagtaa

SEQ ID NO: 16191 - DNA, 702 bp, Escherichia coli
gtgctggaagtcagctacctgcgtaaatcctatggcgatcgtctgctgattgactccctgagcttctcgatcccgaaaggagcgatcgtcgggatcatcggtccgaacggtgcgggtaaatcgacgctgttccgtatgatctctggtcaggaacagccggacagcggcaccatcactttgggtgaaacggtgaaactggcatcggttgatcagttccgtgactcaatggataacagcaaaaccgtttgggaagaagtttccggcgggctggatatcatgaagatcggcaacaccgagatgccaagccgtgcctacgttggccgctttaactttaaaggggttgatcagggtaaacgcgttggcgaactctccggcggtgagcgcggtcgtctgcatctggcgaagctgctgcaagttggcggcaacatgctgctgctcgacgaaccaaccaacgacctggatatcgaaaccctgcgcgcgctggaaaacgccctgctggagttcccgggctgtgcgatggttatctcgcacgaccgttggttcctcgaccgtatcgccacgcacatcctggactaccaggatgaaggtaaagttgagttcttcgaaggtaactttaccgagtacgaagagtacaaaaaacgcacgctgggcgcagacgcgctggagccgaagcgtatcaagtacaagcgtattgcgaagtaa

SEQ ID NO: 16192 - DNA, 252 bp, Escherichia coli
atgtcttttacatttgataagtctgctccattcccacaaaaattttgggtggacagtattactggaaccgagtcaaaaatttttagcacctcaggaatgctcaatcgcggaggagtaaaaatacttgcccaggaattccacacacaggagctaaattacggggcttatcacaaactagagttgataatggatgcaacccaaattgatgaactgatcgttgccctacaaaagctaaaagaaaagatgtcataa

SEQ ID NO: 16193 - DNA, 297 bp, Escherichia coli
atggaaaaatatgaactgaaaaaataccgacttaaaacactggaaggcgaaacattgcttcagcgtatagcccgaaatgttgcctggtatgccatacgactctctctgcatcgccatcttgttaacgggtatccctcgtcaacgctgttgttcatcaatatcaaagataaagaaaaagccgcagaacacattcggtggatggaactggcgcagggacaagctcttgatattgagtatggcgatgagatcgactacagcaaagctcaaccgctgcgccacgtaatttttagggggtga

SEQ ID NO: 16194 - DNA, 423 bp, Escherichia coli
atgaaaatcaagcatgagcacatcgaatcagtgttgtttgccctggcagccgaaaaagggcaggcatgggtagccaatgcaattactgaagaatatctgcgccaggggggcggcgaattgcccctggttccaggcaaggactggaacaatcagcagaatatctatcaccgttggttgaaaggtgaaacgaaagcgcaaagggaaaaaattcagaaactgatccctgcggttctggcaattcttccgcgcgagctgcgtcaccgactctgcatcttcgataccctggaacgccgtgcattactggcggcgcaggaagcgttgagtacggcaattgatgcgcatgatgatgcagtccaggccgtttaccggaaagcgcatttcagcggcggcggttcgtccggcgattctgttgttgttcattaa

SEQ ID NO: 16195 - DNA, 306 bp, Escherichia coli
atgacaattactcagagtattgacccgctagaaacgaataatgctgtattttgtctggcgtatgaattgtctgtacaggcatcaacaatggcaaaggaaagagagctaactccaaggcaggcacgtctcgcactggaactcgccagccgggtatcagtagcaaaaaaaatcgcaccagccgtaatggcacaaaacctggctgatgcaattacagatctcaggtcactacaaccatacaattatcatgtcgaagaggcattagaaaaattaatcgctgctgccgacgccatcgttgatgaactgtaa

SEQ ID NO: 16196 - DNA, 234 bp, Escherichia coli
atgcctattcaatctcaacacaaaaatattgattatctttccgccagattagaggctaccgcgcttgttcttgaagaacttgttaaacttcttacgccagagcagcgtgaaaaactgaatctggcaattgccgggcgttgcccgggcgtgaaaaatgcatctctcaggaatagaaattctcccgcatatcaattattacagttcatcaacgatggcgtcggcagcagcgattaa

SEQ ID NO: 16197 - DNA, 171 bp, Escherichia coli
atgactaagaaaataaaatgtgcttaccacctttgcaaaaaagacgttgaagaaagtaaagctattgaaagaatgcttcacttcatgcacgggactttatcaaaagacgaaccgagaaaatattgcagtgcagcttgtgccgaaaaagaccagatggcacacgaactttaa

SEQ ID NO: 16198 - DNA, 1053 bp, Escherichia coli
atgaacgaattaactcaacaagaaaatattaactctaatgttgcggttttcagccctcagtctctggctgcaattcagacgttttctcaggtaatggcttccggcatggctactgtaccggaacacctccgaggaaatccatcagactgcatggccatcaccatgcaggcgatgcagtggcaaatgaatccttatgcagtagctcagaaaactttcgttgtgaatggtgtgctcggatatgaagcgcaactggttaatgccgtaatcagtactcgtgggccgctaaccgggcgtattgaatatgactggttcgggccgtgggaaaaaattatcgggaaatttgaaatcaggaagaacgacaaagggaaagaatatcgtgtacctggctggaagctggccgatgaaaacggaatcggagttcgcgtccaggcaacactacgcggagagagcaaaccacgcgtactggagttacttctggcgcaggccagaacacgtaactcaacgttatgggccgatgatcctcgtcagcagcttgcctatctggcactgaaacgctgggcgcgcctttattgccctgaagtgattcttggagtgtacaccagggacgaactggacgaacaacaggaaaaaatcattaatccggttcaggaacataaaaacacatccgcctgccgtgcggaacgtgaaacaacaattattgagcaggatgccggggaaaactggatcagtgctttccgtgaacgtattgagcaggcacaaagcaccggagaaacaacagcacttcggcaggaagtggaagagcataaaaatacacttggcgctctctatacggaacttaaaggaaaagtggttcagcgtcatcaccgtctcaatgctattgcccgtattgagaagatgataaatgacctgccttcatcaggtgatccggaagcagaacaaaaatttactgctctggaaaatacgctgaatgctgcacgaccacatctgggagaattatatgaggcgtataaaacgacactgacagatatgaaaccagaatatatcggctcctga

SEQ ID NO: 16199 - DNA, 546 bp, Escherichia coli
gtgctgttctttagtggctttggcgcggcggtgggatgctgcgtaggtggcttcctcggtgactggctgggaacccgcaaagcgtacgtttgtagcctgctggcctcgcagctgctgattattccggtatttgcgattggcggcgcaaacgtctgggtgctcggtctgttactgttcttccagcaaatgcttggacaagggatcgccgggatcttaccgaaactgattggcggttatttcgataccgaccagcgtgcagcgggcctgggctttacctacaacgtcggcgcattgggcggtgcactggccccaatcatcggcgcgttgatcgctcaacgtctggatttgggtactgcgctggcatcgctctcgttcagtctgacatttgtggtgatcctgctgattggtctggatatgccttcccgcgttcaacgttggctgcgcccggaagcattgcgtactcatgacgctatcgacggcaaaccatttagcggtgccgtgccatttggccgcgccaaaaacgatttagtcaaaaccaaaagttaa

SEQ ID NO: 16200 - DNA, 954 bp, Escherichia coli
atgaatggtgaatattttgtacgcctcgcattacatactctgaaatgcactcaaaaagatttagcaagccacttaggtgtttcctcaacacaaattagcaaatggaaaaaaggggaacacatgtctgctgatatggaaaaaaagttcagaaatattacacaaataggagattattctcctcaactagttgaatggacgggctcagtcgagaatgctgagaaatgggatcggcttatccattttcttgctcaacgagctatggaggatgctgaaacgggttatataacacgacctcttactgacgaagatggctttttggttgaagaaacaattgatgtattaaagcgaataggttttcctacacctcttccctttcctgaaggacttaatattgacgacgataatgctgacgaagaagaggctttttgggagatattagagagcaatgctcattgttctgtaattaatgatatttatcatgctctgaatgatgtttatggtttctacatagcatatgttgatgagttgattcaggacgacgatttagatgtctattcaagcgaagccatcaatattcagagttcattgatatcacttgctgcatgcaaaattgaaattgatactcctgttgcatcaaactttaaagaatttcgttatagagttaaaaaagactacgaaaattggttgaatcaactcaagatgatggcattcagggcgggaatcccgttaagagccgaacttctggaaatggtttataacaccgctgaccaacttagcgttgcagcagaagccgaaagtttcgatttcaataaatctagcattcatccagatatatacatgaacgagatcctcactggcatgagaataattcaccaagtgcttccggtaataatgcaaaagttagaaattacagatttcaaactagatgaaacagatttatgcctgggcaaatag

SEQ ID NO: 16201 - DNA, 1074 bp, Escherichia coli
atgattaaacaactattgtctattgctgccgtggtctcccccctgttacttagcccatcggtaaaggcagcaacaggtgattgtgaaggaacaggtgaatttcggacagatgcttctgaggactggacacaagataataatgttgccggcaaagattatgtggtaaagaattcagctattgggagcaattacaccttaaactgctcttgtccggcaggtagtaaagttaacctgtattatacagtaacatctgcattaataactcaaggtaaagaacgagatttctatcgactgaattctaatctggatattaaaacccaaataaacgacattcctggtaatccatctgttatggttccaagcaattcatatacaccgcttagagacggtactggtacttaccatgctaacaaaaacaatagtgtgtgcatggccgacccagccaatgttcggggatcagacttttctattggtaaaaatacaacgattacactatacgtcactacgccatttttgggtgaactgaatatccctgaaacacatattgcttcagtccaggctgcgtggacaagtacttctgctgcaccacgtcccattaaggatattgctaaaatctatattcaaggccgaattacggtacctcaaagttgcaaaataaatcaaggtgataccattaatgtaaatcttggatttattagcgctcaacgtttcaccctacaaaatcagatgccaacaggttacactccagtaagctttgatattacctatgattgcggtgatatgtcccaaattaacaatagcttgtatatgaaaattgaaggttcagattatgttaatcaatataatttagtcgcaagacgccgtgaaagtgatgatgtccctgatgttggtatccgccttatggatgtgactaaagggcaagtagatgttccatttaatccaggcatcattctgctagataaaaccggagcaggaacaacacactttcaggcttatcctgtaaatctggtcggtggagtattgtcgaccggaccttttaaagcatcagctaccattacggttattgtcaggtaa

SEQ ID NO: 16202 - DNA, 882 bp, Escherichia coli
gtgagtggacaattcacagattattccgatcgcgatagtgatagggcgatcttttttagtattagtctgcctctggatcgttggttacctaatgcacaagctacgtttcgtgtcactgatgaaaaataccgttcaactcaatatgagactggcattaccggttctttccttgatgacaaccgattaagttacagctttaaacaacgaatggaccaggaaaataataataacggcagtacgctttctggtagttaccgctctgcttatggcactgttaacgccaactatgattacacgtcaaacagtcgccagttcagctatggtctttcaggtggaattgtcgcacacccccatggggtgactctctcacaaccgctgggtaatacatttgccgtaattgatacccagggtgcatctaatattcgggttaaaaattaccctggtattgccaccgattactttggttacgccgtcatcccttatttaacggcttatcaggaaaatcgtattgccttagacactactacaatgccggataatgtagatgtccaggagactgcaaagattgtcgtgccaggacagggcgccgctgtcgttgcaaattttaatgcccaaaccggtcacagagtgctattagcactaactgacgtccaaggtaagcccattccttttggtgctgttgccagtaatgaaggccaattccaacaaagtattgtcgatgaagctggagttatttatctctccggcattaataaaaaaccacaaacctggaaggttcgctggggaagtggaataaaccaacaatgccagtttacgtttagtctgaacgatagcgcgaacatcactacccccattattcgtgattcggcaaagtgtctttag

SEQ ID NO: 16203 - DNA, 1638 bp, Escherichia coli
atgaaaaccaaaataaaatgcatctctttacctgttatgaaaccactttcctgctggttaaaaacagtattacctgttcttattactggtggagttctgtcccctcttcatgccattgctgacaattactattttgatccctcattgctggaaacaacaaagagtggtcaaaaggcaagcgatttatctgctttctccggtaaaaatactcatagtcccggtgattatgatgttgagatcgttatcaataaaaaaaaggtgactcagagaaaaatcacttttgctatagatgataatggagaaattcgcccacagcttaccgttggtcttttacgcgaattgggttttaaagttgacgaaataaattcactaaatactcttgatgataacgccctgataacagatttatccaaaaccgtacctggaagcaaaacaaagatagacctcaaccatagcactctcatcctggacattccacaaattgccctgcggcgtgacccttctggttatgttgatcccgccaggtgggatcatggtattccagtattgtttaccaattacagttttagtggctcgaacagttattatagtaacagcgaaaagaatgaaaggttttatctcaatatgcaaaatggagtcaatatcggcccatggcggttgcgtaattactccacgtggacacatagcagtaatgagactcgctgggatagtattaatagttggttgcagcgtgatattaagagtttaaagtcgcaattagtgcttggtgaaagcgccactgatggcacaattttttccagcgttcagtttacgggtgccagaatttattctgacgagaacatgttaccgaatagcttacgaggttttgcaccgattatccgtgggattgccaataccagcgcaatagtcaccatccgccagaatggctatacaatttatcaaagcaatgtcccggcgggagcattcgaaatcaacgatctctatccatcctcatttagcggtgatttagacgttacaattgaagaagccgatggtaccgttcgccaatttactcagccgttttcagcacttcctgttatgcaacggccaggccatcttttatatagcatgacagcagggcgatttcgtgcagacccgtcatctaatagtaaagaaccagagttcatcgaaggcacagcattttacggccttactaatattttcactctttatggtggggtaactggatccaaggattatcaagcagcagcattaggcatcggtagcacattgagtattttgggcgcactttccgttgatttaacttatgccaaaacgaagttagaaaataaagaaaaatttaccggggaaggtttacgttttcaatatattaaagatatacccgaaacaggaacaagcctttctcttagttactcgcgctattccaactcaggtttttttacctttgccgacgcaaaccaacgtgatattaatgtaaacaatcgccaacgcagcgaagcgattttcaacgttaaccaaacgctgactgataatctcagtttttatatttcaggtgcacaacgagaatactggggagcagaacaaaatgatcgcaattattctgccggactgaacggctatcttgccggcatcagctaa

SEQ ID NO: 16204 - DNA, 693 bp, Escherichia coli
atgaagattaaaaaatcgtttgcaatactttttctattagctggctgggtgaaccagagtctggctggtggaatccttctggaaagaacgcgtgtagtttatgatggtagtaaaaaagaagctgcattgccggtcactaatcgaagtgataaactaccatatttattacaatcgtgggttgaaaatatctatgactcttctcgcggcccttttattattacccctccgctatttcgtcttgatgccggagacaactcttcattgcgtatcattaaaaccgatggcaatctaccgagagataaagaatcacttttttatattaacgtccgtgcaattcctgctgtcgataaaaaagaaacgcaagataagaacctacttactttagtatttaaaacacgcattaaactcttttacagaccatcagaaatggacggtagaccttcagatgcctataaaggcctaaaattctcaaggaagaacaaccaactggagatatataatccttcggcatattacgttgttttttcaggactggctgtaggaaaaaccgactttaccgataaaatagaatttattgcaccgggtgaacataagcaattaccattgccattagtttcagaaaacatcgtgaaatgggcagccattaatgactatggcggtaatacggatacatatacatctactttgccataa

SEQ ID NO: 16205 - DNA, 573 bp, Escherichia coli
atgagtaaagtagctaagacagttgccgctggcctgctggcgctttttgccggtagcgcctccgcaaccgatggaaaaattgaattcacgggtgaaattcttggcactgtctgtgaatttgcgaatggtgatacagtttatgttgaattaggtcactatgccgctaatcagtttaagtttaaaggggataaatcccctacgatccctttcactattccgttgaaaaactgcccaacggtagcctgggatcacattgatggtactaaagatgcgtctttccagttatggctggaaacgcgtaacggagcaactaccggtgataacaatgagttagttgctgttacaagtatggacccagataccgcggctacaggtgttggtattcggattgaaaaagatgctcaaacacctatggcaattaacaaacttagtgttccaaagatatctttcccaattactggttccacgatgaatttagatttagcggcttactatgtgtcaaccacaacagccgataaaatcaaacccggtgaagctaatgctactgtggatgtaactcttgattatcgttga

SEQ ID NO: 16206 - DNA, 786 bp, Escherichia coli
atgggggtaattggttttgtgctgacggcgctgtggatcaagttgattcataacccgacagatcacccacgtatgtctgcggaagagctgaagtttatctcagaaaatggcgcggtggtcgatatggaccacaaaaagccgggcagtgtggcagcaagcggtcccaagctgcattacatcaagcaattgctctctaaccgcatgatgctgggcgtatttttcggacaatattttatcaacaccatcacctggttcttcctcacctggttcccaatttatctggtgcaggaaaaaggcatgtcgattctgaaagtgggtctggtcgcctcgattccggcactgtgtggctttgcgggcggcgtgctgggaggtgtcttctcggattatctgatcaaacgcggtttgtccctgaccctggcacgtaagctaccgattgtgctgggaatgttgctggcttccaccatcatcttatgtaactacaccaacaacaccacgctggtggtcatgctgatggcgctggctttctttggcaaaggatttggtgcgctgggctggccagtgatttctgacaccgcgccgaaagagattgttggcctctgcggcggcgtctttaacgtctttggcaatgttgcctccattgtcactccactggtgattggctatctggtaagtgaactgcactccttcaatgcagcactggttttcgtgggatgttcagcgctgatggcgatggtctgctacctcttcgtagttggcgacattaaacgtatggaattgcagaaataa

SEQ ID NO: 16207 - DNA, 540 bp, Escherichia coli
atgaaaggcttcccaattgcacatatttttcacccttcaatcccgccaatgcacgcagtggttaacaatcacaacagaaatattgattattggacggtaaaaagaaagtttgcagaaattgtctccaccaatgacgttaataaaatatacagtataagtaatgaactgcggagagtattatctgcaattactgcattgaatttctatcaaggcgatgttccttctgtcatgattcgaatccaaccggaaaatatgagtccattcatcatagatatttctacaggagaacatgacgattatatcatacaaacattagatgtaggcacttttgcaccttttggcgaacaatgtacttgctcagccgtcaataaaaaagagctggagtgtattaaggagacgatttctaagtattgtgcaaaattcacccgaaaagaagccatcttacccccccctacgtactttaataaaacctccattccttcagattgttggcaaattctctttttttcacccgatcattttaataatgatttttattga

SEQ ID NO: 16208 - DNA, 2037 bp, Escherichia coli
atggaaaaagtttatgataccactagaattagtaatcttgctaacgacccgaaacagttttgttcttttttttgtgagtacataaaaagagatgatattagtatagatatcgccttggatgtgctgagaatatcttccatctattataatagattttcagttcagactgaagttgagtataacaatacattcaaaaaatgtattaatgagctagtaaactcatttcctgataacattgaactaatctctgagttcgagagtcaatgtaaaattatgcatgatataaataattctttctttgcggctacaaaatgtgctggtatttggcgtaaaaatacaaaaaaatcacatgcattaatacttaatctcatcatgttttgtgagatgtttttatcatcattatcatccttggttgtggtcaatgatcctaaaaaaatgaagaggatttttccattatttatcgtttctgaaaatattaatattcatgctgaacctgatatcgaatattttcgagttatcgatagggcatttgatgaggtagccaattacaccggaagaatattttcttatttacggactcatgggccattgaaactaacttcttgtgcgaataaacaaaccttgctttcaatgggagggtaccttaatgagtggaatgtttttgactcattaagcagagtaagagactttttcagactaagtagtgcagtatttacaaaattggataataatatttactctcttgaggttgatagtttttgtttataccgagattatgagattgcaagaaatagactaatgatgagagcgtcacatctatatagcgaagttcatgaatttagtaacaaacattttcatctaaatagttgggtaaaggatcatatgccatcttacttaaattctgatggcatttttagctcatttcatctaagcgagttggaaaatatgtctcctgatgaccttcatgaagaatatgggaatatatcattatttaattgggtgcacgcttatcaatgtttagtcgagttatctaaagaagaaatgagcaaaagattttcatcgacaaaacctatacccctacagttggatcgctggctgatcataaaaagccgtgagagttggttatcattctttcaacgtaaggggattgcagcagatgcagcaaaaaaactgatagattattttaccttcaattcaaaatcacatgatcttaatgattgcccatttattccctgtatggacggtttatgcttaatgcctgcattaatagcaaatagctcagtgactcgctctctaatgtcattatttggttccaaaaaaatttctcaagcaagtaaagggcgatttcatgagcaacaatttataaaacaagttcgtgatgcggggattaaagcttctccaattgatgctcatgctaattatcagtgcgattgcgtgattctcctggatgattgtttgatttttacagaactaaaatcaaatggtcaaccaatatattatggtaagtactatcagcaagtgtgtaacatcgttggagatagctcattaatacatgatcataataataaatttatgcgttcttattttcaacaaataaatcgaatttctgaacattatcttaatcatcttgatgtgatcattaaagaattcgaactaccatcaacatggcaacccaaaggtgtgtataagcttattgttactacaactatgctcggtgggaaatatcatgtggatgatacatatgtagcggacaaatatgcattatctagtttttttcaacgaatacctggagtgatatatcaaacaaatgaaaatggaaaaatggcgaaaaatatcattgatgggtttgagtgttgcgaaggggaaatcactatcgataagtttatagattatctttcctctttgcccagtattaatgctgtacgtaaaaatataaaaaaattaacttatagtgttcgatttaatgaaaaattagtccatcacccttattatgattcttgggcttttggcccatatattcgtaagggaaatgattag

SEQ ID NO: 16209 - DNA, 1344 bp, Escherichia coli
atgcatgtgcttaacattctctgggtggtattcggcattggtctgatgctggtactgaatttgaagttcaaaatcaattcaatggtggctttgttggtggcggcgctgtccgtcgggatgctggcgggcatggatttgatgtcgctgctgcacaccatgaaagcgggcttcggcaacacgctgggggaactggctatcatcgtggtgttcggtgcggtcatcggtaaattgatggtcgactccggcgcggctcaccagatagcacatacgctgctggcgcgtctcggtctgcgctatgtacagctgtcggtgattatcatcggcctgattttcggtctggcgatgttctatgaagtggcctttatcatgttagcgccgctggttattgttattgccgccgaagctaaaattccgttcctgaaactggcgatcccggcagtagcagctgccactaccgcacattcactgttcccaccgcagccgggtccggtggcgctggtgaatgcttatggcgcagatatggggatggtttatatctatggcgtactggtgacgatcccaagtgtcatctgcgcaggtctgatcctgccgaagttcctcggcaatcttgagcgcccaacgccgtctttcctgaaagcggatcaaccggttgatatgaataatctgccctctttcggcgtttcgattctggtgccgctgatcccagcgatcattatgatctccaccaccatcgccaatatctggctggtaaaagatacccctgcgtgggaagtggttaactttatcggttcctcgccgattgcaatgtttattgcgatggtggttgcattcgtactctttggcaccgcgcgtggtcatgacatgcagtgggtgatgaacgcttttgaaagcgcggtgaaaagcattgcaatggtgattctgatcatcggtgcgggtggcgtgctgaagcagaccatcatcgacaccggcattggcgacaccatcggcatgttgatgtcccacggcaatatctcgccctacatcatggcatggctgatcactgtgctaattcgtctggcgacgggtcagggtgtcgtttcggcgatgaccgctgccgggattatcagtgctgcaatccttgatccagcaaccggtcagctggttggcgtgaatccggcgctgctggtgctggcgacggctgcgggttccaacaccctcacgcacattaacgatgcatctttctggttgttcaaaggatactttgacctgtcagtaaaagacacgttgaaaacctggggtctgctggagctggtcaactccgtggttgggctgattattgtgctgattattagcgtggtagcgtaa

SEQ ID NO: 16210 - DNA, 1404 bp, Escherichia coli
atggggagtaagtgggaaaaggttcgtcttggtgaccactgtataaaaattggaagcggagctacacctaaaggcggtagtagcgtttatactgataccggtaatacatattttatccgcagccagaatatttataatgatggatttaatactaatgggttggtttttattaatgatgaggctgctttcaagcttaaaaatgttgaggttcaggaaaatgatgttttaatcaacataactggtgactccgttgcacgcgtatgtatcgctccaggttcttttttacctgcacgagtaaaccaacatgttgctataattcgccccaaaagtaatgcgtttgactctcgttttcttagatattttttgtcaagcccccatcaacaagctctgctattaacacttgctagtgctggcgcaacaagacatgcgctaaccaaaggaatgattgaggacttacaagtcccaaaaccgcctctaaatatacaaatgtcgattgcaaatatattagaattttttgataagaagattgaaaaaaataattatcaaaaccaaacactcgaacaaatgtcccaaactctcttcaaatcttggtttgtggattttgatccagtgattgataacgctctggatgcaggaaaccccatcccggaagccctgcaaactcgcgccgaattacgtcaaaaagtacgtaatagtacagatttcaaaccactttcggcggaaatccgctcgcttttcccaagtgaatttgaagagacggagttaggttgggtgccaaagggctggaatataaccctggcaggcgaagagtttattgttaaaggtggttcaacaccaagtacggccaatgaagatttttggaataatggaactattcactggacttcaccaaaagatttgacgggaaatgaaagcaaagttttgcttgatacggctaaaaagattacgccattagggctagcaaaaatatcatcagggcttttacctatagatacagtattgatgtcatcacgagctcctattggatatttagcgctcaataaagttccaatggctataaatcaaggatatattgcaattccttctgctaaacatttatcaccagagtataccatctactggcttgacaatattatggatgatatcaaaggtatagccggaggaacgacttttgcagaaataagtaaatcagcttttaaaacaattaaattacttattccttcttcggatataattaccgagttttcacgtataactcgcaaccactttgataaggttgttcaaaatacaaaagagatagactcactaaccaacctccgcgacaccctgctcccgaaactcatctccggtgagctatccctggaagatcttccggatctcactaccgatacagaagctgcataa

SEQ ID NO: 16211 - DNA, 1623 bp, Escherichia coli
atgaaaaacagtaaggcattttaccgcagcgcattagcaacagctattgttatggctctttctgcaccagcattcgctgctgataaagcggtatcaactgattcggttacgctgaataaagataagacgactctggatcaagatgttgttattaacaatacagcagacaaacagattacagccgtaacaattaatgcggcaaatgaagacctgaatgttacttttgctggtcatgatattactgctgaatcaacggcagacaaaaaattcgttgaaggtgtaaaagttagcggtgacaaaaatgttgtgattaatgctacaggctccaccatcacagctcaaggtgaaggcacctatgtccggactgcaatggtcatttcttcaacaggcgatgttgttgttaatggcggtaactttgttgcaaaaaatgaaaaaggtagtgcgacagggatatctctggaagggaccaaaggaaataatgtaacgctcaatggcacaaccataaatgctcaaggtaaaaatgattcgagcaacagctctacggcaatttttgctcaaaagggtagcgtattggatgggcatggctttagcggtgatgcaaccgacaacattacccttgctggctcaaatattattaatggccggattgaaacaatacttattgctcaggagaatacgggaactcatacagtcaacctgaatattaaggatggctcagtaattggggcggctaataataaacaaacaatttatgcctctgcttcggcacaaggagcaggttcagcaacgcaaaatttaaatttatctgtcgccgattcaaccatctactctgatatccgtgccctttctgcaagcgagaattcagccggtaccacaacaaatgtaaacatgaacgttgcccgctcttactgggaaggtaatgcttatgcttatgcttatgctgatgctggtgctggtgctggtgctggtgctgatgacgataaagcgagtagtaatctgaatataaatctttccgatggctcagtctggaaaggaaatgttgcgggtaatacgactactggcagcaccggtactacagaaaaccagtcagcaaccgtaagtctgtctgattccacctggaaaggtaacgtgggtgacggtctggatggtggtgcgcgagtcacgctgaaaaactccagctggactggtgatgtcagcaacgccaaaacggctgttgttctgacggatggttctgtgtggaatggtgccattaacagcaatcctgttgcaggaagtcatgcagtggctgctgccggcagcactgatgcaggtactttgactccatctacgttagccggtcagacagttgcacttgccggctccacctggaatgttaccggtgattcttctgttcttggcgtcactgctgtaaacagcaccatcagtgtgaaagatgcctccctgacaactcaggttctttctgcaaaagacagcaatcttgttgttgatgcaggtacaaccaatgctctgaatgtcacagggaaagctaccggtaatgtgacagtttataacgctggtaccgtagacttgaaagatgcaaaaacagcattcattacattactgttggtgaaggcagtgacctga

SEQ ID NO: 16212 - DNA, 3984 bp, Escherichia coli
atgaataaaatatatcggctaaagtggaacaggtcccgtaactgttggagcgtctgctcggagctggggagtagagtaaaaggaaaaaagtcccgggctgttttaattagcgcgataagtttatattcatctctggcactgtctaaagatgtcgctgtaagtgaagattacacagctgtattcggtaaagataaccagactattgattaccgtatttcagtgaccgacaatgccaatctggtaatcgatgcgacagattcttctcgtccacgtctgactctcgcgtctggtggtgggctggatatcactggagggaaggtgcatatcaatggctcgcttaactttttgttaaaagggacggggtttctgaacgtcgccaatgctggcagcgagttatatgctgatgatttatatgagtcttactctaatattacccacgatagaggctattttaatgtctccaacggcggcaaaatccatgttaagggcaccagccgtctgacctatttgcagggaaatgtcagcggtgaaggcagccaggtaaattctaaaaccttctttatgggcgtttacggcagttacggtggcaatcagtacctgtcagttaataacggcggtgaagttaatgccagtgagaaaattagcctgggttattatgatcaaaactccgatacaacacttgctgtttcggaaggtggtaaaatctctgcgccgactattagtttaagcaccaactctgagttagcgttaggggcacaggaaggaagtgctgcgaaggctgcagggattattgatgccgaaaaaattgagtttgtgtgggcaaagacatccgagaagaaaatcaccttaaaccacacggataaaaacgcgactatttccgcggatattgtcagtggcagcgagggcctgggctatatcaatgcgctcaatggcacgacttacttaaccggggataactccgcctttagcggtaaagtcaaaattgagcaaaatggcgctttagggatcacccaaaatataggtacagcagaaatcaccaaccgcgggaaattacacctgaaggctgacgatagcatgacctttgccaataagatttctggcaacggtacaataagtatcgacagtgggacagtggcgctgaccggcaataactatgcattcagcggatatattgatgttgcttccgatgctgttgcggttatttctgaagacaagaacatcggccgtgcagaactggatgttgatggcaaattgctaattaatgccaacaaagattgggtatttgataacgatcttgaaggtagaggcattgttgaaataaacatggggaatcacgaattctccttcgatgagtttgcctatacagactggttccagggttcactggcgttccagaacacgacatttaacctggaaaagaatgctgagtttctgcagagaggcgggatcactgcgggtcagggaagccaggtaacagtgggtaagggcgctcactccattagcactttgggattctccggcggaacggttgattttggtgccctggcagctggtgcacagatgacagaagggacagtcaacgttagtaaaacgctggatttgcgtggcgagggtgtgattcaggtttctgacagtgacgttgtccgctctgtatctcgtgatattgactctgcgttatcgctcactgaagtcgatgatggtaacagcaccattaagttggttgatgcgcaaggtgcggaagttctgggcgatgcgggcaatctgcaattgcaggataaaaatgggcaaatcctctccagcagcgcccaacgtgatattcagcagaatgggcaaaaagcggccgtcggcacttacgactatcgtctgacgagtggggtaaacaatgacggtctgtatatcggttacggcctgacccagcttgatttacacgctaccgacagcgatgctctggtgctgagctctaacggtaaaagcgagaatgccgccgatctcagcgcaaagattaccggcagtggtgacctggcattcagcagccagaagggtcagaccgtatcgctttctaacaaagacaacgactataccggtgttaccgatctgcgcagtgggacgcttttgttgaataacgataacgtgttgggtaatacccatgaactgcgtctggcggcagagactgaactggatatgaatggtcacagccagaccgtgggcacgctcaatggcagcgccgattcactgctgagcttaaatggcggcagtctgacggttaccaacgggggcacttcaaccggttcgttaacggggagcggagagctgaatattcagggcggcacgctggacatcgcgggcgataacagcaacctgacggcgaatgtgaacattgctaattcggctaatgtcctggtaagtcatgcgcagggattgggtagcgcaaacgttgagaacaacggtaccctggcgttgaataatagcgctgaaaaaagagcggctgcgtctgtgaattacaccctgggcggcaatctgaccaacaacggtacgctgatgaccggaatgtcaggacagcaagctggcaatgtgttagtggtgaaggggaactaccacggtaataacggtcaactagtaatgaatacggtactgaatggcgatgactcagtaaccgataaattggttgtcgagggcgatactagcggcacgactgccgttacggtgaataacgctggcggtacaggtgcgaaaacccttaacggtatcgaacttatccatgttgacggtaagtctgagggcgaatttgttcaggctgggcgtatcgttgcgggggcatatgactacactctcgcgcgtggacaaggggcaaatagtggtaactggtatctgaccagcggcagtgattctcctgaactgcagccggagccagacccgatgccgaatccggagccaaacccgaatccagagccgaaccctaacccgacacctacgccgggtccggatctgaatgtggataatgacctgcgaccggaggcgggtagctacattgcgaaccttgcagcagcgaataccatgttcaccacgcgtctgcatgagcgtctgggtaatacgtactataccgacatggtgacgggtgagcagaaacaaaccactatgtggatgcgccatgaaggtggtcataataaatggcgtgatggcagcggccagctgaaaacccaaagcaatcgctatgttctgcaactgggaggcgatatcgcgcagtggagccaaaacggcagcgacagctggcatgttggggtcatggcgggatatggcaacagcgacagcaaaaccatttcctcgcgaactggttatcgtgctaaagcgagtgtgaacggatatagcacaggcctctatgccacctggtatgccgatgacgagtcgcgtaatggcgcgtatctcgacagttgggcgcagtacagctggtttgataacacagtgaaaggggatgacttacaaagtgaatcctataaatcaaaaggatttaccgcttcactggaagctggatacaaacacaaattagctgaatttaatggcagccagggaacgcgtaatgaatggtatgttcagccgcaagcacaggttacctggatgggagtcaaagccgataagcaccgcgaaagcaacggaaccctcgttcatagcaacggtgatggcaatgttcaaacccgacttggcgtaaaaacctggctgaagagccaccataaaatggatgacgataaatcccgcgagttccagccgtttgtagaagtgaactggctgcataacagtaaggatttcagcaccagtatggatggcgtgtccgtcactcaggatggagcccgaaatattgctgagataaaaaccggggtggaaggacagctaaatgccaacctgaatgtctgggggaatgtgggcgttcaggttgccgataggggatataatgacacctctgcaatggttggcattaagtggcaattctga

SEQ ID NO: 16213 - DNA, 702 bp, Escherichia coli
atgaagtacaaaaaactaataattttaatttcattattattttcaaacttttcatttagccaatcaaatgggataaatctggcggcaactcgcgtagtctttgattcaaaagaagctaacgcatccttgaaaataaataataattctgaagaaaaaacatggcttttaagatcatgggtttcagcttataatagtgacgaaaaagttaaaaactttataatcacacctcctttatatcgaattgacccaacagaaagttttcaattacgcataaataaaattaatgttcatctaccagaagatagagagtctgtatttagaattaatgttttagctataccctctaattataataatgacacacaagaaaaaagagattcgggattacagtttgcaataaacaatcgtattaaacttatctatcgaccacataatttgaatgtacctaagaaagtcgatgatgcttataaagctttgatattttcgaaatcagaaaatcaagttcatgttaaaaacccaacaccatattacattaccatgaatgatgtgaaaattaatgaaaaaagtattacatctatcaaggattttatggtttcgccattttcaacattaatcattccggaaaaaaacgctaaaacaattagctattctacgatcaatgattatggcgggaaaactccgactcaaaacattaagctttaa

SEQ ID NO: 16214 - DNA, 168 bp, Escherichia coli
atgattgtcaaagtgttttctttaataattattttttatttgtcgcgttttgttagtgataatgctatcgattttttatgtttaattatcaccttacattcattgcctgtctttttaaagtacaattctctgctaagaatacgacgtattaaatttatggcaatataa

SEQ ID NO: 16215 - DNA, 159 bp, Escherichia coli
atgttacaacctcctccggcatctttaacgtggtcgaatcccctcaataataatccgctgcacgttttcaaccgtttgattgaaaaatacctcatcgcgcaacgtcgcgcctgtcaccgcctccacctgaggggcgaaatcggcgtaatgaggcgttaa

SEQ ID NO: 16216 - DNA, 378 bp, Escherichia coli
atgaaaacattacccgatacacacgtacgggaggcatcgcgctgctcgtctcccgtcaccatctggcagacactgctgtcccgactgctggaccagcattacggcctcacgctgaatgacacaccgttcgctgatgaacgtgtgattgagcagcatattgaggccggcatttcactgtgcgatgcagtaaactttctcgttgaaaaatacgccctggtacgtaccgaccagccgggattcagcgcctgtagctgctctcagttaatcaacagtatcgatatcctccgggcccgccgggcaacaggtctgatgacccgcagccactacagaacggtaaataacattacccggggtaagcatccggaggcgaaacgatga

SEQ ID NO: 16217 - DNA, 846 bp, Escherichia coli
atgtcaaacatcacaatctcccgtccggaagtggtcaccgggcatacggacgttatctgctccaccagtatccgacacgttgtgacggtacggaatgcagcactgcaacaaaccgaaacgcttatccggcaactgactgaaatctcagtactgacaaaaagcattggtggtaaaagcgcccggaactgggcggtgaaacaggattttcgctgtggctgctggctgatggagaaaccggaaaccgcaatgaaagccatcacacgcaatcttgatcgcgaactctggcgtgacctgatgcaacgttccgggatgctgtcattaatggatgcgcaggcccgtgatacatggtaccggtcactggagtacgataattttccggaaatcagtgaagcgaacattctgagcacatttgaacaactgcaccagaataaggatgaggtgtttgagcgaggggtgatcaatattttcaggggactgagctggaattacaaaaacaattcaccctgtaaatttggcagtaaaattatcgtcaacaatctggtgaggtgggacagatggggatttcatctgaacaacggcccacaggccgatcgacttgccgacctggaaagaatgctgcatctgttcagcggcaaaccgatccccgacaaccgggaaaacatcactattcgtctggatgatcacatccagtctgttcagggtaaagaggactatgaagatgagatgttcagcatcagatactttaagaagggctccgcgcatatcacgttcagaaaaccagaactggttgatcggctaaatgacatcgttgcgaagcattatccggggcaactatcagccatctga

SEQ ID NO: 16218 - DNA, 3120 bp, Escherichia coli
atgttacattctgtttacaaaaagaaaaacaagaaacacttcggaagttccccctcccgtttaacgcttttgtcaaccataattggcgctttattatcaaatgcttatgcctcgacctcttctgagaaaatcgaccttaatggaaaagaacaaatcgagacatctgatatagatattgatacaggagtaaaaattggcaaaaatggatatgccgtatccgttcaaaactcaggaaaattaactactgaagggaatgttaaactatctacagctggaaaaaatgcgtttgccatctccgtttcaaataactcatccctgaacattactaatggtgcatctattgcaacaagcggtaaaaatgctactggtatcaatattgaaaactcaaacggcttaatcgaagggggcaatattataacctctggtgataatgccagaggcgttgttatttctggtgaaaacagtcagttctcaattaataattcaatcattacaactcaaggagagaacagcaatgcgtttctgtggggagctcgcggtatctcagccgaaaacaaaggctctgtttctgtaaataacacccaaattaaaactgaaggttcaggggcttttggcgtatttacatcatctggtgcttcagttgagctaacggatacaaaaatcactacatctggtaaaaatgcctatggattacgttcagatggagtgaattctacaatcactgcctcaaaagggcttcagattgttacttccggcaacctggcccatgcagtatcttctttgaataatggacatataaatcttggaacaggcgcttccattgaaactaagggagagcaagctgacgcaatccaaatcaccggaaataacggtggaacattaactggtgatagtgtttcaatccaaaccactggctatgctgcgaaagggatatacgttgcagccatctctccttctgattcatcccctgaatcacatgcagttctaacaggatcatcaacgatctatacatcgggtgacgattcaattgccatatgggggcatggaaaaaccgcccatattgacgttgaaaaggttgccattagcaccattggtaattatgcatacggtataaatgcacaaaataatgctactgtaaatgccagtacagctcagattaccactggtggaagcaggtcatatggtgtggtagcaaatgatggtggaaaaatcacgcttggttccggaagctcgattacaacaagtggtgattactctcatgggttgtgggcaagtgatagtaatacagttattcagggtgaaaacatatctgtacacacatcgggcaacggtgcagattcagtagttgcgaccgacaatggtaaagctgaattcagccagaaagatggggtaataattagtgaaaaaggagccaactttagtgcatccgggggtactattgttgccacattagacggcagtcaaatcatcaacagcggtactttcattttgtcagccagtaatgatactggctccggtggaaacatttccgttacaaccaagaatgtttcatttaatggcgatatcagagcagatgaaaagagctctgccaacctttctttagagaattcacgctggacgggaaacgcatcaaatggtggtactgttaatttagacgagaacagtatctggaagatggcaggtaattcagatattgctcaacttagcaacaatggttctgtatacctggggcaaaacgcccaaaacacgctaacaataaatggtgattataccagtaagaatggtcacatctatttttcaggcattctcggcgatgatgactcatcagtagataaattaattgttaaagggaatacagatggtaaaacctttgtcactgtaaaagatatcggaggcgttggtgcacagacacttaatggtattgagattatccatgttgatggtcaatcaaacggagagtttatccagagcaaccgtatagctgcaggcgcttatgactacacgctgggacgtggtcagggaagcaacagtggtaactggtatctgaccagcggcaagaacacgccggacccggaaccaacaccgacgcctgacccggactctaaacctgaacctgtgccgggtggttatgataatgacctgcgtccggaagctggctcctatacggcaaatatggctgcagcaaacaccatgttcgtgacccgtcttcatgaacgtctggggccgatgcagtacaccgatgtcatgaccggtgagacgaaaaataccagcatgtggatgcgccacgaagggggacataaccgctggcgtgatggtacaggccagctgaaaacacagggtaaccgttatgttgttcagttggggggagacattgcacaatggggctggggagaaactgaccgctggcaccttggcgttatggctggttacggtaacgagcataacaacacggactctgtgcgcaccggataccgctcaaaaggcagtgtgaacggatacagcacaggtctgtatgccacctggtttgccaacgatgaaacacataacggggcttatcttgatacgtgggcacagtacggctggtttgacaaccatgtgaaaggtgacggactgccgggcgagtcctggaagtcaaaaggcctgactgcttcgctggaaactggttatacctggaaagcaggtgagttcagcggcaatcatggcagcctgaatgaatggtatgttcagcctcaggcacaggttgtctggatgggtgtaaaagcagatgaacaccgtgaaagcaacggtacccgtgttgagagcaccggtgacggtaacgtccgtacccgtctgggtgtgaaaacctggattaagggacacaacagaatggacgacggtaaatcccgtgagttccgtccgttcgtggaggtgaactggctgcacgacacccgtgagtttggtacccgcatgaacggcgtgacggtacatcaggatggtgcacgtaatatcggagaggtaaaagcaggtgttgaagggcagataaatgaccgtctgaatctgtggggtaatgtgggtgttcaggctggtgacaaggggtacagcgacacctcagccatgctgggtgtgaagtacactttctga

SEQ ID NO: 16219 - DNA, 741 bp, Escherichia coli
atgagctttaatgaaacattctcaattataatgcctgcacacaatgcagaagcgactatagaacatagtataaattcagttctcaaccaaactgatcaagattttcaattaattatagttaatgatgcatcgaccgacaacactcaaaaaataattgataggtataatgatgagagaattataaaattagtcaataaggtgaatttgggagtggcagaaacacggaatcgtgcactaaatattgctaccggacggtatattgcatttttggatagtgatgatgtttggagaataaataagttagaacgtcagagaagagaatttaataacggtcacttattagtttgctctgcttattgcattatggataatgatggaactgtaaatgacaaaaaaatattttttaaagaaaatatagaatataaggatatgttgaaatcaaatttcattgcaaatttgactggatgttatgatagtcagatgctaggtaagttttatcaaaaaaaaataggtcatgaagattatgttatgtggttggatattctcagtgtggctaaagtagcatattgcataccagaatgtttggctgtataccgtatagcgaatcattcggtttcatcaaataaaattcgagcaatgcattggcaatttaatatttatagacagtatttaaaaatgaatattgcgaaagcagtttattactttattcattatgcaattaatgcgttgaaaaaaaggtag

SEQ ID NO: 16220 - DNA, 1233 bp, Escherichia coli
atgaagataaacaaaaatagcgtgttcattagttgtatattcatattaaatccattggcttctgttttatgtgcattaagattaataaacaaaaaaaatttaggctttgttattgtattaatttcatttttgactttctttataacgttgtatacaccaccttatcaggatttgtataggcgatatatatccacatattacatatataattcacaaacaaccctatgggaagctctggagaataaagttgattttttattctatttatgttcatggttgttttttaagcttgatttccctttttacctgattccggcattatttagttcaatcagctgctattgtatcctttctgcagcgaatgatttttggcggtatgataaaaaaaatgttagtcgttacattctgttaattgcctttctatgcattttttcaattatagatgttattatgatagcatctacattgagatttggttttgctgttgctctgttcataaaaggcattagcacttattatgtcgtcggtaaaaagaaaagagcatatgctttttttctcttagcaacttcttgtcatgtatcgatgttgttgcctgtgtgtgtaatatttgtcaataaatttataaagatatcgtggttaaattgttttattttaagtattctaatgtacataagtagcatttatttagttccatttatattgaatattgtaaatttgggacatttaaatgagtatgtaaccactggctatataaatactgaatatgcaaatttatcaaataatactaatacacttttagttcaggcctataagtggttgatattttttgtgtttttgattttttttattaaaagtaggacgttatttcctgaatttgataattatgtcagattgcttattgtctttagcgcaatgacggcgttatcaataacaatatttaatcgatattttattggccttatatcaccactggtatttattgggggggtgagttgtcttagccgtttaaaattcaaacctttatttcagatgataattattataacattactttttaatattcttgtcattaacatctttttggaaagacgacaaattataatggcaaaaatgtggcgtggtttatacctacctccagcattttctttattgtatagcatgagagatttcgataattatcttaaagaaatagacaacgatggtaattgggtgaaaaatagactcgctgaatga

SEQ ID NO: 16221 - DNA, 840 bp, Escherichia coli
ttgaataataaaataattgcctgcatggtagtgaaaaatgaagttgatataattgagtatacacttgagcaggcattaaaatgggctgattatattcttgttttagataataatagtactgatggtactactgatgtgataaaaaaaatgagtgaacttgagcaaaaaattattttttgggggaactatggaggaccatttagggattcgctcagagcagttatctataatgactattattatttatgtaatgatggtgattggtggtgtagattagatgctgatgaggtctatattgacgatcctagggaatttctatcatctatggatgaaagcatagaccatgtttattcagcaagctttcagtattatcttactaaaagaatgttagaaaatgaagaacagaatactagaaaatttgatatatctaattataaatattttaaatgtaattggtctgaaataagatttatcaaaataaaaaaatcaacaatatggccgctacacttcgcaaatccactttttctgttaaagcctagttcgcgtagaattagacttaaacattttcagtataggaattcaaagcaaatggaaaaaagatttagagatcgttcgccggaagaagggaaaaatttattttcgcatgaattaaaacaaaataaagtttgggatgaaacagatttaacatatgatcagggattatatgaatatgatgatgaaatattgcccaagataaaaaaaatatctacttttagaaaagttattttttcttgtattgtttatggtttgaaaaaattttctttagaaagaattttactgcccacaaaagaaaaagtgtaa

SEQ ID NO: 16222 - DNA, 1434 bp, Escherichia coli
atggttagtgtgacgagttattcatatccaacggaaacagagaatgataatagccagtttcaaaatcagagtctaagggagagtatcgacaaaagtctcgaggataatatttataaatttaatatgatagaacaaagcggcctgctcgataattatagggcaaggtttaaagatgacactttccgtgacatttttcgaagttttttattatatcttttagattcatttcatatctatcggcatgatattagtgataaattggttccttattttcatgttacgcctgaatcggagaatgcgaattataagacatggattgccgttacaggcatgaatagctatataaaaattgagcagaccggaagtaataaatttaaaatcactgatctgtatcgtgagttcaatggcgaaacaaagtgttatgataaaaagtgtagggatatggattttagtggtcgaaatgtaaaagagtttataaggttattatcagatcacgatcaatttgaaaaagatcaaatctcagaattaacagttgctgcaaatgctcttaagctggaagttgctaaaaataactataacatgaaatactcttttgatacgcaaaccgaacgccgaatgatagagcttataagggaacaaaaagatttaattccagaaaagcatttacatcaatcatctataaaaaaccttaagcttcatgaggatgaatttagctcactccttgcagatgcagaaagacaagttctggagggaagttcatttgttttatgttgtggtgaaaaaataaacggcactataagtaaattacttcgcaaaaaaattacagattcatcacattccaccaaatctctcactctctctgaatctccttcttatgatgtttatgaggaaatattcaagaaagctgttttcacacctgatgaatgtcatctggtgagagattctttagtgcaggatggtataaagccagaaaaaatagcaaaaattatttcttgtttatccagtcgtaccgggattggaaatttgttttatgcctgttcacaagcatttcatgttgctaatgataacgctgcacttgatgtgcgtcgcgccgctacgtctgttggcgatacaatagatgtttgtccgagttttgttgctttgaatggtagaaattaccatcagcatgtcgatttctcagaatacggattcacacaaaccctttgcgtcttaggagcagtcgtaaataacgcgaatgacacctttgatgttgctaattatatctataccactaaaggcgaaaatattatccataacgacgctgaagatgattctccctatgtacattccgatgagagttatagacacaaagatgattattgggcaagggataatgatatccgcaatctaaggagaaatttctcaggcaatattacgattgcaacctacaaataa

SEQ ID NO: 16223 - DNA, 879 bp, Escherichia coli
atggacgtattccgtacggctatcggctgtctcctttgccgtgagccggcccgccgcatcacgtgccagccggtggcggatttcaccgccccggtccccggtgaacaccacttccgtgaccgcgttcagcgcgttgtagcggtacgactggcggcagccgtccggatttatctgctccgccagacggtccagcacatcatggcggaaccggtagctttctccgttctcgttcgtgagcgtgaccagacgcccgtaagcatcgtacccgaacgccgtcctgcgccccgtcgcgtccgtccggctgcgcacccggccctgcccgtcccgctgccagcgcgttatcctccccatcgggctggtgtacttcaccagcctgcccgccgcgtccgactggtaattcaccgtgcggccgtccgccagtatcacctccgtcaggtggccgctgtcgtcatacccgtagcgcgtgctgtggctctgcgcgtctgtcatccgtatcagccgcgagcgttcgtcgtagaaccaggccgtctgcgagccggaacagtccgtgtgccgcatgagctgtccgtcttcgttccactgaaggtatttattccccccacgggcatcggttatctgcaccacctgaccgtggcggtcatactgataccgggtgttctgctgcagcgggtcggttacggcaagaagattgccgcgttcatcgtactcacagcaccagctgttccccgccgcgtccacctccgtttccggctggtgccacaccgggtgccactgtgtctgtgccacccgccccagcgggtcgtgcgtctccgtgatatgcccctgccggtcatacacatagcgccatttgccgccctgcgcatcggtcattcccagtaa

SEQ ID NO: 16224 - DNA, 714 bp, Escherichia coli
atgctgataaatctgtgtcacccgccggggatgcgccgccagttcataatgcagacggatgcacggacgctgctgttcaccgctgatttgcgtgatgcgccccagctcgtcgtagtacagattcagacagttgctgttgcggtcgcccagcattttcagccgctggcgctgcgggtgatgcgggtcggcctcaaacagaaaaaactgcccgtcatcgctgctgataagccagtgcccctgctcaccccgccgtactgccagtccttcgccggggctgtaaaacccgctccccggcagcacggcctccatatccagacgtcgtcccatgcccgacacaaaggtcatacagttttcgtcagcagtacccggcgtgcgctcgaggctgacttcatacatcacgctccagccctgcccgaacatcccttccgtgcggtcgtcacgactgctgtacacgcgctgccagtccagcggaaagtggcccggcagactgaaatcgaagtcatcgtcatccgccagatatttggctccggtggcggcattgaccggatgcggaagggcactgatggccttctgcgtcatcacccccatcccgacactggcagcaaaacaggcgattttagaaagcattttgcccgggcgaagaaacatcagcgccacggttgccaccagggttatctgcgacctgccgcttctgatatccctgaccaccagtaa

SEQ ID NO: 16225 - DNA, 258 bp, Escherichia coli
atgaacgccttatccggcctacaaaatcttgtaaattcaatatattgcaccatcttcccaggcctgataagcgtagcgcatcaggcagtcataagtaaaaaagggcgatcttccgaccgccctttttcttatttaatgtgtttacgcgtttttcagaacttcgctaacaatctcaaccgcttctttctcgatctgcttgcgatgctcttcaccgaggaagctttcgcaataaatcttgtacgcgtcttccgtgcctga

SEQ ID NO: 16226 - DNA, 153 bp, Escherichia coli
atgctgacgaaatatgcccttgtggcagtcatagtgctgtgtttaacggtgctgggatttacgcttctggtcggagactcgctgtgtgagtttacggtgaaggaacgtaatattgagtttaaggctgttctcgtttacgaaccgaaggagtag

SEQ ID NO: 16227 - DNA, 684 bp, Escherichia coli
atgaacttgaagaagatttttttcagtgctgtcactgtttcagttctctgcgcattaacgggatgtgactacattgaagaaggcaagccagaaagtagtttattgaaacaacaagaagaacataacaataaaattgtgctactcgaaaaacaacaagcacagctaaagagtcaactggaaactattcaaaaacaacaaactggcataataaacagtacaaagactttgactcacgtaattaaatccgttaaagaccaacaaaatacctttatttttaccgagtttaacccggcaaaaacgaagtatttcattctgaacaatggttcggtggctttagcgggccgagtgttatctattgacgcaacagagaatggcagtgttattcatatttcactggtcaacttattaagtataccgatctcaaacattggttttaatgcgacatggggtggggaaaaacctgtcgatgccaaagagtttgcccggtggcaacaattacttttcaacacaccaatgaaatccacattgaaattattaccaggtcaatggcaagacattaatttgaccctgaagggtgtatcgccaaataacctgggatatctgaagttagccatcaatatggaaaatattcagtttgacaatcttccctctgctgaaaatcggcagaaaagaagcaaaaaataa

SEQ ID NO: 16228 - DNA, 492 bp, Escherichia coli
atgaaacgactacttttggccgggctgggaggagtgctgcttacgggcagtgctcttgccggtgaaacgaaaagtgtgccattgacattgcgcgtactggtagacccaccacctccttgtaccgtaaaaggcagtaacgtcgattttggtgatgtgatcatcaaaaaaatcaatggtactgaatatcgcaaagatgcaggttataccctgaactgtgccaatagcctgagcgatgaccttcagatgcagtttaagggcacaaccaccacgatcaatggcgaaacggtgttaagcacgggaattaccgggtttggcattcgtattgaaaatgcagcagataactctctgtttgcgattggcgacaatacctggactccatttagcgtcagtagccagccacaactaaaagcagtgccagtcaaacagaatggcgtgacgctgacaggcgcacagtttaacgccagcatgacaatggtggtggattaccaatga

SEQ ID NO: 16229 - DNA, 480 bp, Escherichia coli
atgaaacgactctcgttaattttattatccgctttttgcaccataacgcatgccgcaccggaagatatcaccttcacgggtacgctgatcgaacctccggtctgcaccgtcagcaatggtgatgatattgagatccagtttatcgacgtcattatcgacaatattgacggggttaattaccgcaaagatgttccgtaccagataacgtgtgaccctgatattaccgatgacgcctgggtaatgacgctaacctggaccggtacacagaccaactataacgatgcggcgattcagacggatgtcacgggattagggattgaactccagcaaaacggtcagccctttaagctgaataccccgcttaacgtgacacccgccaacctgccgaagttgaaggccgcacctgtaaaagcttccgatgccacgctgactgacggtaacttttccgcttacgccacattgcaggtggattatcaatga

SEQ ID NO: 16230 - DNA, 546 bp, Escherichia coli
atgaacaaactgaagaaatatcaatgtatcagggtgcaaacctttctgttgggcggtgtgctggtgctggcgagtcattcagcactggcagctaataatttgcatttttacggcaacctgatgagcaaaacctgtactccggtggaacaggctggaacgttggcagaggtacagtttgcgaatattagccacaaagatttgatggagcgcggtcagtccgatcgtgtaccggtggtttttcgcctgaaagattgccgtgggccagcgcagtacagcgtaaaagttactctgaccggaacagaagacagtgggcaaccgggatttctggctctggatgatacctctggtgcacagggcgtaggcattggtatggaaactactgatggtactgctgttgctattaataacacgacgggagtgacctttgtgctgaatgatggcaataacagtcttaatttcagagcatggttacaggcaaaagaggggcgtgatgtaacacctggtaattttaccgcccagttaaccgcaacgtatgagtatatttaa

SEQ ID NO: 16231 - DNA, 864 bp, Escherichia coli
atgaaaataatgcgctggattttgggcctgctgatatcacttttcttcagtacagcagttcaggcgaatgtcattgttgcaacaatgtatacaccgatagggtatgcaagctattctacgaagataacttattatcttgatgttcttacccccgatagcgtcaatcacggtgtttatgagacaccaaataacaccggtttaatcactggatggatacctttgaaaagctggacgggacctggccctgcaccatcattaaaagtcatatcgatgacagcgatatcacaatcatcttgtccggggcttgcagagtatgacagccgtgcgcaaaggacgatgtggacttgttatgaaatacgaatggaagtctggaaggaagactccagcgttcatggctgcccgtggctggtatcgacacatgcagatagcattgatcttattgatcctgctccgggaacctattccggacgcacagtcagtaactcttcttgtccacctataccgttagggccttatgatgtctcctggaatgaaagtcgggttgtgcatgataagacgttagcgctccagtctaccggcgggataattgaaaaaacgctctccacctacctgatgaaagacggcaaactgtgtgacggcagcaaatttggtgatactgacgatcgtggtgcttattgtcgttgggtgtcgcagatgctcaccttcacctcatcgggctgtgacaatgccaaagtgacggtaacaccaaatcgtcaccccattaccgacaaagagcttcatgatatggtgcttcgcgtggataccacctcgcggcaacctattgattctacctgtcgattccagtacgtactgaatatgctgtag

SEQ ID NO: 16232 - DNA, 528 bp, Escherichia coli
atgcagcatttaaaaaatattactgcgggtaatccaaaaactgttgcccaatatcaactgacaaaaaattttgatgttatctggttatggtccgaagagggaaaaaactggtatgaggaagtaagtaattttcaggaagacacgataaagattgtttacgacgagaataatataattgtcggcatcaccagagatgcttcaacgcttaaccctgaaggtttcagcgttgtcgaggttcctgatattacctccaaccgacgtgctgatgactcaggtaaatggatgtttaaggatggtgccgtgattaagcggatttatacggcagatgaacaggagcaacaggcagaatcacaaaaagcagctttactttccgaagttgaatccgtgattttgccgctggaacgcgctgtcaagctgaatatggcgacggatgaggaacgcagccgactggaagcatgggaacgctacagcgttctggtcagtcgtgtggatcctgcaaatcccgaatggccggaaatgccgcaataa

SEQ ID NO: 16233 - DNA, 909 bp, Escherichia coli
atgccgattatcgacctgaaccagctacccgcaccggatgtggtcgaggagctggactttgaaaccattcttgctgaacgcaaggcgacactgatttccctttacccggaagaccagcaggaggcggtcgcccgtgccctgatgctggaatccgagcctctcgtcaaactgctggaggaaaatgcttatcgtgagcttatctggcgtcagcgtgtgaatgaggccgcacgggcggtaatgctggcctgtgccgccggtaatgaccttgatgtgattggtgccaattacaacaccacgcgcctgactatcaccccggcagatgattcgaccattccgccgacaccggcagtgatggaatctgacaccgattatcgtctgcgtattcagcaggcgtttgaaggtttaagcgtcgccgggtcggtgggggcttatcagtatcatggtcgcagtgccgacgggcgtgtcgcggatatttctgtcaccagtccgtctcctgcctgtgtcaccatctctgtgctgtcacgtgaaaataacggcgtcgcatccgaagacctgctggctgtggtgcgtaacgcccttaatggcgaggacgtcaggccggtggccgaccgcgtgaccgtgcagtctgccgccatcgttgaataccagataaacgccacgctttacctttaccctggtcccgaaagcgaacccatccgcgctgccgctgtgaaaaagctggaagcgtatatcacggcacagcaccggctggggcgcgacatccgtctgtctgccatttatgccgctttgcatgtggaaggcgtgcagcgtgtcgaactggctgcaccactggctgacatcgtgctcaacagtacgcaggcgtctttctgtaccgaataccgcgtcgtgaccggaggctcggatgagtga

SEQ ID NO: 16234 - DNA, 918 bp, Escherichia coli
atggattatacgagctatataataggacagcttcaggttgaggatattattgatgcaattaaaggcgttaataatactaatgtcataaaagattatgtgctgcctgtagtattaccaattatatcttctgtgctgagttactttattgcaactaggttgttttatcggcaggagtaccttaaagcacaaagaagaaaggtaagcgttgtaaataaatgtatttatgactacttttctgcaatgacaacgttgttgcaaattaaagggaattattatggtggggtaagtataagtgaaaatcctatcgagagggctttagcttttcctgttgtggttttttctggtgctcctctatcatcagatttaagtgagttggcctgtatattgagtcaaaagggagtagggaataatagagagacagcaaagactactaactggggggatgcttttgctgttagtgatatagcaagaaggtttaacagcctattggctgcattaaatgttaggaatgattttgatgacacctatagaggaatgattattgaatcaacaggttcacctttgcctacgatgcgttttaaaaatgatgatattgttaatgctataggtagtaataaggcagcttattacattgatattactgagcaaataatgattatgatagatgttttgttgcttgatattaatctgttgctcaaagagttgccattgtatgctgaatcgctgtttgacaaaagagtaatgcaagaagattcagggattcttaaattcaatgatttgcacgaacgttttcctctacttatgaaacctgtaacgccaccttcgattaaactcatgtctgattatttggggtacagtgaagatgagatcttacgacgctatccatacccgttctttaatatgcatgattgtgaatga

SEQ ID NO: 16235 - DNA, 948 bp, Escherichia coli
atgaagatatttattagttggtcaggtcaggacagcctggagatagcaaaagtattacgggattggataccgaatgttattcaagtagctgagccgtacgtatcagcggaagatattgataaaggcactcgctgggcgactgatatatcaaaggaacttgatgactcttcttatgggattatttgccttacaaaaaataatattaatgcaccgtggataaattttgaggcgggtgctttaggtaaaaaggttgataagagccgggttagtcctttcttgtttaaaattaaaccatctgagataacaggcccaatattacaattccagtatactcgttcggatgataagaacgatattttgaagttgatgttgtcaataaataatcaagcaggatttttgactgaagaacgcttaactaaagctttcgagcaatggtggccaagtttagagcgtgagttagataacattcaagatattaaccctgtagataaagattccactaaaaaaacaaaaggtgattcgacttctgagatacaaaatctttccaaaattgttgaaagtttgctggatattagccgaacaaatcaccaattattgcgtgatccagcatcattattgccagaagaatatgttagcaaaataataaacagggaagggcgtaaagaaactgttttaaaaattgtagcttctgatttattatccatgcatcattcactaattcgtgtaaaaagaagatttattcgccgtggtattgatgaaacatctaggagcgagttaattgaatcattaaataaaatgataatggattgttctagagtaatcgctcacttagataattattgtggggtttcatcaaacaatatgttcaatagtgcgcttagattgcggaccagaaatttaattgacatgatggatgaggaggatgcagaacgggatgaaatggaataa

SEQ ID NO: 16236 - DNA, 558 bp, Escherichia coli
atgctgacagtgctgttttatgtgctgttgggtttaggcgcagcacacttcatttacgagcgaatcattttgccgtccatccgacttcattatagaaaccaattgtttgcgcttcgtgatgtcgctaggaggaaaatcattgatggaggttccgatacttccatgcaagcggcaacacttgtgcatgactcattgaataacgctatcaatagattgcatttactcacgttgccaaacaaatttcgtgctcaaaagcgtatggcagaaaaccatgcaataaggcagaaaattcggcgtgagatagatgttttcaaacgctgtgatgatagagaagttgttgatgtactgtttaaatccggtcggatacttgaaaatgtactgttattcaatagcttaatgttattgctttacatgtttccatttgtccttgctgtatggttctgtgttagggtcataaagacagcaagtagtttagtacagtgggtcaaaggaagagatttagaggaagctataatgctgcttcctgatactcaggttgaaaaggttgtatacgcataa

SEQ ID NO: 16237 - DNA, 387 bp, Escherichia coli
atggggaagcaaggcaaaggcaaaggcaaaggcaaaggcaacaaaaatcaggttaaggttacgtgggctcaggcgtggcgggatgtaatgataagagccatgtctaatggtcagttgatacctattaccatcagtattattttaatgattgctgcatggaggttaccaaaaactgacttgtccaatttagccttctctattgttgatggctttaaggagcattccttggttggttgggctatctcggtaatagtgggtttggcttggtctgcacatgcgcgaatcatgaggcgctgttttagttccgaggcacagagaatcggtaacgagaaaacaaagtatcaacaaagacagaccactcaagccttgggtacaagtgataaatag

SEQ ID NO: 16238 - DNA, 294 bp, Escherichia coli
atgaatatcgcacagaaattaagagcaataagacaatcggaagggctaactcaagcaaaattcagtgaaatcagcggcatagcgttaggaacgctaaagaattacgaaggaggccatcaagaccctggcatccaagttgtgttgcaggtcaccaatgcacctcagttccaaaaatacacactatggctcatgacagataaaacagcgccggaagcgggacaaatcgcaccggctctcgcgcacagtgggccagagtcaacagaatccaaccactccgcgaaaaggattggctaa

SEQ ID NO: 16239 - DNA, 576 bp, Escherichia coli
atgaaaaaaagcctgcttggtttaaccttcgcttccctgatgttctctgccggttcagcggttgccgccgattacaaaattgacaaagaaggtcagcacgcctttgttaacttccgcatccagcatcttggctatagctggttatatggcacctttaaagatttcgacggtacttttacctttgatgaaaaaaatccggctgccgataaagtgaatgtgacaattaacaccaccagcgtcgatactaatcacgccgaacgcgataaacatcttcgcagtgcagatttcctcaatactgcaaaatatccactggcaacattcacctccaccagcgtgaagaaagacggtgacgacctggatattaccggcgatctgacgctgaatggcgtaaccaaacccgtcacgctggaagcgaaattaattggtcaaggcgacgacccgtggggtggtaaacgtgcaggcttcgaggccgaaggcaaaattaagctcaaggacttcaatatcaaaacagatttaggtccagcttctcaggaagtggatctgattatttcagtggaaggcgtacagcagaagtaa

SEQ ID NO: 16240 - DNA, 1530 bp, Escherichia coli
atgagacgggcaatcagctacatcagattttcaagtgaacgacaactaaaaggggactctgtacgcagacaatctaagctggttactgactggcttgataagaaccctgagttttacttggattcatccttgagctttaaagatttggggaaaagtgcttttagtggtaagcacctgaaaggtggtctaggtgactttctaaccgctatcgagaaagggcttgttaaagctggtgatacgctactaatcgagagtttagaccgtctgtcacgtcaggatattgatattgcttctgagctattacgccgtatcttaagggctggtgtagatgtagtcaccctgtccgatggtgaacattacacacgagaaagtttaaaagacccgttatccctgattaaaagcattctgataatgcagcgggcgcatgaggaaagtctgaggaagtctgagcgtgtccaagctgcatggaaccgtaaaaaagaactcatctccgaaggtatcaaggtatctaggcgttgtcctgcatggttaaggctgaatgatgaccgtcgaacattcactatcatccccgataaagtggaagttgttaaacgagcatttgacctgagattacagggtttaagcttttgggctatcaccagaactttaaacgatgaaggccacttgtcattgaatcaatacacacccaaacaaaaggggtggtctgatactgctgtaaagaaactactcagaaatcgtgctgtgattggatgtttcacacctgctggacgtgaagaagttcagggttactaccccgcaataatcagtgagtcactattctatcgagtacagcaactgaacacagggcaatatggtagggcttctgtatcaagtaatccgctatcagtcaacctgttcaggggtatcatcaaatgttctgagtgtggggctactattgttcttggtggatatgccttaaaacgttttgggatgtacagatgccctaatcgttcagctaacaggtgtagtgcaaaggctatcagtcgtaagcaaacggatgcaactatcctttacatgctcgcattatgcgaccgttttgaaactgaaaatactggcactattgatagccttaaattacagcgtgaagatttgcagcgtaaaatctcaaaaatggcagaactcgctattgaactcgatgacatgacaattatcacagagaaattacgtgatatgaagaatgcgctatcaaaactcaatcatgatatcgaagaggaaacaaagcggataaaggccatcacaactggaagcctcaaagatattgacaggacaacaaaggaagggatgatagagacacagctacttatcaagggcgtactcaaagaaatagttatagatgctgctaaacgtcgctgtaaagtaacttttcacaatggtaagtcaattgacctacctataacagaaaacccctcagaggacgttacagaggctatacagtcgctttctgaagtcactgagaggggtttaatagatgttgatgtagtagcgatttag

SEQ ID NO: 16241 - DNA, 789 bp, Escherichia coli
atgatttactctaatcagattcgttacagtggcaaagatggcatctatttccacttaagagataatgtagatgccttcttaaccttatcagcaactgaaaacatggaatttgacagccctatgcaggtgactacacagaacatgcaatcagggcaaaccgtcacagataatgtgcaaagagcacccagaacaatcactattagtggtgtcgttgtagttggctatgaaggaagcttattattaactcgtcagggtcaattagtagagaacttcatagacactcttgaaagctggagagaccagaagcaaattatttcggtcatctgtaaggatggaattaaaattgatgattccattattacgagttttaaagcttctaaagatgttggtatttcaaatggcctaagaatccagctaacttttcaggaaattaacttcaaagctattgtgggtcagactgatatttcagcagcaactggaaagaccgctactacaaatgatggtggtgtgaccagtaagaagaatgcaggtaacgtgaccactgaacgcaataacgcgcctatgctatcgtgcaaagagctaatgagtattagcgatgtatccggttacgctccagctatcagaaatgatattctcgatgctcagattaagtgcaataaggcttggaagctggactattcagacttaacagaagctgaaaaaaccaacgtcaccaatgctaacagtaacgctggtcgggtagcttcaaagcttaaaaagtactcagtgaaccctaataagagattctaa

SEQ ID NO: 16242 - DNA, 2181 bp, Escherichia coli
atgagcaaattcacagttgatagttttatcgttgagctaggcttcagcgagaacgttgttaagggcttgcaaagagttgaaaaggcagctttgcaatcagcacaaagaattgagcgtaatttgaatagagcgtttaaggtcgataccaagaaacttgacaacaatctgtcaagttctttagggcaacttgaaagaaagtttaataagacctttgataagattgaacagagagcaagaaatactaaagctttccagtttaccacaagatttaatgacgctattaatcccccaaaacaaccgagacagccacgaattagcggcaacagagcaatcacagcagcgcatagtgtgaatatgtctaagcttggtgatattaatccgctgatggctaaaatgtttaaagcacagtattacagcttaagcggtaaggctggcaatattggaagtgaaaagtttaacgctgaacttgcaaaattaaatcaatctcttcgtgaaacgttgaataaactcaggtcacagacaaaggccaccagcattaacaatacaagcgacgcatttaataatcttgcaagcaatgcaattaagttatctggtgcattttactctgtgatgggtgctcttaacgcttacaaggccattatgaatgcaggtcttaaacgagattccgcacagagagccgctaagtttgtacttggtgataaagcatctgaagctgaaacatttatcaggggactggctgacaagacaggtcttaatatctctgaaggtctatcaagctacgctaagtttgcagcaggtgctcagggttctatgtcacaggaacagacacaggagctatttggtaatgcaacggctatgagtcgcttaatggggctttctaacgatgagctaaacggcattttgaaagcttttgagcagatggcttctaagggcaagattcaagctgaagaattacgtggtcagttgggtgaccgtatggctggtgcatttaagctattcgctgaagcattgggtatgactgctacagagcttgataaagcgatgaaagacgggaagattttaagtagtgatactctccctaaagtcgctaaacagatgggcttgatgattgataaagcgggtggttgggctgaagtcgctaagagcactcagacagctttaggtaagttagcaaacaactgggatgatacgatggtgaaaatcttctcaggttcacaggatgagctaaacggcttcttatccagcctgagtaacctgcttagtgaaatggggatgagttcttctatcgctggtgatgctatcggtggacttatcgacatgcttaaagctggtgtagatgacatccgtatctttaacaatcaccttgaaggctggattttacagactaagaagttctattacagccttgatgacactaaacgaaaactacttgatgaagtcggtgatggttttatcaacttcgtcaaaggtcttgctatagcgttatctgcaaagacactattcagtgctactacaggggttatgaacctgacaagagcaatcacaacgttaggtacaagagctaatcaggtggctggtcaggtagctactggtaaaggtggtggaaaactgaaaggtgtagctggtggtgtaggtagtgctcttgcaattggttatgctgatgacggttatgaaacagcgttagcattagcttcaatgattccacaaatcagaggtgtcactcttggtttatatgcattgaagaaagctcttgattttatgaatcaggaagcagtcaaaaacgctaatatgcatccatctggggtaggtgtgggtagtgactttaatcctgtgtattctggtgaccctaataaaccgaatatgattaacgaaggatggggtagaatttttagttcaatgggtgaattgtttaacaatgccacaatgaatattgcaagattcaatcatccagagttaaacaacattaagcaagattcagcattaacgagtgcagatattcagagtctgagggatgaaatctctgctttaagtaagcgtattcaggagcctgtgaaagtttccttgggtggtgaagttgccattaaaccagatgaaaccagctttatgacctttagcagtaatatctacgaccaatatgcagaagctacgctattaagttcatcattcccagaagatgattga

SEQ ID NO: 16243 - DNA, 204 bp, Escherichia coli
atgattgatttaacagaacgctatgaacttattaaagcaattagcgaacgattgaaagaacaacccaacaaaccaaaacgaatcaaatcatccacctctaaacaaaataacagaatcagaaaaattgctaaatggtgtctggatagattaccaagtgattgtcagattgtcggtgaagatggtaattattatctgattagataa

SEQ ID NO: 16244 - DNA, 708 bp, Escherichia coli
atggaaaatctatatattaacggtaaaaagattgatagcttcggtgactggtcaccaacgactgaacatccagctatcactattcagcgtcaagagcatgacaagcgtattaagcttgagcaagaaatccgaatgtcaccaaagcaaattacctttgtgtctcctgagcctcaagaaatgcctgatgtttgcaagggtgaagcattacttgagcttgaaaagaaatattacccactgctgaaagcacagcgtattaaacttgatgacgcttacagcaaagttaccttgatgcaatcagctattgagccgtcagaatttgagattcaggatgaattgtcacagaaaccatttgtctattaccaatatgaagacaatgatggttttggtacttttccagaaaacatcccagccgtgattagtagtcttcctgatggatatcgaattgtgaagatggttaaagcttcaaggggtgctggtcagtttatttacatgaccgataagagcgatgaagaactctgtgaacttgccagacagaacatcttggcatcacgtaacaagcagcttgatagtgctaagttgtgtctcttaagagagcttcaggctatgaaagaccttatttctgcatatgaaacgcagaagaaggttgctatgcaggctgatattgagcagttagtgaagatttctcagaaatacgcaaaggcactttga

SEQ ID NO: 16245 - DNA, 330 bp, Escherichia coli
atgagagaattaaacttcccgctacagattttcgttgataacgacaccgctatgatgattcaggctttcagtgattccggtgtatcaattgactttgacaggctgttaaagctgatggctgataatgcagaaaacatctctgactttattcagtcggtggagtttaacgagcctcgaatgatgctaccaattaccgactcaaacatgaaaggattggttatcgagcaaacgaacaaacacagcgttagccctgaaaaatatctcaaggcagctatagcaattttgtacgctgacaatattttggttacggattcgaaggtggtgcattaa

SEQ ID NO: 16246 - DNA, 210 bp, Escherichia coli
atgaagaaagtattcaccctcaaacttaaaacagataaagccttcaaatattttcgaaatctaattgatgtacataatggatggggtgacattgataatgatgacatctatctgattatgcaatccccatctttcacgttaaaaacctcagtaacaaaaagctggtttagtcaatttcatagtgagatggggttaatagtctcagactaa

SEQ ID NO: 16247 - DNA, 231 bp, Escherichia coli
atgctacctaggtacaaattttataaactggcatcacatctaatcagacaagatacccgctcaaaagaatatgaagatgttacgcttgaccgtaacaagaaaagactaaagccacatcaaattgagcagttacgctatgaattaaagtcactgggtatcgagcttgattatagtgacccgactcaatttaagcgggcttatgaactcattaagaattgggggggagaatga

SEQ ID NO: 16248 - DNA, 177 bp, Escherichia coli
atgcatgattttttcacagcaattattgaatctcatcgttttagctcgttgggctttgcggtatttattgtgctattggtgttttgcgttatgaatcgagtcattacaaaaaagacaaagcttacaattcgacttaaacttcttcgtgttgagatagagatttcaataaataaatag

SEQ ID NO: 16249 - DNA, 933 bp, Escherichia coli
atgtctaaatataacccaaatcagttttataaatttgatgtgcgaatctctcagctttcagaagaaattaacgcagcagcaagattaatttatatggtcatggttcatagctgtgatttctatgaagagaagtacaaagcatattcaccaagtattgaccatctcgcttatatggctggcgtatcaaagagaacagcaatcagagctattgagacacttgagaagcacggtttaattcaggtacaaaagaatcaaggtcgtcaaagtacttatcgtgtattcacactggatgataagccggaattacttgtaagacctacatcacaggaagttgcagcatcagtaagacaaaatgacaccgctaccagtgacaaaatgacaccactaccagtgacaaaatgtcatgggggtagtgacaaaatgtcacccgtgttagataagttattagataaaacattagataataataatatagataagagtaaagatactggacttaatgatgatattaaagaagatgactttctttctttggatgaattaaatgattttctttctatgaatgaatctgaccttgatagtgaagctactaaagagacctctaaaacatctgacttagaggaagataaaatctctgatgtgattgctagtagtgaccataaaaacacacagtgccccgccactgatgatgagatggaccccttcgatgatgatgaagaggatgaagagtcagaacgtgaaaaagccattaagagggtagagaagaaaaagagattcgagcttgcaagacaaaagaacaaagtatcgggtttagacccattcgatgacagtgaagatgattattatctttcaccgaaaaagaaacaaactcaggatgacaagaagcaaaaaattaaaccgaagatgtattttgctggtggaggtatgcgctaa

SEQ ID NO: 16250 - DNA, 576 bp, Escherichia coli
atgtcacgcatctttgcttactgtcgtgtatcagttgatgactccaccaatgagaaccagattgaagccatcaagaatgcaggttacacaatccctaagacacgaatcatagaagaagtagtgtccggttcagtggctgctatggagcgtaaagagttctctaacttggtcacacataaactagaagctggtgatacgctggtggttctcaagcttgaccgtttaggacgtgattgcatcgacctccagaaaacggttgatatgctcattgcaaaaggaattaagttgatttgcttagacctgcctgtgcaggacttatccaagccagaaggtagaatgatgcttcaaatgttcggggcttttgcagagttcgaacgtaaccgcatcagagagcgtactaagcagggtctacagcgtgttaaagcacaaggtaaggtgttgggtcgtcctgtagctgtgaacactacagaggccgttttagagcataaggcaaagggattgtcacaaagtcaggttgcaaagcttctgaatctctctgtgagaacggttagccgtcactggacaaagacactgtaa

SEQ ID NO: 16251 - DNA, 468 bp, Escherichia coli
atgcagcacgagaacgattctgataatgaattcaggttgtcggtattcgataccctaaagggaacgctgaaccaacatagacagatggctgaagaggggcgcgacgaacaggcctttaaaaaagatgaagagatcgagagtgaacattttgtctatagatcacgcacaaggagtggcgcagatcattccgatgtgacacaggttggttcgcttgaccctgagcaacacagaaaacagctcagtaacagagattttgaaggtgagattaagttaaaaaagacctatggtatctggcttttgtttattcttgccatccagttgcttgttatgaatgcggtgttcattgtggttggatttaagacactggaatttgatgccttaacattgcagctgtacatggggggaaccttaacagaagtgtttgggcttgttctcgtaatcacgaagtacctcttcaatcgaaaatag

SEQ ID NO: 16252 - DNA, 489 bp, Escherichia coli
atggctaccaatccgagagaacatgcccggcgagtgctggagacgttctggcgtggtcgggactttcctgtcgatcctgcaaaaatcgctaacgatatggggattgatgtttttattggcaaattaccgggcaatgtgtctggggctttgatcaagcaaaggtgtcaggatcccgcaatctttcttaacgcagatgatagcaagccccggcagcgcttttcgtgcggacatgaactcggtcattatattgccagactggcagatcaaagtgacgtctatgagtacgctgattttcgtggtgaagaatccaggagtggaactgatccagatgaaatctttgcgaatcagtttgctgctgaacttcttatgcctatagatgaagtaaaaagactgcattctcagggacatcctagctatgttatagcacatcatttcggagtgtctgatgatgcgatcaatttccgtctgaagaatctaaggttagcctga

SEQ ID NO: 16253 - DNA, 8034 bp, Escherichia coli
atgttagctcgttcagggaaggtaagcatggctacgaagaagagaagtggagaagaaataaatgacagacaaattttatgcgggatgggaattaaactacgccgcttaactgcgggtatctgcctggtaactcaacttgcgttccctatggctgcggcagcacaaggtgtgataaacgctgcaacccaacaaccagttcctgcacaaatcgccattgcaaatgccaatacggtgccctatacgcttggagcgctggaatcggcccaaagcgttgccgaacgtttcggtatttcgttggctgagttacgcaaactcaaccagtttcgtacgtttgctcgaggttttgataatgtccgccagggggatgaactggatgtcccggcacaagttagtgaaaaaaaattaaccccgccgccgggtaatagcagtgacaacctcgagcaacagatagccagtacttcacagcaaatcgggtctctgctcgccgaagatatgaacagcgagcaagcggcaaatatggcgcgtggatgggcctcttctcaggcttcaggcgcaatgacagactggttaagccgcttcggtaccgcaagaatcacgctgggcgtggatgaagattttagcctgaagaattcccagttcgattttctccatccgtggtatgaaacgcctgataatctctttttcagccagcataccctccaccgtactgacgaacgtacgcagattaacaacggcttgggttggcgtcatttcactcccacatggatgtcgggcatcaacttctttttcgaccacgatcttagccgttaccactcccgcgccggcattggcgcggagtactggcgcgactatcttaaattaagcagtaacggctatttgcgactgaccaactggcgcagcgcacctgaactggacaacgattatgaagcacgcccggccaatggctgggatgtacgcgcagaaggctggttacccgcctggccgcaccttggcggtaaactggtctatgaacagtattatggcgatgaagtggccctgttcgataaagatgatcggcaaagtaatcctcatgccataaccgctggacttaactatacccccttcccgctgatgaccttcagcgcggagcaacgccagggtaaacagggtgaaaatgacacccgttttgccgtcgattttacctggcaacctggcagcgcaatgcagaaacagcttgacccgaacgaagtcgctgcacggcgtagccttgcaggcagccgttatgatctggtggatcgcaacaacaacatcgttctggaatatcgcaaaaaagaactggttcgcctgaccctgacggaccccgtgacagggaagtcaggagaagtgaaatcactggtttcgtcgctacaaaccaaatatgccctgaaaggctataacgtcgaagccaccgctctggaagctgtcggtggtaaagtggtcacaacgggtaaagatattctggttaccctgccgccgtaccggttcaccagtacgccagaaaccgataacacctggccgattgaagtcaccgctgaagatgtcaaaggcaatttttcgaatcgtgaacaaagcatggtggtcgttcaggcacctgcgctaagccagaaagattcctcggtatcgttaagtacccaaacattgagtgcggattcccattcaaccgccacactgacttttattgctcatgatgcagcaggtaatcctgttatcgggctgatgctctcgacgcgtcacgaaggtgttcaggacatcaccctttctgactggaaagataatggtgacggaagctatacccaagtcctgaccacaggagcgatgtctggcacgctaacgctgatgccacagctgaacggtgtggatgcggctaaagcccccgccgtggtgaatatcatttctgtttcgtcatcccggactcactcgtcaattaagattgataaggaccgttatctctccgggaatcctatcgaggtgacggtagaactgagagatgaaaatgacaaacctgttaaggaacaaaaacagcaacttaataccgcagtcagcatcgacaacgtgaaacctggtgtcactacagactggaaagaaaccgcagatggtgtctataaggcaacctataccgcctataccaaaggcagtgggcttactgcgaagctgttaatgcaaaactggaatgaagatttgcataccgctggatttatcatcgacgccaacccgcagtcagcgaaaattgcgacattatctgccagcaataatggtgtgctcgccaatgagaatgcagcaaacaccgtctcggtcaatgtcgctgatgaaggaagcaacccaatcaatgatcataccgtcacatttgcggtattaagcggatcggcaacttccttcaacaatcaaaacaccgcaaaaacggatgttaatggtctggcgacttttgatctgaaaagtagtaagcaggaagacaacacggttgaagtcacccttgaaaatggcgtgaaacaaacgttaatcgtcagttttgtcggtgactcgagtaccgcgcaggttgatctacagaagtcgaaaaatgaagtggtcgctgacggcaatgacagcgccaccatgaccgcgacagttcgggatgcaaaaggcaacctgctcaatgacgtcaaggtcaccttcaatgttaattcagcagaggcgaaactgagccaaaccgaagtgaatagccacgacgggatcgccacagctacgctgaccagtttaaaaaacggtgattatagggttacggcctctgtgagctctggttcccaggccaatcaacaggtgaattttatcggtgatcaaagtactgctgccctgaccctcagtgtgccttcaggtgatatcaccgtcaccaacacagctccgcaacatatgactgcaaccttgcaggataaaaatggcaacccactaaaagataaagaaatcaccttcactgtgccaaacgacgtcgcaagtcggttctcgattagcaacggcggaaaaggcatgacggatagtaacggggttgccatcgcctccctgaccggcacgttagcgggcacgcatatgatcacggctcgtctggctaacagcaatgtcagcgatgcacagccaatgacgtttgtggcggataaagacagagcggttgtcgttctacaaacatcgaaagcggaaatcattgggaatggcgtggatgagacgactctgacagcaacagtgaaagatccttttgataacgtggttaaaaatctgtcagtagtcttccgcacctctcccgcagacacgcaactaagtctgaacgcgcgtaatactaatgagaacggtattgctgaagttacccttaagggcacggttttgggtgttcatacagccgaagccatactgcttaacggcaacagagatacgaagacagtcaatattgcgcccgatgccagcaacgcgctagtcacgctgaatatccctgctcaacaggtggtgacgaataacagtgacagcgtgcagctgacggcgacggtgaaagatccgtcgaatcatccggtagcgggaataacggtgaacttcaccatgccacaggacgtggcagcaaactttatccttgaaaataacggcattgccattacccaggccaatggggaagcgcatgtcacgctcaaaggtaaaaaagcgggcacgcatacggttaccgcaacgctgggtaacaataatgccagcgatgcgcagccagtcacattcgtggcggataaggacagcgcagttgtcgtcctccaaacatcgaaagcggaaatcattgggaatggcgtggatgagacgacgctgacagcaacagtgaaagatccttttgataacgtagtaaaagatctaccggtcaccttcagtaccgacccggctgatactcaacttagtcagagcacgagcaatactaacgacagtggtgttgctgaagttacccttaagggcacggttttgggtgttcatacagccgaagccacactgcctaacggcaacaacgatacgaagacagtcaatattgcgcccgatgccagcaacgcgcaggtcacgctgaatatccctgctcaacaggtggtgacgaataacagtgacagcgtgcagctgacggcaacggtgaaagatccgtcgaatcatccagtggcgggaataacggtgaacttcaccatgccacaggacgttgcggcaaactttacccttgaaaataacggcattgccattacccaggccaatggggaagcgcatgtcacgctcaaaggtaaaaaagcgggcacgcatacggttaccgcaacgctgggtaataacaataccagtgattcgcagccggtaacgtttgtggcggacaaaacctcggctcaggttgtcctgcagatgtcaaaagatgagatcacaggtaatggcgtcgataacgcaacgctaactgcaacggtcaaagatcagttcgacaatgaggtgaacaatcttccggtaacattcagcacagcttcttcaggcctcaccctgaccccaggggaaagtaataccaatgagtctggcatcgcgcaggccactctcgcaggcgttgcctttggtgagcagactgttactgcatcactggctaatactggtgccagcgacaacaaaactgtgcattttattggcgacacagcggcggcaaaaattatcgagttgacgcctgtcccagacagcataatcgccggtaccccgcagaacagcaccggcagcgtcattaccgccacagtcgttgataataatggctttccggtgaaaggtgtgactgtgaacttcaccagcagaacaaactctgccgaaatgacgaatggcggccaagccgtaacgaacgaacagggtaaggctaccgtcacttataccaatacccgctcctcgatagaatcaggagcgagaccggataccgttgaggccagtctggaaaatggtagctccacgcttagcacatcaattaatgtcaatgctgatgcgtctacggcacatctcactttgctacatgcactttttgatacagtctccacaggcgagacaaccagtctgtatattgaggtgaaggataattacggcaacggtgtcccccagcatcaggtgaccctcagcgtttcaccaagtgaaggcgtgacccccagtaataacggtatatatactaccaactactacggcaatttttacgcaagctttaccgctacaaaagccggggtttatcaagtgacggcaaccctcgacaatggcgattcgatgcaacaaacagtgacctatgtgccgaacgtcgcgaatgctgaaatcacgctggcagcctcgaaggatccggtgattgccgacaataacgatctcacgacactaacagcaacagtcgctgatacaaagggcaatgcgatagccaacactgaggtaacatttactctgccggaagatgtgagggcgaacttcacgctgagcgatggcggtaaagcgattacggatactgaaggcaaagcgaaagtcacgctgaaaggtacaaaagcaggcgctcatactgttacagcatcgatggctggcagtaagagcggacaactggtggtgaactttactgcggatacgctcactgcgcaggttaatcttaacgttaccgaggacaactttatcgccaataacgttgggatgaccacacttcaggcaacagtgactgatggaaacggcaacccgttagccaatgaggcggtgacattcacgctaccggcagatgtaagcgcaagcttcactctcggacaaggcggttccgccattactgacatcaacggcaaggctgaagttacactgagcggtacaaaatccggcacttatcccgtgacagttagcgtgatcaattatggtgttagtgatacgaaacaggtgactttgattgccgatgctggtacagctcaaatggctggttttaccgcatcatcaagctcattcaccgcgagcacaaccgagggcgcgaccctgacggcaagcgtcactgacgcttacggcaacccgctagaaggcatcaaggtcaatttccgcggccccgccactacgctgagtaacaccagcgtcgaaacggatgctcagggtaaggcagaaattcttgtgacaagcaccattgcaggaacgaaagtagttacagctaatctggcaaatgcacctaccgaagccgccatacgaacgctgactgtcaaagcagatgttgattctgcggcgatcaccagtctggaaacgcctgaaggtcaggtaatagtcagagaacccatagcggttaaagcacacgtcgacgaccagtttggcaatccagttgctgaccaacttgtgacattcagtgcagagccgtcaagttttaacatggtcattagtcaggatacggtttctacgaatagccagggtatagctgaggtcaccatgacgcccggaagatacggttcgtatactgtgaaagcgtccctgacgaatggctcctcttatgagaaggacctggtggtaatcgatctaagactaacactcacggcatcaagtccgcttatcggcgtcaatgacccatcgggagcaactctgactgtaaggttaactcatgcaaacggggctccattgagccatgaactcgttacctttagcgtaacgcccgaaggtgcaacgttaagtagccaaacggcgacaaccaacacttcaggtgaggcacaagtcgttctgaccagcaataaagtcggtacatatgtggtgacagcatcgatccaaagcggcgtaattattcagactcagacaaccgtgaaggtcactggcaacccaagcaccgcacatgttgctagttttatcgctgatccgtcgactctcccggccaacaacagtgatataagcacgctaaaggctactgttgaagatagcagtgggaacctggtcgaaggtgtcaatgtgaacttcgcattaaaaagaggctttgcctttgccacattaacgtcattaacagcggtgaccgatcaaaacggagtcgcgacaacgagcgtaagaggagcgataacggggagcgtcacggtaagcgcggaaacgagctacggtggggcgcaaacagtagatataacgctggtggcaggcccggcagacgcctcgcagtccgtccttaaaaacaacaggtcatcactgaaaggggactttaccgaaagtgctgaactatatcttgttttacacgatctatcaggtcatccgatcaatgtttctgaagggctggaatttgtgcaatcaggtaccaacgtgccctatgtgcaaatcagcacaattgattacactcaaaatttatacggtgagtataaagccactgttacaggcggcggagagggtatcgcaacgctgatccccgtgttgaatggtgttcaccaggcgggtctgagtaccacgatagaattcattagcgcgggaaccagaccaatgaccggtacagtatcagtgaatggtgcaaacctacctgcagcttcattcccttcgcagggatttaccggggcgtattatcagttgaataatgacaattttgcaccaggaaaaacggcggctgattatgcgttttcaagctctgcctcctgggttgatgttgatgcttccggtaaagtgacattcaaaaatgacggtgatagcaatactgtaataatcacagcgaccccaagatccggtggcgctatttaccaaacgcaagtacgggtgaaaggctggtggaaagataacaataatattatcttaccattaagtcgtgctgaaaattattgtaataacgagatcggcaacggttacgctattcctggcgtgaatcttttaagcagtggagaaaaccgacgcgaaatagggtcactgttcggtgagtggggagatatggggcattatatggacgctgatttttattcagaaatatattggtcttctaataccgcaggtggaggccgacaatacattgtttccctggaaaacggggcgcatggctctgttcaaacatctgaatattttcatgtagcatgctataaaaacatctaa

SEQ ID NO: 16254 - DNA, 882 bp, Escherichia coli
atgaagaaaatattctgtattacatgtcataaaataagtgttccgctcaagcttaccacggattatttatcctcatttccggaaaatatcataatcattcatgtggataaaaaaacaaatatagatccttttagaagaaacctatcccctagtataatttatttgaatgatcgagttgatattacatggggtaccgtaagccaaattgaagcgtttattaatttgttaaaagaggctgtaaattttaatcccgattatgtttttatgctatctggtgatgatttattatgtatgacgaataaaaatattaatgataccttgagtaatattgattttaaaaaccttatccattatcaagataggagaaatcgttgggtagatcctgtatttcgagttaaatataaatatcctaattatttctatttaagaaatgcaagcgtattttgcagagccaaaaaaaagttaatgttgaaatttaatcttttaaaaacaaatgatgttttctttaaatatcggcatttgattcactcattttataaaggtactaattggtttggtatcaataataaaactcttaaaaaaataatatgcttcctaaatgataatcactggtattatgatatgtataaatattcattatgtggtgatgaggttttttttcacacgttactaaaacatttgaatgtaacagacatttatcataatactacaatgattaatgatgccttgcgatatattgactggacaacaggtccggaatacccaaggatgttaaatgaaaaagatattgaacaaataaaaaaatctggttgtatctttgcaagaaaattctctgacgatataaatcaggaacatttcagttatttgttgagtgttgattga

SEQ ID NO: 16255 - DNA, 1023 bp, Escherichia coli
atggaaagaagttttcgtctggatttaatgagattacttgggctgttattaataatttttgctcatatagagccacctaatgccttatttcagataagaacatttgatgtaccaatgatgatttttgtttctggagtagcttattatatatcgagtccctcttttttttcttggaagatttattatatcaagagagtttcaagattattatttcctgtttggtgtttttttgttcttttttatggagtggtgtatctttttgatattaaggtattttcagagtatttaaaatggaatatgatattctcaacttttttactaaatggatttggctatttatggataatacgaatttttataattattgcaatattagcacctttcatagtgatgttttttcggacaaaaacattttattttgacgtgtctgttataatattatctatatttgcatcgacaatagcagattattattttattcaaatgaataataaatatgcaagatacattgttgttgatatattacttccagcattaacttattcatctatatttattcttggatataaatggcatgcctatactagattcgataaaaacacagtaggctttgtgtttttaatttttcttatagtcgcccaagtttatatgttatttgaacaacagggtattattcagccacagaattttaaatacccgcctacaataatatatatatcgttctctcttgtgatgattgttattttggattttatattgaaatcttgttttgataatactgcgtcatcaaaatataaatgtgttgtttttttatccagtaatacaatatgggtatacttgtggcatattccaatagttgagtatttcaaattgactgactgtaaacttgaatggtatgtaaaatacgcaatcgtagtttgtatttcttttttaattacttttttacaagtttatattattaaatggattgttaggcaaaatccatgcaaacttaaattcttaaaggtaatttttactggatga

SEQ ID NO: 16256 - DNA, 1092 bp, Escherichia coli
atgactcttaaatggaaaaaggttcgtttaggagatgtcgcagaattacaacgtggttttgatctacccagtactaagcgtattgaaggggagattcctattgtttcatcaagtggaataacaggcttccatgttgaagcgaaggcaaaggctccaggagttgtcactgggcgatatggttcgattggtgatgttttttatttagaacaggatttttggccattaaatacatccttatgggttaaagattttcatggaaatgacgaaaaatttatctactttctgttgagtaactttgactttaaaaaatttagtgacaaaacaggtgtgcccggtgttaaccgtaatgacttgcatgcagtcaatgtattactgccgcctttcctcgaacaaaagaaaatcgcccaaatcctgtctacctgggataaagctatttcggtgacggaaaagcttctcaccaacagccagcagcagaaaaaagccctgatgcagcaattgcttaccggacaaaaacgcttgctggatgagaatggggtgaggtttaatggtaaatgggagaaaaaacttctttcagatgtagctgatgtttatcaaccaaaaacaatatcccagtctatgatgtctgattcggggtatccagtttatggcgcaaatggagttattggattttatcaagagtttaaccacgaaactgaacaaatagccgtaacttgccggggtagcacatgcggcatagtcaattggactcaagcaaaatcgtggattaccggaaatgcaatggttatcaatacggataactattcctacgtgagtaaaaaatttctattctatactctgaatggcagtgatctgaagtatttaatatccggttccggtcaaccacaaataaccggaaacattaaaacgcatatcattaatttgccctgtatcgaagagcaacaaaagatcgccaccgtgctgtccgcagccgacgccgaaatctacacacttgagaaaaaactcgcctgcctgagagatgagaaaaaagccctgatgcaacagctactgactggcaaacgtcgtgttaaggtcgatgaggcggttgccgaatga

SEQ ID NO: 16257 - DNA, 1260 bp, Escherichia coli
atgactttttcctgtgagacgctgcccacagatgcgaaagcggctatccgagagatgaaagctgcgctgcgggaacagctcggtgatgtgcaacaggttttcgatacactctctgcaaaaatcgaaacgcgtgttgctgaaatcgatgccctaaaagcgcaatggctgccggtttggccggaagtttcttatagtgatattgccgcaggtacagtaagcgatgccactcgcaatgaaattaagcgtcgcggctgtgcagtcataaaaggccatttccctcgcgagcaggcgctggcgtgggatcgtgccatgctcgattatcttgatatcaatcattttgatgatgtttataaaggccctggcgacagttttttcggctcgctggaggcttctcgtcccgaaatctatcccatttactggtcgcaagcacagatgcaggcgcggcagagcgaaaatatggctgctgtgcaatcttttctaaaccgactgtggacgtctgaaagcaacggcaaacagtggtttgatcctgatatcagtgtaatttatccagacaggatccgccgccgccctccaggtaccacatctaaaggcctgggcgcacataccgattctggtgcgctggaacggtggttattacccgcttatcagcgcgtttttgccaatgtgtttaatggtaatttcgatgattacgatccctgggatgctacacaccggaccgaagtcgaagagtacacggtagataacactaccaaatgttcggtgttccgcacgtttcaaggctggacggcgctctctgatatgttatcgggtcagggattgttacatgtggtgcctatcccggaagcgatggcgtatgttttattgcgcccgctgctggatgacgtaccggacgatgaactgtgcggggttgcacctggcaaagttctgcccatttcagagaaatggcatccactactgcttaaagcgctgacttccattcccgcgataacagcaggggattccgtctggtggcactgcgatgtgattcactccgtcgcgccagtagacaatcaacagggttggggcaacgtgatgtatatccctgctgcgccaatgtgcgagaaaaatcgggcttatgcacacaaagtcaaaatggcgctggaaaaaggcgcatcacctggcgacttcccgcgggaagattatgaagcaaactgggaaggccgctttacgctggaggatctgaacattcacggtaagcgcgcactgggcatggatgtttga

SEQ ID NO: 16258 - DNA, 1584 bp, Escherichia coli
atgaatttaaccctcaaagaatcgcttgttacccgtagccgggtatttagcccgtggactgcgttctactttttacagtcgctattaattaacctcggcttaggttatcccttcagtttgctctacaccgctgcgtttacggctattttgcttttgctatggcgaacattgcctcgcgtacaaaaagttctggtcggtgtcagttcgctggtggcggcttgttatttcccttttgctcaggcctacggcgcgcctaacttcaatacaatgctggcattgcactccaccaatatggaagagtcgaccgaaatcctgacgatttttccgtggtacagctacctggtcggcttatttatttttgcgctcggcgtaatagcaataaggcggaaaaaagagagtgaaaaagcgcgctggaataccttcgacagcctgtgtctggtattcagtgtggcgacattttttgttgctcccatgcaaaacctggcctggggcggcgtatttaaactgaaagataccggctatccggtatttcgttttgctaaggatgtcatcgtcaataataacgaggtgattgaagagcaagaacggatggcaaaactttccggaatgaaagatacctggacggtcactgccgttaagccgaaatatcagacctatgtggtggtgatcggtgaaagcgcgcgtcgcgatgccctcggtgcctttggcggtcactgggacaataccccgtttgccagcagtgttaacggtttgatatttgctgactacattgccgccagtggctccacgcagaaatcgcttggcttaacgctcaatcgcgtagtcgatggcaaaccacagtttcaggataactttgtcaccctggcaaatcgcgcgggcttccagacctggtggttttccaaccagggtcaaatcggcgaatatgataccgctatcgccagcatcgccaaacgtgcagatgaagtgtatttcctgaaagaaggtaattttgaagcagataaaaacacgaaagacgaagcgttactggatatgaccgctcaagtgctggcgcaagagcactcgcaaccgcagctgattgttttacatctgatgggctcacatccgcaggcctgcgaccggacacaaggcaaatacgaaacctttgtgcaatcgaaagaaacgtcgtgctatctctataccatgacgcaaacagacgatttactgcgtaagctgtacgatcagttacgcaacagcggcagtagcttctcgctggtttacttttctgaccacggtctggcctttaaagagcgcggcaaagacgtgcaataccttgcccatgatgataaatatcagcagaatttccaggtgccttttatggtcatttcgagcgacgataaagcgcatcgggtgattaaagcccgccgctctgccaatgacttcttaggctttttctcccagtggacgggaattaaagcgaaggaaattaacatcaaatacccgtttatatctgagaagaaagccgggccgatatacatcaccaacttccagttacagaaggtggattacaaccatctcggaaccgatattttcgacccgaaaccttaa

SEQ ID NO: 16259 - DNA, 477 bp, Escherichia coli
atgaacgatgatcacggtattcttatgcctgtcgcactaaatcagctacgggcatttgatttaaatccaccccttaccaaaaatccagaatatgatgaaattaaagagtcgattcgcaaccgcgggctggattatccgccacaaatcacacaacgtccgggagaatctttttatattattgctaatggaggtaatacccggctggcaatactcaacgagttatggctggaaacgcacgacaaaaaatactgtaatattgtctgtcatttctggaagtggcatacagactggagcattgaacaaggtaatttacactgcctgcttggtcatctcgtagaaaatgataaacgcggttcactgacatttattgaacgggcattaggggttcaaagtgcaataaacctgtatcaaagtatccggggaagctcacaaagagattgtagtggtcaagtaatactggccacggttttacagtaa

SEQ ID NO: 16260 - DNA, 192 bp, Escherichia coli
atgtcatcaccatcacaacgatttctgcgtctggcacaggtcatggataaaaccggactgaaacgttcacaaatctatgcctatatgaaaaccggagattttcctaaatcagtcaagataggtccctccagcgtagcgtggctggaatcggaaatagacgactgggtcaaagcaaaattagataaccgctaa

SEQ ID NO: 16261 - DNA, 927 bp, Escherichia coli
atgcataccattccttaccatagtaataacacctttatgcctgtctgggttactatcggcgaagcaactgatattatcaacaggtatactaacagtcatattaaagagtgtgatttatggcgttatgcactttatggtcatttacctctttcaatttattttcagtcaccagtaaagattcgaaaaatctgccagaagggagataaaatagcattagatagtattcaagaaaatattattgagaagatagctcagttaagtgatacgtgcatatacaatgggaaaagtaaaataataaagacagaaggtgactacatattcccggaacatcatattattgacacaccattaattggtcatgaatatattgtattgcaaagattattggctcactcattaaaaataccaaaacccattaccggacagtataattctcattatggtgttgtcgtccgtgaaaatggaataatttatcaggtcttcgaatccaccacactggaaaacagaataacccagcgccttcgccatctctcaatccccgttgcaacatacttttacgaatcaacaaaatcccaggatctcaaacaggcaggaacccggtatttcccggtttatcattttcccgacgatgcctggttcgttatcaaacgtaccgctcttgagcaattcataaatacttttttccttcccactcatacagatacccctaaaaatggaacccgcatttctacaccactatcacgttttctctggctggcgtgtaagcacaatcatgacattagcgcattgatgggacacccctacaaactcctctccgtgttcgaagaatgggcccgctccgacggtatcactgaacggctaaatggggatacgctgaaaactgcactggaacgcggttctccggctgctactccagcatcgtcataa

SEQ ID NO: 16262 - DNA, 786 bp, Escherichia coli
atgggtttttttagccaactggaacagtttgatcgaaaactcacccgctggtacgtccgctgggggcgctgggtatggcggatactgatcgccgtgccaatactggtggtgctgtggaatctcggacaggcggtatggggggggccgagaggcggcgtgatactggtgatccacagcgaaatagaccggccaatacgtggatttagcgttaatggcgtagcaggcgctgatgcttctgccaacggaggtggttccacaacttgctgcggggacgtcagtggagagacggcggaagtgatctggacagttgattactctctggcacagtataaagcgggcatcaggactgaagtacaccataaaaccttgccgctgcccaaaagagaatggggagaagattttctgcacgtacactttttaccgggcaacaaggtgttgctggggtggagtaaggatttatcctctccctatgacgaacacaggcaaatgaatactgaaatcagggccgaatgtcagtcagacaaaccggacgttgtggccgtgatgcacgaatggcgaaatatgaaggaaagccagacttattcgtcctgcgagcagtggaaaaaggttgaggaatctctggataaggcgcggcaggttggactgactaagccgctggaccagaaaatttacgcgttcaactatctgaacggtaaaaaggcctatcttgaatctgttgagttccaggcggtgctggaaaaagtaaaaaggaatgaaatgtcgctgtctgatcttggtcaggaatga

SEQ ID NO: 16263 - DNA, 1947 bp, Escherichia coli
atgggtacattggatatcggtgcagcaacgcgggcgcagcaggcagatgaatgtaaggtgggaaactgcgggcgcgtctggcatgttggttttttctttgacggcgtgggacgtaatatcgttcaggatgcgccggataaccgtttaagtaatattgtccgcctgtttcgggcctacccggatgaagaggttaatacggattttgtttgccataataaattctacttctccggtatgggaacgccttatgaagaaaaaacgactgagcaaatctataccataatagatacctctatggaaagtatggttgatggtataaaagatatacctaaagatgctgcaaaagatacgatagaggatatactcggtcagagtggatcgtggtatgaaaccttaaaaaacgcgctgaaaaaacgcatctccccagaggatataagaaagaaaaaacgcgaatctgttattgatgcattaaaaaaaaccactatcgaagccatacagtggatacgtgacaatgaatttgttagtgctcattttttgactggtgacacaacgcgcattaatgccgcaaaattgctttttaacagtgcattcgctgaaaatagcaagaagaaagaaggctctcctccccccaaaattaaatcaatttccatttcattatacggttatgatactggtgcaacgctggcacgtaaatttctggatgagttccttaaagaagtttgtcaaaaaagtagtgaggataattacctttttaaaaaggtgcctgtaaatattgtttttgctggtttttttgactgctcgcgacattcacctgccagtaataataatggactggactatttttttagtattgcaggaaaggccagcggagataagagagttgaaaagattggcgaaattgtcagcgtagcatttggcgagaagggcattgaactggatacggccctgccggggacagtaaaacaagcgttgcatctggctgcggcctatgaacggcgtctctggcggggattataccggctgggaagcaccaaagtggaacataaggagataatgttgcccggttgcagtgaggatgttggtggtgggctgaaacccgatgagcagaaacccagtgcggaattgtgccgtgtggctctgcatactatgtacaatgcagcgttcagagctggtgttccttttcctgattttaatactctttatgaacagaaacctgttatagctaattacttcttgataaatgatacggttgaaggacgctccgtcaggaactggatgactctctataaaaaggaagtcaacaaatactggcaggataatctggtagatgtttacacaaaggtctacggaactgataaggttagcgatgccgcatttgatttctatcttgatatctatttcatctggttggcaaaacaatattatctttactgtaccgaacttaaccaactggataaagaactatcgttagtacgtcgtgaacagataagcggctatggtccactcaccggaatggaggttaaccctaatacgaaagccgatgatataaatgcgcagatcactgaacttaaatctctctggggatggctggatgacgtaaggcgcgtggcgaccggtttgtcaaatgattttaatcatgggagaccaatggatactcgtatgcaaaatcataaagatatttattacacggcatgggtacgagctgaactgtttctcgatttttatcataaggcgtggaatggagaaaaaattccagaaatatcatggccgggtatagagacgattcatgcctatttttctcatgatttacaaacggtggatgcagggacttctattagcgaaagtttttttatacgccgtatggcagaatctccaaaaccagaggaaaaaccggataaaaataaaatattggaatatctaaacatcatcccttttcgattcacctaa

SEQ ID NO: 16264 - DNA, 480 bp, Escherichia coli
gtgagagtaataaagattatttcaagattgttgttttttataataatgaccatttatatttttgtttttatattttctcttgacagtggcagtgaactgggtctttttaacatattatcttcagtttatggcaatgctttctttggggcgctagttatcttatccttgctggggagtgctgcgatatacttatatctgaataagaaactctggctaacgaataattccgttctaatgtttcttatttcatttgttattgctataagtatatttattatctttatcaaaaatgatttgatactggattggctatgtcgcatatatgtcagtatatttgatgatgataaactctattcaggctcaggcagattgttacagcattttccattcatagtgagagtattgttcttttttatgataatgagtgttttttcaacctgtatatcctactttctgctcagaaaatataaattaagatga

SEQ ID NO: 16265 - DNA, 933 bp, Escherichia coli
atgttcttaacaaatacatcgcgttttttatttttatttttatttttatttttatttcttatgcacaagaataaattatatgcatatgataatttctcattcaatgcggatgtacattatggttatggtaagctattatggcatgataaaaaaccagtcatatacccattggcatccttatctgattatacttattataacgaattcgacccatttgaaacgatttattatgtggggcaatactataaaattagcttaaatgagagtaagcgaattcaagaacaaaaggacatttatgcacatcttcaattaaaacataataaatcattaattacagcaaatgtaacgttacataataaaagtaatagttcgtattatgttcatcggatgaatttaccagcaagcatccatgaatcaccttactctcctttgtgcagtggttcttttttaatcgtaacaaataacatacggttagattatataagaaaaattacatgccgatttgatttgtggatgaaaaaatctgactggatagaaatatcacccggagaaaaactctcatacacagtaaatttgaatgactattatgcttttctccctgcgaagcatcaatatgatataggaactgtagagttcacattggtaaatagtaattggttcttagagcagcatatttatgatcttttttttgctattgtggatgaacgacactataaacagtgtaaaaacacttctggcattgttaggaagtatatctataagtcgtggcagttatgtgagacttatcgtgggaggtggagccctttacaggaactcatgaatcgatttcattatgaaggagggagtgaaaatatatttcaaataagaacaaatcaagaaaatataaacattaatggagataaaattaaatctctttattcatcgatgcagtga

SEQ ID NO: 16266 - DNA, 1638 bp, Escherichia coli
atgcggaagaatacggggaagacgccgatgagtgagctgttgcaaaagctgacccgtagctgttttgccgacagggatgcactggatgtggcgcgaacacaggcggcgctgtggcagacatggctgctgccggtgacggcaaatacgccggtcggggaagaccccggctaccacgacgatttcctgcgtatccgcgacgagatgaacaaactttccggcgcggatacggacctcatctgccagcttgccgaatccctgctgctgacgcaggcaaaagacgtgcgcatcgccacttactacatctgggcgcgactgcaccgcgacggtgagcgcggactggcggaaggactggcgctgctgagcggactggtggaacgcttcggtacgcaactgctgccctcgcgaccggccagccggaaaatggcgctggagtggctggcgggggaaaagatgctcgacagccttgcccgctacccggaagtggcaaaagaggattttgcgaacattgttgccgctcttaatcaactgacggtttccttcgccgcatggcccgaagaacaacagtctccctccctgatgccgctgattaacgcactggaatcgcgtctggcgcagtcgggcgggatgaacgcggtggtgccacaaaacagcagcagcgttactgcaccgtcatccccggtggatgcgccacaggtacagaccatcacctccgggcgtgacctgctcgaccaggcgaaagtgctggcccgttatctgaatgaacagccgcagggctggctttcagcacaccggctgatgaaaaccctgcgctgggacacggtgcatgaactgccgccggatgtggacggcaaaacccggctggccccgccgcgcaccgagtcacgcaatcagcttaagcggctgtatgcccagcagaactggacggaactgctggagcaggccgacctgatgttcagcaccggcgtcagccatttctggctggacattcagtggtatctgcatcaggcgctgactaaggcgggcgtaccgtgggacaggtggacagccgttatccgtcaggacctggcgttactgctggaacgcctgccggggctggaaaatctggcatggaacgacggcacaccgttcgccgatgaggtgacgcgcaactggatagcgcagcaggtcatgatgcgggaagacggcgcatggcttgcggggaaagccgctgtaccgacagacgacgccacaaatgacgtactggcgctggagccggaagcactggagatggcagacagtcagggcgtggaagcggcgctgggctggatacagacccgtccgggcatcaccacggcacgacagcgcctgttattgcgactgctgatggcgcgggtggcggaacagtacggtaaaaacgagatggcgctcctgctgctggaagaactggataccgccgcacaggggctgacgctgacgcagtgggagccggacctgctgtttgaggtaaaagcccgacaactgaaactgctgcgtctgcgggcgcaccgctatgcggataaagccctgctgaaccgaaaaatggaaatcctgctgggaacgctggtggcaatcgatccggtacgggcagcggtactgtgtgatacgcaacataaggactga

SEQ ID NO: 16267 - DNA, 252 bp, Escherichia coli
atgttaatttattttgttgaaatatttgataaattaagcgatgaactgattcaggaaatcaggataccagaagacaaattagaaacgctttctgaaattatgaaatggaattctttagaaaaagattcatttttttgtggtattggtggctttaatgttatgaaggagcaggcattagcgttagaggatttattaggtatccagttttacgatgagaaatatattattcagatttctggtggggaaatttga

SEQ ID NO: 16268 - DNA, 333 bp, Escherichia coli
ttgataaaagcatatagtatattggatgatgtttatgagttttccgatgtctcatactattatgatgagttgtcatctgtaaattttaattcagaggttagtgatgaagtcttaggtgaggatttattaatgatctcgttttcaaatggaatgacagttgatgtcggttggtatcattcgtttgaagaagatgaagaaaaacagggggaatttgtcatatatgtaataaagaatgaagactgggaatctcctttattaaggttgacttctggatgggataaatccagtttgggacaaaaaataaaacaggcattggatcttagccataattaa

SEQ ID NO: 16269 - DNA, 468 bp, Escherichia coli
atgacggtaaatattgaagcactaattaatagcttggggaaatcttataaggagatttttgatgccggatttataccttataaaactaaaccaacgggtttttcgggtgaccccgaattaacgcttgaaatggtaagggaaggtgtatttctttcctttaaaagaaacggacggttccttaagggggtggagctatttatacaaaacccttcgattaaaggatggacatttccaaatgagttaccacatccattgaaggagagtatgtcaagaatatggattcatgagactttaggttatccgttacgaagtatagaacctaaaattattatgaatacggtttttggctggcgagatctttatcaatcatcatatctgaataacactgttagtatgcaagtatcctatgatgttgatgatgcagtaaagacgattctatatctacctgagtctgaattacattggtga

SEQ ID NO: 16270 - DNA, 468 bp, Escherichia coli
gtgtcaataaatattaatagacttattaaatatattggaggaagttatcctgaactaattaataatagtgtcattacttacaaaacagaacctaaaggttatgcaggctccccaaatctcaacctggagatggcaaaagaaggggtatttttatcattcaggcgtgatgggaaaatcttcaacgaaatgaccctttatattcaacatgacaaggtagaaaactggattttccctaatgaattacctttaccactgcaaagtaaaatgtcacacaagtgggtacatgaaacatttggcttgccagacaaatccattcctccccggatgataggaattaagatgtttggatgggttgaacgattttcgattggtggttttcatattccggtcacgatgagagtagcctatgactctgatgagttagttaagagtattacatatatgccgacatcagaattacgctggtaa

SEQ ID NO: 16271 - DNA, 552 bp, Escherichia coli
gtgtacaaaaaagagaggaacaggccattcgaaacgcgtgaagaggttctggcatatcataagcgggaaaaaataccctgtctggagtgtggcaagttgctcatttttttaccgcgccatatctggtttgtgcatggaatacgcgctgacgaatatcgtgaaaaatggaacataccgaagcacatcgcactggcagggatttcatatctggagaaacaaagtgaatatatgaaggcgagaatagcaaagggaaagctggatcccgcagaacaaatagccatgatgagaataaagagaaggcaactaaagtcagatcctgactggcgtaatcgctccggttctatattgaagaaacaatatgcccgacgagatatccttaaaaacaggatatgggaaagatctcccagcataaaaagtgtctctgtggagttgaaaacagaagctataaggcgaatgaaaaacaggaaggtcgtcggggaaaaagtccaggatattgccgatgacctgaacgtatctatcagcaaattgtatcactggctaaaaataatataa

SEQ ID NO: 16272 - DNA, 1047 bp, Escherichia coli
atggatacatccctgtctgacccaatttcggcagaatacccctgtggcccggatctggagtacgatccggaatacctgctactgttcacgcgcgccgcaccgcgtgaagaagcgcaatacggcgattttgtcagtacgccggaaaccattaactgggcggagcttgagcgggatgcctgccgactgctgacgcgcagcaaagatatccgcattctggttgtcctgctgcgctgccgtatccagcaggccggtgccaggggactggcggaggcgctcgcgctgctggaaacgttgtgcgccacgtacccgaacgctatccatcctcaactgctcgcgactgaagatatcaccgccgaagaggcggcagtggcacgtagtaacgccctggcggcgttgctggaccacgaaggcgtaatagccgatattcgtggcattacactgtcaaacaatgctgccatacgccttcaggtacgggatgtggagcgttcgctgtctgcatcacgcccggcggatgcgctggcaccagaatcggtacgccagcaactggccgacctggaggcgcgcggcacactgccgctggatgcctttcgccaggccgcagagaccactgagaggctgcaacgccatgcgcgtgaaacgctgaatgaccaggcaccgaacctatcccgtctgacacaattgctgaccctgttgccgggagcgatacggaccaccacgccggagctcctgccacaaccagtggctgaacagccggagagcaccgccatcgttcatactgaacagatatcatcagagcagattgcgctaccggtgcatatcgcggaggaaatatcaccgatgtccggcgcagaaccccggcagatccgcgaccggaacgacgcgctggaacgcctgcgtgtcatccgtcgctggtttgagcacagcgaaccgagcagcccgaccattcctttgctgcgccaggcagaacgcctggtcggaaaacgcttctcggaggtaataaatgaaattccagtagaactgctggaaaaatgggatgcgctggagtaa

SEQ ID NO: 16273 - DNA, 996 bp, Escherichia coli
atgagcgacgatttcactcaggcgcaggaaaccccctggcgttacggttttctgaacctgatgcgccgcgtggatgtgcagttgtgtaccgttccggcgggcaacacctggcaaccacggatggaaaaatttcgcctcggacaaacgcccgcgctgacctttgcgccacgggaaatcgccagtgtgagctggcaggaagagcgcctgcacatcagtttgtacagtctcgggctgtggggaccgaacggtccactgccgctgcactacaccgaactggcgcgcaaccggactgaaagccgaagagacccgacgctaacccgtttttctgatctttttcatcaccgctggctgacgcagttttaccaggcatggcgcagcgcccagtccgctgggggcggtctggataaaccgcaacatgaccgctttgccttttatatcgccagcctcagcgggcaggatttgcgggagagcgccgatagcccgttgccggatcacgctcgcctggcggcatcggcccatctggtgcgtgagtcccgcaatccggacggtctggccaccacgctggcgcactatttcggtgtacctttccggatacaggagtatgtcctgcactggatagccgtggcggacgatgagatcacccggctggggatgccagccccctcttccgttattggcaacggtgcactcatcggccaggccgtgccggacatgcagtataagttccggctggttatcggcccgctgacgctggaggattaccgacgttttctgcctggcggcaataacctgccagtcctgacagaactggtccgcgcctttagcggttttgaatactgctgggaaattgagctacagctaaagccccacgccgcccctccggctgttaccggtggttcgtaccaactgggctggaccgcatgggcgggtaaagccatgcacgaaaacccggtgacgggcatgattttcgaaccagaacactacctggcgcactga

SEQ ID NO: 16274 - DNA, 495 bp, Escherichia coli
gtgagcgcttcccgccagcgtccgggcaatcacctgctgcccacgctgtttgaccgcctgtgtgatgatgccccaaaccagaaacgcgaccacgatatcagcgtcagcccggttcagtttaaggagatcattcgccgggatttgtcatttctgctcaacaccgtcagccatgaagatgatattgatgctgcacgttatccggacgcggcagcgtccgtactgaactacggcctgccgccactggcgggcagctttctgtatgaacacaagtgggacgatattcgcagggccattttgcgtaccatcatccggtttgaaccccggctgaaagcgtccaccctgcaaatcatcccacttcagaatgagcgccaccagagcggccataacacattacagtttgaaattcgcggcgagatcctcacgcagccctacccgatggcattccgggtacgcagcgcgctggatatggaacagagccgcattacgtttttttaa

SEQ ID NO: 16275 - DNA, 831 bp, Escherichia coli
atgacaaacaataacgagctaccggctaccctgtcggcgctgctgcgggattattccgtggcggagggcattcaaatggcagagcagcaggtcaggatgcacccggcgcaggcctcccgccgccacagcttatttcagttattgtgcgtggcaggctactggtcgcgggcactgcaacagatccagctatgcgcccggatggacgcaaattatacccgcgaagcgcaggtatttggcgagctgatacgctgtgagatataccgccacgcctgctttcagggagaacagcggcccgattttattctcccgccgcccgcctggatggaggatctgctgaccgccctcgcctgtaacgctcgtggtgaagcgcaggaagctgacgcccaccgcagccgcgcacttgaggccataacagatactgcagggcagtggaatggcggcgcatttgactggattagcgacagcgactcccgtaccggtccggtactcgaactcatcgcgggcggagtatatatctggctgccgttttcacaaatctgttcgctaaaatcgccgcggcctgcgcatctgaccgatttgatctggaaacccgtcaacgtcacactgaataatggcgacacacacagtgcctggctgttttcccgctacagcggctctgaaaaggctgccgactccctacgtctgtgccgggaaacggtctggcaggacgggccgggagagactctggtacaggcgctgggtcagagggtgtggctcaccggtcacggcgatatcagcctgctggatttgtccacctgtacctttaacaccgctgaaggaagcgacgcgtga

SEQ ID NO: 16276 - DNA, 915 bp, Escherichia coli
atgaaaccaaatattacgtggggactccaaaaaatacaggcgcacgggatcgccgataacacaatttacgcgactgaaggaacacaaattatcttcaccgttacctctccctggattcctgtttttaaggtgaatgatgatgtaaagattgccctcactctgacccgccacgaagaagcatggtggattatcaatcagtctaccgaatattgctgtacggtaaacgaccagattgtggaacctcatcaccgtatgcgtctgaatgaaggcgacctgatagaatgggggttatcttcatggtgccttgtacatggcaatccatcatctccggacctgagcgcagtaaaaacgatatcgcagactgccatcacgtcggaagcaataaccgaatatctggatctggattggttcaggcagcagcatctgacatcacaaaatccattcgatatcattcctgttcatggagcctcctccaccggagaaggtgcggaaaaagggaatgccctgacccgactttatcaggaataccgcgaggcgttgttatctcccgaacaagatcttcatcgccatgctgatccttttccctttaacgaagagccctcctcgcaggatctggattcattgcgtgacctggtcaccgaagccgagacattgcaggatatggtcactggcgggttaagcattgacgctattctcaatgtactggatgccaccggcgaaggtgaaacagcctggcttgtcgaaaagactccccctgatatcctgcatttactttccccggaatacgccccggaaacagcgcatagcaccgtactgcccgacctgacacgcaaagagcatcgcatcattggcattgacagccattatcggataaacccggcacaacacggagagatatctcatgacaaacaataa

SEQ ID NO: 16277 - DNA, 2634 bp, Escherichia coli
atggacactcctgtttcgcgcagtgcactatatggaaagctaaccaaatctttgtttagatctttggaatctgcgacaacgttctgtaaattacgcgctaatccttatgtcgaactgacgcattggttgcatcagttaatacaacaaccagagaatgacattcacaatgtgcttcgacattatcaaataacatctgctgatgttgagaaggcgttaattcagcaattgaatatattgcctgccggagcgagtgtaattaacgatttttcccatcatatcgatctttctgttgaaaaagcctggatgttggcaagtattcgctttggcgatcaaaaaattcgtagtggatggttattacttgcctggttaaccacgccagaattgtgtcgggtgttaaaaaatatttgtgcgccattggcagagctaccggtagatgaactattagatattcttccgtctttaatcacttcatctcctgaattaacagaaatgccttatgacggctcgtatttaaattctgcagtaccgggggaagctagccaggtctttgccggcgaatcaaccggaagcaaatccgcgctggcgaaatactgccaggacatgactgcgctggcccgtgaaggcaatatcgatccggtcaccggtcgcgaacacgagatccgtactatgacggatattctgctgcgccgtcgccagaacaacccgctactgaccggcgaagcgggagtcgggaaaacggcagtggtggaaggattcgcgctggcgattgccgggggggaagtaccgccgtcactgcgtaacgtgcggttgctgtcactggatgttggagcgctgctggctggggcgtccatgaagggtgaatttgaatcccgcctgaaagcgttgctggaagaggccgcgcgctcgccgcagccggtgatcctttttgttgatgaagttcacacgctggtgggcgctggtggtacatccggtacgggggatgctgccaacctgctgaaaccggcgctggcgcgtggcaccctgcgcaccatcggcgcaaccacctggagcgagtacaaacgccatatcgaaaaggatccggcgctgacccggcgttttcaggtattgcaggttgctgagccggaagaggttgcggctgttgagatggtacgcgggttagtcaccacgcttgaaaaacaccatgacgtgctgatccttgatgaggccgtgcgcgccgccgtacagctttctcaccgttacattccggcccggcaactaccggataaggccatcagcctgctggatacggcggcggcccgtgtagcgctgtcgctgcataccccgcctgtgagagtccagtatctgcgccagcagctcaacgctgccgaactggagcaggagttgttattaaagcaggaaaaaatgggtatccgctcggagcggggcgatgtactggcggcgcggattatattgctgaatgccgatctttctgacaccgaagtgcggtggcagcaggaactggagttggttcgcagtttacaggagcaacgcggcgcagcgcctggcgagcgcgacgaaatcactctacaacaggcagaaacggcattaagaggctggcagggtgaaaaccccgtcgtgtacccggaagtcagtgcaaccgtggtggcagagattgtctccgactggaccggtattcccgccggacgcatggtgaaagatgaagccagtcagatactggaattgcccacccgtttggcgcagcgtgttaccgggcagatggatgcgttggcgcagattggcgagcgtatccagaccgcgcgggcgggtttaggtgacccgcgtaagcctgtgggtgtctttttgctggccgggccgtccggagtaggcaagactgagaccgcgctggcactggcagaagcaatctatggcggtgaacagaatctgatcactatcaacatgagcgagtatcaggagtctcacacagtctccactctgaaaggcgcgccgcccggctacgtcggctatggcgaaggcggtgtgttgacggaagcggtacgccgccatccctggagtgtggtattgctggatgaaattgaaaaagcccatcacgacgtccacgagctgttcttccaggtgtttgataagggggcgatggaagatggcgaaggtgtccatatcgatttcaaaaacaccacgctgttgttgacgactaacgcgggggccgaacttatcagccagctctgtgaggatccggcgctgatgcctgattcggcaggactaaaagaggcgttaatgccggagttacgtaaacacttcccggcggctttcctggggcgtgtgacggttattccttatttaccgctggatgagaccgcgcgtggtgttattgcccgcctgcatcttggcagattgatggatcggatggcggagcagcatggcgtttcactggtgtatggcgatgaactgattacgcatattgtgtcgcgctgcccgatgcacgaaaccggcgctcgtttgctcatcggctatatcgaacaacatatcctcccacaactgtcccgttattggctgcaggcgatgacagagaaaacggccatcacgcaaatccgcattcgtgttgatgaggatgaacagattatttttgaaacggattaa

SEQ ID NO: 16278 - DNA, 564 bp, Escherichia coli
atggcaaaagaattaagtggcgcactgtgggtcagtcgctttcctggaagttcttccactaatgatttgcaggggacttttcgtgcatcggtagataattttttgcgcgcgcttggtaatgcgcgtgcaagggtcagtatctctgcaacatatcgccctcccgccagagcatatctcatgcactggtcatggttgattgctcatgaaatcgttcaggcaaaaaacgtcccggcgatggagggggtggatattgagtgggatcacccgactgagcaagcctcgcttgaagcggcgcaggctatggttacggcctatggtatgaataatctgaatgtcgcgcctgcactgagctccaaccatacacgcggtactgcgatagatatgaatatcagttggagcggaacattaacaattgcggggagcaatggtcagaatgttgcaattaatacactacctcgaaccggaatgaatgcccagcttcaggcggtaggtctgggttacggcgtcagaaaatttgttggcggcaatacagatatacctcactggtcaattgatggacattaa

SEQ ID NO: 16279 - DNA, 291 bp, Escherichia coli
atgacatttcgttatccgatgttgttgacattcctgttaatgattttcgctttctgtgttcagggggaaccgtctttaccacaggatgtacagcattttctgagtaatgcggaaatgtgccagcatcttgctggtgaatgggacagttctttaccagagaaggataaaagaggcatcgaaaagggggttgatacctggtgtcctccggcgaagaaatcactccctgtgctgcgggaaaagtacaaagaaaacaaagagattataaaaatactctctgcgtatgatttttaa

SEQ ID NO: 16280 - DNA, 546 bp, Escherichia coli
atggctatcaacaacagcgcgcagaagtttattgcccgcaaccgcgcgccccgcgtgcagattgagtatgacgttgagatttacggctccgagaaaaaaatcgaactgccgtttgtcatggcggtgctggccgacctggcgggtaaaccgcgtgaagagctgccgccggtcaccgatcgtaaattccttgatattgatatcgataacttcaacgagaggatgaaagccattgcgccgcgcgtggcgtttgctgtccccaatacgctgacgggcgaagggcagttaatggtcgatatcacgttagagaatatggacgatttttcgcctgcgcagattgcccgtaaggtggatgccctgaaccagctgctggaagcgcgtactcagcttgccaacctacaaacatatatggatggtaaagcgggagcagaaaatcttatcaacaaactattacaagaccctacgttactgaaagctctggctagtgcgccaaaacctgtcgctcaacaggaaagtgtcttatcaggtgaaacgggaacagcagactaa

SEQ ID NO: 16281 - DNA, 1515 bp, Escherichia coli
atggtaaacgatactcttctggcgactggcgaactctctgctgcgcaaaccactgcctatcaggacactgaatttgattcgctcttggataaagccttccgtcccaagacacctcaggcagcaaaggctgttgaggcagcagttcagacgctggcccaacaggctttgacaaataccgtcaccgtcagtgacgacgcttataaaagtattgctgcgattattgagcagatcgatttcaaattaactgagcagatcaaactaatcctgagtcatccggaatttcagaaactggagtcctcctggcgtgggatggaacatttggtttacaacactgaaaccgatgaaaaattaaaaatccgttttatgaatctttcaaaggatgaattgcggaaaaatatgaagcgttacaaagggatcgcctgggatcaaagccccatgttcaaaaagctttatgaagctgaatatggacagttaggcggagaaccttacggttgtatcattgcggattattattttgatcacacgccaccggatgtagatctgctcggctccattgccaaagtggcagcctcagcccatgcgccgtttattgctggggcctctccgtcagtgttgcagatggactcctggcaggaactggctaacccgcgtgatctgaccaaaattgtgacccaaaacctcgaatacgcaccgtggaactcgctgcgaaaaagtgaggattctcgctacattggcctgacgatgccacgttttctctcccgtttgccttatggtgcgaaaacaaaccctgtcgatgagtttgattttgaagaagatgcggatggcgcagatcacagcaaatatgtctggagcaatgccgcctatgcaatgggtgtaaatatcaaccgctctttcaaacattacggttggtgtacgttgatccgcggtgttgaatctggtggcgcggtggaaaatctgccctgtcataccttcccgaccgatgacggcggcgtggatatgaaatgcccgacagaaattgccatctctgaccgtcgtgaagctgaactggcgaaaaatggttttatcccacttatccaccgcaaaaactctgattacgccgcctttattggcgcgcagtctctacaaaaaccgcaggagtattacgatccggacgctacggccaacgccaatctctcagctcgtttgccatatcttttcgcctgttcacggtttgcgcacttcctcaaatgtatcgtgcgcgacaagatcggctcgttcaaagagcgtgaagatatgcagcgctggctcaatgagtggatcatgaactacgtcgatgccgatccggtgaactcctcacaggaaaccaaagctcgtcgcccactggcagctgctgaagtggtggtggaagaggtggaaggtaatccgggttattacgatgccaaattcttcctgcgcccgcattttcagcttgaagggttaacaggatcactgcgtctggtcacaaaactgccgtcggtaaaacagggtaatacctga

SEQ ID NO: 16282 - DNA, 486 bp, Escherichia coli
atgggtagaccttcatttaatgaggcatggtcggcatttggaaaagtgaattttcccgttgctgatgtcggtcgtataattggcggaaatgttgggcaaaatatttcaggtggctattttgaaaatgcttgtccaattcgtatgagttatgttttgaatgctacgggattttcgatatcccgtagttctccctatgcaacggttagtggttctgataagaaattttatatttatcgtgtgaatgatatgattgaacatctgacccagattatggggaagccagatcttgtcattaataatccaactcctggtgactttacaggtaaaaaaggcatcattgttgtaaaaggccatggctggagcaatgctcgggggcatgtaacattatggaatggtagcgtttgttcagatcaatgccatctactaaatgatccagataatggaacatttgttcctgaagtcggaatcctgtgggtactaccatga

SEQ ID NO: 16283 - DNA, 372 bp, Escherichia coli
atgaaatggctgaaattaatattttggggcctctgtgggctacagatatgtcaattatcttatgctcaggaagcattgactgaaaaatattctcagtcagagctcttacgcaattgggctttgagtcattgtttgtcattggtgtataaaaatgatgccgttcaggatgatgccagagctacagctagtgcttatcttgaatatggtcagcaacctgtagaaatttatcgtgaaatagatgcgatagcgagaaaatatgcatcattaaaatatgatggttctatagcatcagacttcagtactatgaaatgtatagatttcattcatggaaatgaattggatgagttgatttccaggagtgttaagaaatga

SEQ ID NO: 16284 - DNA, 486 bp, Escherichia coli
atgtcttatgatatttttctgaaaattgacggcattgacggcgagtcaatggatgacaaacataaaaatgaaattgaggtgttgagctggcgctggaatatccaccaggagtccaccatgcacgcgggtagcggtctgggatccggcaaggtatccgtaactaatctttcatttgaacactatatcgatcgcgccagcccgaacctgttcaaatactgcgcctccggcaaacacattccgaaagccgtgctgaccatgcgcaaagcaggcggcaacccactggaatacctcaaatacagttttactgatttgatcgtagcaatggtttcgcccagcgggagtcaggggggagaaatagcttctcgtgagtcagtcgaactctctttcagcaccgtgaagcaggaatacgtggtgcagaaccagcagggcggcagcggcggcactatcacggcaggttacgatttcaaagctaacaaagaaatttaa

SEQ ID NO: 16285 - DNA, 534 bp, Escherichia coli
gtgaataaatggcgtaaccccggtgggtggttatgtgcggtagctttgtcttttgtcttcctgctttccgggtgcagcattgacagcgacgacgtgccggacctgatgtcacaaagactcgatctggtgattaaggcttccgataaggtgaatcctgacaatcagaaaaaagccgcgcccatagagatacgcgtttatgaactgaaaattgatgcagctttcacggcggcggactggtggtcccttcaggacaatgacaaggctgttcttgccgatgatttactccaccgcgacagctttatcctgcgtccgggcgaggagaaaaaattacgccgcgccctcaataaggaaactaccacgctggggatcctcgccggataccgcaatctgggaaaatcggtctggcgggctacatataaaattcctgatccaccggaaaaaagttggtacagccgctttatgccaaagaaaaaagtcgaactggatgctggcatagagcaaagcgccatagtgattaaagaacgggatgagtaa

SEQ ID NO: 16286 - DNA, 1344 bp, Escherichia coli
atgagttggaataaccgggtggtctggagtgaaggacaatttttgttgccacagatgtttcagcagcaggaacgctatctggaacatgtcattcattatcgcagtttgcctctttcacctttttactggggcttcaatgagtatggtattggtagtgaggcgctgaacatcggaaaactggtacttacgaaggcttccggggtatttgctgacggtacaccttttaatgcgccgggtcatacaccactcccgccgcctctgaccatccttccagaacatcttaaccagttgatttatctggctgtgccaatacgtacgccgaacagtgaagaaaccagtttcgacaataaccctgaatcactggcacgtttttcggtacatgaaagtgaaatccgtgatgccaattcgctggggcgaggcgcgcaactgctgcaacttagccacctgcgcttgcgactgttaccggaaaaggcggtgacagacgcgtggatcggcctgccgctgacgcgcatcacggcgctgcatcccgatggtcgggtcgatatagacaaagagttgatcccgccagtggcgaactaccaggccagtacgctgatatgtacctggctgtcgtggattaacgatctgataaaaatgcgtgcagattcgctggcggaacgattgacggggagcgacaaacacggtcatgaagcggcggaagtgtcggattacctgcttctgcaagttcttaatcgtttcggccccttattgatccatatgtcgaaaacgctgctatcgcctgaagtactctatcgtaacctctgcgcactggccggagaactctctacctacgtgcgtccgcaaacacgtcgtccggaagaatataaagaatataagcacctgacgccctatgccgggctgaaatcggtggtggacgaggttcagtatctgctgaatgctgtgctaatacgtggggcgcagcgaatccctctggaagagggaacttacggtattctcaatgcggtggttgaacctaccgaactgtcagatttcagctcgttagtattggcggtgaaggcacagatgtccgccgacaccttactacaacatttttcggctcagaccaaaatagggccgtcagaacgcctgccggaactgattcgctcgcaccttcctggtcttgttctacagatgctgccagtgccaccgcgtcagatcccgttccagtccggttacatctattacgacatccgccgcgacggcgtgttgtgggaacatatcgcccgctatggtggcatggcaatgcataccgccggagagtttccagggctggagctggagctgtggggagttcgcgataaatga

SEQ ID NO: 16287 - DNA, 1320 bp, Escherichia coli
atgaccgacgatattctgacgcaacctgcggtgaataccctgcaattacagccttcaatgaggggaacaaggtcgcctgataatgacggttacgatacgctcgtccaggacagccttcgcagggaagatataaaggtggtggttgaagacgggccagatttgaagctccgcttggctgagatcactgctgctgtgaatcctcttctggcggcggccagccctctgttatgcgcgctggcgcaaatgccccgtgaactttcccctggttttgtcgaacattatcgcgccctactggagcgtgaagtccgccggtatcagacgctgtgcgaccaggcaaacctgcgccgcgaacatgtgctggcggtacgttactgcgtgtgcacggcgctggatgaagctgccaacaacaccgtctgggggcgacgcggtgtctgggccgggaagagcctgctggtgacttttcatggcgaaagtgaaggcggcatcaagctgtttcagataatcgggcgtctggccgccagcttccaggagcacagcgatgtactggaaatcatttaccacattctgggactgggttttgaaggccgctacagtgtacggcctgacgggcgtaaacaactggacgatatccgccagcaactgctgactcaactggtccagcgtcgcgatccgatcacgccgacgctctcgccgggttttgccggtgccgtcagtgggcgaatgcggcggatgcgccgggtgccggtctggctgagcgccggaatcgctctgctggtgatgctgacgctgtttggcctttacagccaccggatgaacctcgccaccgaaaccgtacaacagcgtatcgacgccattggtaaaaatctaccgccgccacccgttccagtgcataaactgcggctgaaaatcctgctggcgaacgaaatcgcccgtggcctgctgacggtggaggaagatgaccatcacagccgtgtaatctttcgtggcgatacgatgtttataccggggcagagaaccgtgaatgatgcgctccgcccggtgattgataaggccgcgcgagagattgcgcgtgtgggcggcgcggtgacggtgaccggacacaccgacagccagccgatccactccgctgaattcccctccaaccaggtattgtcggaaaaacgggcggcggaagtggcttcactgctgacgtccggtggtattccggccagccggatccgggttgtcgggaaaggagataccgtaccggtgaccgataaccgcactaaaaccggacgggcgcagaaccgccgggtggaaattctggtggtggaacaataa

SEQ ID NO: 16288 - DNA, 3867 bp, Escherichia coli
atgcaaaaatttctcagtctgctgttttcccgccgcgcgctggctgttgtcggcgtggcggtactggcgctgctggtctggtttgttgggccgctggtggcgtttgacaccctgcatccgctcgcgtccgtgggaagtcgggtagtcaccatcgttctgttactgatgttcctcgcactgtggctggttaactggtctatgagcatcattggcgtgacggttctgtgcctggtcatcggttttgtttcacccctgctggccttcggtgatgttcatccatttgcgccgctgtggctgcgtctgacgcttatcggcctgatcctgctgacttatgcgctgtatggcctgtaccggctgtggcgggcgctgcgtctggatgaacaactgctacgccgtttcctgcatccgcgtggggaagacgtaccggtggcaggggaaattaaagccgacctgcgcaccgtcagccatattgttactcgcgctattcggcaactgaaacaactgcgcgtagacctgccgggctggcgtaatgtactggaaggaaaacgttttctgtacgaactgccgtggtttatggttatcggcagccccggcgatggtaaaaccaccgcgctgcttaacaccgggctacagtttccgctggcggaacagatggagcaaaccgcgcatattctcaccgtgccgggcggcggcacgctgcactgcgactggtggtttaccaacgaagcagtgcttattgacaccgccgggcgctatgctcgccacgatgacggtggcgaaatcagtgcgacccagcgcaacgccggggagtggcaggggtttctgggactgctgcgtaaacaccgccccggcgcaccgctcaacggcgtgatcctgacgctgaacgtggcggatctgaccgcgcagtccccggcggaacggctggctgcctgtgcagctctgcgtgcacggctggcggaactgcgggagacgctgggcattcgttttccggtctatctggttgtcaccaagatggatctgctgccgggctttacggagtatttccgtgggttgaccagtcacctgcgagcccaggtctggggcttcaccctgccttacagccgcaggcgtcacgccagcgatccgcagtcgctgcatgcgctctgtggccgggaactggcaaacctgacacagcggctggatcaggggctggatacccggttgcaggaagaatacgaccttaaaagccgtcagcggctctaccgcttcccgcgtgaatttgccgcgctgggtgcgccgctgctggaagctattgaacagattttcctcgattcaaaatttgatgctacccagcttaacaacaccctgcgcggcgtatttttcaccagtgccgcgcaggcgcaggtagacgcggtggccgatcagacgggcatctggcagcgttttgtccgggcgatcaaagggaaggcggattccccatcccataccctgccggacggcaaccgcagctatttcctgcacgatctactgacgcagtttatcttccgcgaagcgcacctggtggagccgaatcttcaatgggcctggcgttatcgcctgctgcgtaccggcgggcatctgctggtattggcgctggctttctggttgtggcagggaatgcagggtagccagcagggtaacagcggttatctgaatgaaatcgccagccggacgacccaactggatggtgatgtcaaagcctataccggaaaacctgctatgcagcctgttccggccctgctgaaccaggcgcgggcgctctctgcctggccggggctggacccggactcgccgccgctggcctggcgttatggtctttacagcgtcccgccggtgatggagagtgtcgcatccctgtatgaccgcctgctggaccagctactgctccctccgctggtgaaacgaatggaatacgtgctttcagatgcgattgcgcgtcaggacagcaaagccgcctatgacgccctgcatgtttatctgctgctgaacctcgataaggaccacgaggacaaatacaacgcggcggagatccacgcctgggtgctgaacgatctggacaaccgcgacagcgtagcggagtttggcggtcgcgcagccgtgctggagcatattgacgccctgtttgacggcagccgcgtggtgcattcgccctgggaaaaagatgaggggctgatccgccaggcgcgggccttccttgacggccataccagcactgagcgtatctacactcgagccctggcttccatggagagcgaagcaccgcaggagttttcgctggttcgcgctgtgggcgcggatgcgggaacggtttttgtccgcacggatggcgcgccgctggacaggggcgtgcccggcatcttcacccgcgaaggctaccgggaactgttcgacaaacggctgtcggagtttgtcgccgccgcatcagcggacgacgcctgggtgatgggccgggaaagtgcgcaaaaaaaaacgactgatattgtgatgagccagttgccggggcaggaactcccggttacccgtgaggtacgtcgtctgtatctggctgaatatgctcgccgatggcaggattttctggcaagcattcacagcatcaacagcgccggggaggacggtagccctggactagcgtatgaccttcaggtgctgcgtactctggcctcgccggattccccgctgatgcgcctgagtaaagcggtggtggagcagaccacgctggtgccgccgctggatgcgcaggccagacaaaagcagatggcccagcgcgcgcaggaccggctctccggcaatgcgggaaaagcggtgcagacggcgaagctgttgcaggacattcacccggaagagcggctggaaaaatcactggtggatgaccgtttcgccgccctgcgggaagtggtttccgggcagacggacagcgggcagggcggcggcgtgccgcaattaaattcgctgctgacgatgctcaatgagtattacacccagctcaccattgccgacagtgcgctggctgcgagcactctgccggggcgcatttctgcggcggataaactgcaactggaggcggcaaaactgcccgcgccgctgaaaaaaattctgctggatctcacgcagcagggaacgcgaaaaatcaacgccggcaccggtgaagtgctgaacgcgcagatggaagcggtgatcggtgatgagtgccgcgacgccatcgacgggcgctaccccttcaccgacagcccgcaggaggtcagcgcggacgattttaaccgtatctttgccagcggcggcgtgctggataccttctggacgaagcaactggccccactggcggataccgccagcaacccgtggcgctacaaaccgaccgaaggcaacatgaccttacagggtccagacctgacgccgtttcaggaggcgaaacagatccgcagcgtgttttttaacggcgacggagggaaaaagttctcatgggcgatgcaggtccgcgtcgtggatatggacccggccatcaccgaactggtgattgacattgacggccaggtactgcgttacgctcacggcccggtcaggccgctgaaagtgaactggccgggtccgcgcaacggctcaatggcggaaataaccgccagcccgcgcatccgccaggacacctctacgctgctgactaatggaccgtgggcgctgtttcacctgctggatgcgggaaaagcgcaagaaacggcggtacggggaacacagcaggtggagtacagctttgacgggcggcgggtgatactggaaatcaccgccggacgggattttgacccagtggatcgcggactattacaacgcttcgcctgcccggagcgagcgctgtga

SEQ ID NO: 16289 - DNA, 414 bp, Escherichia coli
atgcaacaatatacgcgtttttttattatttttttgttatatgccatgtcaggaaatgtttttgctgatatcagaaaaaacacaggaaccattgaccccgattatattaatctcagtgcgcaggaatttttgtcattttatgctcgtggaacgtcacaggaaaaagaaaatgttctgatgtatgtccttggtgtgagtgatgcgacagaaagtaaaacctggtgtggatataataagattaatgaaatagaactttattcatcggtactgacatatcttaatcagcagtcggttaacgatatgaatatgcgagcttcaactctgattgaacaagcgatggtcaggctgtttccctgcccggatatggcatcaccggaaaaaaatctccccggcagtcatctgtttcacacctga

SEQ ID NO: 16290 - DNA, 399 bp, Escherichia coli
gtgggttataactatgaagcactgcaacagcaaaatgctggttatgtaaatacctgtgccacacgtatgagtctggcgctgattaaatcaggcgtcagctttaacgggcgactgacgatcaaaagtggtgactggaaagggaagaaaatagaaaccggtgcgaaattactggcagatcagctttcccgagctgatgtttttggaagaccagttatctggtgtgactcagaaaaatttaaaacagacaccagtaataaaagaggagtggtctttttctggaagattacgggttacggtggcggtcatattgatcttattgagccttctaccacaggtgctatatgtcattcacattgctattttagctgcaaggaaatctggttctgggaactgaattaa

SEQ ID NO: 16291 - DNA, 762 bp, Escherichia coli
atgcgccgggcagagatatcggccccggcgatgttcggcagactgccggaccagcgggactatgtgcgctggcgggtgagcgcgaacgaagggcaggtgtggcaggcgtggctgaaccagcaaacgtggctgggacaggggcggcatattgttctgccggaaggaacggatgctgcgaagaccggagtaaatgacggttggatgcacctgtcaccgagcgagaaaacggcggtgccggaacaccatccgctaccgtggagctttgtattatcgccgggatttttatccattggtgggcgcgatgagtggctgaccggggtactgaccgcctcgcgtgacagcacgggcaggccgtggccactggtgatttaccagcgtgccgggcgggaatggctggaagagagcctggatgatacacagggctggctgtactggctggcgcggttggcggcagctcatgtctcaccacaggctgaacgctgcggacgactggcggagcagacagaccagctctgggcgatgtggcgaccggggccgcgctggacacaatggctgcgcggcctgcgacgtgtatcgcagcgtagccgggaactcaccggcctgccggacgcaccggtagtggaactgcccggcgtgcgccacctgccgtggccgggctggccagacaaaatgctggcacaggcgcagcaggggcagggctggttctggcagcagaacagcgaagggcggtatgtggatgctttgcgactggagaaaaaataa

SEQ ID NO: 16292 - DNA, 180 bp, Escherichia coli
atgaccagcgaatgggaaaaagacctgctgctgggattaatcagtgacgaagacagggagaagctgaaagcgtaccgcatttacgcgaaatcgctgcaggcgatggatttcagccccatcattgataaagcttcatataacgccattgaatggcccgtctctcctgaagcctcttcctga

SEQ ID NO: 16293 - DNA, 3129 bp, Escherichia coli
atgtctgtagtgatatcaggtgcgctgatagatggcgcaggcatccctatgtccggatgccacataattctgaaatcccgggtaaacacctcagaggtggtgatgcgcacagttgccgacgtggtgacaggaaactgtggcgagtactgttttaaggcgcagaccggaaaatattgcgtatatctgaaacaggactggcgcgacgagtactgtgttggcgacatttcggtttacgacgactccaggcccggcacgctgaacgactttctgaccgctctcgatgaaggcgacctcaagccggatgtagtgaaacgctttgaggaactggtggcgcaggcgcagcagagcgcggaagcggcagcggaaagcgaacgacaggccgggcaacatgtcgctgatgcgcagaagattaagggggattgccagacgctggcggataacgtacagcagaatgcagaatccgttgccgaagataaaaagcaggtggcacagctggcatcatctgccacacaggatgccgcccgggcagaacaggcggtcaaagatgccgataagatagtccagaaagcggtcgataaacttgctgatgccgcaacgctgaccggtgaggcaaaagccagcgccgaagcggcagcaaaaagcgagcagaacgcgaaacagcacagggacgaggcgcaacggatagttgatgacctgaagggaagcaatgcttccacgacagaaaaaggtctggtgcaactctgtagtgatacagacaacgacagcgaagaactggcagccacaccaaaagccgtcaaagccgtcatggacgaaacgaaaacaaaagcgccgctggacagcccggcgttcaccggcacgccaaccacaccaaccccaccggacgatgctgccggtctggaaacagcgaatgcggcttttgtccgcaaactgcttgctgcgctggttgactcgtcaccggaagccctggacacactgaacgagctggcagcggcgctgggcaatgacccggagtttgcgacaacaatcatgaacgcgctggcgggtaaacaaccactcagtgacgtgttaaccgcaatcagtaatctggaagaacgggcagataatcttctgtgctttaatcaggacggaaatgcttcactgtctccactgtcagaaaaagcccggtcactgctggcacaggccacagtggaaaccatgcgcaatgagcttgagctgaaaagcgcagcggtaagggacattcagacagacctttacgacagctcggaaggccgtgttgcgctgcctggtgcatttggttacggaatgacggacgccggagcgcgttcaattattgccagcgatatggcgactgtagccagaactgcgcacaacctgcacccgggacggtattacaccttttccacacaaacggaagagacgaccggaataacagaaattatctggctggataatggctggggcgacaaaacaagccagacagcaacaaagctggttctgttttttggaaaagacggacggattctcatgaccgttcgtggcgataatatctccgccccggtcacctggacgaatctgacgctacaacttggcaatgcagcacagaaggatgcacaggagaatatttacgaccgcaccgaaggccgtctggcgattcccggcatgtttggattcgggaaagtattttccagcggcgacaggaccgaatttaaaacagaggtcgattttctccgctgggtaaaaacggcaaaacccggtcgttataccgtatttgcggacacaaatgtggtggtaccaggcattcagacaaacggcgttattgaaattatctggccacaacctaaaagctcaacagatgacagggcctataaggcagtaatttattacggtgttaatggtcagatttattacaatcgctacgttggtggtcatgggtatctggttggctgggaaaacctgaaggttgatgtggcttcactcattgcacagattgaagcacgcgcgcccctgaaaagcccggcactgaccggagcaccgacaacaccaaccccgccagatgacgcagcaggcactgaaatagccaatgctgagtttgtccgcaaactgcttgccgcgctggttggctcatcaccggaagccctggacacgctgaacgaactggcagcggcactgggcaatgacccgaactttgcgacaaccgtcactaatgcactggcaggtaaacagccgcttaatgacgtgttaacggctgtcagccagataacaccggaagaaaacacactgccttatttcagtgcagagggccggattttactggcgcagctgtcagaaaaagcccgcgcattactggcgctggacacacctgaagccatgcgcacggagcttgagctgaaagcggctgcgacgatggaaccccagagtgatatccgcgaccgcacacagggcaggctggcactgtccggtatgcatggattcggtcaggcatttgccagcaccgaagccctgacatttaacgggcaggccgattttgctgaatggctgaaagaggccacgccggggcgttatgcggtcagtattgcagactcttccacgctgctggttggcacaacgaaatttaacggcatcattgatgtgatgtggtcaccctttgataacgacgagtcagacacaacgcgcaaattcaaaacgctgctgtgttttaaccagtattacgaaggtgagcacagtattcatcgcctgacttaccgctggagtggaaacaactggaatgcaacagtaagccctgtcatttacgatggcgattcgctggcgttcctgctgtcccgaacggcaggctcaggctcatatttcaaatacccggcagtgggtgttccggtgcttgctgtttatcgcggaacaacttccggggataaagaaatcaaaattggcctgggtgatgtggtgccagggtcacaactgggcggggttaatctttcgtgcacaatatcttctgcagggcctggctcttacggttcaacaccaagtgcaggagcaacagggtacccttttccggggcgttatatggcgttatccggggtcagggactcttacggaacaagcggtcgtatctgcctgtttgtgcgcatcgagtaa

SEQ ID NO: 16294 - DNA, 579 bp, Escherichia coli
atgaaaatcagagcggtaaaaggcgtcagaaacgcccattatctcgaaaattgtgcggttgactgcgaggtgttatttgagggtgaaacggaattcgtcccgtataccgctgtgcaggacgatagcaccccgacaggccagcgcatctgggaagagttacagagcggcaaatggggcgaaatcgccccatttgccatcacacctgaacttatcgccacggcgaaggatgccaaaaagcgggaaatcgaggcgtggcgaacagaacaggaagcgcagcccttcacgtttgaatggaacggacgtacctggaacgctggccccgactcactggctcgcctttatccggtagtaatggctgcaaaatcggatacgacacgaaccgcccttgcgtggggtgatgccgataatcaacaggtgaaactgtcaatgccggaattggaagaactggcagcagcaatggctcaggctcaggtcgagcgcaacgatgagatttatcgtcgtcagcgggagataaaagaggagttgagccgcttggatgatttgcgctcaattagaacgattgcaattagcagtaattaa

SEQ ID NO: 16295 - DNA, 546 bp, Escherichia coli
atgacacgtcttgctttatatatactattagctttgccgtgcctaagctctttttacgttaacgcgtcttctttacaggaacaattagcggctattgcgcgagccgaaaatgaaggtaaaaccgaagaaaaacgtattgaagatgcacgtaaagaacaagagcgccaacgtgccaatgcggaaaggattcgcaaagagaaagcagcagctatggcagcagcaaaagaaaaacaacgacgagcggctgagcttgagcgtaaggctaagctcgaagcagaaatagcggcagataaaaaacgcgatcaagattatgaagatcaactacgccaacttgaactagaaaaccgaaaactcgaactcgaagctaaaagggccagagtaaatagagcaaacgattttctggaccaagaactcaaggaacgggctgcacaaactgacgttattcaatcagaagcggacgctcggcgtaatatttcaactggtaccaaagaattgttgcaaagtgagggaaaagcgagagagagtaaagccgatagctggtggtaa

SEQ ID NO: 16296 - DNA, 513 bp, Escherichia coli
atgttgaaattaaataaagcaaccatttctttattagctgtctttgcattaagtgggtgtcagtctactgcagaacatcttgctgcagatgtttatgacaccactcaggttaattccaaacaagaaaccaaaatgataactatcatttcggttcttcctgcaaaaattgctgtggacaacaaagaaaataaagaagcagcacaaacattcggtgctgtagttggtgccgttgctggaggagtaattggacataacaccaaaagtggttcgaaactggcaactaccgcaggggctgtaggtggaaccgcacttggtgcagccgctggttcattagtcaaagataaaactattgttgaaggcgtttctctaacatacaaagaaggtacaaaagtttatacatcgactcaagttggtagagcttgccaatttgcgcctggattagcagccatgatttcaactaaagaaaacgaaacacgtattcaaccaaatgcaacatgccctgataataaataa

SEQ ID NO: 16297 - DNA, 405 bp, Escherichia coli
atggctattcaaatctcagttgaaactctttccccgatcacccataaccaaatccctgtcattactaccgagcttttggcacaactttatggcaccgaaactaataacatcaaagtgaactatacacgcaatgccgagcgttttgtttgtgggaaacactacttcaaattggaaggagctgagttgcgggaatttaagaacaaggttactcaaagtaacttagttgcaccgcgtacaaagcacctcatcctctggacagaacgggcgcagcccgccacgcaaaaatgttcgaaaccgatcaggcgtgggaagtgttcgaaaaactcgaagactgttatttcagccaaaaacaaccaccagcagcacaaaactccgccaccaaaaatgatggattcacattactga

SEQ ID NO: 16298 - DNA, 1659 bp, Escherichia coli
atgaatgcgactgcagcccagacaaaatctcttgagtggcttaatcgcctgcgtgcgaatccgaaaattccattgattgttgccggttccgcagcagtggcggtcatggtcgcactgatcctgtgggcgaaagcccccgactaccgcacattattcagcaatctttccgatcaggatggtggcgcaattgtcagccaactgacgcaaatgaatattccttaccgcttcagcgaagccagcggcgctattgaagttccggcagataaagttcacgaactgcgtctgcgcctggcacaacaaggtttgcccaaaggcggcgcggtcggtttcgaactgctcgatcaggaaaagtttggtatcagccagttcagcgaacaggtgaattatcagcgggcgctggaaggcgagctttctcgtaccatcgaaactatcggcccggtaaaaggggcgcgcgtacatctggcaatgccgaaaccgtctttattcgtccgtgaacaaaaatccccttctgcatcggtgacggtaaatctgttacccggccgcgcactcgatgaagggcaaattagcgccattgtgcatctggtttccagcgcggttgctggtctgccgccggggaacgtcacgctggtggatcagggtggacatctgttaacccagtccaataccagcgggcgcgatcttaatgacgctcagttgaaatatgccagcgatgtcgaaggccggattcagcggcgtattgaagcgatcctgtcgccaattgttggtaacggtaatattcacgcccaggttacggcgcaactggacttcgccagtaaagaacaaacggaagaacagtatcgccctaacggtgatgaatctcaggcggcgcttcgttcacgccagcttaatgagagcgagcaaagcggttccggttatccgggcggcgtaccgggggcgttgtcgaatcaaccggctcctgcgaataacgcgccaatcagcacgcctccggcaaatcaaaataaccgccagcagcaggcgagcaccaccagcaatagtgggccgcgtagcacacagcggaatgaaaccagtaactacgaagtcgatcgcaccattcgtcataccaaaatgaacgtgggcgatgtgcaacgtctgtccgtcgcggtcgtggtgaattacaaaaccttgccagatggcaaaccgttgcctctcagcaacgaacagatgaagcaaattgaagatctgacccgcgaggcgatgggcttttctgaaaaacgcggtgattcgctcaatgttgttaactcgccgttcaatagcagtgacgaaagcggcggagaactgccgttctggcaacagcaagcgtttatcgatcagttacttgctgccggtcgctggttgctggtactgctggtggcgtggctgctgtggaggaaagcggtacgcccgcagctaacacgtcgcgctgaggcgatgaaagctgtacagcaacaggcacaggcccgcgaggaagtggaagatgcggtggaagtccgcctgagcaaagacgaacaactccaacaacggcgcgctaaccaacgtctgggggcagaagtcatgagccagcgtatccgtgaaatgtctgataacgatccgcgcgtggtggcgctggtcattcgccagtggataaataacgatcatgagtaa

SEQ ID NO: 16299 - DNA, 300 bp, Escherichia coli
atgcgcgccattgctgataaacctggtatcgaacaggtggcactgatggaagcagccgtcagcaccaaagcaacgctggcagaaatgttggcaagaatggaaaatcgtggcttagtcagacgcgaacatgacaccgctgacaagcggcgtcgctttgtctggctgactgccgaaggagaaaaggtacttgctgcggcgataccgattggtgacagtgtggatgaggaatttttggggcgtttgagtgcagaagagaaggagctgtttatgcagttggtgcgcaagatgatgaacacatag

SEQ ID NO: 16300 - DNA, 294 bp, Escherichia coli
atggctgaacacgatattacgccagaagtcaccatttccaaaacacagcgccgctgtacggtaggttatctgcccaaccgcagcgacacgccggtgatcaaaatcagcgccaaatggctgagagaagcgggatttgagatcggcacgggcgttaccgtgaagatctcggaaggctgcctgatcctgcttgcagataacaacgaagtacaggaactgcgcagggaactttatcaggttaaacagtctgttaaggggatgcggaatggggtgtttagtatgctgaacgataattaa

SEQ ID NO: 16301 - DNA, 264 bp, Escherichia coli
atgaatatccgaaatcaatataatgaagccttaaataaattagatgttgatgttaatgatggtttgagagatttaataaacatatattgtgtggctattgattcttttgaaaatgatatcgttgactcgattgctttatacgtgattgatatgggaaataaagatacttgtcgatatctacaagaaatattatcagagaataaagatccttatttagtaaaagagtttaatgtatggataaaagaaattaagaaaaaatattaa

SEQ ID NO: 16302 - DNA, 519 bp, Escherichia coli
atggtaacggatccgataggcttaaggggcgggctgaacttatatgcttatgcgccgaatccattaacgtatattgatccacttggtctttgtaaattaaggggaagtaatgggcgctttagaagtgcacagaatattcaggaagaaataggcggcctgcccaatttttcaggaaaaaccccagggcaaatacggcaaactttgcgtaatcgaggttattcttcggtacaagcgcatagtggaggagaggtctggacaaaagcattacctgacggaaatactgttgcagtgagaattgacccagcaaatcctcgctcaccttcacattatgccgatgctgtacctcatgctcatattgaaacagttccaacatccagtgtttctaatgggaattatcgtccgagagacgtgacgggcaggcatactgccactggtggggtttctgaccgaggaacgaatccgaatcataacgctgatgttcacattccaatgtctccgggacgacccccatataattaa

SEQ ID NO: 16303 - DNA, 900 bp, Escherichia coli
atgaataacgctctttataaccagattcgcatcttccagagcattgcgcgggagggcaatatttcggcagccgcaaggaaactggaaattacgcctccctccgtcagcaatgcactaaagctgctggaagagtatatcggccatccgctttttgtgcgtacgacccgccgtatagagctgacggaaaccggtcaattattgctggaacagaccgctgcggcggtggagtcgctggaaaactcgcttgaaagcattcgcgaccagcatcaggagccctctgggatggtgcgaattacgctctcgcgttttgcctacctgttaattcttaagcctgcgatggcagaattctgtcagcaatatccgggtatacagttagaaatttcggtctacgacggtaccgtgaatatcatcaaagagcgttttgatctggggatccgttttggcgatattcttgagggaggggtggtggcccgaccgttaatgaaaccgtttcgtgaaggattatatgcatcctcagcgtatctctcccgacatggaacgcctgaagtgccggcagatctctgtcatcaccagctgattggttaccgttttatcaccaacaaccgcatccttccgctgctcctgaacgatcgcggtgagcagttgaccgttgagatgccggggcagttaatcagcaacgatattgacgttatggcagacgggatccgtaacgggctgggaattgggcgcttgtttgagcctgtctggcagttacagccggacagggagcgctttattccggtgatggagagctactggaaaacctacccgccagtgtatctctattaccccaaaaacgcgggtaaaacgaaaagagtgaaggccctgattgattttctgatatccactacggggcgataa

SEQ ID NO: 16304 - DNA, 285 bp, Escherichia coli
atggctgttaaaggtatcaagttttctgaagtcaaagcaaaagcacttgccaatcctgacgttaaaaaggcttacgatgaagccacgcaggaagaagaacttcgtgcagtcctcattgaaatgaagaagagagccggattaaccagcaccgagattgcagcacgcatgggagttagccaaccagctgtcagccgtcttgagaggaatgtatcaagtgccagccttacaacgttacaacgttatgctgcagcttgtggtatgcacattaagttgtctcttcaataa

SEQ ID NO: 16305 - DNA, 321 bp, Escherichia coli
atgtatgagctactatttcaccccgaagcggaaagcgaaatttatgacctcgaacctattatgcaagcaaaggtacttaagggactagaaaagctggaagcgaaagggccggaactccgctatccagatacaggcattatccaggatggtttgtttgagttgcgcgtaggaagaaaagacatttcaagaacattttttgcttacgctaaaggtcgaaagatctatattttaagaacgtttattaagaagacccctaagactccgaaggccgaaattgctctggcgacgtcaagatgggaggaactgaaagatggctgttaa

SEQ ID NO: 16306 - DNA, 1440 bp, Escherichia coli
atgtcaggatttaaaaaaggttttttatggggtggcgcggtagccgcgcatcagttggaaggtggctggaatgaaggaggaaaaggcatcagtatcgctgatgtgatgactgctggcgctcacggtgtgccgcgtgaagtgacagaaggcgttatcgacggacttaattatcccaatcatgaagcaattgatttttatcatcgctataaaacagatattcagttatttgccgagatgggattcaaatgctttcgaacttccattgcctggacacgaatctttccgcaaggtgacgaacaggagccgaatgaagagggtttaaaattttatgatgatctgttcgatgaatgcctgaagcagggaatggaacctgtggtgacgctttcgcattttgagatgccttatcatctggtgacaaaatatggtggctggcgaaaccgtaaactgatcgacttttttatccgcttcgcatcaacggtcttcacgcgctataaagaaaaagtaaagtactggatgacgtttaacgaaatcaataatcaggtgaatttcagcgaaagcctgtgtccatttactaattccggtatcttgtattcgccagaggaagatatcaatgagcgcgaacaaataatgtaccaggcggtacattacgagttagttgccagtgctctggcagtacagactggtaaatcgatcaatcctgaatttaatatcggctgtatgatcgccatgtgccccatctatcctctgacgtgtgcacccaacgatatgatgatggccacgaaagcgatgcatcgtcgttactggtttactgatgttcatgcgcgtggatattatccgcaacatatgctgaattactttgccaggaaaggattcaacctcgatatcacaccagaagataatgcgattcttgccagaggttgtgtcgactttatcggctttagctactacatgtcttttacgacacaattttcgccagataacccgcaactggattatgttgagccacgagatttggtcagcaacccttatatcgatacatccgaatggggatggcaaattgatccggcagggctacgttattcgctcaactggttctgggatcatttccagttgccgctgtttattgtcgaaaatggatttggtgcggttgaccagagacaagctgacggcacggtgaacgatcactatcgcattgattactttgcttcccatattcgggaaatgaaaaaagccgtagtcgaagatggtgttgacttaattggctacaccccatggggctgtattgacctggtttctgccggaacaggggaaatgaaaaagcgctacggaatgatttacgtcgataaagacaacgaagggaagggaacgctggaacggatacgtaaagcgtcgttttactggtatagggatctcatcgccaacaatggcgaaaatatttga

SEQ ID NO: 16307 - DNA, 3210 bp, Escherichia coli
atgacatatcaggcaattttcactggctgggatgatctgacgattgaagaccttctggtcgcttaccggaaagcaaaagccgatagcttctttgagaatacatttcctgttgctatcaaatttgccgagtatgagcaggaattacttgaaaacctgcaaaaactcttagatcttttgcagagcgaagatggattcagtagcaataagaagttgattggcaaatttcgtttgttaccgaaaaaattaaccacaaagaaaaaacatgaatcccaaaatggacacgtccacttttctaatcctaaacgagcagccgaccatttatttaataattttgatctgataccagagtttcgtattattggtgacttcccggttgatagtcacattatctctgcactatggattaacatggtcgggcataaatttgatgccagcttagataactgttgctatggcgcgcggctaaagcgtattcgtaatgatgaattatttagcaatgagcaggataatccattccatatcagtgccgtgggttcttttagcccctacttccagccctaccaaaaatggcgtggtgatggcttaaaagctatacgtgacgagttggaaaaagatcgtgacattatcgccgcctcactggatttaaaaagttactatcattttattgatccactggctataacctctgatgatctctataacacactaaacataaaactgactgaggatgaaaaagcgtttactgcacagttagcagtattcttaaagcactggtctgacggcgcagcggcatttggaaagaaaatagcgtacaaaacacctgttattaatggtggtctggtcattggattaacagccagtcggatcatttcaaatatattgctacaccattgggataaattagtcattgaaaaactatcaccaattcactacggtcgttatgtcgatgatatgttccttgtaatacgcgatacagggacaattactaataatcacgaatttatgttattgctgcaagataggcttggcaatgattgcgtttatttgaaaaacgagcaaaaacaaatatggcaaatacagcagggcgagcatttccagggtaagaccaccatccagttacaatccgataagcaaaaacttttcgtgcttcaagggagggctggaatagacctgctcgacagtatcgaaaaggagatctacgagctttctagtgaacaccgcttgatgccttcaccggatcaactggaacactccaccgcagctaaagtcctttccgctgccggtagtgtaggtgaaaatgccgatactctgcgccgtgcggatggattaaccattcgtcgtttgggctggtcactgcaattacgctacgttgaaacactggcacgagatctgcctccaagtgaatggaaagaacagcgggaagagttttatcagtttgcctacaaccatattcttagggctgataatctatttgcacattttagttatctgccaaggctgcttggctttgctatcagtatgaatgaatggcagcacgcggaaaaaattgtacttaaagcttacgaatccatcaacctgttggcatcggtgattacttcaggtaaggaagtgaatataaatggttgcaaaactcgagcagtaaatgatctttggcgctgtataaaaggcacattaagctggctatttgttgatgcagcgacacgatattacagtcctgacagattatttcttgataaacgttcaaagaaagaagagtgccttgcggatacattttttaatcatatttcacaaagtctgacgaatctaaaggatttactggatcttcgctttgattcagcagatttttatttaaaagcgccattggtagctcgagctgatttagcaaaggaaccttataaacagatcgtaaagagtcagtcggcagaaaaacttgttaatcagcgtgatagtaaaaaagaagttaaaatactgaaattaatgagcgactcatcgcttattgatattgacgttattaagctatttttgaaatcaaccaagaatacccgactggaaaaagtggctaaaggaaatcgtaagaacgaaagttacctaccttacattttccctacacgtcctttaacacccgctgaaatatcagaactggcccccgaatgtgttggattaccctccacatccgacaaaaaaccagatgagagaccgtccaccatttgggcaaaatatactcaagcattacgcggagtatggatcaaaccgacgttgctagcatcggagcaggactcagatgaagcgacaaaaaaagctcggcctaagaaattcattcatattggcacagacaggaaacataaagttgtcgttgcgctaaccagcattaaaacagaggaggacgactgggctaaaatggcctgcaataaatctaacttgtcccgttcaaggtaccagcggatttctgaactggttaatgcaacattgaaactatctcctaaacctgattatgttttattccctgagctttcaatcccgttacgctgggttaacagtattgctgatcgtttgagttcggcgggtatcagtctaattgcgggaacagaataccgccacttagacgataatcaactgaagagtgaggccgtacttgtcctttcagataacagactcggctatccagcgagtgtcaaaatatggcaacccaagctggaacccgccgtaggtgaagatgaggcattattttcaacttatggtaagtcttgggattcgacacttaatgttaaacaacgtaagccggtatatattcatcacggcgtcaattttggcgttatgatttgctctgaactccagaatagtaaagcgaggatccgttttcagggcgcactcgatgcattaatggtattgagctggaataaagatctagatacgtttgcatcgttgattgaatcagcagcgctggatattcatgcctatactattttagtgaataaccgaaaatacggcgatagtcgcgtacgttccccggcaaaagaaccctttatgcgtgatattgctcgtgtgaagggcggtgataatgactttgtggtcgctgcaacgctggatatcgactcgttaagggcatttcagagcagggcaaaacgctggcctaaaggcggcgataaattcaaaccgttacctgaaggattccagttggcaaagaaccgcaaaaagctaccgccaaaataa

SEQ ID NO: 16308 - DNA, 2019 bp, Escherichia coli
atggttataaagaaaaacattaaacttgataagaaagattatctcagggctttactatgtgatacactgcccggtgattgtccaattattttttcaaatgatggcttatatataaacttaacagaatatgatagagcttgtaatgatttgttacattttactccggtttcttctttcttaaaaaaaatagttaaccctaatttagactcttctattagtgtcgcagatcgccaccgagaaaagaagaaacaaagctccccatttggctattgtatagtaaaagatgcctttagccaaagacatctttctttaattcatccaagatctcaaattaattattcggaattttataaaacatactcatccgttatcacattaaatactttaaaaagtaatttttctattcgctacccacgtaaggtcgctaactctttctttttatatgaaaataatgctttggaaaaatataaaggggaagatatcgaaacaacaaaggatgagttaatgaggaaatattcatcctcttattttagttatggcggtttcaacaggatatataaactatttcaaagtaagatgtttattgagcttgagaaaagattctcggtgatgtggatgttagatgtatcacattgttttgatagcatatatacgcattcggtttcttgggcattaaaaaataaatcatatatcaaaaaacatgttaaacacagcaatcaatttggacaagaattagatacactgatgcaacgtagcaataataatgaaacaaatggaatacctattggttcagagtttagcagggtttttgcagaattaatatttcagcgaattgattgcaatattgagtcatgccttcttagtgaacatggatgggttaataataaagattatgttatattgagatatgtagatgattttattgttttttgtaatggtgagtcaagtgccgaagttattacaaaaataattaatgtgaagttaaatgaatataatctacaattaaatgtaaacaagcttaagaagtattctaggccattttgcactagcaagacaagtttgattgtcaaagttaatgaattaattcgcaatttagaaattaaactgtatgaaaaacgtgatagtggctttactttaaataaaataagaagtaagcatgatttaaagatatatgtaattaatcatgtcaagtctatatgcattgaaaatcaagtgtcttattctgatgtttcatcatatataatatcatctctttccaaaagattaatatcaataattgatatattacgagttcaagaaaatgaagatgatgtagatgtaaaaaaaaggattaaggacttaattttcacaataaccgatattatgttgttctttttcagtgttaacccaactgtttcatcatcttataaattatcaaagacaatggttgttgttaataactatttgaatgaaatatctagtgactatagtagtatttttatgactacgttagtgaatgctgcggaaaacattaattttggtgagaatgataatgggctgtttattgatgatttcatttcaattgaaaaggttaatttaatcttggctgctactttttttggggataattatcttataagtgacagtttttttcatggagttatacataaaaagaaattggactactttactataatctcactgctattctattttagaaacagaagatcattccgaaaattgaagtgtataatagagggtgaaataaaggaaatattaagttctaatatggatttgctgcaatcatcggaaaaggcacatttatttttggatgtcatgtcatgtccatttgtctcaatagagacaaggcgttttttatatagaaaatatctcaagagctatgagccaaagctgaacagaagtcatctggagattgagaatgatttgcaatctctgcttcaaacatattggtttgtcaagtgggatgagttagatattgtgaaaatgattgagaaaaaagaattgaaagaaagctattaa

SEQ ID NO: 16309 - DNA, 1278 bp, Escherichia coli
atgaaccgtcagccgtttacttcagcagcacttaaacgaaacttaagtgaaagtgagaaggcttattattttaaaaaaaataatgttgctgagttagaatcattaattagtgatgccgttttaattgctaatgagaattttcgctctggtgtgagtgtaaagaaactaaatattaagggacgctgcgtttacactgcttcatgtttgaaggaaaaaataatacttagacattgcaatgcaaatttaaaatgccttgaatcgcttcgtcccaaacaacgaaatacaataattagtgagcttaaaatttatttggaagaaggtactccattcaaaatatatcgtttggatataaagtctttctttgaatcaattgatttaccgcagctttttcagctcttacataacgaaacacgactgtctagacatacaaaaaatttgctagaatggtatcttaaatcgtgtgaaaggcttcactcttcgaaaggattacctagagggttagaaattagtcctatgttatcagaattgtacttggcacaatttgataatagtattcataggcatccagaagtattttattattcaagatttgtagatgatatggtaatcgtttcaagtggttgtgaatgtgaagcgtcctttatggaatttatacaagatgtattaccaaagggattggctttaaataaagataaattaaaaatatctccatgcataccaaagagaagtaagggtttaaataaacaggataaattgcttcatgaatttgactttctagggtactcgttttctataatagacacacctttgagcaaagatggtgagattaatagctgttacagaaaggttgttgttaatttatctaaatctcgcctgaagaaaattaaaacaagaatagctaggtctttctactcttatcatattaatggtgattttaaactattgctagacaggatttcttttttgactagtaacagggatttaaatcgcaaaataaaatcgttaagttctttagaaaaaagcaagataagtacaggtatttattacagtaatgcgaagttagatgttgactccatatccctaaaaaaattagatgactttttgctatattgtgtgcaatctaatactgggcgtttgaatagtgttgcaaaaaaaccttttaatttgaagcaaaaaaaagaactgctaagaaatagttttagaaaaggctttgtggatagagtatatagaaagtataactttaagcgctatactgagattacaaaaatatggttataa

SEQ ID NO: 16310 - DNA, 273 bp, Escherichia coli
atggcacttaaatgtccggaatgcggtacagttgcacacgccagaacagcagcctatgaagctccgtcagttaaacgctcgtggtatcagtgccagaatctggaatgttcctgcacatttacggcactggagagtgtggataagataatcatgaaaccccggcgcaatgaacaggaaccagacaaatcacaacccccggtaaaacaacagcaaacgctcaatcgctatggctccgcgtcaaaactgtcaagccgtcagcagattcctgtctga

SEQ ID NO: 16311 - DNA, 552 bp, Escherichia coli
atgacggcccgaggcacgcctgaccaggcacttaccagttttcggaatgcccgcattctgtgggccggacataatgagagccgaaaagccgttgaacaacagataacatctctcctcgctgccacagaaaaaccagcagattatgcccgacagctcgaattactgcgggaacgtctggatgtgctgaaatggcaaattaactgtgctgcgcgcgaatgcatttactcgcagcatttactgatggaggcctgcacagaagccgctctcagcaattttatgcaggcgaatggggcagccctgacatctgcactggctccgttcctgaaggggcgcggaggggttgacgttgcgtcccgtatattacgcagtgctctggttcgccagctggcaataacaccgcctgaaattgctggggattatcgtgagatcctggatgaatccggtttgatgcctgaccccgggatgattcgtgattgccagggttcttacaccccggcacaacatctgcgttttcagcaacgcctgaatgacattaacgatatacaggagtga

SEQ ID NO: 16312 - DNA, 744 bp, Escherichia coli
atgaacaataccgcagtaaataacaacctttccacttttccggctgtaacgcagcgggcactggaaaccatgaacacagccagaaacgcatggcttgaagcacgtcgtcagcagaaagcggcagcggataatattgcgacaatccgccagcgtcgcgctgaaatggaagccacgacgaacacactgaatgaggagtggcgcacgctgtttcgtgaaagtcagggcgtggtctcaaaggaaatgaaaaaactgcgcacggaaattgcgctgggacgagaaacgcttgaggattttgatgagctgctggcggctcaggaaagcgaaaatgcacttttgccgcagaaagctgcagaattagccggacagtatatccacgcgcataacattcttgtggatattcgcgcaaaacaaatctgggaggattttatgcagtcgcatggaaaagcgcttattcagacgctgagcctgcttaaatccacaatgggccgggaagccagtgccgttgtgggtgtggtgaattcagttaatgacccggacacagtgctgaaagactttattcataaacatatcaccagaccggctctggctaacgatgcgatgcctgagcaggacccggtgtttaaactggcgggagttgccccggattatgcggcgcgtctggatttcagtaatcaactctctccggcagctatgcataaaattaaggttcgtcaggaacttgctgagaaggagaaagcagtatga

SEQ ID NO: 16313 - DNA, 2673 bp, Escherichia coli
atgacaatacagacggttacgcagatttcagccgccgcacgggggaaatggcccgttattctccagatgctgcgtattgatgtacctgaaaacggcaggcacggtccctgcccgaaatgtgggggcaaggatcgttttcgccttgatgaccttgacgggcgcgggacgtggatctgcagccagtgtggcaatggtgacggtctggatctggttaagctcgtaaccggttacagcatcagaaaggctgcgcaggaggtggcgcaggtgcttaatgtgccggatgtgcaggaactgcctgttaagcctgccagacaaaaagcccctaaacgcgacatgggtcttaccgtggcggcgctgatgaaagagagccacacgggagaaagcgcctatctgacaggaaaagggttcgccggatacccggcctctctgaccggaagcgtgcagcatatcagcggtaaggattttcctgccggttccctgctgttaccactcacgaccaacaccggagccgtgactggtgcacagcttatcgccccgacgggtgaaaaaagcatactgcccggcagcacgatgaaaggcgcgtttgtgtcgctcagcccgttaccgtctgaaccaccggtacaggtggtgattaccgaaggttacgctacggcgctgacggtaagtcagctcactgccggatgcgtagtggctgccatatctgcgggcaacctgcccaatgtggcgcagtcgctgcgggcacgctggcctgaggtaaaaattatcatcgccggtgataacgattttcaggacggaggtgagaatcccggcagagcctttgctgaacgggcggcaaaagctgttggcggctggatgacgctgccaccaggagagattaaggctgactggaatgactttcatcgggagcacggtattacccgtgcccgtgaagcctttcgcaacggtctggtactgtgcggggaaggccgcacgcaactgccgcacgggttccgtcttacccaggaatatctctggtatgaaaagcaggtacagcgcaacggtgagacggagatccagaacgtcaaaatatgcagcccgctgcgcgtgacggcaatcacctgcgatgccgatggcggtaacttcggacgactgctggaatgggaagatacgtggggtgagtgtcgccgctgggcgatgccgatggaaatgctgagcggcagtggtgaggaactgcgccgggtactgctggttaacgggctgtcttatatcagcaccaccggtgaggcacgcgcacgcctgatggaatatatctcactgtgtaaaccggaacgccgcgtgacctgcgtcagtcgtactggctggcatggtcaggtttacgtcctgcaggatgaggtcagcggtgaaggtgcagagggtgtcattctccagaccacttccgtgcaggggcgtgatttccgcgtgtcgggcacaacagaggaatggcgggagcatgtatcccgctactgtaccggcaactcccgcgtggcatttgctgtcagcctggcctttgctgcaccactgttacggctggttggtatggacggcggcggctaccacctcaaaggggaatcgacagacggtaagaccaccaccatgaaagcggcaacctccgtctgcggcgggcctgactactggcagacatggcgggccaccggcaacgcgctggagggatgcgccagccgccgcaacgatgccgccatgatgcttgatgagatccgggaagttgacggacgcgaggcaggcaatatcgcctacatgctggcaaacggtcagggcaagggccgtgccggtacggacggtgagctgcgtacccgtaagcagtggcgcctgttgttcttttcaactggcgagttgtctctgaccgaacatgcggcaaaggccggtgagcgtacttttgccgggatggaagtcaggatgatccagatccccagcgattccgggaagtttggcgtttttgaggagctgcacggcttcgacagcggcaaggctctggcagagcatcttgaatgggccacgtcctgctactacggttcgccgttccgggagtggctgaaagcactgaccgctgatcttaacggactaacggcacaggcaaaatcgctgatgaaggaatatgctgccgccctgactccgaaagatgcaggcaatcaggtgggccgggctgtgaaccgctttgctctggtggcgatggcaggtgaactggcaacccgtctgggtatcaccggctggcctgagggtgaagcactgcgggcaacccgcgtctgcctgaacgcatggctgaaagatcgcgggcacaccgccaatcaggaagatatcgccgcactggagcaggttcgcagtttcttcaccgcgaatcagtacagccgctttgcagactggtatgacgagcgcaaccgccccggcaatatggtgggctggcgcagggtggagaaaggcagtaccgcgcagggcacggaagctgtcactacgttctatgtcatgccgtccggctggaaagaaatctgcaggggatttgacccgcgcaaggtggcgcgtctgtgcgcagatcgtggatacctgctgccctccactgatggcaaactccagacaaccattcgcccgccagagatgaatccccgcaggctctatgtcttcaacagcgaggtgccgggttaa

SEQ ID NO: 16314 - DNA, 384 bp, Escherichia coli
atgaaccagccgcaggtttccattttcccggcagaaatgaccaccgcgctttaccggcgggctattgcttcagcatggcggcagaaaatgctgaacgaaactggcagtgatcagtatggtccgcacagcctgacggtggagcgtattgaaatggccattgcgctgcatatcgagtgcgtactgattaacgagtacggcgaagcacagggcgccgctgccgcgctggcactgctgactgacatgctggagccgtcactgctgaccgcgccgccggtactgaccgcgcgcggctgtgaagtgatggcggagatgtaccgcacgcttccggcggcctttgatgacttctgcagtaccggtgtgacgttgtatcagggggaagtatga

SEQ ID NO: 16315 - DNA, 285 bp, Escherichia coli
atgaatatttcaaacgggcacaacggtgctcagggccacactttgcctgaaaaacacaataccggtgtttttgcctatgggttgtcagaggacagtttcggaaagctgacccgcgcaagaaatgcctgcgacatgctccagcttctcttttctgaatacccgtctcaggccggagcactggacactggctgtgcgcatggtgtcgccgcgctgatggagtacctgctggcagatttgacggatattgcacacagctgcgcactgattgaaggaggtgccagatga

SEQ ID NO: 16316 - DNA, 360 bp, Escherichia coli
atgcgtaattatccgcatcccggcgaacgctggcagcatgaacgtggctggacggtcacgattatccgattaatagaagcctcgccctctgtggcgctggttaatcctgaattcagctgtgaagtgctgatacgtcatgacagcgacaaccagctttcttcctgccctctggcatggtttgaacagcgatatacgcgcctgtttgatgtaccgctctttaagcctgcaccagctcctgcaggcggtagtggttccggcccgctgacactgcatccgtctgtgctatttatccgctggcgggagcgtagcatatggcgttctgctgagcctgatgacggtcactattcaaagtttctctga

SEQ ID NO: 16317 - DNA, 177 bp, Escherichia coli
atggctaaacagaagtgtacctggttatttgcggcgatcaaccgcagtcaacgcaatgcccgtcctgtgatgttaaggatcaccgcagataacgagcggtcagcgcggcgcagacttgccccggactatgtactgagctttgccgggcgcattccctgcggaggtgaacatgcgtaa

SEQ ID NO: 16318 - DNA, 174 bp, Escherichia coli
atgtcaacaccacaagagaaacgttctccaccattccaaatgcgtcttaccgacgattttaggttgcaactcgaaaacgaaatgcgcaaagatggagatagcgcgttggcaacttggattaaaagaattttacgcaaagaactccaatcacgcgggattgaccctaaaggctaa

SEQ ID NO: 16319 - DNA, 291 bp, Escherichia coli
atgttatctaaacatgataatactactttgcaacgaccttcaatggattctctgatcgatatgaagtttattacttccgattgtttattaagtgataaatggatttatcgattgatttctctgaatcgctttccaaaacctataaaaataggtcggatgtcacgatggcgcgctgctgattattataagtggcgagatgggtttgaagaaaactcaggtcaacagtttgaggggatgagaaataaggcaagagcaattaataaagggaatagattatcacctactccctaa

SEQ ID NO: 16320 - DNA, 825 bp, Escherichia coli
atgaatattttaaaaattaataatactgattctctgctcagagattactaccagttggatgaagcttcagaaaaaattggttgtagtgaaaaggatatactctggtttgccagagaacgagatgtagagctatgcatggaattccatgatgatgagtatgatgtttcatgtggtttgaagattgatggtcaaatagatgagttcttatctaatctgaaatatttaccacgagatagaaatggcaatattatgttgtcagacttaagttctataagaatccctgatgaagataatttaattgataaaaatggttttattcgatgcttcatatccggtttatgggctgttgattatgaatataaagatctgttagttaagcatgaggggcaaccggattcctggcctattcattttctactggcgggtacgcctaatataaattgtaaggtaattctttatgtaaattatgatgaaaaagaaaattattatctttttgaggttttgtggattacaaaggtacagattcaaaaattcattgatatagtcttatgcgaacaaaagcggataaaaaacgccaataaatataaatcacaatctgaggcgcaaaaacaaaaacatgctgttcctcgagctgaaatactcatggctattatttcgctctatcatcgtgatatgaggctaagaagagagagtccagcagcgatagctgattatctttttcaacatgccagtgagttctggcctaagaccggagaaccgcctttgagctatgatactgttgttagtttgctacgtagttgcatgaaaaacattaagtttaactaa

SEQ ID NO: 16321 - DNA, 1191 bp, Escherichia coli
atgatgctgaatgcccgcaaggttgaagctgcgaaaggaaaagagaagagctacaagctgtttgatggaggtggcctataccttcaggtcgaacctaatggctcgcgttactggcgtatgaaataccgttttgctggtaaagagaaacgattgtcctttggtgtttatccaacagtcacacttgctgatgccagacaaaaacgagaagacgcgaagaaactactcgcagcaggtgaagatcccggcgaagtcaaaaaagccaaaaagcaggctttaaatgcagcgagtgagacacttaacccattcagagaagtggcgttagagtggcacaaaatgaaatcacccaaatggtctgagggctatgcttccgacatcattgaggcattcgagaaagacattttcccgcatattgggcacagacctatagctgatattcagccccttgaactgcttgaagttctgaggttgatagaagctcgaggcgctatggagaaagcgaagaaagtccgtcagcgatgcggtgaagtttttcgctatgccatcgtaacgggtagggcaatctacaatccggcaccggatcttgccagtgcgatgcaaggacatgaagcagtccactatccattcctcaaagccaacgaactaccggagttctttaatgcccttaattcttattcaggaagtccaattgtattgttgggggcgcatttacttatcctgacaggtctacgaactggagaactacgagcaggtgagtggcgagaggtggattttgataatgcggtgtgggagatcccaaaagaacgtatgaaaatgcgtaggagccatattgtcccgttgtcaaaacaagcattatcccatctcaaaagtttgaaagaactaactgggaactacccgctgatgttccctggacgcaacgatcccagcaaatttatgagtgaagcaagcattaatcaggtgtttaaacgtattggatatgcagggcgtgttacggggcatggtttcaggcatacgatgagtacaatcctacatgagaaaggatttaacagcgcttggattgaaacccagcttgctcattcggacaaaaactctattcgtggaatttataaccatgcccaatatctcgaagggagaagagaaatgatgcaatggtatgctaattatttatctgagcaaattggtactcataaatga

SEQ ID NO: 16322 - DNA, 2013 bp, Escherichia coli
atggattgttcaaaatgcaatggttatgcgacgatgttattaaatatggtgcatggttctgacccggttaatttactggaattacatggtttccttgaacacttcgcatattatgtttcatttggcaaatttaatgctggacaccagcgctataatgcatttaaaaaattcgtcagtgagatttcggagatcagcgcaaacgatatcaatatgacgattaaaaccgggcaatccagacatgaaaatgtgatctctataaatatgaatgatgcaattcctcgtgatgaaaaagggatcaccgtccgaatagataatattaatggaaagaaaagcaactctactttgtcagatgtttttattccctatgtaaatacattttcagacctcaaaaataaaatactcaggatgaaaattgaactgactgaaggtagtggtttttctaaaagtctttctgacagtcagattgagatgcatattctgaggaatgttaattcgctaaacgttggcgagaaattgaatgatgataatcttgcatatcattctatattcactaacgaattctctgttattattccgccatcctattatgatgcgacttctgtagtaaacgccaataatggtgtgagagaaaaactatttgaaagtgatagtaaagttaaagatatcgtcgatgaaatgtctaatcatgatgtggagagcgaaaaagatatatttgttatcggaggaatgatagaaaaactggattctctggtagacgaatctttcaatgaaaatactgataacatacaaacagtaaaagatttgttaacgcaattaactgatggcatggaactcttcgcgctgcgggacatagtggcattcccatcgtccataatagcaaaattattaaaatccccacttaatagcgatcatgaacttgttatgcgcgcattggatacgtatctgtgctacttcagaaataaaaatctgagtaacgatacggaaataattaactttttccatgctctctttttaaagagaccagagttgatggtttctgaaaattatagatttattcaatttattgatttgctttttgaaaacggaagtgttgaagagaaaaacttagcatttgacctttatcacaattatcttgcattacctgaaataaaacaattcgttactgaagaaataaagttgaatttcaatgagcagcaagggttgttagataaagataataaatgttatatcctgttatcatccgataactctgggcgagtaatgcgcttatcgcaccaggcgttaatctcaatgcttgagccagaggttaagaaaaagactatctggaataattactctatatatccatctttgcaggatacccatgaagatgtcagagatgatccagaaacgatttgtacgcgtgcatttcctttatttgcaaaaggatgggaatatgcgcagaaaaataagaaacaccaattgattctcaatgctcttggattgaaaggttatattcgtgatgtatttatgtcagcaataatgcgaaaaacagactttgtgccagaatcggataatcaaccgtcagaatttaaatcattattttcctctttgatgaccgattcagaccaatggcaacagcatactctgaaagataaacattacgctaatctattaacgatgctggatctcaaagaggccagtgaaagtgataagtctaaaatatttttctgtctgtctgccatatttgcaaatatttctcacagtaatgtcttttacggtattcctgatgcgtcaaaaactttaaaacgttatgcatttgctttattggcgaaagcttattctttagatgaaagtatgataagcagtcaaacttttaatacatacaaaacggtattgcttgatttcaataatctgtctaatgaagaggccaaccagttgcgtataagttcgttatatcgtgatatggtccgctacgcacaatatcgtttttctaaagttttatccgagtggacgccagacgcatggctgtaa

SEQ ID NO: 16323 - DNA, 351 bp, Escherichia coli
gtgatctttccctggttaatcatggctgaacacgatattacgccagaagtcaccatttccaaaacacagcgccgctataaagtcggctatgtcagagcccgccaccaggaccgcacaaccggtatagcccggtattattcacaacaccccagcctgcacctgaagggcgactggctgaaagaggccggatttgataccggacggggtgtcatggtgaagatttcggaggggtgcctgaccatcatcgctgacagtgacgaggtgcaggaactgcgggaggaactttatcaggttaaacaggtggttaaggggatgcggaacgggatgtttagtatgctggacgaaagctaa

SEQ ID NO: 16324 - DNA, 435 bp, Escherichia coli
atgaaaattagccttgaagataaattaaatttaattagagcaaaagattatgcttctaaattaaatggtgtcacttcctttgatgtatcattcttacgtaaaaatgacttcatgtggcatcgagaaatgctaatggcaataaataaaaccgataatattattgaaaggagagttttcaatttacctttaaatattaatgatctagcgagagatgttgaaagtacactgaatgtgaaaaaagatattctttgcaatatattctataatggagatgtttgcatatctcttcatgtcgaaaatttttcaaatttcatattgagtttgttttcgataaatgaaacatatgatctttcattagcatttacatctcctgatcgactaatagttttaagtgataatgaatatgatgttcagttatattatattcataaataa

SEQ ID NO: 16325 - DNA, 459 bp, Escherichia coli
atggtaacggacccgatagggctggcgggcgggctgaacctgtatgcttacgcgcctaatccagtaagctggatagatccgcttggtctgaaatgtggtgaattaagaaaccgtcgtcaggcactaaataaagcaaaagatcttgcgggcatacctcgttcacagcaacctaataggcaatggacagttggaaatgatcctagaagaaggggacaaacaaattataaatattcggaagatttagggtctcatgggcgatattatgaatatacggatgcctacggacgtaagaaagttgtagtcgagcacacggcagatcctaggactcctggccctcacgcacatgcaggacaacctaaaccgggcgctgatcctagaacatacgatttcaaaagtgatagatatcagaagatcaatgaccctgtaactaaggatcatcatatatattatgaaaattag

SEQ ID NO: 16326 - DNA, 1440 bp, Escherichia coli
atgtcagtacccgttcaacatcctatgtatatcgatggacagtttgttacctggcgtggagacgcatggattgatgtggtaaaccctgctactgaggttgtcatttcccgcattcccgatggtcaggccgaggatgcccgtaaggcaatcgatgcagcagaacgtgcacaaccagaatgggaagcgttgcctgccattgaacgcgccagttggttgcgcaaaatctccgccgggatccgcgaacgcgccagtgaaatcagtgcgctgattgttgaagaagggggcaagatccagcagctggctgaagtcgaagtggcttttactgcggactatatcgattacatggcggagtgggcacggcgttacgagggcgagattattcaaagcgatcgtccaggagaaaatattcttctgtttaaacgtgcgcttggtgtgactaccggcattctgccgtggaacttcccgttcttcctcattgcccgcaaaatggctcccgctcttttgactggtaataccattgtcattaaacccagtgaatttacgccaaacaatgcgattgcattcgccaaaatcgtcgatgaaataggccttccgcgcggcgtgtttaaccttgttctggggcgtggtgaaaccgttgggcaagaactggcgggtaacccaaaggtcgcaatggtcagtatgacaggcagcgtctctgcaggtgaaaagatcatggcgactgcggcgaaaaacatcaccaaagtgtgcctggaattggggggtaaagcaccagctatcgtaatggacgatgccgatcttgaactggcagtcaaagccatcgttgattcacgcgtcattaatagtgggcaagtgtgtaactgtgcagaacgtgtttatgtacagaaaggcatttatgatcagttcgtcaatcggctgggtgaagcgttgcaggcggttcaatttggtaaccccgctgaacgcaacgacattgcgatggggccgttgattaacgccgcggcgctggaaagggtcgagcaaaaagtggcgcgcgcagtagaagaaggggcgagagtggcgttgggtggcaaagcggtagaggggaaaggatattattatccgccgacattgctgctggatgttcgccaggaaatgtcgattatgcacgaggaaacctttggcccggtgctgccagtggtcgcatttgacacgctggaagaggctatcgcaatggcgaatgacagtgattacggcctgacctcatcaatctatacccaaaatctgaacgtcgcgatgaaagccattaaagggctgaagtttggtgaaacttacatcaaccgtgaaaacttcgaagctatgcaaggcttccacgccggatggcgtaaatctggtattggcggcgcagatggtaaacatggcctgcatgaatatctgcagacccaggtggtttatttacagtcttaa

SEQ ID NO: 16327 - DNA, 3903 bp, Escherichia coli
atgacagaacaacaaaaattgacctttacggccttgcagcagcggctggattcgctgatgctgcgcgacagacagcgttttttacgccgtcttcacggtgtgaagaaggttaaaaatcctgatgcacaacaggccattttccaggagatggcgaaagagattgaccatgcggcagggaaagtcctgctgcgtgaagcggcacgtccggaaattacttatcctgacaatttaccggttagtcagaaaaagcaggacattctcgaagcgattcgtgatcaccaggtggtgatcgtcgccggggaaaccggttccggtaaaacgactcagctaccgaaaatctgtatggagctggggcgcgggattaaagggctgatcggtcatacccaaccgcgtcgcctggcggcacgaacggtggcgaaccgtattgcggaagagctgaaaacggagccgggcggttgcatcggttacaaagtgcgtttcagcgatcacgtaagtgataacacgatggtcaagctgatgaccgacggtatcctgctggcggagatccagcaagaccgcctgctgatgcagtacgacactatcattattgacgaagcgcacgaacgtagcctgaatatcgattttctgctcggctatttgaaagagttgctgccgcgacgtcctgacctaaaaatcattatcacttccgcgactatcgacccggaacgcttttcgcgccactttaataatgcgccgattatcgaagtctccggtcggacctatccggtggaagtgcgctatcgcccgattgttgaagaagccgatgacaccgagcgcgatcagttgcaggcgatttttgacgccgtagacgaactgagtcaggaaagtcccggcgacattctgatctttatgagcggtgagcgggaaattcgcgataccgccgatgcgctgaacaagctgaacttacgccataccgaaatcttgccgctttatgcgcggctttcgaacagcgaacagaaccgcgtgttccagtcgcaaagtggacggcgcattgtgctggcgaccaacgtcgcggaaacgtcgctgaccgttccggggattaaatacgttatcgacccaggtacggcgcgtatcagccgctacagctatcgcaccaaagtgcagcgtttgccgattgagcccatttcgcaggcgtctgccaaccagcgtaaaggccgctgtggtcgtgtgtccgaagggatctgtattcgtctctattccgaagacgatttcctttcgcgcccggaatttaccgatccggagattctgcgtactaacctggcctcggttattttgcagatgaccgcgctggggttgggcgatatcgccgcgttcccatttgtcgaagcaccggataaacgtaatatccaggatggcgtgcgtctgctcgaagaactgggcgcgatcaccacggatgaacaggccagcgcctataaactgacgccgctcggtcgccagctttcgcaattgcctgtcgatcctcgtctggcgcgtatggtgctggaagcgcagaaacatggctgcgtgcgtgaggcgatgattatcacgtccgcgctctccattcaggatccgcgtgagcgaccaatggacaaacagcaggcatcggacgaaaaacatcgtcgcttccacgacaaagaatccgacttcctcgcgtttgtaaatctgtggaattatcttggcgagcagcaaaaggcgctttcttctaacgccttccgtcgcctgtgtcgtaccgattatctcaactatctgcgcgtgcgcgaatggcaggatatctacacccagttgcgccaggtggtgaaagaacttggcattccggttaacagcgaaccggcggagtatcgtgaaattcacattgcgttgctgacgggtttactttcccatatcggcatgaaagatgccgataaacaagaatataccggcgcacgtaacgcgcgtttctccattttccccggttccggcttatttaaaaagccgccgaaatgggtaatggtggcggaactggtagaaaccagccgcctgtgggggcgcattgctgcgcgtatcgacccggaatgggtagagcccgttgctcagcatttgattaaacgcacctacagcgaaccgcactgggaacgggcgcagggcgcggtgatggcaacggaaaaagtcactgtttatggtttgccgattgttgctgcgcgcaaggtcaactacagccagatcgatccggcgttatgtcgtgaactctttattcgccacgctctggtggaaggtgactggcagacgcgtcacgcattcttccgtgaaaacctgaaactgcgggccgaagtggaagagctggaacacaaatcacgtcgccgcgatattctggttgatgacgaaacgctgtttgagttctacgaccagcgcatcagccacgatgtaatctccgctcgtcacttcgatagctggtggaaaaaagtcagccgcgaaacgcctgatttgctcaactttgaaaagagcatgttgatcaaagaaggggcggaaaagatcagcaagctggattacccgaacttctggcatcagggcaatctcaagctgcgtttgagctatcagtttgagcccggcgcggatgctgacggtgtgactgtgcatatcccgctgccgttacttaaccaggttgaggagagtgggtttgagtggcagatccccggcctgcgtcgtgaactgatcatcgcactgattaaatcgttgccgaaaccagtacgccgtaattttgtacctgcgccaaactatgccgaagcgtttttaggccgcgtcacaccgctggaattgccgttgctcgacagccttgaacgagagctacggcggatgactggcgtcaccgttgaccgcgaagactggcactgggatcaggtgcccgatcacctgaaaatcaccttccgcgtggtggatgacaaaaacaagaagctaaaagaagggcgctcattacaagatctgaaagatgctctgaaaggcaaagtacaggaaacgctatctgccgtggcggatgacggtatcgagcagagtggcttacatatctggagttttggtcagctgccggaaagctacgaacagaagcgtggcaactacaaagtgaaggcgtggccagcgttggtggatgagcgcgacagtgtggcgatcaaactgtttgataacccgctggagcaaaaacaggcaatgtggaacggtcttcgccgtctactgctgctgaatattccatcgccgatcaagtatttgcatgagaagttgccaaacaaagccaaacttgggctgtactttaacccgtatggcaaagtgctggagctgatagacgactgtatctcctgcggtgtggatcaactgatcgacgccaatggtggcccggtctggacggaagaaggctttgctgcgctgcatgaaaaagtccgcgctgaactgaacgatacggtggtggatattgcgaagcaggtcgagcaaatccttacggcagtgttcaatatcaacaaacgcctgaaagggcgggtggatatgaccatggcgctggggctttctgacattaaagcgcagatgggcgggctggtatatcgcggttttgtcactggtaacggcttcaaacggctgggcgacacgctgcgatatttgcaggcgattgaaaaacggctggaaaaactggcggttgatccgcatcgcgaccgtgctcagatgctgaaagtcgaaaacgtccagcaggcgtggcagcaatggatcaacaaactgccgcccgcacgtcgtgaggatgaggacgtgaaagagatccgttggatgatagaagagttgcgcgttagttacttcgctcaacaacttggtacgccttatccgatttcagataagcgtattttgcaggcgatggagcagattagcggttaa

SEQ ID NO: 16328 - DNA, 2307 bp, Escherichia coli
atgtttaagcccaggatttgcagctggataggtttacttcccctgtttatgctgagtcttccagtacaggcggaacttcgatgtgttgcaaatgcagttgatattgaaccatttttttctgcggctaccgctgaagataaacaacaagttgaacaagctatcaacagtagcgtgaatcttgtccccttcggtttatctgcatcggactggaaagtgcatcgtggcgatttagtggtagaaggtaatatagagagtaatcaaaaattgattgttcttggcaatttgacagtcaaaggtaatatttccactttctctctttctaatccatgggttattctcggtaacgtgacggcaacgaatatagttacggattcaccactgttaattaccggttcgataaatgcaagtggactggtatttatcgactcatattacgataatccgtctacgattaagggaagtattaatgcgcgcgggatatttatcaatgacataattgcacctgttgttgtgtcttcgacaaatagtgaattcatggtccgtgcgggagacaaaaatgacactgaaaatgtcaaaaaagcgctgacgataataaatcctgatgcatattattggggcctaataaatgataaagatgctctgaaagaaatttttaagcgaagcaatattcgcatggcagggaatgtctgtaatctgatgaaaaaagaagtgctgtttcgccctaagccttctcctgagttagtgcaggaattacaaatgctggatgaaggcaacgttgctgcatttgaaggacgagacattgcgacatttgatcttgccataatgcgaactctcccaaggcttaaaggaatttcagctaacctacgcaaacaacttattaatagcaatgatggacaaacgattgcaagtatggcgagatatatgcctgacaatgagattctggagttgaccgatcagcaattgggttaccagcctgttgttctggggttgctcgaccgtgaaccgctctctgtcgaaataatgacgcgaatgagtcatctacctgatggtgtcggtccgttgaatcttgcgctacgtgaaaatctccctctggatatcgtcatgactctggcgaaaagagattgggatatgatcattcaggagctttataaagatgcgtggttattgcccgaatccattattgatggctatatccgcagtgatgatttctctattcgtcaggtcggtgctggaggacaactcacctacaatcaggcaatgcagttggtgaacgattcatcaaacgatgttgtcacaagcttagcgtcaaagctggcagagatgaaacaccatggtcaattgttgcggatgacgccacaagagagtgacaaaatagcagtatatttacaccaaaaattcgagaatgacgatgatctaatacgtgtgttatttttagcattgccagataacttacagtttaattttgttaaaaagatggagaaaaaatttcctgcctatttttgctgtcgggatatgcaggtaattcactctgacgctgctttacaacggttattgacacgtttcaacgatcctgcggggtggagtaatctggcgaaaaatcagtatctgagtacggcgatgaaacaaaaaatttggcatcgcgctttatcgcatcgaaaaaataatccgaaagcagattctgcagcatatgaaaccagcgctgatatgattttgtctgagctgattagccacggtgaagttgatgaccagatgctattaaatgccgcctctctgatacgttcggaaggctgggactttttagagagtgcattagttagttgggataatttacccgctattgtcctcaaggaattacagcaaaatatgccacgcaatgatatttgggcgaagttttttctgaggcaggaaaacagctctcgtgcgcaggttaacgaagcgttacgtgtttattatgcacttgaccccgatgcgttagcgcaactggataaactggcaaaacaaccagatcgtatatggtggagtacgctggcgaaaagcaatcttacatttttcaagttcggcgcacttaacaatcgccatacaccgtctgcggcactggcggcagaaattgatcccgagtggtggattatggcgatgaataatccccgttttccagttgatgtattgaaggcgaggctgaaacgtgatcctttgctggcgttagagcttgttaaccctgaactggatttagttcggcagctggcgcttaacggtaagacgcgcgcaatacgggaacaagcgatgagaaaacttgatgagttgcattga

SEQ ID NO: 16329 - DNA, 123 bp, Escherichia coli
atgcgcaatttgcagttcacggattggttgtttttagtattttttcggtggcaaaaatggggcaaaaagtcggaaaaggggcaaaaatggggcaaaaaaagggtgggttatcgtggcttgtag

SEQ ID NO: 16330 - DNA, 750 bp, Escherichia coli
atgaacaccataatccttaatgaaaaatgtccgttatctcaatatattcccgtaactccctatgccccggatctaaagaaactgcgtgactctgaggctcctgtcagttacagacttaatgaaacggggaatatattctattcgtccactgagacaaatttaaatgatgatgccagagatttgtttgatagtgtaaccgttctgttttccgcaatgacaacagcaatggggcaaaaaggaaaagacttatttgattacgatagctggacaaaaataatacgcggctctggcttttttgcagaaatacagaaattcacaaagaccctagagattaaaagcggttctttgagcattgatacgcaagtcattcaacaactgatacctggcatcacaacaggaaattcgcttgaaatagccaagggggttcttgcctccataaatggtacgtttagtgcagaagacagaaaagagactgataaaattgggcatgttttattttattgtgaggagcttttcggtgcaccaaatgtaacagttcgtttattttttgccagcaaagatacacataagaacattacttcttctccatgtcacaaatcagccatatcatcatttgagcaagtacaagaagcaaatacatttttatttgtagatgctgcgagaattgcaaaatatgcaaaaatgttcgataaacaaccagaggaatataccagtctaattaacaaactggcatcgctaataacatcttaa

SEQ ID NO: 16331 - DNA, 594 bp, Escherichia coli
atgaaaatcagagcggtaaaaggcatcagaaacgcgcattaccttgaaaatggtgcggttgactgcgaggtgttatttgaaggtgaaacggaattcgtcccgtataccgccatgcaggacgatagcgccccgacaggccagtgcatctgggaggagttacagagcggcaaatggggtgaaatcgccccgttcaccgtcacgccggaacttatcgcagcggcaaaagatgccaaaaagcgggaaatcgaggtgtggcgtacagaacaggaggcgcagccgttcacgttcgaatggaacggtcgtacctggaatgctggcccagactcactggcccgtctctatccggtggtaatggctgcaaaatctgatacggcacgaaccgcccttgcgtggggcgacgctgataatcaacaggtgaaactgtcgatgccagagcttgaagacctggctacagcaatggcacgggcgcaagttaaccgcaacgatgaaatttatcggcgtcagcgacagatgaaggacgtgctggatgggctggaggatttacgctcaatcagagaaatgatggttagcagtgaacgagtacatggagaataa

SEQ ID NO: 16332 - DNA, 1965 bp, Escherichia coli
atgtctgtattaatttcgggtgtgctgacggatggcgcgggactccccatgtccggataccatattattctgaaagcccgacagaatacatccgcagtggtcatgagaacggtggcaacagtggtgacaggggcggcaggagaatatgcatttgaggcccagaccggaagatatgacgtttatctccggtcatgtattgaaagagaatattgtgttggtgatatttcggtttacgacgattcaaagcccggcacgctgaacgactttctgaccgctctcgatgaaggcgacctcaagccggatgtagtgaaacgctttgaggaactggtggcgcaggcgcagcagagcgcggaagcggcagcggaaagcgaacgacaggccgggcaacatgtcgctgatgcgcagaagattaagggggattgccagacgctggcggataacgtagcgcagaatgcagaagacgttactgaagacaaaaagcaggtggcacagctggcgtcatctgccacacaggatgcggcccgcgcagagcaggcggtcaaagatgccgataagatagtccagaaagcggtcgataaactcgatgaagctgcaacactcaccggcgaagtaaaggccagcgcagaagcggcagcaaaaagcgaacagaacgcgaaacagcacagggacgaggcgcaacggatagtcgatgacctgaaaggaaccagcgccagcacgacgcaaaaaggcctggtgcaactctgtagtgacacggacaacgacagcgaggaactggcagccacaccaaaggctgtcaaaaccgtcatggacgagacgaaaacaaaagcgccactggacagcccggcattcaccggcacgcccaccacaccaaccccaccggacgatgctgccggtctggaaacagcgaacgcggcttttgtccgcaaactgctcgctgcgctggttgactcatcacctgaagccctggacacgctgaacgagctggcagcggcgctgggtaatgacccgaactttgcgacaacggtcactaatgcactggcaggtaaacagccgcttaatggcgtgttaacggctgtcagccagataacaccggaagaaaacacactgccttatttcagtgaagagggccggattttactggcgcagctgtcagaaaaagcccgcgcattactggcactggacacacctgaagccatgcgcacggagcttgagctgaaagcggctgcgacgatggaaccccagagcgatatccgcgaccgtacaccgggcaggctggcgctgtccggtatgcatggatttggtcaggcatttgccagtgccgacgctctggcgtttgagggactgtctgatttcgttgaatggctgaagaaagtcacgccggggcggtatgcggtcagtattacagattcatcacaactgcttaccggtaccacgcaatttaacggcattattgacgtgatgtggtccccgtacgccaacagtgaatctgacacagtccgcaaatttaaaaccctgatgtgttacaaccagtattatcagggtgaacactgtattcactatatgcagtaccggtacaacgacagcgataacagctggaacatgtcatcgcgggtagttgtctacgacggagattcactggcgtacctgttgtccaggatggcgggctcaggctcatattacaaatacccggcagtgggagtgcctgttctggcggtctatcagggagcggcggctggcgataaggcaatcaaaattggtctgggggacattgtgccggggtcacgactcggtccggtaactatcacctgctcaattaatgatgctggttcatatgtttctactccacgcgtttctgccggaggtgccggggcattcagctttcccggtcgctatcaggcgctttctggattcagtaattcgtatggcgatgaaggccgcatttgtctgtttgtgcgcatcgagtaa

SEQ ID NO: 16333 - DNA, 1089 bp, Escherichia coli
atgggactgaatgaatatcagccggatttcagcctgacagcggaaggccaggatatcacgaaggccctaaaacgggggctggctgaactgcgatataccgataatggtgctggcacaaagcggtccgatgaactgatgataacgctgttcagcgagacgctggcgttaccaccgaaaggcgcggtgctaacgctgggactggggttcaacggaaatctggtcaataaaggcagttttaccgtctgtcaggtggcaagcggtggtcctccccgccggctcaccatttatgccaccgcagcccccatgaatgcgtcaaaacatggcgcagacgtgaccgcactgaaaacccgggctttcagcgatatcacactgggcgacctggtgaaaaccatcgccactgaaaataatctggtggcgcgcgtctcatcggtgcttgctgatattcatatcccgtgggtgatgcagtcatcagaatctgatgctgctctcttgtcccgcattgcaggtatgtacggcgccaccagtaaaccgaccaatggctactggttatttctggaatacggggcatcacaaagtacggggggcagaaatgcgcctgagataaccattatgccgggtatggtatcagactgggattatcgtgaaggtgagcgacagggcgctgcgggtggtgcgaagggggataaaaagagcgggaaagttggggtccggtattttgatgcccgtgacggacgcacacgtgaagttaaagttgacgtggagtcaacagataagcggcatccgtttacccagcctgaccatggcaccgcaaaacactgtgcagagtcgaaggttaaacgtgtgcagaaagccggacgccagatgacgataacgttgccctgcaggccggaactgctgaaagcaggggcggagatgcgttttgtcacgcagggatttggtgtgcgtgaggaccatcactggcaggctgagtctgtggagttttcactggtaccgggacagggatttacgctgaatctgtcactgaccacggatatttctgcaaaggggaaagccagtggcaagaaaaaaggcgtcaattattttggttaa

SEQ ID NO: 16334 - DNA, 219 bp, Escherichia coli
atggcgaaaaactggcggaccactgacggcgatatgctggatgatatctgtcagagacactatggcagcgccggacttaaccagtcactggcggcggtactggaagccaatcccggactggctgatattggtccggtctatccggcgggggtggaaatcgtgttgccggactgggtgtatgaaccggaggaaaaggagacgtttcagctatgggactga

SEQ ID NO: 16335 - DNA, 489 bp, Escherichia coli
atggtggatttgctgggctggggcgtaaaccggcttgagcgtgaagcatgggacgcggtgggatcattaacggatgtcgcctcccgcgtcatgctgtcgtttggtgagtttgaattcagtattgatactgctgcttataacgccatgaagcgcacgatggaatggcgatgggatgaacaacagcttatcggaaaaaacgatctgctgcagtataccggcaagggggccagaacaataacccttgaaggtatggcgcacgcgggatttcgtgacggtgtgggaatggatgcccttgatacactggttcagatggtggatgacaatccggccccgcatcttctggtctcgagcacaggtgatgtgatggggtatttcgtggcaactgcctattcagataacaccacgtcctttcttcccggcggtgcgccgaagaacaaaacgttcacactggagctgaaatactatggcgaaaaactggcggaccactga

SEQ ID NO: 16336 - DNA, 1653 bp, Escherichia coli
atggcaacggtgggcgataaccttaaagcgaatatccggatcggaggcacgatagatccgtcgtggaaaaaatcggttgatgggttgaagcacggattatcaggggcaacacaggaagtggctcgtctgacacgccagcaggacgtactgaaacgaaaaattcaggctggcgttctggctggacaggatattactgatctgcgaaagcagtatgaaaagctgggtaaaaaaattcatgatgcctccggagagcaggacaaatttaaccgtaaactggctcgtgcggaacgcctggaacgctggaaagggcgggcggggacggtccttaaaaccggttttgggctttcggttggttccgggttgacgctggcagcgggcactgccgctgtgcttaaccggaatacggagacggcagagcgggcagggatagcccgcagttatggggtggattatgaaacctatgcgtcatgggattctctggcccgactgatggggctgaacggtgaaaacatcggtgatctgtttgaggagtaccggaacaaggtttttgacgatgataatggtgccacggataaaggggccattcaggaggtctttggcaaactgggactgaaagccggggtgatggcagggaaaagtaaccaggagcaggtcgaatttttatttgatcgcttactgcaggtagagaatgaacaggtggctgccggaatggcagatgcgttgttcggtggtgaggccaataaaattctgacctggatgcgtctgtcagggaaaacttatcgggagcttatcagtgagcagaaacgctataacctggtgacaaaggcaggggctgatggcgcagttcagggacatgtggcactgtcaaatctccgtaatgttctgagttcttccattgatgaaatcagcggacagctgggtaatgaacttgccccacatattcaacaggtgacggatgaccttgcggcctggtttaagaatggtgggctggaaaaaatccgggcatttattcgtgatgatgccctgccggcgctgatcgacatggttgcctggatgtggaaatttggaaaagttctggccggaataacgcagaaagccattgagtgggggctggcagatgatccgcgtcaggaccggcgagaggtactggaatatctggcaaaaatggggtcgccggagctggcgagagcggtggcgcagaaaaacggccagggagaatggtttgatgaactgctcaagcaaaatccggacctgacgaaacaggttgtacaggcttataaagacacccgcggttatctcccctggaatcatgacgataaaaagtttgatgcatttctcgaccctctgctggggccgaaagaagaacctgattttaaggcgataaaagagaaatcccgcacctacattgatggacttcatgcagcagatccggggcagggtaattcggatcccctctcagctcttcagtatacacccggcagtgtcagccaggtggaagtaaaacccacatatcagatacgggcggaatttaacatcactcagaagcccggcgaggatgccggacaactggcagacagggtaacgaaaaatctgggagatattaattttggtcagcgttcccgcatgactgatggtgatgcattctgggggtga

SEQ ID NO: 16337 - DNA, 303 bp, Escherichia coli
atgtcggaaaaaaacagtgttcctgccagcagcgtggaaattgtgttatccgtgccgtatgtcaccgcatcaggacagacgatcacgcacgtcactatgcgtgcgcccactgtccgcgatcgtctgttgcatcgccggagtaacaaaccggaagcagaggctgatctggatatgattgccggtctgtgtgggatggacgcggcagacatgatgaacatggaagcgtgtgattacctggccctggagcgtcagtttaatgtttttttgctgccgccggtccggcggaagaagaaagcatcctga

SEQ ID NO: 16338 - DNA, 519 bp, Escherichia coli
atgattacgggtgaaaaaaaactgttgcgcgcatgggcgttatttcttcctggtgggatccgtcttcagggggcgcacgaatatacgccgccagccattaatatcacgacagtggatatcaaaactggcgcaatggatgcaccggtggcagtggatgacggcatggaagcgctgacctgttcgtttaagatttatggttatgatgttgccatgcttacgctgctgggattacaggccgggctttattcgccggagattgttgtccgccaggcttaccaggtggggaatgcgaccagcggacaggtggaaaccctgcaggggatgatcaccagtatcacgccggatgcgcgtcccgcaacgtcacaggcagaggcttcggtgacggtggaaatgtcactgagttattaccgtcaggctgttgacggtgtggaaaccatctgcattattccggaggaatttgtgcgccgtattaacggcgttaatgttctggcggatctgaaaaaaatcatccgggtttaa

SEQ ID NO: 16339 - DNA, 1476 bp, Escherichia coli
atgtccggattacatggtgttgaaaccattgaactgacgacaggcacggttgccgtgcagaccatctccacggcagtgattggtctggtgggaactgcgccggacgcctctggtggtgtgtgcgcttccggcacagccggctcctggctgctgggaacggcgctggatttcacggcgaaacaggaaggtcgggccggtaataagatttcggttgttgctgtggctgccacagaacaaaacgcgcagacagcggcatcgctgaaaggcacaaccctgacgataacgctggggacggacgaacacagccagattaacgccacggcggaccgtgtgactgaagtggtgaatgcgctgggggattcgcctgtgacggcggctgtcagtaccctgaatgcaggaagcgctgaaaataatgtggtgtcgccgttcagcctgacgttatccggcggggaggatgaggcgttcccggtcaatacaccggtggtggtggcaggggccattactcaggccgggaaactgggctcagccgggacattatatccggccctgcgtgatatttttgaccagaccggtgcgctggtgattgtggtgcgtgcggaaagcaaaacaaaggcgaaagaggccgaacagcgtgcggcggtgattcaggccatggaggcgctgacagaaagtaagggcgtgacaggctatcaaccgcgcatcctcattgccacgggttacagtgaggatgatggtgtggcaaaggcgctggaaacgtatgccgcgaagctgcgggccgtggcctatatcgactcgccctcaatggcaacgccgcaggatgtggttcagaggcgcgcatcctttggcgggcgcgtggagctgctgcgcccgcgcgtgtcagtaacggatgacagcgggcagacggtatttcgtccgtattcggctcgtgctgccgggctgcgtgcccgcatagattacgaaaagggatggtggtggtccaaatcaaaccaggacgtgatgaatatcaccggtctggagcaggtggacacatttattctcggggagcagaactgcacagcaaacctgctgaacatggaaaacatctccaccattattcggcatgacggttttaaacactggggcaaccgtctgtgttcatcccacagtcagtggcgttttgagccggtacgccgtactgcagatgtgattgaggacagtattcaggaggccatgctgccttatgttgaccgtccgctggatcgtgatgtggcggacgacattcttggcagtattaatgcctatatgcgtcagcttaaaaatctgggcgcgatccacggtggcagtgcctggctgaatgatgaactgaacactgcagaaaccctggccgccgggcagttgtatatcgattatgactttgggccgaagtcaccactggagcgcctgacactgcgggcgatgattaacaataaactggcgctggaggagctgacggtatga

SEQ ID NO: 16340 - DNA, 177 bp, Escherichia coli
atgaccagcgaatgggaaaaagacctgctgccgggattaatcagcgacgaagacagggagaagctgaaagcgtaccgcatttatgcgaaatcgctgcaggcgatggatttcagcgctattacggataagaccacatacaacaatattagctggcctgagcagccacaaaatacctga

SEQ ID NO: 16341 - DNA, 9240 bp, Escherichia coli
atgaacagaaattgttaccgcattatttttaacaaagcccggggaatgctgatggtggtggcagatattgcccgttccggtcgcgccggtacatcactgtcctcccgcacaggatatccacacaggcaacgtatctgccgtgtcacgccgcttgcattctctttgtggctggcgtcggggatggtgcattctgtcagtgctgcaggcattgtcgcagaccatggcgcaccggggcatcagcagcccacgattacgcagacggccagcggcattccgcaggtgaatattcagacgccttctgccggcggggtttcacataatacatacagccagttcgacgtcggtaaccagggcgtcattctgaataatgcccataacaatgtgcagactcaactgggtggcatggtggccgggaacccgtggctggccaggggagaggccagaatcattcttaatgaagtgaacagtcgcaatcccagccagttgaacggttttgttgaggttgccgggaaaaaggcgcaggtggtgattgcgaacccggccggcatcagttgcgacgggtgcggttttattaatgcgaaccgggccacgctgaccacggggcagcctcagatgaaaaacggcagtctgaccggattcagtgttgaacgtggtgagattcagattacgggcaaagggatggatgcctcgtgcacggattataccgatatcattgcccggtctgtgaagattaatgcgggtatctgggcgcaggacctgaaagtgaccacaggacgtaacaatgtggatatcgcgcacgggcagattgagaaaaagaccggagatgtctcttcacagcctcagatggcactggatgtggccagtcttggcggaatgtatgccggaaaaattcgccttgtcggtacggaaacgggggtgggtgttcgtaacgccggtcatattggtgcacaggcaggggcggttaccctgacggctgacggacgaattgaaaacagtggcagtatcagtgcgaaaacggatgtgcatctggcgacaacccgggagctgcataacagtggttctgtttatgcggggcaggatacgcagatacagagtgatggtgtattcacccatacaggctctgtggcatcacgtcgcaacacccggattcagacagcgcgtctgaccggcggtgagcggagtctgctggccgccggggtgaaagatgacggacgtctggcggcagcgggcaacctgactgtcagtaccaccggcgaactggcggcacacggacaggttctgtccggtggggacatgcaactgaaggggcaggggctggatttaggcaacagccggatacagggacaacatactgagctgaatgcaaccagtggaaatctgtccacacagaatgcgcaactgagtgccggtacgctttccgcccggactgccgggcagttcagcaataatggcggtacgataaatgccgacacactgcggatatcggcacaaagcctgtcaaatcgtaaaggcagtctgattcagacgggaacaggggatttttcgctgagtctgccgggaagcgtggataaccgggaggggctgcttgcggcaaatggcgcggtgcgtctggatgcactgagccttgataatcgcaaggggaaagtgcaggcggcgcagtcaggcagtctgcaggtgaagacaaccggtgccgtggataaccagcagggacgtctgcttgccagcagtgacatcctgattaatacacaggcgctgaataacgacaacggactgatttcagctgctgccggaacgggcaggataaaaacacagcagtctgtcagcaatacggagggacgaatggagtccgccggcaggctggatatttcggcagggagtctgaataaccaccagggtacggtggtgtctgacgggctgtccgtgacgctggatggtgcgctggataatacgtccggcagactgctttcacagaaaacgctgtctgtgtcaggcagcgaactggtctctgatgatggtctgattcagtccggcagtgacatgacgctggatgtacaggacggggttctcagtaaccggaacacgaaaacacggggtggtatcagcagcgccggtaccctgacagtgcgggctggtatgctgaataaccagcagggatttatggtgggtcagaaggatatgaccctgaacgccggaacgcttgataaccgtcagggcgtgctggggaatcaggcgttattacagatatcgtcaggtacgctgatgaatcagaaaggtgcactgaaggccgggacggatatgttgctgagtggtggcgatgtcagtaatcaggaagggacgcttgccgctggcggggacctgaatactcacctgaatgtgctggaaaatcagcaggggacggtggtcagcaacggtaacagcaggctggatgtcacacggtttgataatcagggtggcagactggtggcacagcagtcactgaccctttcctcgacggatatcatcaacgatgccagcggcctgatacagagcggtgcatcgctgaatctccgtgctgacacactgagtaaccgtaacagtggtgaccggggcggggttatcagtcaggggccgatgacgctgaatgccggcacactggacagcactgccggtgtgcttttgtcgggagatgctctgtccctgactgcgggcgtggttaacaatacatccggtcaggtggtggcaaacggtctgctcggctggaacagccaggcgctgaacaatcagtccggtcttattcaggggaggggcatcagcattaataccgcaggccagacgctggataacagacgcggtacgctgaacagcctgcaggaactgactgtcagtaccggagcaatggataaccggggcgggaccgtgggggcgaaaacgacagctgacctgagcaccacctcgctggataaccgtgagggtggccggctggtcagtgaaggtgaactccgtctgcatacgggaggcctgcagaatagccacggacagatacagtctgtgggcgacattctgttcgacagtgtacggggcgttgtggacaacgtctctggtctgattcgcagtggttctgccattacgctgaacgccctgcagtttatcaatcgccacacgcagaataccggccaggggctggaagcgcagacaatacacatcacgacgcaggaccttgataaccaggagggcagtattctggcagacagggcgcttacggttatggcagacaggacgctcagtaataatgatggcgtgctctcttccggcgcgacattgtctgtcagtggccgtcagctgacgttttcgaaccgtgacggcgtggttaaggccgggcagtcagtatctgtggatgccggtcagctcggtggtgacgggaaactgctttcgctgggcgatatgacgctgaaaagtaacacaacgttcagcaacagtggtcagactattgcgaacggaaaccttacgctttccgttaatggcgatgtctctaataccggcagcctgctggcaggcagccggcttgacctgaacagcatccgccttgaaaactcagagaaaggtgaaatcagtgccgggcagacctggcttaacgtgacggacacactgctgaaccgtgggctgattgacgggaaatatacgcgtcttcaggcgaacaccctgacgaattccggtacagggcgaatctacggcgatgctgttggtgtcagtgctgccacatttaataatctggaagaaaatggcgtggcggcgacgctggccgggcgtgagcgtgtggacttaggggtacagaccctgaataaccggacgcacagcctgatttacagtgcaggtgatatgcatatcggtggcacgctggatgcgaatggcaccgctacaggtaaagccggtgtactgaataatcacagtgccactattgaagccgccggatatctggcactgagtgccggacaaatcaataacgtcaatgaccatttcaccacggagcgcgtggtggtttccacggaaaaggtgactgagtatcagctcagcggctcagataaacgctggagcgccggtgaaccgggcgtttatgtggataacgattccagtaactcactgaaaaaactgcatacaccggaaggcgccagagataaattcacgcagtacgattacacccgtaccgtggaagaaacccgggtaaaagaatccgacccgggaaaaattctgtccggtgccggcatgacgattgtggcagacaaactgcttaatgataagagtcaggttgtggcaggtggcctgctggatatgcaggccggtgatgtggaaaacgtcagtgtcagcggagagcgccatgttacggactcagggacatccacgtattattaccgtatcaggaaaaaaggaaaggataagcagggggagaaaacctctcagtacactccgcccactgtaattcagaccatcacgctgaagccgggagagctcaccagccacggacaggttcagggcagccatgtcacactttctcccctgaagccacagggaacggatgtacagacaggactgaccggaaatgtggatgcgacagtagccggtactgaccggataccgcttcgcccggtggtgtctgccggtgaaccggtcattctgttgccggggcagcagtttgaagtcagcacacctcagggcagtatccatgttgccgggccggatacccgtctgccggacagcagcctgtttaaaacaaatccggcagtgaatgtgccatatctggttgaaacggacccgcgttttacgaaccagaagacgtggctgggcagtgattacatgcagaaggcgttttctcagaacggggataacatgctcaaacgcctgggggatggtttttacgaacagcgtctgattcgtgagcaggttgtcgctctgaccgggcaacggtacctggacggatacagtaatgatgaagagcagtttaaggcgttaatggatgcgggtattgcatttggtaagcaatacaacctgacaccaggtgtggcgctgactgctgagcagatggcgttactgaccggtgatattgtctggctggttaacaccacggtgacactgccggacggcagcacgcagacggttcaggtacctcaggtgtatgcccgtgtaaaacccggtgatgtgaacagtgccggtgcgctgattgccggcagggacatggtgatgaagctggatggtgacctgtttaacagcggtaaactggccgggaagcagaccgtgcagctcagggcagaaaacattcacaaccaggccggcatcattcagggagcaaatgtcagcctgacggcccggacggatattaacagtaccggcgggctgctgcaggccacggacagcctgctggcgatggccgggcgggatattaacctgaccaccaccacccgcacggcacaaagtgacgccggacagaaccattttgaacgcaccagcatcgacagtgtggcgggcgtgtatgtacagaatgaccagggaagactggtgctgcaggccggacgggatatgaatctgacggctgcaacggtggtgaatcagggtaaggacagcctgacgcaactcagtgcgggcagggatatgacgctttccacagtgaccacatccgcgcaggacaatattacctgggacaaaaataatcgtctgttgcagggcgtcacacagagtacgggcagcacgcttgccggtaacggtgatgtcacgctgaccgccggacgggatatgacgtcacaggcggcatcgctgtcagctcagaaaggcctggccctgatggcgggtcatgacgtgacgctgaccggtgcacagaataccagctcgctggatgaataccataaagtgaccggcagcagcgggatgttatcgaaaaccaccacaaccacgcatgatgtcactgaccgccggaccatgacgggcagtgaactgaacggggatacggtcagtatcagcgccggacataatctgaacgtcacgggcagcagtgtggccggggataaccgtgtctccctggctgccggaaataacttgaatatcggtacgctgacagaaagcaaccgtgaaacacacctgaaacaggagaaaaaatccgggctgatgagctccggaggtgtgggattcagcatgggcagccagagtctgaaagtcacggacaccgcaacagacaccacacagaaaggcagcacggtggggagtgttcacggtgatgtttcccttcaggcaggtaaccggttgaccgtcaacagctctgacctgattgccggcagggacatggcactcagtggtaaggaagtcagcattaccgccgccacagaccagcatgtacagacacatacggtggagcagaaaacctccggtctgacgcttgccctgtccggcacagcgggcagcgccctgaatacgacggtggagaccgtacaggcggcgaaatctgccggaaacagccggcttgaagccctgcagggggtgaaggccgcgctctcgggggctcaggccgtgcaggccggacgactggcagaagcacagggcaaccagaaagagaataacaatgccgtgggcatcagcctctcttacggcagccagtcttcgaaatcagaacagcagtcagagcagacggtggcgaagggcagtacactgaccgcaggtaatcacctcagtattcaggccaccggctccggcgtgaagggcgtggatggtgacctgacgatacagggcagtcagataaaggccgggaacaacgttctgctgcaggcaaaccgtgacgtgaatctggtatcagcagaaaacacgtcaaagctggaaggaaagaacacatccagtggtggcagcgtgggtgtcggtatcggtgtggggcccggagggcctggtttcagtctgtcagccagtgtgaatcagggtaagggcagtgaaaaaggtaacggtaccacccatacagaaaccacggtggatgcgggaaaacagctgactatcatcagcgggcgggacaccacgcttaccggcgcgcaggctggcggtgaaacggtgaaagtggatgccggtcgccatctgacactgaccagtgagcaggacagtgaccgttatgacagtaaacagcagaatgccagcgccggaggcagcttcactttcgggtccatgagcggttcggcgagtgtgagcctcagccgggataaaatgcacagtaactacgacagtgtgcaggagcagacggggatttttgccggcaggggcgggtttgatgtcacgaccggacagcatacacaactgaacggtgccgtgattgcgtccacggcaacggcagataaaaacaggctggataccggcacactgggcttcagtgacactgaaaacctggctgactttaaaacggaacatcagagtacagggctcagtaccggtggcagtgttgccggaaatttcctggggaacatggcaaacaatctgctggtcggtgcaaatcatgaaggccatgcggacagtaccacgcagtcggcagtgtctgccgggaatatcaccatccgggatacgcacagccagaaacaggatgtggcagacctgaaccgtgacgctgcacatgcaaatcagacgctgtcccccatctttgacagagaaaaagagcagcagcgactgcagcaggcgcaactcattggtgagattggtaaccaggtggcagatattgccagaacggaaggacagatagccggtgagaaagcgaagcgggacccggcagcactgaatcaggcccgcgcagagcttgaggcagcaggaaaaccgttcacggaacaggatgtggcacagcgggcctacaataacggtatggcggcctcaggttttggaacgggaggcaaataccagcaggcgatacaggccgcaacggcagcggtacagggactggccggcggtaatctgagtgcagccctggcaggtggtgcagcgccgtatattgctgaagtggtgaaaaccatgaccacagatccggttaccggtgaggtgaataaggctgcaaatgtggctgctcatgccgtggtgaatgccgcactggctgtggcacagggaaataacgctcttgccggtgctgcaggtgcagccaccggtgaggtggtgggaatgatagccacacagatgtacggtaagccggtgaatgaactgagcgagacagagaagcagactgtttcgacactggcaacggttgctgccggcctggccggtggtctggtgggagactcagggggggcagcggtagccggcgcacagtcaggtaagacaacggttgagaataactacctgagtgctgatcagatcgataactttgcggcgagggcgaaaggttgtgaggcccgtggtgactgtggtcagatcgtgaaagaaatggaagatctgagtctcaagcagcgtaatgaactgatcgcaacatgtgcttcgagcccgacagcctgcaaagagaagtacggtgacatccctgctaacagtttgttggttcacgaagccatagacagggcattgggtgaagatattccgtgggcaatgaagaatgacttatccgttctgttgatgcagcagatggatgagtcagggatagtgagcagtactgactttgcccaacggctggaaaaacagtatggtcttgacagtcagagagccgaaattttagcgggagcggcaatggcagccgtgaccggtgggttgggtaaaggcgggaagcctgcggctggaaccgcagggaaaaatatcgttgtggttgactcgggcaagaaaggtgcctggaacaaggcgatgaacaagccggagccgaacactatttataaagtggacggggataagacttatcacactgataacctggccagacccactcaggttgaagcaactcttagcgcaaatgtgaaagaccggaatggttatcagcaatgtaaggcgggtagatgtggtaatcttggagatgaaggtgggcatttaatagccagtatatttaatggtcctggtgaaaaattaaacctgctaccaatggatggaaaccttaataaaggtgcctggaaaagtatggaaaacacttgggctaaggcattaagtgaaggtaaagatgttaaagttaatatccagccatcttatacaggtaacagcgtaaggccggataaattctatgttgagtactctataaatggcggaaggccggtatctgaaacgtttaaaaatgtacccggaggtaagtag

SEQ ID NO: 16342 - DNA, 336 bp, Escherichia coli
gtgaggactgatcaagagatttataatgatataggttcagtattgctatccattgcgcctgaaaatgcatccaaagtgatcatgagagcagaactgtctcctgaaaatgatcattgtaaatgtgaatttgactatataaatgcagatactggcaatactgattggttttcggcaggggcacaagcaaacggtgatttatttgattttcttgtggaattaagaaattattttctagataactttaaatctcaggaaaagccattctggcatggctgtgaagtgacagtagatgtagaggctttaaagattaatattgaatttaaatacgaaaattga

SEQ ID NO: 16343 - DNA, 528 bp, Escherichia coli
atggctacatacggcggtcagtttacgcttacaaaatgtgaagctgaaaaacagaacattgacgttattattcctgagcttccctcccctgaatcccctgcactatcggagtggcttgctgttttgtgggattccgtaggcaagatagataacaagacatggttcgtcgcccacagcctgggatgtgtgacaatacttcggttgttagctcaactaacggtaaatgagatgccagcgggtattattcttgtttccgggttcaatgagacactcccgatatggcgacaacacggtctttcagaaatggatacattcatctatcctccgctagaaatggggcagatagttaacggagtaaaacatcgctatgtcattggctcattaaatgacaccatcgtgccaacggaactaacgcttaaactaagtcagcaactcaatgcccccttctatgcgcttcccgattcaggtcattttttaggtgacgatggtatcaacgaattaccactggtgttgcaactattaatatag

SEQ ID NO: 16344 - DNA, 1089 bp, Escherichia coli
atgctgtttacttacacttatgtaccacatcaaatggagagaatgcagcggtttatcaatttcattttctatcaagtgtggtgtagagcgaggaaattaggtccgtatgacttgactctatttgatgctaatccacctcttaaagagataatgacctcttttgcctatgaccacactgcagcaggggatcgtttttcaagccaagttcaagctatttatcaaagttttgcccagctctcgcgagagcaaacagctcagtttaaacggtggtaccaaggcaataataatctggaaaaggcatgtgccaatgcgccgaatacacgactagcccgctacgctgacatcgcggtgaaccataaagagctgtcagagcagctcggtacgtttttcagaggattatactcgcagtcattgctggatctcgctgctctgcgcgccaagattggtgatattgacgatcattacaagaacttcgtgcaaatcaataaagttgggaaatgcccgttttgtggtatcagcgacttacttagcgaatatcatactaaacgcgaagcttacgaccattatctgcctaaggcattgtatccttttaattctataaactttcgtaacctcgtgcctgcctgccactattgcaatagtagctataagaccagtaagaacccagcttacacgccaaaagaccctgcaggagcagttcatcgtcgcgcggttttctacccatataaacctgtgacacattccatcgagttacaagttacactgcaaactacagatatagcaaatttgacacctaacgatattgccttacaatttggcccagatgctgttgccgaagaaatcgatacgtggaaggacatttacggtattgaagaacgctacaaagctaaattctgtggggaaaatgatggtaagtactggctaacgcaagtgctcgacgaatggagagaggatggccgaaatcctactgattttcttacaactttggcgcgacagactcggagtcgaccatacgccgactgcaattttctaagaaaacctttccttgaagcatgtgaggctattggccttttaactgacgggcgatga

SEQ ID NO: 16345 - DNA, 1791 bp, Escherichia coli
atgaaactactacgtctgaagatcaacgacccggcaggctttcgcagcttaccctgcggttttgagcaccattttcgcaccgaatggaacttgcaggatgaactcgcaaaagctgaccactttgcccccttcgtctgcgctggaccgaatggcagcggcaaatctaacttgcttgaagtcctcgcagcaatcttctttcagttggaaattctgcgtgtgcgccggcgttttcttcctgaagcattgcaagatgagactctggatctttcacccatttcctttgagctggactatttaattcgagtccttcctgaataccgtagctctaacagtcccgaatgggcaaaagtgcatgttaggaaaaactctggtgaatcggtgcgctttctttgggaaaaccaaagcgactttggtactgacataaatgaaccattcactagtagccatatagacatgctgttacctcagtacgtgcttggttactcttcaggcgagaacgaaatccttagtcttcctttttttaagatgcgttttgtacagtttgatgagtactacaacgcacttacccagcaacttccatatcccggtcacccagaaaccagacttgcatatcttgataacggattcagccaggccatcctgctgtgcaatctgctgtttctcgatgaggatagtttgcggcctttccgcgaggatgtggggattgactcactgcaggaattccgcattatcgttcgtcgtagtgttggacttcggccagaacaacttactgcttttgccagtgaagatgaaaatcaaaaccagttacctgaagacatagtcaatagtaatcccgctctacagctccatatcgatgaacagggattactccattatcgtctaaatattacccatttactggaaggcgacgaaagatcttcattaatgattaatgcattacagcgatgcgctaccttgagttacgtcgatgaagttactgatacgctaatcttagattaccgggttaatgaggcaaccaagcaagccttccgtgaaaatttcgacggttcaccattggctctattccaggcctttcaggtgttgttagctcttaacctgtatgttgtaagtgattcgcttaagtcggatttatactcttcaaccagtcactatgttagtgaaacagtaccgacgctagcatctgatgagcgaatcatgcgctttaaacatttctatttcaggaagcgagggggcgagaagccaatgcttctcaaagagctatcggatggcgaacaccagttattgcatagccttggtttatgtgtgctattccgtgacactaactgcctgcttctgcttgatgagcctgaaacccactttaatccaaattggcgagccagtttcatcacccgtctgcgtcagtgcttacctgatcaacaggatgtggggcaagaaatgttaattaccactcatacgccgtttctaatttcagatagcaagccggacaaggttttagtattcagcaaagatgaaacaactggcgttatcagcatcaaccacccggactacaacacactcggtgcttctatcaacaagatcactatgaacacttttggcaaacgtgaaactatcggtggttatgcacagaccctgctggaagatttacgcagacgatttgaggctggtggagaggatagggaatctcttattaccgaaattcaccagcaattaggcgactcggtggaaaaactgttactgatcaatgcgattcttggacagaacgcacaagacagcgaagaggagcagagttaa

SEQ ID NO: 16346 - DNA, 1554 bp, Escherichia coli
atgaagtggcataaattttctactgttatcaccgatgccacttctaagttcagaaaaattaaggcatccaattatcttactagtggcagatacaaaatcattgaccagagtaaagagcctgtcgctggctatactgacgatgatagtcttattaatgaacaattgcgtccaatattgatttttggtgaccatactcggattctaaaatatgaaaatgaccctatagcactcggggctgatggagccaaagctctttgggtagatccgaatatagctgatgcgcgctacgtgtactattatttacgctcagtcccaatcaaagaagcaggttatagtagacatttcaagtttctcaaagaggttaaaataccaataccctacaaagatgggcaacctgatttcgactatcaaactagggttgtttacctgcttggcaaaatagaaggcatgatcgccctgcgcaaacagcatctgcaacaactcgatagcctactcgaaagcgtttttctggagttgtttggcgatccggtacggaatgataagggctgggatattgtgccgtttcacaaagtaggcaaatttatcagcggtggtacacctagtaagagtagggacgacttctggaatggagactttccttgggttagcccgaaggatatgaagacgacaaaaattgacaatgcgatcgaccacatttctgaaacggtttttgagcagacatccctaaaacgaattgctccgaatcacttactgatagttgttcggggaatgatacttgctcattcttttcctgttgcaatcaattctgtcgatatcgccatcaatcaagatatgaaggcaattaaaccagttaaagacattaatgtcgtctatttattgaactgcttaaattcccttaagcgtcaactattaaagctcatctctacggcagggcacggtactagaaaattcgattctgtatccatggaaaagctatttataccgaaacctcctgaggaccttcaaaatcaatttgtcgccattgccgaaaagattgaaatcctcaaatctgattaccagcggagcctcgttgaattggagactctctacggcgcattgggccaaaaggtattcaagggtgaacttgatctatcacgagtgccgatgccaaaaccgtctactcgagatattaccgctgtttccttgggagcccaaacgaccatgcccgcccccgttgtacaaaccgtgcctgccattcatttacccgatacaggtaatctactggctgcattggaaaattccgaggctcgcaagacattggttacagaatggctggaagcctatcgcgtacaacttgctgaaacaccattttcgttacaacaatttattgaactggtacaaaaccgactggcggagctccacccggacaacgagttagtaataggggctagtgactacgaacacatcaagacatgggtgttcgaggctctggctgctggtacattgacacaggtgtttgacgatgctggcaattgcatcaagctcaaagccgctattgagcaaagtccagcatga

SEQ ID NO: 16347 - DNA, 1665 bp, Escherichia coli
atgttacaaaacaatcctgaactaaaatctaaaatcgacctgctttggaacaaattttggagcggtggcatcagcaatccgcttactgccatagagcaaattacctacctgctgttcatgaaacggcttgatgagttggatcaaaagcggcaggccgatgctgagtggacgaatgaagaatacacctccaggtttgaaggtacctggattccgcctgaggagcgcaactggcctgtgacggaacagcgtcccattgacaaacgtacgctgcgttggaacgaatttaagcgtatgcaggcagaggagatgctgcagcacgtacagggcaaggtatttcccttcctgaaagacctgaacggtgcggagtccaatttcactcaccacatgaaaaacgccgtgttcatcatccccaaaccggcgctgttggtagaggcagtgaagactatcgacgacatctttgcggtgatggaaaaggactcacaagagcatgggcaggccttccaggacatccagggcgatgtttatgaaatgctgctttcggaaatcgctaccgcaggcaagaacggtcagttccgcactcctcgacacatcatcaagatgatggccgagctggtgcagccgcaactgggtcaccgcattatcgacccagcctgtggcactggtggctttctgctgggtgcctatcaatacatcgttacccagttggctatcaacgctggtaccaagaaccttgtacccgatgaagatggttttatccgtacttcagttgccgcaacattcgatgaaaagcgccaattcgtcttgcaagaaagcctgtacggctacgatatcgatgccactatggtgcgcttgggattgatgaatttgatgatgcacggtatcgatgaacccaacattgactatcaggacactctgagcaaaagctacaacgaagaatccgcctacgacatcgtgctagccaacccaccctttaccggtagcatcgacaagggcgacatcaacgaagccttgcaactggccactactaagaccgagttgctgtttgtcgaaaatatctatcgattgctgaaaaaaggtggtaccgcctgcgtgatcgtgccgcagggcgtgttgttcggctctggtaaagccttcagggatttgcgccaaaccctagtggaacgctgtgatcttaaagctgttatcaccttgcctagcggcgtgttcaaaccctacgccggagtcagcactgccattttactgttcactaaggtctggggagcaaaagacaagattacgaaacctgctaccgaacacgtctggttttacgaaatggccgctgatggctactcgttggacgataagcgtagtaagcaggaaggttatggtgacctgcaagacatcatcactaagtaccacaaccgcaatccggggaccgacaccgaccgaactgcgaagtactttatggtaccgtacagcgagattgcggatgagaagaataacttcgatctttccctttcacgttataaagaagatgtatttgaagaagtgagctatgagcctcctagaattattctggaacgtctgattcaagctgaagttggcgacatagacgaagcagagttggccattgtgcagaatggtattgtgaaggagttgctagagttgaaagggatattaggatga

SEQ ID NO: 16348 - DNA, 2799 bp, Escherichia coli
atgcaaagttctgagaaagaaactcggattgctgttatcgataatcaattgtgcattgctgggtgggatgtacaagatccaaccaaggttgtgcaagaattcgatatcctcactaatcaatcagaaggtgtagctgaacctcaccaggagtatggtgggcaccagtacagtgactatgtgctcttagggaaagatggcaaaccacttgctgtagtcgaagctaagcgcactagtaaagatgcagctctgggccgtgagcaagcgaagcagtattgctacaacatccagaagcaattgggtggtgagctacccttctgcttttacaccaatgggcacgaactttatttctgggatctagaaaacgcaccgccacgtcaggttttaggtttccccacgcgagacgatttggaacgctttgcatacatccgtcgcaatcggaagccgttgacgcaggaattcattaacacctcaattgctggtcgtgactaccagattcgtgctattcgttcggtgcttgaaggtattgaacaaaaaaggcgtgactttcttttggttatggccactggcacaggtaaaacgcgcacttgcattgccatggttgatgctttgatgcgtggcggacatgctgaaaaggtattatttctcgtggatcgcatcgctttgcgtgagcaagcattggcagctttcaaagagcacttgccgaatgaaccgcgctggccaaatgtgggtgaaaagctgattgctacagaccgtcgcatatatgtcgcgacctacccgacaatgctcaacatcatccgggatgatgtgcagcacctgtcgccgcacttcttcgatttcatcatcgttgatgaaagccatcgctcgatctataacaccttcggcgaagtactcgattattttaaagccatcacattggggctgactgccacgccaactgatattatcgaccacaataccttccagctatttcactgcgaagacggtattcccacgttcgcttatacctatgaagaggctgtaaaccacgtgccgccttatctctgcaattttcaggttatgaagattcagaccaaattccagatggaaggcatcagcaaacgcactatttcgttggaagaccagaaaaagctgatcctgcaaggcaaggatgtcgaagacatcaactttgagggaacccagcttgaaaagcaggtgattaataagggtaccaataccctgatcgtccgcgagttcatggaagaggcaattaaagatgccaacggagttctgcccggtaaaacaatctttttttgtgccaccaaggcccacgcccggcgtatggaagatattttcgataagctctatccgcaataccacggagaactggctaaggtgctggtgtcggaagacccacgtgtctatggcaaaggtggccttctcgatcagttcactaacaatgatatgccgcgcattgccatcagcgtggatatgctagacaccggtattgatgtacgtgaaatcgtcaaccttgtgttcgccaagccagtctattcctacaccaagttttggcagatggtcgggcgcggcacgcgcctgctggaaaccagcaaactcaagccttggtgccttgaaaaggatatgttcctgatcctcgactgctgggacaactttgaatacttcaagctcaacccaaaaggcaaagaactcaaaccgcaattgccattgccagtgcgtctggtcggtctgagactcgacaagatcgagaaggcttatgatagcagtcatgcagatattgccagtcgtgaaattgccaagcttcgcgtgcagattgcagcgttgcccaaagagtcggtcgtaatcaaggaagccaccgcagctctggcgcggctggaggatgacaatttctggattaacctcagccacgaccgactggaattcttacgtgctgaaatcaaacctctgtttcgtactgtttctgaggtcgacttcagggccatgcgctttgagcgcgacctgctcgaatattcgctggctgtgctcgatgaaaacaaggaacaagccgaaatgctcaaagaaggcattgtcgagcagatcagtgaattaccgctatcagtcagctttgtgcaacaagaagaagcgctgatccgcacggcacaaactaatcactattgggtcaaagccgatgaagatgcgttcgatgttatagtcgccaggctcggtcctttgatgaagttccgtgaaaaatccagaggcgaggagcaaactcagcttgatttggccgatgagctttataagaaagaatgggtggaatttgggccgcagcacgaagccgtcagcgttacccgttaccgtgaaatggtcgaaactttgattgccgagctgactgagcacaatccggtgctacagaaaatcaagaacggtgatgcggttagtagtcaggaggccaatgaactggctgagctgctgcatgaagagcatccgcacattactgaagacctgctgcgtcaagtctataagaaccgcaaggcacgtttcgttcagttcatccgccatatcctcggcatcgaagtgctcaaaagctttcctgatgaggttagtgcagccttcgaccagtttatccgtgtccacactacgctcagcagccgacagatggagttccttgaactattgaagaacttcattgttgatcgcgaaagggtggagaagaaagacttaattaacgcccccttcacggtcatccatccaaaaggcatccgcggcgtgttcagcccggctgaaatccaagagatcttacagcttaccgaacggttagctgcctaa

SEQ ID NO: 16349 - DNA, 699 bp, Escherichia coli
atgtcggactacactttcaacatgggtcccctgcgtagtgcgatccatattcagcttcacacccataacgccacccgactgtggaccgggcggagggcgaccgagaacggccctgcgccaatcattggaatgccgcgctttatcgaaatccttaatcagatgcgcattgccgcagaacataacgatccttacgccgatctgtggatgctgcgtatggaagagaaactggcgcagtcgcgtaagttgatgcaagtgatgctggatcaggcaaaagccatgttcagcgaattgccagaaggcatcgatattgaaacctgcttcaatgttcagcctgcccgctttccgctgtttatcaacgccccgctggcctatcagggtgtttatctgctgaccgacttcgaccaactcgcacgccagcttctgctggcctctcatatcgccgtcatctcccacagggagatgcacaaccggttaaataatggcgcaacggttattcgcagcgccttcggtctggcgcagaaatatcatggctccgggctgacccgtcaggattttatcgacgatacaccgcaggccagagccgccattgaacgtttaggcccgctaccggaagcgatactgagcggcaagctgcgctcatcgttttcatcaccattgcctggcaaggccgaaaatcccggagtcgccgatgatgaataa

SEQ ID NO: 16350 - DNA, 495 bp, Escherichia coli
atgatgaataaccccataaccggctatcagtcgctggctgatgaagactataaaatgctggcttacgtctcctcgctaaaaggccttttaaagccttttaagagtaagggggagcttgagctgctggagagcaacgcccaaagcgtgcgcgagatgatggaaccattgatgcaacgcctgatccagagcgccagacgctaccctgtgcgccagcttccgctgatattcaccatcggaccagccccgtccggcgcaaacttcctgcgctggcgtaaccagcagaacaacaaatccggcaccccggcattctgcaacctgattggcgatcccaaaatcccgcagcgtgccagagatgccttgctggaaatcgagcgggatcgcatcgttttcaatatgcagatgtcggtactgaccttcatcatccgccaggcgcgtgagtgtcaggaaaagataaaccaggcagaaatgctgtatcaggggcggcaaaatagctga

SEQ ID NO: 16351 - DNA, 417 bp, Escherichia coli
atgagcgagaaaacttacttcaatctgtacaccagcggtctgggttacgttaaccgtgtccgcaccgtcaccccaaaacgcggcgaaccctttttatgctgtgacattgccgcattaagcggggctgccgatgacgtggactatgtccgctttgactgcaaagtcaccggtagcgaagcgcgtaagctgattgcccgctgcgagcaggcggtcaatgaaaaacgcaaggtgctgatccacttccgcctgggcgatttatacgtcgatatgttcacctacagcaaaggcgagcgtaaaggcgaaacgggcgtcagcctgaaagcccggctgctctatattggccttgttaaaatcgacggcgaagtcgtctggcaggccggaaaccaggaaacagaggcagaagctgatgcagcctga

SEQ ID NO: 16352 - DNA, 465 bp, Escherichia coli
atggcgcgaataacaggatgggttatcacactgctgatgctgggcggctgcaccgcgccgcaacaacccgttgcgcctgcaccaaaacccgcaacaccgcctacacctgaagtggtgcgctatgaccgctacctgctgatcaacacccgccccgacgaagcccagcgcaacccgctgcaccaagtcgtcaacatcaacctgccgctgaacctgaagctcaccgttggcgacgccttcgcctggctgctgaaacaaagcggctacagcctgtgcgccaatgaccatcccacgcagtttctggctggcaaaccgctgccactgtcgcaataccagcttggcccgatgcgactgaaagaggcgctgaaaacgctggccgggccaggctggctaatgcagaccgacgtactgaaccgcgaggtctgttttcacctgaacacgccgggaacgggagaccatcatgcttaa

SEQ ID NO: 16353 - DNA, 318 bp, Escherichia coli
atgatgaactggaaatcattttcccttaaccttatctggtttgttataagcatattttggatagattttttatctgttcaagacaaagagtggtttatcgacggtagaggaattaataatgtttgtgatgttatgacatatcttgagaatgatgatattcgcccagttggtattataatgaccttaccattattcatcccatatatttatgctgttatttggaagaaacagcactctctttggcaatattttgttatttcaataatgctcttctattggctgtggcagttttccctgcgctatctgttttgttggtga

SEQ ID NO: 16354 - DNA, 714 bp, Escherichia coli
atgaataatcttattttttgcgaagttgatgaattaggctttcctaaatggaatggcattgattattttcgatggcgttttcttccgactaattggacattcagcacggggactgcacacttatggttatataaaacatcatggttgatttatcaccgtgatatgttgtggcaatatgccaaagaggcgcaaatcccgttattattacttgcgggcgttgcggctgctgaggttggcggaatgccagaaagatttaaaccagtgggggtgctgcaattaaaaataatcctagaggccgtttcaaagagaggaggcaatacctactcaaactctacttcagtcggttctgtcgcaatacagttaggcgttgcagccaggactatagggatacatccagatcttttgtcatcctttgagcagttccaactttcccagtgcttactaaatgaccgcttcaacattagagtggtagcatttcatttacgagaccttatacattatgactatccggaaataggtgacaccactaatttaacggatgagcagttaattgtagtcggctcccgatacaaccgtggtattgaaagaaataaacaagatattatagactccattgcagcaccgaaaggatcccatcagagagaatacagtgaatatggtcgacgtattcttgaaaagaaaactgctttaatgaaaataatgaataatctatga

SEQ ID NO: 16355 - DNA, 273 bp, Escherichia coli
atgctgtccaacatgaaaatattcattactgagcaacaaaaagctgaacttgaacgccttcatgattccagtcgtgacgggcgagtcagagatcgtattaaagccattcttctggtttccgaaggctggagttctgccatgattgctcaggctttacgcttgcatcagacaacgattgatcaccatatcagcgaattcctgaataaaggaaaactgaagcccgaaaacggcggctcagacagcaaactcagtgctgaacaaacggccttttaa

SEQ ID NO: 16356 - DNA, 303 bp, Escherichia coli
atgtttgtcttgtgctgcatctggtttgttgtagcgatcccctggatagtcatcacttccacgctggacaaagagtggatgattgatgaaggtggggttaaaaatatctgccatgtgctggagtatctggaaaatgatgatacccgcgatgtcggtgtgataatgacgttaccgctctttttcccttttctctggttcgctttgtggcgaaaaaaacgcggctggtttatgtatgccaccgcgcttgtgattttcggctactggctgtggcagttttttctgcgctatcagttttgtttgtag

SEQ ID NO: 16357 - DNA, 3684 bp, Escherichia coli
  misc_feature (2334)..(2343): n is a, c, g, or t
atgtatagcatcacagaaaaattaaactcaagatttaacactgcgcttatattcgctgtcactgtctatattattttatcatttattacagccattgattttcataaaaaaatagcagaaaactcttcacgcattaatcttatacttatcaataataatttgaataactttttttctaaagttgaaaaagaggcggatgctttaaaagatgccatttatctgttacacgatgaaaatgaaataaaacgcgcagttcttcatcggatgaaaaagatagattctgttaatttagtcggaataatgctaaataatggaaagtatcttagctttattcgaactgataatggtgatgttaaatttttggggcaatcagagccaggtcatgcttttactagccctgatggtgaaattaacgataactactttgatcctgaatcccgtccctggaataaattaccaacagggacttattcaaaatggtcaccatggtataactgctatggcattgccgggaaaaaatgtttttcgttttcattacgaccagccgaagcagaaaaagattcatttgctctgaagttaattcatttagatcttgatgaaagatattttagcaatttcctggacaaattaggaggaaatgcagatattttatttatggaacagaataaaaggattatggtaggtaatgaacaatcaatgttacatcttattgttagagatgcatctggacgttataacataagtaataataacggtaattatacggacgatattatttcactccccaggcttcctgatgtcaaatttcattattttcattatcaaaaagcagaagacacaaacataaataaatattttacactgatgtttgtatgtggtttggtttgtttctgtttattatggtacctttttgaaaagataacaaaaaaggttagaaacgactctggtaaactaattgagcatctgaaaaaattagcgagctcagtataccgaaatgataaaatcgaaatcgtgcaaaatgacagtagtgagattattgagctcaaaaaaatcattaataacattagtgacaaatacaaagagcggatggaacggttacttaatcttgtttcctatgaacaaggaagttgtttctatatcaacaaatctgtcattgaaactaataataaaacctattcagcagttggtatgctttgtatctatggattagagtttgtagaggctatacatggcagtcagaaattttatgagatcattaatgatataaaatcaaagatatcagcaaagtattctaaatattgtgatattgtaaaaatttctactgaaacatatttgttgctgtgtcacactcattgtgaatcgttcatagaacgattatctgttttaaactttcctgagcatattttttgcataagaaatatttatgttcataaggttgctatttgtgaaactttttcaggggaaagtttgtcgatttatgaaggtaaactgaaactggcattaacagctatgcgagaaaataaagaatctgaatttatattttatgatgatattaaggctcatgaacttgatcaaaaggtttgggttgctggaaatataaaaaaagcaattgtgagtagtgagttttatttagtatatcaaccgattgttgatatggatagtaataatgttgttggcgccgaagcgttatgccgctggttgtccgttgaaaatggtgcaataccaccatcagttttcgtgcctgttgctgaagaaattggcttaattaaagaactgggtgattttgttcttgaaacggctattggtgaatttggttcatttagtcgtgagtatgaaattacgaaagaatttcttctgcatatcaatgtttcaccttggcagttaaatgaatttaatttccatacccgcgttttgaatttaattaataaatttggcgtaaatacggaacaaatctgtctggagatcaccgagtcagcaatgaaagatataaatgatagtttttataataatataaaatttttaagaagaaatggcattaaaatttcccttgatgattttggcagtgggttagctgacttgaaaaaattatacaaagttagacctgatagcatcaaaattgattcagaatttacttctggtattttcgatgaaactaacagggttgtgtgttttatatctagtcttgcacgagaagaaaatatgccagtgatcgctgaaggtgttgaaacagaaagacaggccagagaattacaaaaattaggcttctcccatgttcagggatatttataccagaaaccattaccgttttcagagtggcatatagacagtaaaccnnnnnnnnnnatgtttaagtataaaaaaaaggcagcagggatctgttttttgtattttttatgtgtctctgtaatgacatgttatctgtatactatttacgttaaagatcgagttaattcggtaaaggtatcgatcatagatagtgggcttgctatagctaatgtgtctgagtatcggcgcttagtatttaataatgtattttatgggttagatatttcttcggaagagttgttaaaaaggatacgcaatagttttgctgactttcaaaaaccagaatatatctatgatctaggtccctatatcattagcgatggtaaatgcgccaaagttacaacggaaggggataacttttgtgacggcatagtttcttctatccgtataagtaacatctttgaaagggggattattagtttaaataataaatattatatttattatgctcatcctatttcgaaacgaacaagtttgatatcagtggtagatcctgaacgttatttggctttgataagaaatcagtcaggtgaacgggaaaatatatatgtctcattttatgatatcaatgataatgaaaagaaaatcgcgggtgatgattttttgattaatgatgctgtatttgagaaatcagcgatcactcttgcttattcttatatcccggaagtaatgtttattgttgcctataaaaaagataagtatatttatatgtgcttgttgtttgtttttacatcggcaatttctgcggggttaatatattttcattacattaaattaatgcaaaaaatcataaataagggtaagttagaaaaagagtctatattatcgaataatcattataatttgcatggaaaaaatctattctttaacgttgaagagattgatgcaattagagaaatatatgatttcgggacttacgatgcattgacgcgagcttctgggcgtcgtgtttttgataaaaatatcaggatgctgagtaaggattttggatatttatgcctgtttgatgtagataaatttaaaaccattaatgacaagtttggtcatttatttggtgatgaagtactaataagacttgttaatcttattaaggatgaattacccctcagcaaaggtgaagtttatcgatttggtggcgatgagttcgctattatttatcatgataaagatataaatcaattatcaagaattttgcacagaatagtccatttctcaataggtggattgaattgtagttgcagtattggtgttgccgatactgacgagtgcatgaataacattgaacggttgaaattactggcagatgaacgattatacaaaagtaagcaaaatggcagagcacaggtaacctggtgttaa

SEQ ID NO: 16358 - DNA, 279 bp, Escherichia coli
atgttaagtaaccttcccggcctgctgaatgtggcgttatgcacggttattgtgctgacgctctttttttatcgtcgccgtgattccagacataaaccgctgatgtcatggctggcttggctgctgatgctgctttatgcctttgcaccactcagctatctgtgcggtcgcccgttagcggcgaactggctggcggtggggcttaatctgctgttctgcgtgttggtgattcgcgcacgcgggaacgtttcaaaaatctttgtattacgaaggcgctga

SEQ ID NO: 16359 - DNA, 546 bp, Escherichia coli
atgaagtcgaaagatgaaatttttgacgaagttctgggaaaagagggcggttacgtcaatcacccggatgataaaggcggaccgacaaaatggggtattacggaaaaagtcgcccgcgctcacggatatcagggcgatatgcgtgacctgacacgcgaacaggcgctggaaatccttgaggcggattactggttcggaccacgctttgatcaggtggccgcattatcctctgatattgctgcagagttgtgtgataccggtgtgaatatggggccgtccgtagcatcgaaaatgctccaacgctggctgaacgttttcaacctgcaaggcaaattgttcccggatatggacgcagacgggcgtatcggcccccgcacgattaatgcactacggacttatctgcaaaaacgtggcaaagacggcgaactggtgatgctgaaggcgctgaattgcacgcagggcgaccgctatctggagctggcagaaaaacgcgaggccaacgagtcgtttgtctacggctggatgaaagagcgcgtagcagtttaa

SEQ ID NO: 16360 - DNA, 1329 bp, Escherichia coli
atgtcgattgaaatctatctcccaaaacctcatgaggggcaaatagctgcatggacggcggcaatagaagaacgcttccacgcggtatgctgtggtcgtcgctggggtaaaacggtgatgctggtgaacatcgctaccagtttcgctacgcggaaatttgccgttcctaccaccgggcaacttatcgcgggtagggtggggatttttaccgcgcaataccgccagtaccaggaaatctgggatgaaattagcgccgttctgcaaccgctgatcctcagtcagtcaaaaaatgaaaagcgcatcattctccgcaatggggggcgcatcgacttttgggtaacggacaataacaaactggccgggcgtgggcgtaaatatcacgctgtgctgattgatgaggccgcattcactaaatcgccggaaatgctcgaggaaatctggccccgagcgatacgcccgacgcttgtcgattaccgtggctgtgcgtgggtattttccacaccaaacggtatcgacgagagcaattttttctacgcgatatgccacgatgaatccctgggatttgttatgcaccatgcgccaacttcatcgaatccgtatattccgaaagaagaactggaggaaacggagaagaaatccgatccgcgcgtctggcagcaggaatatcttgcagagttcgtagactggtccaaagacgcgttactcgatgtcgataagctgctggtggacggtcaaccaattgagatgccgccgtactgcgacatgattttcgcagtgatggatacggcgctgaaaggcgggaccgaaaatgatggtactggcgtggtgtatttcgcttatgagtcaacgtattcggacgagccaaaactgacgattattgactgggatgtgacgcaaattaaagcgtcattgcttcctgaatatatccccggcgtttatgacaacctcgagcgcctcgcgaaattatgccgtccgcgtctgggcagccagggaatttttatggaagacgccgcgatgggggcaatcctcaaccagaaggcggaaaccgaaggctgggatatgacgccgattaaatcggcactgaccagcaaaggtaaagacgaacgggcggtgatggcatccagctaccactatcaggggatgtgcaaaatcgtccgggaggcttacgacaagaccgtttcattcaaacgtaccaccgcaaaccacctcattaaacaaatcgccgggttccacctggcagacaaagacgcgcataaacgtgctgatgaccttttcgattgttatacctatggattgattatcgcgcacggtaattacgcggcgttgtaa

SEQ ID NO: 16361 - DNA, 1437 bp, Escherichia coli
atggcagagatcgagattactggcggcctcggttcagcactgatgcatattcttgaggctgaagaaattcagccgggaaccgacattggctatgaattgtgtaagcagctgtggcaattccatcctctgggcggaaaacttgtcgaaaaacccatactgatggcgatgtgtaagccgcgccagtataacgtggagacagaccctgacgagagggttgtgaggcgttttcaggaggtatgggaacgcatgaaggtcaacgagaagattaaaaatctgttttttctgtctcgttgctacggtgctgcagcgatcggcgtgggcaccgacagcgttccatgtcgtgaaccgcttccgacgttcggactgacagaagatgacgtgtatatcaacgcgtgggacccgttgaacgcttccggttcgatggtgactgaccagaaccccaacagcccgtttttccaggaagccaataaaaaactgaagattggtgggaaagactggcatccgtcacgcacactgaaaatcttcaacggcacaccgatttatctggagtttcagagttcatcgttcggattcaccggacgaagtgtgtttcagcgcgttctttattccctgaaatcctatatcaacacgatggaggcgaatgatctcgtcagccagaaggcgggcgtactggtagctaaagttgtgcagtacggttcgaaacttgacgggatcatggctgccgccacgggacgaaaaagggaaaacgtcaaagaggcaaaaaataaaggtgtgcttagtatcgggaaggatgaggacgttacctcgctaaatctacaaaacatcgatggtgcgctaaacgctgcacgcgacaatattatttccgatattgcgtcagggagtgacgttccggcgatcctcatcaaagaggaagccttttcgaatggtttcggtgaggggaccgaagattcgaaagccatcagccagtatatcgatggtgtacgccagcagattgaacccgtgatggattatttcgaacgcctggtgcagtacatcgcctggaacgaggaattttatcagtcgctgaaaaatgattacccggacatcataactgatgactataaaaccacgttttaccagtggcgacgtgaatttaccgcgacatggcaggagctggtggaggagtcgccggacaaacgccgggaaagcgacagtaaagtgattcaacaggcgatagcacttttctctgccgtgtcgccacaggttgatcctgaaaaccgtgccgccgtcactgaatggctggcaagccttgttaatgccacgcaaacctatggcgaagctccactcatcattgatgtggacgcgctggcgaattatgaaccaccgaagcaggagacgcctgatggcaatttccagccgggcggtgaggaagaagaaacggatcaggacgctatatga

SEQ ID NO: 16362 - DNA, 834 bp, Escherichia coli
atggcaatttccagccgggcggtgaggaagaagaaacggatcaggacgctatatgaggttctgacggatgccgttaactactacgtaaatcacgggtgggatagcgaaaaatcattgctcgaatggtgccggaaactccgtgtagccgctcagcgagaaacccctgatgataccgtagccagaaaacacctcaccgctatctacagccgtcttgtcatcgacggcggggcattacgagatcagcctcctgacggccctaaaaaaatcactgttgaaaaactgaaacctgagtttcgcaaggaactcgacaggcgaattttcgccagtgccaacctgataaaactcaaccgcgaacaggctattgagaaaactatacagcgttttcagggatgggttacgtccattccgcctgacggggtgagcgaaattgatcgccgggaagtgaagtccggttttcagaagtccgtgaaggatatggattttatcagtcgccgggtggcaattgaccagggacataagctggcgagcaacgttaagtatctgctggctgttcagagtggtgcgattgctctgcgctggcattctaactggcggcgtccgggctacaaataccgacaggaccacaaagagcgcgacgagaaaatttatctcctccgcgattcgtgggcgctggagcaggggcttattaagcccgtatatggtttttatgacgaaatcactgctgccggggaggaggtttattgcagttgcgatgctctgccgatctacgcccctcagaaactacccgacgaatttttaacggagaagggcaaacgtgagtttaaccgagcttga

SEQ ID NO: 16363 - DNA, 1323 bp, Escherichia coli
gtgagtttaaccgagcttgaagtggcagaacgcatcagggacggaaccgtaccgtctccggtgaaattctccaacatgtggttggtgaatttgcgcataaccggaaccgggcttgcctatcgcgccgggctgaaagagcacgtctggcgtgatccaaagctctatctgaacgaggagtttttaaggcgatgcaatggccttccggttatcacaaaccatcctgacgacgcagttctgacggaggaggattttaaatcgcggatcgtcggtagcgtcatgctgccgtatatccggggtgatgaggtatgggcggtgtgccgcgtttacctccagagcattgttgaagaaatcactgagggggatgtttcgacaagtccgtcggtggtgttcaacagcacatcaggaaatgtggaagtacaggaaggtgacaccaattttttaatcgagggcgttcctttcctggttgatcacatcgccctggtgacgaaagcccacggctcgctgggcgtgtgggataaagaccggatccccgcaggggttgaagtgacaaacacaggtgaaatcgagatggaaaaagaagaactccaggccctgttacagggggttgtgagcgatgccctgcaaggcattaatcagaaaatcgatggtgtcgttacgcgcatggactcactggaacagcgggacaaagcgcgggcggatgccgaagaacaggcgaaaaaagaggccgaagaaaaggccaaagccaatgaagccgcagaggaacagcgtaaagctgatgaagctgcggcaaaggaggcggaagaaaaagccaaagctgacgaggcagcagctaaagatgctgaggagaaagcaaaggctgattccgaagcagaagaacagcgtaaggccgacgaggaggcagaaaaagaacgcaatgattctgccctggcagaagcgcaggcaaaagccgactccgcattcagtgcctgcggtaaaaacgcgccagcaccgttttctggtgaaaatgcgctggactaccgcaagcgtgcgctaatcgctatgcagaaacactctccggcacataaggacgtcaatattcgcgcgattgcggattctgcaacgctggctgtgcttgaggacgcaattttcagtgccgcccgtcagtccatcgaaaaagaaatgatgagtacccaggggcaactgcataaacgtatccgcaacgatgaagccgggcgtcgcattactgaatatcagggcgatccgaacgtctggctgagtgccttcaaaattccggggcgtcgtctggcaaaaattaacactcaagggagcctgaacaatggctga

SEQ ID NO: 16364 - DNA, 618 bp, Escherichia coli
atggctgatattaactttcatccgtttaaaaaccgtggagcatttggtggcctttttaacgtcgaatcccgtgggctgatgcagggggatgcgcaggatgatccggcaattcgtctgcaactttgctccggtcgactggacagcaaaatcactgaaccggtatggggtggcgttggagttatggagtgcattgctcccgcgaaagacagcgttaacggcgcggtaattaaacaagccacgaaggacgcctgtaacgcctttactgtctttaatcaggcatttcatggcattaccacgccggataatccggtgccgttatatctcgcgggtggctttgttcactattaccgcgttggctcaggtgcccgcattcctctccctgtcagtgcagaagttgttgcgctggctgatggaaataacaccgttgctgccagtggttttgtgtgggatctgacgaaaaacatggttgatgtttattcgggatcacccggagctaatccgaaagtggatattaagttgctgatggtttcagttgacggaaacctgacggtgaaaaaagaggatggcggtaacgttgtctgggaaatcggcaaaccgtgcggcctgtttttaatttaa

SEQ ID NO: 16365 - DNA, 1029 bp, Escherichia coli
atgagcgcatttactcctgcgactactattgtgtcgccgtcaatggtgctgccggaaatgatcgtgcaacagagcatggcttccggggcgtttgaagtcctggctggtggtgctccggcagtaaaaatcagttccagtgatttgatggtctatcagaaatatctgcgcatgacctcgcaggctcaggtcagccagtctctgccgggccagttaccgtcttccagtatctctggcggctatgacgggatgatgacttaccgaatttcttcccgctcgcaatacagctatctcgatactgatgcagcagatcgctggggctattctctgattgaaggcctgcgcctggctaaccgccagggacacgctcaaatgttgcgtaatatgctgctgtacggtgttgaagcgaagaataacgaagggatcaccaactccccgaatgcagtgacactgaatctgggcaacgacagcaaaggtaacgattcatacaccacctgggattccggcgagatggctaaatttatgcttggcctgattgctgaccagaaaacccgcatgttgctgctggggcagccattaacgactgttattctgagcccacagcgattcatgaaggcgctggagtggacaggaattgttgagctgaccagttatcagcgtcctggtggtggtaccggaacggtgggaacgatggttaaagatgtcgccgataaggcgacaggcgacgacatcattttctgccaggacgacacgctgatcggtaaaggcgctggtggtaatgacctgatcatcgttacgaacccgacgattgaggttccggaagcgcgtcataccattaacaccaatattttctccacgctggttcctaaccagcaggccgtcaacgtgatgttctgtgatatggcagcgccgacggaaataccatcccctatgccggatggtggcctgaccacgttgtataccatgcgcgcgacgccgggctggaacttccgccctgaggggatcaccctgttgtctgccaaatacgcataa

SEQ ID NO: 16366 - DNA, 471 bp, Escherichia coli
atgaaactctacatcgctaactgctcacgtcagccgcacacgttcaactacaaactccccgaaaaaatgcagtcgttcggtgtgacaattccgtccggacgtcagcatatgatcgaaaatcagtccgatattatcgaccacatcatccgacagcatgagccttacggattccagcgttgtgacaaggtggacaagaatttttctggtatctgctattccatcgataaacctgtgagcgttggtcgtattgaggattgcgcggagcagaaaacggaaaatctggaatccctgtcagaagaaattctcgcagccagcgctgtatcgctgaataacgcagtggatcaggcggtgattcagagtggcgaaaaacctcaaccaggtggtattgaaatggaaatcaccggggaagcggttaacaccgaacaggaaaatccgcccagcacaaagcgaaatattaaggttaaaaaataa

SEQ ID NO: 16367 - DNA, 441 bp, Escherichia coli
atgaccctgcgtccgtcactggaggggtttattcgctttgttcgtgacgacatgaaagtaccggttcacgctattgctgacgatgatccgacgctggaatgttgctttcagtctgcgatggagctaatccctcacgatcaggggctggagcgtttacccatcatctatgtgcgaacggtttataacgctgccgcctcatttctcctgaatttcgctcccggctcgtggtttgccgacctgagaaaaaaactcaaccttgggaaactggctactgggcttgtcagtgcggcagcagaccaggggacatcgggttcgatcaccatcagcgatgcgctgagtaatctgtctttgctggatttgcagatgttacaggatccgtatggacgacaggttgttgcggtgctgatgcagatgggcacggtatggggttacacgccatga

SEQ ID NO: 16368 - DNA, 441 bp, Escherichia coli
atgaaactttgttttggggttatcgaccagccgtatgactacggcgacgagccgggaaaaaccacgtttgacgtagcctgtgacctcgaggagcgatacgaaatttttacgcacttctgggaaatgcataaggacgagattatccaggaggcaggtactgaactggcgtaccagttggtcaatcacttcaagtataaggctccgctacctggcgagcattttctggaagggaccgggaagattttccatatttttcttgaaactgaagaaatggccgggatgacgattaacggaaaccctgtgccaactcaggccgcgctactgggcgttaactccaggcttaaggacaaatataccggagagcggcgtccgtcattcatagacggcggcctgtttaagggcagctttatagcgtggatagataataatgccgagtcttga

SEQ ID NO: 16369 - DNA, 945 bp, Escherichia coli
atgccgagtcttgaggaattagccgaacagcacagttcgcagctctcgtccgttcttaaatccgcagttgaaaccatctcgtcagaccaggaaatcacgttcaggctctatgtccggcaggttctgccgctggatggctttgtctattgggttaatgcggaaatcatcagttgcgatgaactgtgtcgcctgaatattgagtcaccaactcgtctgaaaatcaaaggcagcctgcatcgtcaggttattgcgattcaggacgagtctgtctcgaaggatgtgaacaacattattttcacgcctgttcagcaggttgatgattttaatgtggaaaatcccgatgcgatctatctcggtgagtacggaggcgtccagttcgctttttcacgaatggagagccgttatcagcagtcgggtatttttcattatcgcggcatggcgattttaccaaccatgcgttctcagattatcgactgcgagaaggatatcagcgacgagcagatcatctccaacagcatcccgatctggctgcaaatgaaagatgccgcgaccgtgtatccgtcttacctggtaccgcagaaccttcgccctccgtatatcgcggtggatgttcgcaacagtattccgttgcaggtggctcccgttgttttcggcggtgagcggttccagctagtccaggattcggttcgcctgacgctttacggattcagcaacaaaatggcgctggatcttgtcgactcggtggtgaacagggcgctggaggaggaaaagtttggtgtaaccaatattccggtggttcaggacgcaaagtcgggacaggttgaaatcaacgctctggcgaagaaaaagattgtcgattttgacgtgaattactaccagagcaccgcccgggaaatgtcccggcagttgattgaaaaagttatttgtaaatatgaggttaaataa

SEQ ID NO: 16370 - DNA, 1338 bp, Escherichia coli
atgggatttaatatcgtcacggtgaatgtgtcccagaccatcggggccattccctcgaatttgcagcagatgtctgcggttctctcgtttggttccacgactcatgagccgggaaaacccgtattactcacccgtaatcaggatattaacgaactggttaaaaatccgattgctggcttgtcggcggctgccgcaggaagatctgcggcaagcgtcaccgttacgatgacgcttccggaagggagcaacatccgacgcgaaaacagttctgaggtgaaaattgttgtttctgggtgttcgcccgacgcgtggaatggcgaatatactgctaccgtcacggatgaaaaaacactgacctggactattactgattctcagctttccggttctccagtgacgctggggcagttttccattgctggcagtgaaaatctggtgacggcagtaaacacgttttttgcccagggaaattcagtggggatttacctgctggagctgggagtacagaaaggcggagtcagtaaggaaatcgctgcgctgaaatcttatatggaagatccgctccagcgtttttacgcttatctggtaccgcagacgtgggatggcgacgcggagtttatcagtctggcaaaactccacaccgccaacgaagcgatgcagtatttcttcgtgctgacgaaaacgccggatgacacgaattacgtttcgccttatgccggtattaagtcagttattgcaacggcggatgatacgtacccggcgacaaacgcggcagcagccgtaatgtggaactatgtttccgcatcaccttcagaaatcaacaaggtgccgccgatggcatttcgctatctacaggcggtaaacgcccacaagggcaaaaattccattctggctacgatgacgaagcagaatattaactacgtcgaaacgggggctgagggcggaatctccaacacgattctggtgaaaggcgttaccagtgacggtaacgatatgacgtactggtattccgtggactgggtgcagattaatgtcgatatgcagctcgccaacacggttatcaacggcagcaataacccaattaacccgctttactacaaccaggacgggatcgaccgtctacagcaggtcgcacaggcggtgttcaatacgggcgtatcttacggcctggtcaacggtcagcctgtcgtcgatgcagtgcctttccgtcagtatatcaacactaatccgaatgattacggtatcgggcgttatgcaggcctttcggcctcctatacgccgatgcgcggatttgtcgaaatcatttttaacatcaatgtgacaatgcagctttcgtga

SEQ ID NO: 16371 - DNA, 444 bp, Escherichia coli
gtgcctaatccaatgatccccgttggcacccttaaccgggttcgcgccagcgttaaattcacctctcattccgaactgaatgtgtccgcctcatttctggcaaaagaaggcgtcgaattgtcctttcagggcaatatcacggagtttttacccgctatgacgggagccgtgcagtcgccgcagccatacatgattttacaggcgcgtgttcatctgctgcgtagccaggcgctgggaaaacaattcaaggcgcaatgggaaaaaaacgccacgatcggcgacgcaaaagtgtatagcgacagcacggtgttcggtgacttcgatatctataacacggcgatcaccaacgtgcaggatatgaccttcgccgggggcgagccgggtgtggccatcaccattaccggtacgtattacatcaactctgaaatgtgggatctggtatga

SEQ ID NO: 16372 - DNA, 618 bp, Escherichia coli
atgaaaatctcccgaaatctgaatctgattattcctgtccggacagaaaagggtaacggctggatccatgccacgccgatcagcaaagaggtgtttaaagagcatttcttcattctgagtaaaactttttctgccattttttctgaaggtcttggcgtcgttgcggggccgcgtatcgcctgccttatgctggaacggatctcctcagatatgaacatctgggatggcgaaaagggcgttcgcaatacgctcgtgaatgaaatcattcgccttgcgaatctggtttacccagtcgaagggaaaggttatgacacgatcccgcttgatatggcgctggagcgcggcatcgttgaatttgatgatgtggcaggtgaactcgttttttttacatgcgtctcgtcgataaacacaccggagcagacggagcagatgatgctggcagtcagtggaatgtggaacagtcgcacttcatccttgagtcttacggattggattgcttccttgccgacattgaagcctgccgccagttctggcgcgacggcgaacacgtcatcagtgacatcctcgactactcagccggagacggattcagcgacatctgggcaaattccggcctga

SEQ ID NO: 16373 - DNA, 1989 bp, Escherichia coli
atgtcaggtaatcagatgccagttctgacactggacgttaatgaagaacatcttaagcgacttgaggcgatatttgaaaagtatcgcaacgggctgatgattggccctgccggtacgccgcttaaaataccttcaaatacaggtccggcaggtggcgcccggcagacaaccgcaggcggagaagccaatcaggctcccaggaaaccatcttcacccgagccagtttcggctgcttccactgatggacgtttaagggatgaaaaagggcgctttgttggaagcgggaaaacacctgattcgctggtgagcaactataaaggtcgcggcgaaacgatgtttgataagtatctcaacgggctgggtaaaaacgctcaggggacgctgaaaacttacaaacagatcaattcaacgcttaaaacgactaattcccggttaaaaagcctgtttaaaaccacggttgcgtggggggcgaagatagctgcaataggggttgcggggccgtttggctacggctatatggcaagtaaagtcgcggcacagtatagcgtggctcaggggttagggatggaaaccgcccaaatgcaggctgcacgtgccacctattctccatatttttctggcacagaagaactggttcagcatctggcgaacgcacagaaaaatccaaacgatccaaactatgctggtctggttagtcttggaattgatccgcgagatggtgcagcaaagaatctgcccaaacttatgagtgcgcttgcatctctagttaagcaatataaaggttcaggacttactcaggggattctcaacggacaaggacttggatttgttgatgtcgcgacaactaaccaggtggaagcgaatctggacaagatcccccaactgaatgagaaatttgcagcaaatacccggttactcggcgcttacctcacaccagctatgcagtcagattatcaggatacggtgagtaacctgatggtaaatggaaacagaatatcaaattcctggtatgcagctcttgccagatataacccattaatcagaggtgcatctgatgggctgacatccaatattgaaggttttctgaatggtggaaattttaaaaaaattctcactgaggctggagaagggctggagaaatttggcaagtggctaaatagtgaacagtttaaaaatgatcttgatgatttttctctggcggtgagccggattgcaaaagcaatatggtcagctatcaaatggatcggcggggaagataaatatctccccggaaccggagttggtgctgaacaggcagatccagttcttgtggcatttggggataaatatctcggcggtgcgttgccgggagcaaacccgatgacaaatcagtatacgggtgagttttataaacaggatgatgtatataaaaattaccgtatgcctaatgatttaaagagaaatattcagaactttgtagagcaagccaataatacttatcgacttcctaaaaatatgatgtctgcaattgcagaagccgaatcatcgtggaatcccctagcgaaaggaagccccgatgaaaatggcaattatgctaaggggttgtggcaattctgggatagcaccgcaaaacagtatggtctggtgggagatgatgtttatgacccaaataaatccactcttgcggctggccgctttttaaatgatctgaatcggcgttataaaggcgatgtggcaaaaatgcttacggcatataacggaggtcgtattgatagagatggaaatctaagtttgagaatggagactgtaaaatatttaattaaattattgcctcagatacagggagccttggatcaacaccctggtattatgaatcagctaagaaatgccaaagataaccttcagggtgctggcaaaaatgcccgcgcaataattgagcttcaggtgcgacaatcgccaggttccgacatactggcacaactcgccggaacgcaacaaataccggggtaa

SEQ ID NO: 16374 - DNA, 669 bp, Escherichia coli
atgtcacttaattactttggacaagctttcaaactggcgtttgaagtatcgcccattcttttagttgatggcatagcgtcgaaaattcctggcggggtgatgccgattgctgttctgaccgaaggactaagcatcgcgaacggtctgctgcatggagagattcgtacacgttcgatggcggcattcacgccaatggcggggacaacgttagtccagcaggatatttgcaacctgaatttctataaccaggtaacggcagcgaatgcgaccgtcaggaagcctaaccgggtagtcatgcagatgatccgtccggcatctacggaggacggtggctacaccacgaagggaatgacgttcacggcgctgaaaatggcgcttgatatgcataaccattatggcggttgctacaccgttctgactccctcgtttatctacacgcgctgcctgatgcggtcgtttatcgatacatccggtttctctgagcagaacaagcaagtgcagcacacctggcagattgagtttgagcaaccattgtcgtctgtcgaacaaacagtaaagacgctggcgagcgttctggataaatttgataaagggatgccgtcagacgggccgctatcgtggtcaggtattaagaaccaggtcgtgcaggagtttggtattggcttatga

SEQ ID NO: 16375 - DNA, 267 bp, Escherichia coli
atgacaacgttaattcctttcaaaccggacgggcgaggtccgtttcagttcacggccagaatcggagaatatgaaacattcgcccgcgttccgtttaatctgtatgcaaatcgttactacctggaactgaaggacagttctggcgacgtgattgtgtacatgccgttgatcgcgtcacctgacaattacgacatcaatctggcgctgccttgttcaccggggaaacttgtttttcgcgaaagtacgaatcagtttgaggtttcgtaa

SEQ ID NO: 16376 - DNA, 1008 bp, Escherichia coli
atgcgttattaccgactggaaattattaatcctaaaacaggcaagccgccagtggatagcaatggaaaacccattggaccttttgataccagtgaaacaccaggatgtgggttgcatgttgaatttgactttgaagtaaccggcctggatgtagtctgttcgggcacgatgctgacgatctatggattaccaattgatatgctgaagcaaagcgtaagcttgcagggttgtctggtccgtatgaaagcaggctttgttcagggattaccactggcaaataaggatcaacaaggggaggtaatctatggtgaaatttatctggcctatgccaactggatcggcacgaaccagactttaaacctggtaataaatcccggcatacgcaaaaccgatgacggtaaacctttttcaattgaggggcagggggaagcaggcgaaagggtgggcgatgttttagtccgcgctttgcaaaaagcatatcccaataaattgattgattgcacagtcagcgacaaccttgttttgccagagccgtggacaggcaaatatacggagattggttctctggctatggtcgtaaaaaacgcctctattgcgatgatgcgtaatgaaaggtatagcggaatcgccatcagcattctttccgacagaatacgaatttacgataacgcatcggcaaagtggggtgagccaaaaacaattcatgcccatgaactggtcgggcagccgacatggatagcgccgtttaccgtcagcttcaaatgccctatgaggggcgatatcagatgtggtgatgtggttaaactgccggaggggctatattcaggcgctgcgtcgattgtgatggctaatacaacggcatccagcgttatcgcaaaaaattcgaccacgttcaccgggaaatttcttgtgaaatcggtcagacacattggttcgtatctgacagccgatggcgatgcctgggtgacggtatttgaggcatatgctgagaactgggcgagggtgtaa

SEQ ID NO: 16377 - DNA, 714 bp, Escherichia coli
atgtcaaacgctcaaaaattaccgtttatccgaacgctgtcggagatgatgaccagttctggtaaccagcaagccgagcttaaaggtcgtgaattgccctgccatgttgtcggtgtcagcgggcagatagtgacagttcagtttgatatgctgccggaggggatcaactttccgcagataacaatccctgtcgccacattcccgtatattcgttacccgatacagccgggcgatcgaggagtaacaattgccgctgatgtatccctgcgcggtgtgtccggattgggaaccggtatggcgacgctctcttactcgatgtcgctcactccactgtttttcgtgccactggcaaacaaggactggtccgacgaagatccgcaaaaaatcgttttgtacggtccggatggcgcgatcctcaaaacagaggacggcagtagctcggtaacggtggcaccggaagaaatcaggcaaaagtcgaaagctgtttacctcgaggccgaagatattttcctgaacggtcaaattcacctcaacggaccgatcgtccaggacaaagcccagatgaaggatacaaccgcttcgctgattggtcctcttaaggtcgagaaagatgcagttatcaacggcgtgagcgccagcagccacagtcacgatgtgactggtgttcaaagcggtggcagtacgatcacgtcgaagaaaccaaatccgggttaa

SEQ ID NO: 16378 - DNA, 348 bp, Escherichia coli
atgagaacatggggccgcgtcaccgacgcgaacggcaacaaaaaatgggttgctgtagaatctgacgccaacggtgatttctcctacggctggctgacgacgctcattcagacgttaaagctggggttgggggagtcgccgttttacgcgaattacggtattccagcgcagcagtgcatcgtgcagcaaatttacccggactactatgtgaacatggttcagcaacagtttgccgggtattttgcatcgctggcaatttcaaaggtagatggggcagagaaccccacctataacatcgatgttgtgttttttaacggaaccagttaccggacgcaggttccggtttga

SEQ ID NO: 16379 - DNA, 489 bp, Escherichia coli
atgatgcacgcctttctcgaagtaggtaaacgctttgctacttggatcaccgagcgaatcagcgagtatgaattcgtagaaaatcaggactttttgattatttcccaaaatcgggaaataatcgatagaggcataccagctaaagactaccacctcatcctggaccccgccaaagaactggcaatggtcgagcacaacgaaaaaggctgccagatccgccgatacttcatcgagtgcgagaagaagctgcgcgaagaaaccaccagcacacaatcccctctgaatgttgacatcatcatgcgcgtcagaaacggttctgttacccacattgagcaccacaaatcaggctcagttataaccacagaatgggcaattcacttactacgcaaaagtggatggattgtcatgccacgcgatgaacttcttaacacgccactggcccaactgatgcccgaaaacttgcctcaaaccggaacctgcgtccggtaa

SEQ ID NO: 16380 - DNA, 549 bp, Escherichia coli
atgaaatttaactcattagggattttgattagctcactgctattttctggtgtttctcatgcaattgatgccacagagagaatgaatgacattcaacaatttggtaaatggtattatgctgagtttaccatgcctaccactatggcttatcgtattggtgttgaatccaaattgccgcaggataaatcaactttatttattgatatatcaccgttaactcaatgtgagcccggtgatgtaactgtcaatcattttattggatataaacaaatggatttaccaccgttccttcctgtaagctataaaatcagtggacaacaaaagcaggactctataacaaccccatctatcaatgaaggttacttgttcagtcctattagctcattaaagattagtgatttgttaaaatctaaagggaaaggtagtttttctttttggtacactccgccaactgaaagtaaagaaaaaccacaaaaaatattcttcccattagatggccttccggaagcatataaggctgcaatcaattcctgtaaagaaaacatgtaa

SEQ ID NO: 16381 - DNA, 1227 bp, Escherichia coli
atgtcagaaataccaattactatgaccagtgcgggtgcgcagcctacgccacccaatgacttgctcgcgaatcttatcaccagagttgctgaaaaagtacctggatatacagccaaccttccggcgggacttattacagaccttgccagcacggctgtcggggcgctggcattaatagaccaggcgcgggtggatcttattaactccgtaagcccatacggcgcgaatattccgttactgatgcaactcggaaacatttatggagcacagaagggattaagtacaaatacggcggtatacgtggtgtttgaggcgttgccggggtttggtatccctaaaggatttgttgtcggtgacggcaactaccagtatgcagtttcccgcgatacggtggtgccggaaagcgggcagactgagccagtctactgtgtggccataacgtcaggctcatgggctgtaccggaaggaaccgtaactcaggtcattacatcggtacccaaagatcagcctgtaaaatgcacgaaccttaccgcaggaatgccaggtcaggaggcgcaaacgtgggcatcttaccgcgccgaagtcatggagtctggcatgtttggtgtgcagggaacaccggattgctttaaagcgatgctcaaatcagtaagcggtgtgcgcgaaaacctgatttctttccggcagtcgtcgctggggaaatgggttgcggttgttggtggcggtgatccgtatgacgtggcttatgcgatttacaaatctgtaccggatatttcgaaactgaccaacgatgtaagcaatccatccggtgcggcagtggaaaaacgcacggtttcaataaccgtttcgccggacgtttatcaggtgccgttcgttatcccgtcatcacaaaacgtcatggtgctaatcacctggaacacggtgtctgatgattatgttgacccggcgggtattgctatggctgtgcagaaaaacgttgctgattacatcaattctattgaagtcggtcacccgataaatctgctgcgaatccaggatatttttaccagctccgtaaaattgctggttgatgcgacgttgatctcaacaatcagtgtgagcattggtattaacggtcatattgttcttccggcaaaagacacaagcctggtttatggcgatacctattcctatttttcgacggtggcatcacaggttcaggtcaataagtatgcaatatctgactga

SEQ ID NO: 16382 - DNA, 627 bp, Escherichia coli
atgcaatatctgactgagaaaatacttcctgcttatccgtttgtgcagtacagagatgatccgaatgttgttgcgttctttgaagcatacaatgaaattgctcaggaatacctcgattcgctcaacaatctggcattgccatgctggacatcggaatcaataaccgggcagttgctggactggatagcacttggtatttacggtgttgaaagacctttactacaggtttcagaggaggctattgcgcgcggtgcatacgataccattgaatacaatacgatcccgtatgcagcaatgcgaaattacgttccggggcaggcatcgtatgttcctgatgattattttaaacgaatattaacgtggaatttttataaggctgacggttcgcatttctgcattgactggttaaagcgccgtgtggcgcggtttattcatggaaaaaacggaatagacccgccgttacaacatacttttgatgtgagtgtgactgtatcggacagtgttttttctattcagataccagagtatggcgatggtataggctattttctgaaagatgccattgaccagaaatatgtaaaactcccttttatttatacctatgcaacaacggtgattcaaaaatga

SEQ ID NO: 16383 - DNA, 2070 bp, Escherichia coli
atgacagcattatctgacagcatcccccaggcgatggctggtaattcagcctccgacgatgaattcctgtggctggaagagctgcaaggtgataaatcactacaatggatccagaaggaaaatcagcgcaccatagcgcgtttcacccgaaaccagaactttttgcgtattgagcgtgaggtacttaatatcctcaacaaggacacacagatcccgtgggtgagtaaatatggcgattactattacaatttctggcaggatcaggctcacccacaaggcctgttgcgacgtaccaccccggatgaataccggaaagagcatccagcctgggaaactgtgctggatattgatgcactgtgtaaaacggaaggcagggagtggatatttcagggcttgcaacctctggccccggaataccgtcactgtctgctatacctgtcgccggatggcggtgatgcctccgaaattcgtgaattcgatctggtgaccagatgcttcgtcaaagacggattcaacgtacctgtggcaaaaagtcaggtatcctgggttgatcagaacacgctgtttatcgcaaccgattttggccccggctcaatgacccgctctggctacgtacgcatcgtcaaacgctggcagcgtggtcagccactgaacattgctgaaacgttgtatgaagcgcagcacgaagacatggaggtttttgcttaccgcgacgccacaccgggctttgagcgtgattttgttggcaggatgacagacttctggtgccgtgattatttcttgctgacgcagagtgaccagcttatcaaaatagatattccggctgatgctgaactggatactcatcgggaatggatattagtcaggctgaccagcgactgggaggtcggcggtcagcgttatccgtccggtgcactgctggcggctgattttgatgattttctggcaggtaagcgtgaattgcagttgctgtttgccccctctgtcgggagcgtgttaagcgattacagtaaaacacgtgactatttgatcctcagtatcatgaataacgcgaccagtcgactggaagtactgatgccgcagaagagcggctggctacgccgcccactggccagccccgttaccatgagtaccatttccgctgaggccattgatgaagaaagcaacgactattttctgaccatcagcggatttctgcaacccgcctctctgtataccggtaacctcgacgatggtgaaatcacattgttgaaacagtcaccacaggattttgacgttacaggttaccaggtcagccagcattttgttcgctcccgggatgggacccgtgtgtcgtattttcagattgccgctaacaatctcaggctggacggtagtacgccaacactgttgtatggttatggcggtttttccgagtcactgctaccggagtatctgggggatgaggctccggcctggctgaaacgaggtggtgtgtatgtcgtggctaatatccgtgggggcggtgaatacggtcctgactggcacaaagcggcactgaaacaaaaccggcaccgttcttttgaggattttgctgccgtggcaaaagatctgattgcacgaaaggtaacttcttcgcatcatctgggaattcgcggtgaaagtaacggaggattactgacgggcaatatgctgacgttgtatccgcatttgttcggatgcattgtctgtggcgtgcctttactggatatgaaacgctacacgcagctttccgccggtgcgtcgtggattgcggagtttggcgacccggataagcccgaagagtgggactatatcagaacattttctccataccacaatattaaagcagaagagaactatccaccggtgttgttttatacagccaccagtgacgaccgggtcaatccggctcatgcacgcaaaatggctgcacgcatgcaggcgatggggcatcagcaggtctacttttatgagaatacgaaaggggggcacaatgctgccgcagacaaacaacaagcagcatttatcagcgcactggtgagcgagtttatgtggtttcatttgaggtga

SEQ ID NO: 16384 - DNA, 315 bp, Escherichia coli
atgtgtgaaaaagaaccggagctgaaaatagcgcagcaactggcactcgagttctaccgtattctgaaaacccaaaataaatcacagctaagcagctggttcactcgagtccacgaaagcggttcagcagaacttcggcgcgtggctgcggggatggaagctgatgctgcggctatacgtgaggcaatcagcagtcgctggagtaatggtgttgtcgaaggtcatgtaaatcgcctgaagatgctgaaacgccagaagtatggtcgagccggatttgaactacttaagcagaggttaatgagtccactggcatga

SEQ ID NO: 16385 - DNA, 246 bp, Escherichia coli
gtggggcttgacccggaagaatggcagggtccagtttctgctattgcagggacaacggaaaccaaacgaaaactcaaaggcggtgtgagaaaagcgaaatatatctttgaggatgagaacggcaaaaccagaacgtggtctggtaatggtaaaataccgcttgctttacaaaagcagcttaatgaaggttgtcccctggagacttttctcattgaaaagcccagccaacatgaacaaagtgaataa

SEQ ID NO: 16386 - DNA, 132 bp, Escherichia coli
atgactgaacagaaaattaccgacatcgctcaggctaaaacgaacttttatcttttcagtatcaatgctcgtggcaatcacgcaggaaagatcaaactttctcacaaccaactgcttaactggctggtataa

SEQ ID NO: 16387 - DNA, 663 bp, Escherichia coli
atgaaacctattattaatcatgagtttactgatgatgacagacagcttttgctttcatatattccattcatcgacagtcttggtcagttcctgggagagtattgcgagatcgtcctgcacagttttgaggacctgcatcattccgttattcatatcgtcaacgggcatgtgacggggagagagaagggggcacctgtaacaaatatagcactggaaaaactggcagaatttaactcaacaaacgatatgtgggacgtctatttcaaccataaaggtgttcgcccttttaaatcgtcgtcatcacttattctgaataaaaataaagaaccagtaggtatgatatgtatgaactttgctctggatatgcctcttaatgcatttattgaaaactttgcaaaatcgtcaaactgtaaaaacgaaaatttcactcaggatatcaataatcttgtgcttagtcaccttgaacctgttaaaaatatggtttactccaataagaatataccaagtaaaaacaagaactttgaaatagtaaaagaacttaattctattgggttgtttaagttcccggttacaacaaaaattgtttcatcggttcttggtatcagtgctaacactatttataaacatctcagggtattaaataataaggggaaggagaattaa

SEQ ID NO: 16388 - DNA, 960 bp, Escherichia coli
atgaaactaggccttgaaactgagtcatatcatctgttctttcagcagggggtgatggatattttcgacttcattgctaaaaccagtgaactggggctggatggggttgaaataaatatcattccggatgttggtctgcatccggaatttggtgtcctgaacagtatatctcccgaatatctgtcaaaagtcagaaaagccattgattctcatggtctttattgtgagatagatacccgattcactacctgtgaagctatcaccagagcagtggaaattgcatctgcacttggagcagacgttatccgaacttatatgttcaggagaggggaatacaatcctctgaaatatcctgaaatagtaacacagttaaaatcactgacatccttactcagtaggaagaaaattaaactggcaatagaaaatcatgaagatgaaactgccgatgagataatcgaagttatcaagtctgttaattctgagtgggtgggagcacactgcgatataggtaatggaatgatggcatgggaagaaccagtagaaacagttcgtaaactggctccttatgcttacagcacgcatttcaaggatcatattgtcacacgcaacggtgaagacctggttgtctgtggggttccagtcggagaaggaagcattgatattgatacctgtttcaaaaccctggttaatgagtcctctttaaccagaataaacatcgaaacatgttttccttatgcctcaccttttgcccgtcccaaaggtactggcggcgtatattctctggaagggacattctccgtaaaagaggcaccatttaaacacctgaaaataaagccacttgattattactaccctgcaaaaatatctgactctgtattacaggaactaatggcagcccagaatcgctgtgttgaggtttctgttcagactctgaagaatttaagaaaaaaacattgttaa

SEQ ID NO: 16389 - DNA, 378 bp, Escherichia coli
atgatcattgatactaaacatgcccccaaagctatcggtccctatgtacaggcagtatcagctggaaatttattgttcatttccggatgttgtcctttcaaaccagaagacggaaccgtaaatggcgacactatagaaaagcagaccaggcaagcgatggataatctgaaggcaattattgaatctgcaggaatcggaatggataacatcgtaaaaacgacctgttttatcagtaatatggataatttttcacaatttaatcttctgtatagtgaatatttctcatcagataaatacccggccaggtcctgtattgaagtagcccgattaccgaaggacgtgctgatagaaattgaagccattgcggttatcaaataa

SEQ ID NO: 16390 - DNA, 1233 bp, Escherichia coli
atgaataaatggatgaagctatgcttccttattcttggcggtgggacaattttcaagttgtccagtatgaaggacgtattttatgttcctatgcaggctgactgggggttgactaatacacagattggatttggatttacagtatatgctgctgttcagactatcggactattcagttcattatatatagcagatcgtttttccaaaaaaatacttcttcccgcaggtttaatcggtgtgggtctgtgtggggcttatctcacaacattaccccccttctctggttaccttatagcttttggtgctatggctttctttggcgaagtagtctactggcccgtactacttaaagctgttcgcctgctggggaacagggatgaacagggacgtatgttcggctttctggaagctggacgaggagtcgtggatgtattaattgcgtccggcgctttattcgtctttgtgcagtttggcgaaggaaaagctggcatgcaggctggtcttgtttattacacattaatcaccattattgttggaattatcacctactttattgtggatgcagacgacaggaccattccacagaatgacgaagatgttaataaacagatattcaaagggataaagaatgtcgttaaatcaccaaatctgtggctggcctcattttgtatattctttgtgtactccgcatattgtgggctgacatatttcataccattcctgaaagatatctatgcccttcccgttgctctcgtgggtgcttacgggattattaaccagtacgggctaaaaatggtgggcgggccagttggcggttatctcgcagataaaatttctcattctccggccatctatctgaaatggactttccttatttcagcagtcgctatgctactttttattcaactaccacacgactcaatgaatgtttatcttggaatgactgcaactcttggatttggtgcaatcattttttcacaacgggcaattttctttgcgccaatggatgaaatcggtacccccagggaatttgccggttcggcaatggcttttgggtgcattattggttacatgccttccatgtttgcttacacgctttatggttcgctgttagataatttttctggcatacagggctataactatgttttttctgtaatggtggcatttagtctgctgggattcatttgcgcgactctgcttacccgaaggatgaagatgagaaatgagtga

SEQ ID NO: 16391 - DNA, 357 bp, Escherichia coli
atgattaaactgaccttacaaccaagtgcttctgttgcccgtatcgcccgagaacacgataccaatgataaccttctgtttaaatggctcagactctggcaaaacgaaggtcgtatatcgaaacgtcttccggtaatgacttcttctgactctggcgctgagttattacctgtggagataacgcccgatgagcagaaagaatcaatggctgctcttactctatctttatccacaccttctcagactacagtcactgccagctcttgcgaggtggtgttccatcacagtagaataactgtggaaaacccgtcaccaaaactggtcactatggaacatcaccccttctggtttacctaa

SEQ ID NO: 16392 - DNA, 507 bp, Escherichia coli
atgacggataccttttactgggtggcacttcccctgaccacggtaaatggtgtctcgcagtctcagtcggagtggatatgctgggagccaggagtgacctgggttcgccagccaccggaatatgccattacggatatggcatattttcccttttatcggtatgccatgacctttgaggaatttgttccggtattttcttcctggtatgtcggcaataaatgtggtgtggcagtgctgaccggtgcccgtgtggatgaatccctcaaccgctttatgggattggtgttgcagcgcaaactgagatatgccgatgataagctctggatcacggcatcgctcgaagggttttattacaccatgtatccgttatatgacttgaaagctcgtgatatcttgatatataacgtgttccccgcgccagcggggataaaacgtatcgctcttattgtcgctagcatcggccacggttcggcaggagcaagaagcatcgccacaatggcaacatag

SEQ ID NO: 16393 - DNA, 126 bp, Escherichia coli
atggaaatgtttcaaaagtctactcaatacgggctgttgctgcgcgcagaacattttctctgtcaaaaagttatcactcatttttctgattttatgcagaatatttctttttatacattaagataa

SEQ ID NO: 16394 - DNA, 708 bp, Escherichia coli
atggataaaattatagggaaacaattatccccaaaaaagcaagataatgaacactgggtatccatgtcagatttaatggcagggctgatgatggttttcatgtttatatctgttgcttatatgcattacgtgcgtattgaaaaagaaagaattaaagaagttgctgtagcctatgaaaatgctcaattacagctttataatgctctggatattgagtttgcaaaggatttacaagactgggatgcagagatcgataaacagactctggaagttcgatttaaatcaccggatgttttatttggcttaggaagcacagagctaaaaccaaagtttaaactcattcttgacgacttctttcctcgctatctaaaagttcttgataattatcaggaacatattactgaagtccgcattgaaggtcacacaagtactgactggacaggaacaacgaatcctgatatcgcttattttaataatatggcactatcgcaagatcgtacacgtgcagtattacaatacgtttatgacataaaaaatatcgcaacacaccaacaatgggttaaaagtaaatttgccgcagtaggttattcatctgcacatcccattcttgataaaacaggcaaggaggatcctaatcgctctcgtcgtgtcaccttcaaagttgtaacaaatgccgagttgcagattagaaagattattcaggagtaa

SEQ ID NO: 16395 - DNA, 471 bp, Escherichia coli
atggaaatggaaaatacccccggaagagcgcgcacaccatgggcaatcgaagaaattcgctaccttgaaacgcattatggcgtgaagaaaacccgcgaaatagcggcatgcctgaacagaagtgcgacagcagttcgtgccatggcgtatctggtggggataacaacaccagtggctgcggactggtcagagacagagattgagattgttcgcagggactatccggcaggcgttgcgcttgctgatatttgtgcccgtctgaacggacgagcgccgaaatctgtgtgctggatggcccgcaggcttggtctgaaacgcccgggttactggtgtacagaagaagatgaaatcctgcggcagtattatccttcagaaggtgtgaaagtgagccgacgcctttccggacgtacagaaaatgcagtgaaactgagagcgcgtgagctgggtgtgaagttcacgggaaacgggtga

SEQ ID NO: 16396 - DNA, 525 bp, Escherichia coli
atgacacagctcagcagaacaccttcactgctaaatcatgcgtcagagtggataaccctttccggtcagcagataacgcgactgacagaattaccgccggcatacaacctgcaacgcagtgcgcagctactgcagcaactgatggtacttttccccgacaatccccgggtacaggaaatggtggataactggcagaagagtgtaaggagccgagcgcttccggaagaggcgatgacgggctggaacgaaggcatgacccgcttacagcagctggctgagcgcctgaaccgtctggatgaacagcggggaaaatacatgacggtcagtgaactgaaaacagaggtgtttggcatcatgcaggcttttaaccggcacataccggcagaagagcagttacgccgttatgatgaagtccgcaaccagaatggcagtgaacagcagcaaaaacaggctgaaatggcactgaatcagttgattaatcgttatcaggtggaacacgctggcaaaccggagaggcagccataa

SEQ ID NO: 16397 - DNA, 2178 bp, Escherichia coli
gtgaacagaatatattcacttaagtattgtcaccttactcaagggcttatagctgtatcagaattagcatctcgagtatcctctaaaaccggtcgaaaacttctcgctacatttatagtttccgccttgtcttatggtgctgctgaacatgcctatgcagcgcagatggatacccgaaatttctggatccgtgattatcttgatttggcacagaataaaggtgtatttcagcctggagcatacggggtaaaaacgccattaaaaaatggtggtgaatttagttttcctgaagtaacgatccctgatttttctccagtatccgctaaaggtgcaacaactgctattggtgatgcctacagtgttaccgcaagccataatggcactattcaccatgccgttaaaactcagacatggggacagtcagactatcattatgttgatcgggtgaccaaaggtgactttgcggtccagcgtctggataagtttgttgttgaaacagctggtgcaacagagcatgctgatttcaacttatcagcagcagaagcactagagcgttatggtattgatttcaatggaaagaaacagatcatcggttttcgggttggagccggagcaaccggtgttacatcttatggggtgggacaggcatacaatccattattacgtagtgcctccatgtttcagttaaactggaacaatatgttagccacgaataatacaggcggattttataatgaagtgacaggaggagacagcggttccggattttatctttatgacaatcagagaaaaaaatgggtcattcttggaacaacatatggtaaagcattctccagtaaggatacctgggccttttttgctcgatatgatcagaacactgtcgacaccctgaaaaatacttttactcaggaagtgaatctcaatggtgagaaaatgacagttaataataaaaatattactgttaacggtaatacaaccgctattgaactgaccaagaataataaaaataaagatttaaaatttcatggtggcgggaacattgaactcaccgataacctgaattcaggatctggaggattgatttttgatgagggacaatattattcaatcaccgggaaagataaaacatataaaggtgcgggtattgatatcggaaaagatacggttgtcgactggtcggtaaaaggggaggcaaacgataacctgcacaaaacaggacccggtacactgaacgttaatgtggcccaggggaataacctgaaaatgggtgacggtactgttgttcttaatgcagcaaaggcctttaatgctatctatgttgccagtggtcgcggaacggtcaaactagggcaggccgatgcgctggataaaaatagtgattacagaggtatttattttaccagtcgtggggggactctggatttaaacgggttcagccagtcgtttaagaagattgcggcaactgatgttggtaccattatcaccaatacttctgataaaacagcgaccctttctctacaaaacctctcccgttatgtctatcacggcaatatcacgggaaatacgaatatcgaacactctgggacacagaaaagtgctgacagtagcctgattattgatggaaacattgatacgcacaatgatatctccatacagaattcccagcttcggttacagggtcatgccacaacacatgcaatattccgcgaggggcctcggcactgctatgtccccggagttctttgtgacaaagattatgttgctgattttgccaaactggaaagtgaggcaaataagaaaaataacagtgcctataaaacaaataaccaggtggcttcttttgatcaacctgactgggaaacccggcatttccgatttaagactctgaatctggaaaactcagaattcacaactgcacgtaactcagttgctgagggtgatattgtcgcatcgaattcaacgctgaaactgggggcgacgttccggtgttcattgatatgtatgatggcatcaatatcaccggtaatggttttggcttccgccaggacgttcgtgaaggacgctcagcagatgatggcagtagcagctatacgggcaaaattacactgcaaaaaggctccacgctggacatcaacaaccggttcattggcggtattgaagcccatgacagtaaggtaa

SEQ ID NO: 16398 - DNA, 156 bp, Escherichia coli
atgaatttggtgccggactcggaatcgaagatttcttctatcatgttgatattgatttattttatttggtttggtgaaaaatgtaccctcttttgtaccctcagtcccttttgctgtgaaaaaggaatcaaactcgggagttgtaagatgaggtga

SEQ ID NO: 16399 - DNA, 483 bp, Escherichia coli
atgaaatgtttacataccctaatgttttttctggttttcctgtttattagcgtaagtcctgacacaaacgccgccactgtaaatcagccccttaaatgtgacttaaaagcctggtctggccagcctggtgcatgtccaacaacgtacgagttgtacgaagatgacgctacctacagagctgctgtcgacaaagcattaaaccctgttgggttagacggaatgtttggagaagacagctatatggatggtcctggcggtagtgtaacagctgtaaacattaacggaacgagctggatagaaggtggcggttgtaaagctaacgcctgcggctgggactatatcgtaacactctataacccaaaaactcataaagtcattggttactattacaacatcgatcctggttacctgatttggtttggtgaaattggcgttcacgaattcgcgtacctggtcaaggactacgtaaacaaaacaaattaa

SEQ ID NO: 16400 - DNA, 240 bp, Escherichia coli
atgcgcagtttcgataaaccggaagtttatcgtttaatgcgtgacgacacttgtacagggctgattattgccgataccgacgcgcatgtttatcaacgactcaatgatattgtctgcggacagccgaagataatgtccgacaatatccatccgttagcggtcggtaattatagtgctgcagacttctttcacaacgctgaattaatcggctgtattaccttaaaccgcagtgccgaataa

SEQ ID NO: 16401 - DNA, 225 bp, Escherichia coli
gtgttcgataaaggcgaaggttgcttcgtttacattatcgacggttacggtaatggtgaaatgggggccggcggaaagccgatttacaagctccttgaaaagtgtgctgatatgaaaatgcatcataaaatgattgctgagaaaaagaaacgtgaacggaaagcaaatcagtggttgcagcagcagattcttgcagaacattgccgtcgctatggtaactgctaa

SEQ ID NO: 16402 - DNA, 207 bp, Escherichia coli
atgaaattcatcgtaaaagcacttatctgttttgctgcgttgtgcgtgactacagcttatgcattcgataataaagaaatttcacgtggtgaaataaaatatagcgattatcttcctggtaatggctggacgttaccggagggttacacgcaagagcggtttattagctctatttataaatcgcataagcttaacgattttccctaa

SEQ ID NO: 16403 - DNA, 2847 bp, Escherichia coli
atgaaacgacatctgaacaccagctacaggctggtatggaatcacattacgggcaccctggtggtggcctccgaactggcccgctcacggggaaaacgcgccggtgtggcggttgcgctgtctcttgctgctgtcacatcagtcccggcactggctgctgacacggttgtacaggcgggagaaaccgtgagcggcggaacactgacaaatcatgacaaccagattgtcttcggtacggccaacggaatgaccatcagtaccgggctggagtatgggccggataacgaggccaataccggcgggcaatgggtacaggatggcggcacagccaataataccaccatcagcagcggcgggctccagtttgtaggtgccgggggaaaggctacagacacaataatcaatgaaggaggtggacaaagtctgaagggactggcactgaacaccacgctgaatggtggcgagcagtggatgcatgaaggtgcgatagccacaggaaccgtcattaatgataagggctggcaggtcgtcaaacccggcgcagtggcaaccgacacggttgtgaataccggcgcggaagggggaccggatgcagaaaatggtgataccgggcagtttgttcgcggagatgccgtacgtaccactatcaatgaaaatggtcgtcagattgtggctgctgaaggaacagcaaataccactgtggtttatgccggcggcgaccagactgtacatggtcacgcactggataccacgctgaatggggggtaccagtatgtgcacaacggcggtacagcgtctgacactgttgttaacagtgacggctggcagattatcaaggaaggtggtctggcggatttcaccaccgttaaccagaaaggcaaactgcaggtgaacgccggtggtacagccacgaatgtcaccctgaagcagggcggcgcactggtcaccagtactgcagcaactgttcttggcagcaaccgtctggggaatttcacggtggaaaacggtaaggctgacggtgttgttctggagtccggtggtcgcctggatgtactggagggccattcatcctggaaaacactggtggatgacggcggtaccctggcagtgtctgccggtggtaaggcaacagatgtcaccatgacatccggtggtgccctgattgcagacagtggtgccactgttgaggggaccaatgccagcggtaagttcagcattgatggtatctccggtcaggccagcgacctgctgctggaaaatggcggcagctttacggttaatgccgggggacaggcctgcaacaccactgtcggacatcgtggaacactgacgctggctgccgggggaagtctgagtggcagaacacagctcagtaaaggcgccagcatggtactgaatggtgatgtggtcagtaccggcgatattgttaacgcaggggagatttactttgataatcagacaacaccggatgccgtactgagccgtgctgttgcaaaaggcaacgccccggtaacgttccataaactgacaaccagtaacctcaccggtcagggtggcaccatcaatatgcgtgttcgccttgatggcagcaatgcctctgaccagctggtgattaatggtggtcaggcaaccggcaaaacctggcttgcgtttacaaatgtcggaaacagtaacctcggggtggcaacctccggacagggtatccgggttgtggatgcacagaatggtgccaccacagaagaaggtgcgtttgccctgagtcgcccgcttcaggccggcgcttttaactacaccctgaaccgtgacagcgatgaagactggtacctgcgcagtgaacatgcttatcgtgctgaagtccccctgtatgcctccatgctgacacaggcaatggactatgaccggattctggcaggctcccgcagtcatcagaccagtgtaagcggtgaaaataacagcgtccgtctcagcattcagggcggtcatctcgggcacgataacaacggtggtattgcccgtggggccacgccggaaagcagcggcagctatggcctcgtccgtctggagggtgacctgctgagaacagaggttgccggtatgtcactgacgacaggagtgtatggtgctgcaggccattcttccgttgatgttaaggatgatgacggctcccgtgccggcacggtccgggatgatgccggcagcctgggcggatacctgaatctgacacacacgtcctccggcctgtgggctgacattgtggcccagggaacccgccacagcatgaaagcgtcatcggacaataacgacttccgcgcccggggctggggctggctgggctcactggaaaccggtctgcccttcagtatcactgacaacctgatgctggagccacaactgcagtacacctggcaggggctctccctggatgacggccaggataacgccggttatgtgaagttcgggcatggcagtgcacaacatgtgcgtgccggcttccgtctgggcagccacaacgatatgagctttggtgaaggcacctcatcccgtgacaccctgcgcgacagtgcaaaacacagtgtgagtgaactgccggtgaactggtgggtacagccttctgttatccgcaccttcagctcccggggggacatgagcatggggacagctgcagccggcagtaacatgacgttctcaccgtcacagaatggtacgtcactggacctgcaggccggactggaagctcgcatccgggaaaatatcaccctgggcgttcaggccggttatgcccacagcgtcagcggcagcagcgctgaaggctataacggccaggccacgctgaatatgactttctga

SEQ ID NO: 16404 - DNA, 1071 bp, Escherichia coli
atgtctgatgtgagtgcagtcgataaaccccgagtgcgggtgttgagccttaatggtggtggggccagaggaatgtttacgatcagtatcctcgcagagattgaaaggatacttgctaggaagcatcctcaccaagacataaaaattggtgactacttcgatcttattactggaacatctataggtggaatactggctctcggcttagcgacaggtaagagtgctcgcgaactagaaagtgtcttttttgataaagcaaaggatatttttccaaccagatggtccttggtcaatttgtgtaaggctctgtgtgctcctatttacaacagttctcctcttcgtgagacaattgaaatgatgataggtgctgaaaccacatttaacgatttgacccggcgagttatgatccctgcagtgaacctgtctacaggaaagccgctgtttttcaagacaccacataaccctgattttacacgcgacggccccctaaaacttattgatgccgcacttgctacttctgcggccccaacatactttgctccgcactattgcaaagatctccgctcgtattttgcagacgggggattagttgcgaacaatcctagttatatcggacttctagaggttttcagggatatgaagtctgattttgatgttagccacaaagatgtgtacatactcaatatcggtaccgtcggagaagattattctcttagcccaagcctgcttagtaaaaaaaggtggactggctattgccatttgtggggaatgggtaaaaggctggtgcttactaccatgacagctaatcaacatcttcataagaatatgcttcttcgagaactagcgctacatgatgcgctcgataattacctctacctagatgaagttatccctaatgaagcagccagcgatatcactctggataatgccagtgatagttctctgcaaaatttaagcgcaagaggaaagcaactcgctaacgttcagtttgctcagaaccaaaagctaaagaactttttcatttcaccggcaaaaccttttaagcgcacagatgtacaggagaaactctaa

SEQ ID NO: 16405 - DNA, 1299 bp, Escherichia coli
atgcattgggatctaaataattactatagtaacaatatggatggcttaatcagcaagctcaaactgagtaagactgagtcaacgaaactaaaagagctacggcagatagttcgtgaacgaactagagatgtgttcaaagaagcccgcgcggtcgctgcagatgttaaaaagcacacgctaactcttgaaggcgttagattgaagcttggacaaactaatgtgcgctacctttcaactgccgatcaggcggaagtcgctcggcttattttcgaaatggatgatgacgctcgtaatgacttcatcaatctacagcccagattctggacgcagggaagctttcagtatgatacgttgaacaagcctttccaaccaggtcaagagatggatattgatgatggtacatacatgccaatgaccgttttcgagtctgaaccacgtattggtcataccttactactccttcttgtagatacttcactgaagtcgttagaagctgaaaacgatggatggagatttgaagaaaagaatacttgcggacgtatcaaaattcctcatgagaaaacacatattgatgtgccgatgtatgcgattcctaaaaatcagttccagactaaacaaacagccgctgattctgcacatatactaaagtcagaatctatatttgagtctgtagctctgaatcgtgatagccgtgaggcatatctcgtcgagtccgataaagtgaatttagcacttcgtgaaggtgccaaaagatggtcaattagcgaccccaaaattgttgaggattggtttaacgatagctgtaagcgaatcggtggacatgttcgttcaatttgtcgatttatgaaggcttggagagatgctcaatgggatgtaggtggaccatcatcaatcagtctgatgaccgcagtggtaaacatccttaatagggaagaacataatgattccgacctcgctgggacgatgaaactcgttgccaagttactgccggatgagtttaatagaggtctggaaagtcctgatgacactgatactaagttactcttccctgccgaatgggatcaaaatgtgcatcaaaagaccattgttgaaacaatgaagaccttgtatgagattttagtcgatgcagagaatgcaaatactagagaagatgctttacacaaaatgaatgaggcatttggaaagcgtgtgactaatgctcagttaataacatcaatcgctgcagctcccgcatttcatgtttctccatctagggagccagagccaagaaaaatcaataaaacaatggtaagtggctaa

SEQ ID NO: 16406 - DNA, 1770 bp, Escherichia coli
atggaagaaggacgacttcacagagtgatgctcagttgcgggtatagctttacatatgcccgcaatctccctgagaaggcaatcctatacagtcaaaattgccagcaggggtactatacgaaagaatatacaacggtagcaggtgacgttaaaattgctcttattattcgagcggatccgttcattgaactgccaatagcttacatcctagaacttcccgagcagttcaaagatcggctcatgccgcacattagccttgaagggttcctgtgctatgtcgaacaaatggaagctgattgggattcaaacaatctggaggatacctatcgagaggttgatgcgcagatacaacgaaccttggttaattcagtgtctgctgcgatggaagggagtaatgacaaaaaagaactagaaggtgaatttactgcttactggcgaccaagcgaatctctttttgttttatcaaacgcaaatcgttccaccagattaaaaacttttatatctcaatcagttagacctaatggctcttcacaagtagagtatataacagttgaagaatcgtcgccggagaattcgggaaaagtcatctccacatggcttaaactgcggtatctccccaaaaattcattaaaagaatatcatatcagcactcactatatttctgtaaatccgagtcgagtagccgggatgaaatggccacctgcatcgtttcgggatttattgagttggcttggaaaagcagatcacaatgccaaaaataaagttgttgaatatattaaaaaggaagggaagaaaagatatgtttttctctttgatgtattaaaacaagatacctttggtatttatgttgagttcgatttaaagtccattgatctcaaaagatataaacattcagctaaaaactcaacggctaaattatccacagtgttgggagggaaaagtgtttgttcgatgtatcaaagattaggagttgttcgtgcagacattgagacgctactgagtcgaaatacacgtcgagaaggttctgcaaaactatcagaaaaaaggatagctctggtcggttgtggaacaatcggagggtatcttgcagagttattactcagaaatggagctggatgtggtaaaggtcacctgcatctttatgatgacgatttgtataaaccgagtaattttggtcgccataccttatctgctcatgattttggacggtacaaatctctttcgcttgcgagaaaacttaaagactcagtacatttaccgacacaaattatcggatttgagaaacaatttagtatcagagcagatttaatgcagaaatatgatattatcatagatgctacgggtcgccctcctgtgtctaagcggatggcttcgatagtgagaacgattgcattagagaaaagaccaaaaatcattcatgcttttaacgatggtaatggacgagcatcaaaagtcttcattgatgacggtcgtagttgttatggatgtatggtttctaatccagaaaaataccgtaacgggattgattctcgtttttgccacattgatatatcaagagaaaagaacaaaaactgtggtagtacttacacaccttatgatgctgcggtaagtaacatcacagcatctttgactcaaatggctgtgttaagtaccctcgatccagaactgaaatggacttactctgaacatatgcttgaaggaggtcgttcactcaaatctcaatttctgccacggcaacctaactgtccaatatgcaatgaatatgaatga

SEQ ID NO: 16407 - DNA, 471 bp, Escherichia coli
atgaatatgaatgaattagtatttatcgatgattttgataatcatgttgttatcatgagcgaagtcgtgatgcgtcttaattcatatcgacaaacgcattacactagtactgagtctggaggaacccttataggagaacgcagagggcagcaccttgtcattactcatatttcagagcccggccaggatgatgtcaggaaccgtactggattagaaagaaagggcattcatcatcaacaaaaagtaaatgatttatttcagcagtcaaatggttttattgtttatctaggtgagtggcatacacatccagaagattttccgcacccctcatttattgatataaaatcgtgggtaatggggattgttgcgaccgaaccaatgatcatgttgattgtaggaagaaaggatatatggattggaaaaaaaatcaaaaacgatattaaaaaactaaagaagaaaatggtatcttag

SEQ ID NO: 16408 - DNA, 219 bp, Escherichia coli
atgcctaattacatcattaacaaaaatgctcagccgaatggtgatcatgaagtacatgacacgaccaacggatgctcttacatgccagccttagagaaccagatctctcttggctatcattcgtcatgtcagagtgctgttctggatgcaaagcgccgctggccaggatacagaattaacggatgttactactgctgtaaccagtgtcatacaagctaa

SEQ ID NO: 16409 - DNA, 993 bp, Escherichia coli
atgaaaataaagaacattctactcaccctttgcacctcacttctgcttaccaacgttgcggctcatgccaaagaagtcaaaataggtatggcgattgatgatctccgtcttgaacgctggcaaaaagatcgagatatttttgtgaaaaaggcagaatctctcggcgcgaaagtatttgtacagtctgcaaatggcaatgaagaaacacaaatgtcgcagattgaaaacatgataaaccggggtgtcgatgttcttgtcattattccgtataacggtcaggtattaagtaacgttgtaaaagaagccaaacaagaaggtattaaagtattagcttacgaccgtatgattaacgatgcggatatcgatttttatatttcttttgataacgaaaaagtcggtgagttgcaggcaaaagccctggtcgatattgtcccgcaaggtaattacttcctgatgggcggctcgccggtagataacaacgccaagctgttccgcgccgggcaaatgaaagtgttaaaaccttacgttgattccggaaaaattaaagtcgttggtgaccaatgggttgatggctggttaccggaaaacgcattaaaaattatggaaaacgcgctaaccgccaataacaacaaaattgatgctgtagttgcctcaaacgatgccaccgcaggtggggcaattcaggcattaagtgcgcaaggtttatcagggaaagtagcaatttccggccaggatgcggatctcgcaggtattaaacgtattgctgccggtacgcaaactatgacggtgtataaacctattacattgttggcaaatactgccgcagaaattgccgttgagttgggcaatggtcaggaaccaaaagcagataccactctgaataatggtctgaaagatgttccctcccgcctgctgacaccgatcgatgtgaataaaaacaacatcaaagaaacggtagttaaagacggattccacaaagagagcgagctgtaa

SEQ ID NO: 16410 - DNA, 570 bp, Escherichia coli
atgatcgtagatgttgaggagaaaacagttaatgatttctttaaaaactacacactctcacctttttctgtaagaaggttttatccgtcatacttgatagtagaatgtgaagatttttccttgttaaggaacttggttgcatgcttgaattgtgatagcaaaaccgtggatgtagttagaaatcaaatatcacttgcatgtcttgctgtcttatcttcagagaaaatagtgcaaagttttttgttcggaagtcttaatagcttaggttgtaaagttaaggctattattcactcggatatctcagcgtcatggagactttgtgatatatcttcaagattatatatgagcgagagtttgttaaaaagaaaattaaaagacgaaggattatcgtttagtaaattaattcttgaagaacgaatgatgatggcgcaaagattattgatctacagtaaccatactgtcggcaaggtggcgggaatatgcgggtatgacaatgcatcatattttgtaagtgtttttagaggatattttggtgtgcctccgcaccaatatttatcaagattttcttag

SEQ ID NO: 16411 - DNA, 1659 bp, Escherichia coli
atgaagccgggcaacctggggtacaccccggtgttcagcggcattgcgaacgggccgtcgagggtgaccctgacacagaacggacgcttgctgtattcagaaatggtgcctgccgggccgttctccatcacggatgtaccgttgtacaccagtggggatgtgaccatgaaggttaccggtgaggacgggcgtgagcagacccaggtctttccgctggcggtgatgaatggtcagctgagtccgggagagcatgagtttaacctggctgcaggtctgccggacgatgacagtgatatggatggtgcggtgtttgcagcgtcatacggttatggtctggagaatctgacactgcgtacggggctggtgtttaaccaggactggaaaggtgccagtgccggtatggtggtggggcttggctggctgggggctgtgtcagttgatggggcatatgcatcagcgaaatatcgcgatggcagccacagcggtaacaaggtgcaactggcctggagcaaacaactggaaaccaccaacacgggtctgcgcctgagctggtcacgacgaagtgaagaatacgaagacatgtcttcctttaatccgtcggaagtgtacagccaggtgaaccaggggcgccgggtgaaggatgagtggagtgccggcatcagtcagccggtcgggaagctgttcagtctgtcactttccggctggcaacggagttattacccggcctctgcaatcagtgctcaccgccagcaaaaggacagcggtaaggagagaggggtgaccggcacgctgagcacgcagattgaaggtgttggcgtgaacctcagctggaccggttcgcggaatgcggaaggtgaaaataactggtcagcatccgcttctgtttcggtgccgttcatgttgcttgaccgtcgttacagcagcagcacttcggtgagcaccggtaaggatagtggcacgggcttcagtacggggctttccggttcgctgaatgaccgcttcagctatggttttggtggtggtcgtgacagtgatggtggtaccagcagttatctgaacgcgtcgtacagcggtgaccgggcttatctgagtggggctctgaaccagtcgtcatccggaggcaccagtggctctgtgtcagcgagtggctctgtactggcagtgccggcggcgaaagacatcatgttcagccgtacgactggtgacactgtggcagtggtgaacgtgaaggatacacccggagtgaaggtgacgtccggtgacggacagacaaacagtgatggcaacctggtggtgccgctgaacagctatgactggaacacggtgacgattgatgcgggcacgctgccgctgagcacagaactgacgaacaccagtcagaaggtggtgccgacggacaaggcggtggtctggatgccatttgatgccctgaaagttaagcgttacctgctgcaggtgaagcagcgtgacggtgagtttgtaccgggtggaacctgggcgcgggacagtaagaacacaccactgggctttgtggccaacaatggtgtgctgatgattaacgcggtggatgcgccgggtgatatcaccctggggcagtgccggatacctgcggcgaaactgcaggatactgagaaactacaggagattacgtgtgagtaa

SEQ ID NO: 16412 - DNA, 330 bp, Escherichia coli
atggtccgaggccatgatgatacgcagtgtctgctgaccattcggcttcaccttgaagaaggacggcgtcaccacaaaggtcggacgggtgtccttctccacgatattgtccacccaggcctgaccaccaaaggtacgctccttgtcattgttggtgaccgtgatggtcagcgcatccttgtccccgcgaaagatatagcgggtctggtctgccgccagggaagccatcgcactctgacaggtcatcatcagcgccagagtcattcccagtgcttttgtcacccggttagtgaaaaacgtcgttactgcgttacgcttactcacacgtaa

SEQ ID NO: 16413 - DNA, 492 bp, Escherichia coli
atgaagaaaacaatgatggcagccaccctggtcctgagtgctctcagtattcagtcagcactggccgctgaatacagcgagaaaacgcagtatctgggggtggtgaacggtcaggtgtcaggtaacagtgtggtgaaggtaacccgcacaccgacagacccggtgctgtaccgctcaggcagtaacagcccgttacctgcagagctgataatccggcatgcagaaagccgcccggcttccggcggactggcaaacatcacggtgaaacaggctctgccggacaacagggaagcctgcatcaccctgaagacagccctgatggttgacggaaagaaagtgactctcagcgccagacagcagggtgaggatgtggtgataaccgtccctgaggcacagaagctggttgagttaagaacggatgcaccggcagagctggaagtcccggtcagttaccggggaaatctgcagatagcgctgcaggtggaggactga

SEQ ID NO: 16414 - DNA, 780 bp, Escherichia coli
atgaaaaagactctgattgcactggctgtggctgcctctgctgcagtatccggttctgcgatggcgtggactgcaaacggcactggtggttctgttgaactgggcggtaccctgaatccggtagaaaaagttaccccgtgggaagttaaagttggtgatgatgtaactggtctggatgcgcaaattaagaaaggccagaaagaagttagtatttttgcaccacaagatatttctatcttaggtatccgctctaaaactaatactttcggtgcacaacaaggaatttctccacaaattgattatgcaggccatgtggatttacgttcaggttcttgggagaatatgaatttaaacttagatgtactcgatcaggctacatctacgaaaattggttctttattcgtcgaaaactttaaggctgcaggcggtgtatctatgacgggtaccaatgctgatggtgtttattcagtcaaagcacctaatgccgggaacgcattccatggtggtattcgctcgggcgacaaagcaggaaatgccgagagtgttatggcgttctttaatggtgaagtttcggcaaacttttctgagcaggggatggatcgcacattcaacagaattaagaactttagttttaatgactttgatactgctgtttatagtgcattttatggttccggcatcaaaaaaggcgaaaaaatcaggatcactcttgacaaccctgcaggcaccgatgaaatcgtttggaaggcatctctgccggttactgttacctacatgtaa

SEQ ID NO: 16415 - DNA, 795 bp, Escherichia coli
atgaaaaagacactgattgcactggctgtggctgcatctgcagttgtatccggctctgccatggctgctggctgggaacaaaacggcactggtggttctgttaacatgggcggtagcctgactccagtagaaaaagttactccatgggaagtaaagactggtgcagcagtaactggtctggatgcgcagattcagaaaggccagaaagtagttgatgttgctgtaaacaaggcaattccggttctgggtattcgtgttgttgattctgctgggtttgaaggagctgcaggcattactccgcagattgactatcagggagctgtggatattgatggtttcgaagatggtgttaccaatgtgtatatggaagtacgtaatacacagggggagaagattggatcgctgctagctcccttctatgctggtgctgaacgctcttattacgctatcgatggatcagctaaagggcatcgtggattacatgcgaatgaagcgggaatggccttttatggcggtatcgataagaatagtgcgcacaatatgacagagggagctgttcgttcgcgtatttctgcaatagattccgaatttactgcaaagtacaatacgtatgattcagctttttcttcggcttctatggcaactgactttaacaggcctggttatatttttaacgctttctatggctctggcatcgaacaaggaaaaaccatcaagatcactcttgaccagcctgcaggtgcggatgctatcaagtggaaagcttctctgccagttactgtttcttaccagtaa

SEQ ID NO: 16416 - DNA, 798 bp, Escherichia coli
atgaaaataacgcatcattataaatcccttctttcagccattatttcggtggccctgttttattcggcagcgccacatgcagatattcttgatggcggcgaaattcagtttaatggttttgtcactgacgaagctcctaaatggacctggcagataagttcccccgaccagacctgggcagtggatactgctgacgcacgtacagagaacgggcaactggtttttaatttgcgtgataaaggggctctgccgtttctggagggacatctgcatgaagtggctgagcgtggtggccccggattcaccccctttattaccttcagcagtaacggacagccttttactgtgacggaaggaaatgttacctcagcacagcacattcgcgcctctgtcccggtgcgtgacccggagacggggaacgtgtcggggcagctttctttcaccctgaatcaggggatggcggtcagtgccggcagacaggaagacggggtatccgtgccgaccgggatgtcgctggtcagtggtcagagtgtgaccgatgtgcagtcagaaacattgcctcagtggctaaaaacccgcctttccacactacttctgatgaaccagggttttggcaatggcatgagtgccacagacaatggtcaggttatcagtcagggtattctggcggatggacgggtgatgaatcttgcagcgtcatatgcctcagcggtatcggattttgaactgcggttgccggcagagggcacaccggctcgctggcaggcggggctgaacgtaacggtcacggtgcagtaa

SEQ ID NO: 16417 - DNA, 765 bp, Escherichia coli
atgaagaaaacaaccctgttgctgctggtcgccagtttatttccggtggctgttctggcctggaacaccccgggagacgatttcagtggagagcttaagctggaaggaccggtggtcagcacccgtaatccgtgggtgtggaaagtgggggcaggctcccgttacctggatgccgtttattccggaacatcatccggtggggagagggtgatatctgtacctgtgcctgccctgcctgtgttgctgggcaaaacggcctttaccacatctgcggggcatgaaggactgtccccgcgggtgacttacggaaagggcgctgaggcgttctccctggtatggacagagaagggaattgcagaagtgacgctgccggtgaccggcgataaaaacggttgtgcaggcacattcactttcaggatgcaggctgcgggcgtgctgcgtcacgaacagaacggacaggcagtgtataagggagtccgtgatgacctgcaggcaaacgggctgccgggtgaagccatggcgatgaatgcagaacaggtgccgggggtgctgcaggcaatgttcagtggagaggggccctcctggctgcagacaatgacgctcagcggttatacgggggtgagtcatttcagtgatgcggcactacgccggattgaaggtgtctatggtgcgcagataatggcggggtacggggaattgcgtctgagtggtgatgtccctgaacgctggcaggcatccctgccggtaagtattgagtaccagtaa

SEQ ID NO: 16418 - DNA, 774 bp, Escherichia coli
gtgctgaatattattcatcgtctgaagtccggtatgtttccggcgctgttttttctgacttcagccagtgtgctggcgcaacccctgattattccgccgggccactggcaggagggaatggctgtgggcgtgacggagttcagcggcacgctgtatgtccgcgatgtgtcctggcagtggcagccccgttctgtgcggatggggacaccagacgccgtgcaggccggtctgacaacgggtaaaggtggcatggtcagtgaaagccggagagggcaggatttttatattcttggcggacataccacatcactgacaactgcccgtccggggctgcagccgtcagtgacattgcttcaggtgacaccgtcatccccgcgtattgcggcccggggagaactcgcccggggacaggtgcgttacggggaaatcacgttcacgatgcgccatcttctggcatggcaggacaatattactggtggtcagggctggagcgtggtcagcggagaggtgacgccggaggctgaaaaacaggtgaaacgccagttatggcaggtgaacggctatgaatggactccggactatgccgggttaaccgcgcgtcctgatgcgtttatttcgggcgctgagtcgctgttgtcacaggagaatggcagccagcatattgccggtgcctgggtgacatccctgagtgatgtgcgggtgaatttccccggtgctgaagagccggtaaaacgctggcaggggaatctgacgccggtggtggtgtatttctga

SEQ ID NO: 16419 - DNA, 123 bp, Escherichia coli
atggccaagcaacgaaaagtgttgataccgatgtggtgtgtggtgggggtctgtgtggccgcaaccggtatggcatgtctggtgttcacactggtgatgttctgtacggtactgatgtggtga

SEQ ID NO: 16420 - DNA, 642 bp, Escherichia coli
atgtctggtgttcacactggtgatgttctgtacggtactgatgtggtgaaggtcgtaagtgtgagacaaaaaatccttctgaccggaacctgctggtatgagctgacagggctgtggcacctgttgtccgcacagggccacaacgtttaccgtgtacctccggggtatccctgtgtccgggagggctgggacctgattattgtggcgctgagtgcagagcctgttacgggctgggggcgtcatctgtcctggatacgtgaactgagggcagaaatgcccggtgaaatgctggttctggtaccggaaaggctggaaatgctgaaggtgttgcgaaatatctgcccggtgtacagcggatgcatgtcgctgacgtgcctggaaagaacggtccgcatggcactgaacagaaagacagcccgtaccggtaaattccgcctgacatccggacaacgacaggcactgaaacgcctttctgagagaggaagagaccgtcccctgaatctgaaacagagtgaacgggggctgtactggcattatgcccggctggcagagaatgtgggcgtcagggatttcaggatgctgttgatgaccgggctggaccgggaggttcataaaatggaagaccgacagtatggacagtaa

SEQ ID NO: 16421 - DNA, 771 bp, Escherichia coli
atggacagtaattttgtatccgcagacagactgatgcgtgcgctcattaacggggagtttgaaccgtatctccagccggtggtttctgcatccgaccttactgtgtccggtgcagagcttctggttcgctggcatatgccgacgggagaaatccttccgccggcatatttcattaaccgggtggagtctgccggtctgttgttgcctgtgacggaaaaaatcctgaaccgtgcggtggcagggctttcggaggttaaagccatgctgccgcgaggtttccggcttgccgtgaacgtgacgccggccctgctggctgagcgtgagttcactcagatgtgtctggcgctggcagggcatgacagcatacatctggttctggagctgacggagcagcagccgtttaacatggacagacagaccgaagagaaactgagccgtctgagtgatgccggagtgacatttgcgctggatgatttcggaaccggatgttccgtactgtcgtacctgaagcactttccggtcagttatataaaaatggacaggagcttcacacaggacattctgagtgaaaagacatcccggcatatcgtggaaagtgttgtcgggctggcaggaaagctgggtattgatacggtggcagaaggtgtggaaacacaggcgcaggtgaactgtctgtgctctctgggagtggattatctgcaggggttttatttcggcaggccggaaaagatggatatattttgttgtggaaataatgtaaagctactctga

SEQ ID NO: 16422 - DNA, 849 bp, Escherichia coli
atgaaccagagttactactttcagtttaatgtttatgaaatattatggttttttatgaaaaagacgctgatcgtactggctgtaactgcttctgttatgacatccgggtctgcaatggcgtggactccgaacggtagtggtggttctgttgaacttggaggtaccctgactccggcggagaaagttaccctatgggaggtgaaaacgggggatacagtaaccaatctggatgctcaaattcagaaaggtcagcagaatgtagatatcgttgttaagaaagccattcctgtactgggtatccgtaatgcggatgaaaacggttttgcaggtattgcaagcggtaatattattcctcaaattacttatgagaataatgctgttgatgtaaattcattttcaaatggtatcacaacactgactctggacgttcataatgaatccggagataaaattggtatcatgacaacattgtttagtgccgctgcttattcgtcctgggatgatggtaataacacagggtccgttcagcttatgtcatctgcgacaggagcctattttggcggactgggaaaaacaacaaacgctgttcgttcaagcgtggagtctgcctacaatttaatcaagtcccttgatgatgaatacacagccaaaacacctcttggaaagatattggctggaaatatctctgataatgagtatttcgtggatgaagctgatatgttcaaatcagcttatggtgcaggtattgaggcaggtaagactatcagtattgctcttgatactccggcagaaggaaactcttctgttaagtggaaggcatctctcccgattactgtaacctatcagtaa

SEQ ID NO: 16423 - DNA, 243 bp, Escherichia coli
atgtttattcattttatcagtcggcaggggcgaaaccttctggtgaatataaaagatatcagttttgttcttcagaaaggtattttttgtgaacttcatatcaggggaattgaaggtcatgtgatggtggaagatgacttcagtgaggtttacagaaaaataaaagaaatttcaccacaagcgaataatacaggtgaaggtgtctcagaggggaggggatgtgcgtcagaatgctgtgattga

SEQ ID NO: 16424 - DNA, 885 bp, Escherichia coli
gtgcgtcagaatgctgtgattgacattttacttattattgtcttttctctttctttattaatttgcggaaaagtttctgctgataccggatggcagtccggcggagattttcagggagtcgtggaattcgggggcaccatcacaccttatgatgattcacttccgccctggttgtggaaaaccggcggatataccgggttcagcaacaaaatcagtgagctgaccgataacggaacccgcctgacggtcagcgcaccccatgaccttctgctgcttgcaggtaaatctgaacgagcttttgagggcagtgagacatccggtgctggtattgttcctgttattcagctgaatggaagtgacggaagcgaaatccacattcagtgggccagtggcacgccgggacaggggctgcttgttctgccactgagcgtcaccggggacactcagacagcaggcacactggcagcagaagttcaggctttcggggcgcttgcgtgggcagaagatgatggctttggtgccagaatcacccagacactggggaataacagtgctgatgcttatgtttttaatggcggcgtacccgacagcagtacgtggcgcaccgccgacgggctgaacttcatttcccggatgacggaaggcgaagtgtccgcagaaagtatctggacacagctgaaacagggagttccgggagtgtctgactcaccggtgattactgatgaaagcggttatcaggacctggtgggtgaaggctggttttattccggggcatatgcactcgggatttcttccggtgcagttcttaatcttcatttcagtaaaccggtgacaggacagtcagtctggcgggcagggatgacggtgattatccgttatgcctga

SEQ ID NO: 16425 - DNA, 3852 bp, Escherichia coli
atgaacagaatttattctcttcgctacagcgctgtggccaggggctttattgccgtatctgagtttgccaggaaatgcacctgccgggttaccgggaaaaaacatctgaaagccgctgcactgttattatcgccactgctgctttccggtccggcaggtgcctccatagtaagtgcagaaattgattatcagatatttcgtgattttgctgaaaataaaggcgcgttccgtccgggggccacagatattgccatttataataaacggggagagcttgtcggtacactgaataaagccgccatgccggatttcagttccgttaacgtgaagtctaatcccggcgtggcaacgctgattaatccccagtatgtcgccagcgtgaaacataacgggggatataaaaacgtcagctttggtgacggggagaaccgttacaatattgtcgatcgtaatgagcatggctctcaggattttcatgcgccaaggcttgataagctggttaccgaagttatacctgcgtctgttactgaagaagggcaaaaaacaaatgcctacgctaatacagagcgttacactgcgttttatcgggcaggaagtggtacgcaatatatcaaagataaaagtgggaatgtaactcaaatatcaggcgcctacagttatctgacaggggtgactgtcggggcgccatcttcatctgaccatattattgcaagtagtcccggaaatgtttttaacccgattaatggtcctttgtccagttacggggcaccaggagacagtggatctcctttatttgcctatgattcatggcagaaaaaatgggtgatggtgggggtgctgtcaacctggaccggagagcatggtgtaaacaaccggtgggctgttattccactggattttatcgggcagaaatttaatgaagacaatgatgccccggtcacgttcagaacatcggaaggtggtgcgctggagtggagctttaacagcagcaccggagctggtgcgctgacacagggaaccacgacatatgccatgcacgggcagcagggaaatgacctgaatgccggtaagaatctggaatttctgggacagaatggacagattgatctgaaggattcggtttcgcagggggcgggttccctgacgttccgtgataattacacagtaacaacctctaacggaagtacctggaccggtgccggtattattgtggacaaaggcatgtccgtaaactggcaggttaacggtgttaagggcgataacctgcataagattggtgaaggtacgctgacggtacagggtacaggtattaatgaaggcggactgaaggtcggggacggaaaggttgtactgaaccagcaggcggacaataaaggacaggtgcaggcgttcagcagtgtcaatatcgccagcggccggccgaccgtggtgctgactgatgagcggcaggtaaatccggataccgtctcatggggatatcgtgggggcacactggatgttaatggtaacagtctgacgtttcatcagttgaaggcggcagattatggtgccgtgctggcgaataacgctgataaacgggccactatcacgctggattatgccctgcgggctgacaaagtagcactgaatggctggtcggaatcacgtaaaggaactgccggaaatttatataaatacaataacccgtacacaaatacgacggattacttcatcctgaagcagagcacctatggttatttccccacggaccagagcagcaacgccacctgggagtttgtggggcacagtcagggggatgcccagaaactggtagctgaccgtttcaatgctgcagggtatctgttccacggacaactgaaaggcaatctgaatgtggataatcgcctgccggaaggcgttaccggtgctctggtgatggacggctctgcggatatctccggtacattcacccaggaaaacgggcgtctgacgctgcaggggcatccggttatccatgcatacaatactcagtctgtggctgacaaactggctgccagtggagaccattcggttctgactcagcccacgtcattcagtcaggaggactgggagaaccgcagttttacctttgacagactgtcactgaagaacaccgattttggccttggtcgtaatgccatgctgaacaccacgcttgaagcaacagattcgacggtcacactgggcgacagccgggtctttattgacaaaaacgacggtaacggtacggcctttacgctggaagaaggcacatcagaagcggtgaaggatgcagaccgtagcgtgtttaatggcagtgctgtcctgaacgggaagacgacgctggatatcatgaacgcaacctttaatggtgatatcagcggtcatgccggctcgcatgtggagttgtcgcgccggagtcactggaatatgacgaaaagctccacgctggattcgttcagaagcaaaggcgggacgctctcctttgtgacagacaactggtcgccgaaaacgctgacggtaaacacactgcatgccagcagtatgaatatcgccatgggggtcagcactgccgacaacacgggcgaccggattgatatcctgaataaggcaacgggcggacataacacactggacctgtcctccctgtttgaccagactgtcacactgaaaaatgacctgactctggcatctgcaccggtcggaacttctcacgggtatttctcctttgccagcctgaacagggggtttactgtttatacccctgacacacaggtgcaggagaaagacggcagagtttactggcaactgaaaaataacgctggtctggcggactcacaggcacaaccggtatcggaaaatgaaatccggaaggttgcggcggatggtgatagtggtaacaaccgcgcggatgaatctggttccgctgtttccggaaagagctcagaggttaccgtgaaaggcagctccctgtttaaaggggcagataacacatctcttctgaagaaagcgcgtgccatgtttgccgcccgtgagttcattctcagcgacagtgctgaccgctggacacaggtggtggacaacagtgatgcagacggcggtgcatgggccatgacagggtacagtcatggtggatatgacgacttcagcctcaatcagagcggactgaatgtgggatcccgccagtctgctgccggtaatgcctggtgggggatgggggcagagttttaccgggggcacagcagcacagatgaccaccgggatgatttcagcctgtggggcgtgcatgttctggcgggcaaatcctttgccggtggcctgtttgtggatggtatgaccggataccgggagctgtctgaagattacactattcagggagagctgagtgacctgtccggcagggcaaaaagccatatcctgacagcgggtatccgtggtgggtggaagatgcatgcagctccccttgatatatcgataacaccgactgtttcactgaacggtgcccgggtggacggaaatcgtctgcagggcagggagcggagcgtggagcttcatgatggcgacgccctgtggctgaaggccggggttgaggcagaaaaagtctccggaaatatgacgctgaaggcaggtatctggcggaatatcacgctgaacgatatgccgggaatgaccctgcgtgatgactggaaagcccgtcactatgatgcagagaaggctgaccgctataccgtttcgtttggtatcaacggaaagctgactgagaaactgtcagtgcaggcaaaagtaaacagcagttttgatggttactttaagacagatgcggaaggaatactgggtatccggtatgacttctga

SEQ ID NO: 16426 - DNA, 474 bp, Escherichia coli
atgaaaaagatgagttcagtaataattctttgcatgtctgtttttatcctgcagggatgtagtgatgctaaacatctgaagaaaacaccagtaataaataccaataccaataccaataccaataccaataccaataccaataccaataccaataccaataccaataccaataccaatgctgatattgatattcagggtgtggattcagaacagtatcagtatctgaaacaatgtgtaaaaaatgcaagcgcactggctaatcttaatgagagatataaaaaaacgctgaaagagatgcattttctcattaatgaggcaaaatcttacgctgcaagtaacgtatccgggaatgtacagaagacaattacaccgttatttgaatataaaataaactacaaatgtaacgatattgaacagcttcttattgaagaatacaacaggaaaatccaggccactccggttaaggcgcaatga

SEQ ID NO: 16427 - DNA, 279 bp, Escherichia coli
atgttaagtaaccttcccggattgctgaatgtggcgttatgcacggttatcgtgctgacgctctttttttatcgtcgccgtgattccagacataaaccgctgatgtcatggttggcctggctgctgatgctgctgtatgcctttgcgcccctcagctatctgtgcggtcgcccgttagcggcgaactggctggcggtggggcttaatctgctgttctgcgtgttggtgattcgcgcacgcgggaacgtttcaaaaatctttgtattacgaaggcgctga

SEQ ID NO: 16428 - DNA, 546 bp, Escherichia coli
atgaagtcgaaagatgaaatttttgacgaagttctgggaaaagagggcggttacgtcaatcacccggatgataaaggcggaccgacaaaatggggtattactgaaaaagttgcccgtgcgcacggataccagggcgatatgcgtgatctgacgcgcggacaggcgctggaaatactcgaggcggactactggtatggaccacgttttgaccaggtggcagcgttatcccctgatattgccgcagagttgtgtgatacgggcgtgaacatggggccaaccgtggcgtcaaaaatgcttcaacgctggcttaacgttttcaacctgcgcgggaaactgtatccggatatggatgctgatggacgcatcgggccgcgtactcttaatgcgctacgggcatatctgaaaaatcgtggcagggatggcgaactggtcttactaaccgcgctgaactgtacgcagggtgaccgttatctggagctggcagagaaacgcgaggccaacgagtcgtttgtctatggctggatgaaagaacgcgtgggagtgtag

SEQ ID NO: 16429 - DNA, 147 bp, Escherichia coli
atgaaaaacggccttgaattgaaagcgcctgtaactgatgacatcagcagagcagtggcttttgccattaagtgggtggctgtcggtatcgctgtgtctccgattctgtatgggatggcaaaattgatcattgctgtgaaatcgtaa

SEQ ID NO: 16430 - DNA, 183 bp, Escherichia coli
atgagccgaaaacactggacacacagagtgccgcgaacgacggcgaaatgggctctggtagcgatactggtgccttttttcctggtgggatgcgtcagcctggataaggcgcgccagcttttcgatacggcttctcaggtctgccagcttatcgatggcgttcggcagtgtctgcagaactga

SEQ ID NO: 16431 - DNA, 297 bp, Escherichia coli
atggaaaaaacagaaaacaaacagattgtaattggtgctgatgctgctccgtttaagtttgagttgtctcaactggtggagatgcgcatcagtgatgaatggggtgaggttaaagcccgcgcgcagtatgcggatggcgaaaaccagtacttgatccactacaaagcagctgatggtcgcgccacgacggagtggtttggtgagtcaatgctggaagcaacagaagatgatcgtcatcctggttgtccggtatttgctggtatggaattaccggaaggtgcggtagttactgagtaa

SEQ ID NO: 16432 - DNA, 774 bp, Escherichia coli
atgaaaaaaacactgattgcgctggcagtggcagcttctgctgtggtatccggttctgcgatggcatggactgcaaacggtacgggtaattctgttgagctgggcggtacgctgactccggttgagaaaatcactccgtgggaagttaaaacaggtgctgcggtaacagggcttgatgctggtgttacacaaggtcagagtattgttaatatcgctctgggagcagatgtacctttgcttggtatccgtaacaacagcagcaatggtttcctggggcaaagtggtattgacccgcaaattagttatgggggtaaagttgatattgattccatgaaaaatggtgctgctaatctcgctcttgatgttacttctgctggtcagaagattggcactctgtcggctgaaatgtgggtagcttctcaggcaaacaatggtcgcgatttcaacgttatgttatatgcgccaaaagcaggagatggcttcttcggtggggttgcaaaaggtgaagcgggagcctggaataatagtaatgcatacgcttgggcaagaactatcttccctggtattgctgaaacgtggagtgataacggtaccgtttacaatggaaagacgggaatctttaatttcgattctggtgaccatacctatcatgcgtattatgcttccggcattgataagagcagaactatcaccatcactcttgatcaaggtgtagcaggagatactcagattcagtggaatgcatccctgccggtgactgtttcttacatgtaa

SEQ ID NO: 16433 - DNA, 1917 bp, Escherichia coli
atgatttcagacgcacagaaggcagctaatgcagccggtgcgatagctacagggcttttatctctcaatattccggttccactgacgacggttcagtgggctgatcaacattattatctgccgaaagaatcttcatacactcccgggcaatgggaaaccctgccgtttcaggttgccattatgaacagcatgggaaatgaccggatccgcaccgttaatctgattaaatcggcgcgcgttggttacaccaaaatgctgttgggggtggaggcttattttattgagcataaatcccgtaacagtctgctttttcagccaacagattctgcggcagaagatttcatgaaatctcatgttgagccaacgatcagggatgtccctgcattgctggagctggctccatggttcggaagaaaacatcgcgataatacactcaccctgaagcgtttttcctccggtgtggggttctggtgcctgggcggtgccgcagctaaaaactaccgtgaaaaatctgtggatgtggtctgctatgacgaactctcctcgtttgaaccggatgtggaaaaagaaggttcgccgacgctgcttggtgataaacgtatcgaaggttcggtatggcctaaatccatacgcggctcaacgccaaaaatcaaaggttcctgtcagattgagaaagccgcgaatgaatctgcgcatttcatgcggttttatgtcccttgccctcattgcggggaggcccagtatctgaagtttggcgatgatgcgacgccgtttggcctgaaatgggagaagggtaaaccggaaacggtgtattacctgtgtgaacataatggctgtgtgatccggcagtcggaacttgaccagaccgacggacgctggatttgtgacaataccgggatgtggacgcgtgatggcctgacattttacagcgccggtgatgaggagatgccgccaccgcgctcaatctcgtaccacatctggacggcgtacagtccgttcaccacctgggtgcagattgtctacgactggctggatgcgctgaaggatccgaacggcgtcaagacgtttattaacaccacgctcggggagccctatgaagaggctgtggcagaaaagctgagttttgagttgttactggaaaaggtctgccactatggcgcgcaggttcccctgcgggtggtttacctgaccgcagggatcgactcccagaaagatcgctatgaaatttatgtctggggctgggctcccggcgaagaagcctttctgattgataagcaaattatcatggggcgaccggaagacgaggacacccttaaacgtgttgatacggtgatccggaaaaaatatcgtcatgctgacggtactgaaatttccatttcccgtgtctgctgggataccggtggtatcgaccaggacattgtgtatcagcgttcaaggaaacacggcactttttttgtgcttcccataaaaggggcatcggtgtacggcaagccggtgatcaccatgcccaaaaagcgcaaccagcgtggtgtgtttttatgtgaggtgggctccgataccgtcaaggaaatgctgtacgcccgttttgccctgccagtggtctctgccagtgaagccgccccgtataccttccgttttccggataaccccgacattttttcggaagaagaggcgcgtcagatcgtggcggaagagctggtggagaaggtggttaatggcagggtgaaactgctgtgggataaaaaagggcgacgcaacgaagccctcgactgcctggtatatgcctatgctgccctgcgtatttcagttcagcggtggcagctggatcttgaagcactggcccgtgccagaagagatgagcaggacgacgatgagatgagtctggaagaaatcgcggctgcactgagtggaggataa

SEQ ID NO: 16434 - DNA, 210 bp, Escherichia coli
atggtttatacgcatgaaatgctttgtgatgcccgacgggcattacatgaactgatgatcggacgtgctgtggtttccgtcagcaaggacgggcgtcaggttcagtattcgcgggcgacgattggtgaactgcgtcagtatattgaagagctggaaagtgcgctgggtgtatccggacggcgtcgcggcccggcaggagtggggctgtga

SEQ ID NO: 16435 - DNA, 1572 bp, Escherichia coli
gtgaacggggaactggtggatcttcacgggcagccactgcggcagagtatggggtattccggagggggtaccggatttggcgggcagcttgcggaatggctgcctgcaccggaaagtgccgacgtggcgctcttaccttccattcagctgggtaacgcccgtgcggatgatctggtccgcaataacggtattgccgcaaacgccgttgaaattcataaagaccatatcgtcggacacatgtttcgtctgagttaccggcccaactggcgctggctggggatgtcggaagccgattcacatgtctttattgaagatgttgaggcagcgtggatggaattctgcgatccggtgtttggttcgatggatgtggaggggcgtcgctcgtttaccgaatttattcgtgaaggggtgggcgttcatacatttaacggtgaaatttttgtccagcccgtatgggatacggaatccacgtcattattccggacgaaattcaagaccatcagcccgaaacgtgtcagtacacccggttatggtaccggcgatcgttttatgcgtgccggggtggaaatcaaccggtacggaaaagcactggcctaccatgttcaggaagatgactggcccggttacggtgtcagcaactggacgcggattgcggcgacgctgccctccgggcgaccgggaatgatccatgtgtttcagccgcaggaggacgggcagacgcgcggggccaaccagttttattctgtcatggagcgtctcaagatgctcgacacactgcaggccacgcaactgcagtcggcggtggtgcgggcgatgtatgccgcgacgattgaatccacgctggattcggaaaaagcatttgaatatatcgccggggtgggagatggcggtaaaaatcccctgaacaccatcatgaaaggctacgcgcgttattacgccaccaatacggtaaagctgggtggggtccgtattccgcatctttatccgggggattcactgaatctgcagacagcgcagaatgcagataatggtttctctgaactggaaaaggcgctgttacgttacatcgctgccggactgggggtgtcctatgaacagctttcccgtgattattcacaggtcagttattccagtgccagggcatccgccaatgagtcgtggcggtattttatgggcaaacgaaaatttgtggccagtcgactggcatcacagatgtttgcctgctggctggaggaagcccttattcgcggtgtgatccgcccgccgaaatcccgtttttcattctgggaggcccgttccggatggtgtcgtgccgagtggattggtgccggtcgcatggcgattgatggccttaaggaagtgcaggaagcggtgatgcgtattgaaggtggtttaagcacgtacgagaaagagctggccctgatgggcgatgactatcaggagattttccgtcagcaactgcgtgaaagccaggagcgacaggcagcgggtcttccccgccccatctggataaaggacacgtttcagcagcagatccgacagacaacgggagaaaaaggcgatgcgtcgtaa

SEQ ID NO: 16436 - DNA, 1479 bp, Escherichia coli
atgcgtcgtaatttatcgcatattgccgccatggcatttaatgagccgcttttactggaacccgcctatgcgcgggttttcttttgcgcgctgggtaaagagataggggccggcagccttgccgttcctcagcaggctgttcagcttgatgctgatggtatgcaactggcggtgactgactatatggcgggcggtcagcgtccggcaaagagttaccaggtgaagaatggcattgccattctgccggtgagcggcacgctggtgcataaactgggtaccctgcggccttactccggcatgacaggctatgacggtctgactgctcgtcttcagatggcggtgaatgatccggatgtgcgcggcattttgctggatatcgacagcccgggcggtcaggctgccggggcgtttgactgtgctgacatgatttaccgtctgcgggaacagaagcccgtgtgggcgctgtgtaatgacatggcctgttcagccgccatgttgctggcggcagcctgtacccgtcggctggtcacgcagacggcaaaaattggttcgattggcgtgatgatggcgcacaccagttatgagaaacaactggcacaggaaggggtggacatcacgctgatttactccgggcagcacaaggttgacggcaacagtattcaggcattgccggcaggtgtgcgtgcagattttcagcgccgtattgatgaggcccgccggatgtttgtcgacaaggtggcgctttatacggggctgagttcagaggcagtgatgaataccgaggctgccgtttatgacggtcaggcaggcattgatgcaggcctggctgatcaactgattaatgctgcagatgccgttgaagtgatggtttctgcactgaatgactctgttacgaaggagaatgcaatgactgttaaaaatctcaccgttgctgaagcggtggcccaggaaaatcagcgcgtgatggggatcctgaattgtcaggaggcgaaagggcgcgagcaactggcgcaaatgctggcaggtcagcctggaatgacggtagagcaggcgaaagcgttcctggctgctgcgccggttgccgatactgacagcacgggtgatcagattatggcgctgccggaagcaaaggggcgtgaacaactggcacagatgctggcaggtcaaccggggatgacggtggcgcaggcgaaagcgtttctcgcggcagcccctgctgccggtgctgcaggcgcaggcgatcagattatggcgttaccggaagcaaaagggcgtgaacaactcgcgcaggcactgacagaacagccaggaatgacggtggcgcaggcgaaaacgctgctggcagccgcgccggcggcatcgcaaccgtcacaggaaacactttttgatcgctttatggcacagcatgctgccagtgcggtttccggtggcggaactgccgggcgcggggaggaagacctgctgatgagtatgccgtaa

SEQ ID NO: 16437 - DNA, 336 bp, Escherichia coli
atgattaaaaccaccacggaaaagcgcgcggatgtgcacatttttgccggaaacgatccggcgcataccgcaaaagccaccagtggtatcagtgccgccatgcctgcactgacgccactgatgctggatgatgccaccggtaaactggtggcatgggatggtcagaaagccggaacggcagtgggggtgctggctctggcgcttaccggaacagaacccacgctgacgtactacaaaagcggtacgtttgccactgagtcgctggtctggcctgactctgtggatgcggtgaaaaaagccaacgcatttgtgggaagtgccatcagccacgcctga

SEQ ID NO: 16438 - DNA, 1029 bp, Escherichia coli
atggggttatttaccacgcgtcagttactcgggtacaccgagcagaaagtgaagtttcgtgcgctgtttctggagctgttctttcgtcgcacgatcactttccatactcaggaagtcatgctggataaaattaccggcaaaacaccggttgcggcgtatgtgtctccggtggtgtcaggcaaagtgctgcgcagccgtggtggtgaaacccgtgtgttacgtcccggttatgtaaaaccaaaacaccgctttgattatcagcaggcagtggaacgtcttccgggagaagatccggcccgccttaatgacccggcttaccgccgtctgcgtattctgacggacaacctgaaacaggaagagcaggcgattgtgcaggtggaagaaatgcaggcggtcagtgccgttctgcagggtaaatacaccatgagcggcgagcagtttgagacggtggaagtggattttgggcgttctgtcgccaataacattacgcaggctggcggacgcgaatggtcacagcagaatgctgacaccttcgatccgacgcatgatctggatgcgtactgcgatttcgcttccggcaccatcaatatcgcgattatggacggcacggtctggcgtatgctgaacggttttaaactgttccgtgaaaaactggatacccgccgtggctccaaatctgagctggaaacggcactgaaagatctgggctccgtggtttcctttaaaggccattacggcgatctggccattgtggtggcgaagacaacgtatgttgacgaaaacggggatgaacagcgttatctgccggaaggtacactgattctggggaacactcaggcggaaggcgtccgttgttatggtgccattcaggataatcaggcactgagtgaagggatcacctctgcgattcgttatccgaaacactgggaggaagtgggggatcctggttgcgaatataccatgacgcagtctgcgccgttgatggtgctgccggatccggatgcgtttgtggtggttcaggtgaaataa

SEQ ID NO: 16439 - DNA, 366 bp, Escherichia coli
atgacaaaagagcagatgactgaacgtttgcaggaactggcagtgattctggggcgtgaagcagatatttcaggttcaaaagccgatcttgagcagcgcctggcggaatgggaagaggaggccaccggattcgatggggaggagacagggaaggaagaggtgggcaacgatgcatccggcgacggaatgcattctgagcggggactcgcccgggtgcgtatgctgaaaacggcgcatatgccagcctgtgatgctgtgacgggaaaaatgttgatgtttgcccgggcctccagtgttgtgctggttaatgaagccgcagttcctgcgttgctggcggacggtctggcagaaaaaatccgggagtga

SEQ ID NO: 16440 - DNA, 402 bp, Escherichia coli
atgttcgataatctgttcgatcaggccatgagtgatgcggatgacatcatcctggatacgatggggacggaaatcagcatatatccgggcggcacggaaagaagaatccgtgccgtttttgatgccccggcagataacaccgggatgaacactggcagcggcgaaattcgtgatactgcgcccgtgttatttacccggagcacatgggccgccggtctgaaaaaatatgacagggtcatgatccacggcgaaccctatcaggtagtcgatcccggctgggatgagtcaggcactgcgggtcagggggtgattaccatcacccttgcgcgtggagagccggggagaaatacacctgctgcaccggaacgaccgagtaaacgttatggcagtcagagagcatga

SEQ ID NO: 16441 - DNA, 723 bp, Escherichia coli
atggcagtcagagagcatgaacgaagcagtgcccggcagcgacggctggcacgaaacctcgtcgtcgatattgatgaagatgaggtgctgaaaattattgctaaactgggtgggtcaaaaagtcagatccgtaaagcctggggcgtggcgctgaaaagagccgcgtctgcactgcggatgaaggctatggcagagtttaaaaaacaggttgccccacgcagtcagaaaatgatcaaaaagcgtgttctgcataattttatcattcgtcgtaacggtgatgagtttgatgaggcgaaggtatggttcggtctgaacgccatcaaagtacgcgatctgcgcggacgcatcagtgggggacgacgcggcgaacgccatcagttgcgcgatgagcgggggcgttttgctccagcttcccaccggaggaaggcacgggagatccgttttaaacctgccggggaatccctgcctgtcaccacctggtcaacggatgatgcctttatcaaccagttcgaagcggaaaatcgtaacggacgtatatcaagaaggaaaacgatactgatccgacaggcatccggacgacggagggcgcgtgaagcggaaattgatatttatgaagccatgctgaaccgtatagaggattttgtttttccggatgcggaagcactgatcctgaaaaattttgagcatgaactgaaattccgggtatttaaggggctggagtga

SEQ ID NO: 16442 - DNA, 552 bp, Escherichia coli
atgatgggcgcctggcatcaggcggtgattgacagtctgaaacacattccctgggtggaagatgccgatgagtacccggaaaaagtgacgcaactggtgacgcctgctgtgtttgtggatgtaccgggctgggacaaggctcattttgctgacgggcaaacgcgggtcacgctgaaatgtgatctgtttgtggtgacagaccgggccgggaagacggaaaacgtgccaaaaccgcagatttttgcccgttgtctggcgatggatttatctgactggattgagggagccacgttcgggctggataacgttgatccggcggtttttatcgatgctgaggtggataccttcgaccggctgctggacgactacatcgttttccgtgtctcttttgaacaggacattccggtcggcgaagatccgtttgcagttccggcaggtgcgccgttacaggaagtctggctgggtaaagtaccggaaaccggcaagagacatgagcaggattatcgtcttatctggaaatcggagggcaccggtgatgagcctggcagatga

SEQ ID NO: 16443 - DNA, 624 bp, Escherichia coli
atgagcctggcagatgaagtggcagagttacgccgcagggtggcggacatggtccgtcgcggcgtggtggacgaggtgatcccgggtagcccggtgatggttcgggtggatatcggggatgtgctttcgcctccgttgccctggattcaggtacagtccgggcgctacatgcaggtcagtaattacccggctcccggagatgccgttacagtgatatcggaggcgggtgatctgcgtaacggtcgggtgtatccgggggccaatattgacgccattcctgtccctgagggcagtgaatacgaacatgttattttgtttgataccggaacggaaatccgttacgaccgtcaggctaatgctctgtccatcacgctggctgaaggcggcagctataaaattaccggcaggggaaccatggacggtccggtagaaatcacagataccctgaccgtacagggtaaagcaaccatgaatgctgaggcggtggttaaggcggatctgatggtcggtggtgaggtttctgattatcacggaacgatgagtcaaatcagaattgtctataacggtcacaatcaccggggcgacagtggtggcagcaccggacagcctggtcagcaaatgtaa

SEQ ID NO: 16444 - DNA, 357 bp, Escherichia coli
atgattggtattgattcagccaccggcagatatctgcacggtaacgaacatctgcgccagtccgtcaccgatattttgtcaacaccggtcggcagccgggtcctgctcagggaatacggcagcaggcttttcagtctgcttgataacccacaggatgatttcacgcgggtgagaattattcgtgaaacggtaaccgcccttgaacgctgggaaccccgcctgactctccggcgggtggaagtgacgtggacaggagaaggaagcgcgtggctgacgcttgtcggggtgaataacgaaactcaggatacgattcgactcgaggagataaaaattggcaacgtctcaggcaatcattga

SEQ ID NO: 16445 - DNA, 915 bp, Escherichia coli
ttggcaacgtctcaggcaatcattgatctgtccgcgataccggtaccggatgcggtggaagtgccggataccgcaatgctggtcactcagatagtggcgaagtatcaggagctggatacgttgttttcggctctggtggaatctgatcccgcgtataaatgggcagaggcgctggcttatcgggtggcgctgatgcgccagcagataaatgatgctgtccgtgctgtactgcttgccagtgccggtgggaacgatctggatcaggttggcgcgaattatcaggttcagcggctggttattaccccggcagacgacagcaccattccgcccacgccggcggtgtatgaagatgatgacgcttttcgcgaacgtatccagttgtcatgggcacggctcagcaccgccggcgcgaaaaatgcgtatcactattttgcacaaagtgctgatcctgatgtgctggatgtgaaggcttacgggcctgaaacacattcgcaggaaggccgggtttttctttatgtgttatcccggtccggaaatggcactgcatcacaacccctgctggataaggtggcagcatcagtctgtgatgatgaaacccgtcccctgacggattttgtcagtgtccggacggcagaaattatttcctacgatgtggtggcggatattcatattccctacggactggatggtgaactggttatggcaaatgcccgcaaggcgctgcagtcatacactgacagcgtccaccggattggctcggtggcatcccgttctggcatggatggtgcccttcaccagaccggggtgattacggtgaatctgacctctccgggcagtgatatcgttcctgcgatggggcaggcaccgtggtgccgtaaggtaacgctgaacaaggtagagacaactgatgaatga

SEQ ID NO: 16446 - DNA, 591 bp, Escherichia coli
atgaatgacgatatcaggagcatactgccggtcagtgccagccgggcagagcgggtggtggactgtgtcgccggagatatgctgtcagacatagcggtctgcctgatccgctatgtgaaagatcccgatttatgtcctgctgaattgctgccatggctggcctgggaaatggcggtggatacctggaatgaacactggacggagacggaaaaaaggtctgcgataaaacgtgctgcttacatccaccgccacagagggactaaagcggcgctgatggcatcgctggctgacagtcccttccggtcgcagattgttgagtggtatgagcagaccccacccggggagccgtatacctttcgtctgaacgtggagcagaaggatttaccggtgctgatgaatgatcatcaggatctgaagcatgcggtgctccgtgccaaaaatctgcgcagctggttcagtattcacgtttacgggaacagcacagggcgtggatttggttacggctatgtgatggcgacagaaaaaatcagaagtaccggtgtgacaacaaagacagtgcccacaggcgggcagagtgaggcaggtgtatga

SEQ ID NO: 16447 - DNA, 1344 bp, Escherichia coli
atgacggcccgtgtgaccagtgcaaaagaaggggatatctacgcctggcaggatgcatcaggcatgtaccgggtgaaatttgatgccgaccgtgatgataaaaatccgggacaggaaagcatgccggtacgtctggccaaaccctacagtggtgatgcttatggttttcattttccgctgattcagggaacggaagtggccattgcctttgaggaaggtgatccggatcgcccctatattgcgcatgccctgcatgattcacgtcatgttgatcacgttaccgataagaacggtacgcgcaatgttatccgtacgccagcaaataacaaattgcgaatggaggacaaacgcggtgaggagcatatcaagctcagtaccgagtatggcggtaagacacaacttaatcttggccataacgttgatgcacaacgggcattgcggggagaaggggctgaattaagaacagacaggcatgtgtcgatacgtggtggtgcaggcatactgattagcgcggataagcaaccaaaagcccggggggacatgctggacatgaatgcggcggttgctcagttacaaagcgcattacaattagtcactgcactggctcagagtgccggagcttcgggggcactggacgcggatattaactctcagcagcaacttgcccgggtgctgaatcagcttaaagaagccggattactgatgactgcgccggctggtattgcagccaccacgcctgagaatattcagctatctgcaggtcatacactgacagcaacggcaggtgaaaacgccgatatgacgatttttaaacggctgacagtggctgctggtgaggctatcagcctgtttactcaaaaaatggggataaaaatttttgcagcccgggggaatgtcgatattcaggctcagtccgatgccatgcgacttcaggccgggcagcagatggctattaacagcatcaatggtgaaattatactgaatgcagcacagggtattaccctgaccagcagggggggcgcctatatcaaacttaaagatggggctgtggagattggtgcccccggaaaaattgatttgaaaagtggaaatattctgtggggggggagtgcgtcgctggagcaggcacttaagccagccgtagtcgaagaaccacagtttcggaatacaatgaacggtcgttttcgtgttgttaataaaagagataaccaacccaaaccatatgtcccgtaccgtatcgaaacacctgatgggagaattattcgtggtgtaacagatgaacagggttacacgcaggcgcactacggtattgattctgaaaatatcagtttgttttttgaatga

SEQ ID NO: 16448 - DNA, 177 bp, Escherichia coli
atgtttctgccggggctcagtttcttcgcttttcagctaatgccggatctgctgtggattgggctccccgtaatcagcaaggccgtattagcggagaagccagctgtgagcttactctggctgctgcacaggccacgaccaccttttatcgacccgaccgtgcaggctggcagctaa

SEQ ID NO: 16449 - DNA, 327 bp, Escherichia coli
atgaccgccagcggtgaaaaaataacgtcggcaatgccggagcatcagctggtagagcatcaggagcaggttatccgcaatttcctgcagattgggcttgatcaggataaaaagctggatgaacttatttcacgcctgaatctgcgcgatttccgggaaacctatcgtcgcctgaaggataaaccagcctttggttatcctttcgcgcctaactgcactaaacaatatgctctgttttgtgatgataatccctggtatacctcgctgtgccatatcctgccacaggatccgaccatcagacatcgtctggagccgatgaataaatga

SEQ ID NO: 16450 - DNA, 996 bp, Escherichia coli
atgaaacgttttatccctttcttacttatgttgacacttggcggctgtgatcaacagcagacgtctgccccaacgctttctgcagagcagaaaaaaacgctggctgactttattcagcgggtaaaatcagacatggtttatatgcctgcaggcagttttctgatgggagatttttgtcgggaaatgcgccacggaggagcgtattgttccgctgatgaagataataaaccggcccatcaggttgaactttccgctttctccattgcgaaattcaagataacccacgaggattatgatttttatctgaaaatgagtggtctgccgtcacaaaaatttaaagaggaatggcagaatgaaatactggcagacatgaccgtgttagaaaaaagcccggccattatcagctggagtgaagctgataattactgtcgctggctgaaacagcaaaccgggctgaattttgcgttgccgacagaggcccagtgggaatatgcggcccgtaataaagggaaatatgtctcaatagccagcgatgatggttctctgcgctacaacctgaaaacaggacggggagaaaactttgctaccgatgaagatcgtgaggtggttgcagaatccttacatattgattctatcaatgtatttttcccggtagatcactggccgccttcgccggcagggctgtacggaatggcggataacggcaaggagtgggtacaggactggtatgatccggagtggtatcagaaatcgccccgtcgcgatccacaggggccggaaaagggagtgataaaaagccagagatatgatcagtactggaaggtgactcgcggtgctgattccccttcccccggcagaccttccgggatgacatttagccgtaattataaggttccggagccggattatccggcaggagtcacggctcgttgtgtggtgaatgatcctaagccattaaatggcatacagcatataaccgacagtaaaacagaatga

SEQ ID NO: 16451 - DNA, 258 bp, Escherichia coli
atgcctggtgttattcgtgtaggtgataccacttctggtggaggaaaagttttacaaggcagcagtggtgttaaatttcagggaaaagaagtatcctgccttggtgataaagtttcatgtcctgcccatggaatgacaataatcgcagaaggtgatgaaggttcgaaaattaatggtaaaccagtcgcccttcacggacatgtttgtggctgcggttgttcattaattacttcacttcccggagcagggaaacgctag

SEQ ID NO: 16452 - DNA, 1191 bp, Escherichia coli
atgcctgttgaattaaaaaaaataccggagaaaatgccaataccagaaccaccttcagtattccggtggattgttatagtggcgttgatcactgtattgggagcaatactggcgctttttttatggccgaaggagatgctcacagattctgcatggttctggttttgtattcttgtaataccattttctgttggtttaaccagctatgcttttcgtctgcgagtttatgaaaatgaacgtgacaggttgaattactggaatcagcttcaccaggaacagcatgatattcaggtagaaaaagggcagcgtccagcaggcttgctgggtaaagccttcgtcactccggttgccagtaataaactggcttctgccctgataaattatggtagccagttacagtcgttctattttgctggtcttcagcagacactgactactgctaggctggagccttttcaccttaatttctcaaaagagacttaccgtaaacggttaacctgctatctgacccgggttcttcatatgcttgaaccagatttatcagcattgccgacagataaattgtccgttcgcgtccgacatgatggtgtgctggataatgcacaaatcagatgcatctggcaggatatttttccctcctcatatgtgattgatgaatttgtaacagagacagaaggtgatggcatgatgtggctggatacctggctcgatcagaatgcagctgcgctgatgctttctgttgagatcaacctgtttgtggttccccggaattatcagtctgagtcagtctctgcgcttttgctgggctctccagcctggcttgctcagaatgatataaaacctgaagttgtcattcatcgccctgttattgcgacagaagacagccagactctggaagatatgttgtgttggggaaggctgactgcggatgaagttcatacgctctggcaatggcaggttaataaagaagcattaacccgattaatacagcagtcagaaaaacttggttatttgccgggcaggaatgagagttatatggcgggggatttatttggtcatcccggagttgcagcaggaaatattgccctgatctgtgccagtgaacatgctgtggcatctgataaaccgcagtgggtaatgatgacggatcaaaccacgcatcaggctattgtgcgtcagtcagagcattga

SEQ ID NO: 16453 - DNA, 504 bp, Escherichia coli
atggattcgaaggaactggaaatcaatggacttcagatatcggaaaaaaccttaactcagggctttaatgatgcctctaataaaaaactgaagctttctgaaaaagaaatcagtgatgcattgtcctcagtgaacagaactgttcagcgtaataccaggaaaactgaaagcctgttaagggaaaagattggtaataaacattacagaaaaattcagccaggtgtttatctggtggtaaatgaaaaaggaaaagggaaatatgcagatacggatgcagtaagatttaatatgtttgagaaaaaacttgacgggacacctgtcaaaaataccatgaatgcatctgttttatacaaaaaagcagatccgttaatgagaaagcttgttaacgcgggtttgaaaggtgggcgggtgacaatatacgggaaagcgttatatatatacaaagtgctgccaaaagatataagcggagatgaaatagtatcaataacgttttcctttaaatga

SEQ ID NO: 16454 - DNA, 3033 bp, Escherichia coli
atgaaaattcattcaggcccgattttgtgtgcttcagtgtgttgcctgttttttcctgccattatactggccgcaggaaataattatcagggaaccgacaacctgccacactggcagactcccgaattcaacaaccagtggggactggaagcgattaatgcacagtatgcttatgcccgcggatataatggatacgggatcaacattggtgtactggacgcaaagttatttcagcaccctgagtttaacggcaaactttcacagctttccggccatttaccttatgattttgaaaccgaagaagacggaagtatttctttcgaaagtcacggagtgcatgttgctggcattgccgcagccaggcgggacggcaccggaatgcacggcgtggcatttagtgcgacactcaccacaggcaatattccggacagtaataatgttctggaattcatggcccaaaataatgtccgggtgattaacaacagctggggggaagagcccccggtagaggaagatgccgatggtaataaactgtatcttcccaatggtacctataaatatatacaggtgacaccgacctccgtgactgaggagcttctgcctttaagagagcgcatcagggccttcagtaaggctcccgttccgtccactgttgccgataaagacggcgacgaacaggatattgccggctgggcgggtatgttgcgtgccgcccgccatggcaaactgattgttttcgcagccggaaatgagaacaactacaatgtccccatgcacagcgcaacgctgccttatctctttcctgacgtactggaccgctacctcatcgttgccaatctgactcccgatgatgagcttcatgtcacatcgacaagttgtggacatactgccagttactgtgtttcagctccgggcactgacatttacagtgccgcaggcaattttatttcccggaccggtggccccatcacagaagcagcactgaacctgggagagctgacagaggagcctgattacagggaagagaccggcacctccatggcagccccccatgtcaccggcgctgctgccgtgctgatgcagcgtttcccttacatgacagcagagcaaatcagcacggtgctgaaaaccacggcttccgacctcggtgccccggggattgataatcgtttcggatggggaaagataaatctgaaagaggctattgatggtcccggaatgtttattactgccgcggatatcccgccggagcattatgtcccgggctcgtacaccaacactcagtttgtggctaatattccgggcgtcggaggcgtacttgatgccggaacaccactggaacgacagtgttccggacctgaatgtgccctggatatctggcgtaatgatatcggtggtcatggtggattgactaaagaaggtgcaggtacgctggtcatgacgggctctaacacttatgcaggtccgaccctggtcaaccaggggagactgacaatcaacggctcggtcacatccgacgtcagtgttcagggggagggtatcatcggcggcagtggcacactcggttctctgaccgttcgccgcggcggtactgtggctccggggaactcagtcggtacccttaatgttgccggcgatgtcagttttgctccaggttcgcgttatgtggttgaagtgggtacagacggccagagcgacaaactccagagccacggagctgcaatgatcggtggcggcgaggtggctgtgacactggaaaatcataacaatctgttgatccaaaacgaggtattcacactccacggtcagcaatacaccattctggatgcacagcagggtgtcagtgggcgctttgattcggtgatgccgaattatctctttcttggcaccgggcttggctaccaatgggacaaggtgttactgaatgtcggtcgtaacaacacaagcttcgccagtgtggcacagacaccgaacgaacgggctgtcgcatcggccgcaaatacgctggcgccgggtcatccggtttatgagagcattctccacagcagaacggcagaggaagcccggcaggcgtttcgtcagctgtcagggcaggttcatgcggacgttgcttcagcgcttatgaatgacagccgttatctgcgtgatactctgaatgggcgtctgcgtcaggctgaagggcttgtgggatcaccagccatcagggcaaacgaggacggagcctgggtacaactggtcagggcatggagccatgcgacaggtaacagtaatgccacaggttaccgggcttcggcctgtggagtattaacaggggtggacacggctgtgaacgagtggcgactgggtgtcgccactggctacacacgtagctcgctgcacggagcttccggctctgaggctgacagtgataactatcacctggctgtctacggaaaccaccagtcaggtaaactgggaatacgtggaggtgtgagtcacacctggcaccgcatcgacacaaagcgaacggtcaactatggcatacaggctgaccatgacacggcccggtacagtgcgcacaccggacagttgtttgcagaagcaggctacagcatcagaggaagcagactgagcctggagccattcgccagtctgacatatgcggagttcaggaataacagcattgcagaaaacggtggcgctgctgccttgcgtggcggtaaacagcataaaaacgcaactgtatcgaccctgggactgcgtgcggataaaaaatggcagctgaatcagggaatgacagtcgcgtttcgcagtgagcttggctggcagcgactgtacggagaccgggaaagaggagttaaattgcggtttactggcacggatgcacaattcaaagttaacagcgtgccagcctcacgcgatggcatggtgctaaaagcgggagcagaagcgacggtaaacaggaacgtcacgatatcactggagtacagtgggctgctgtcacaaagctatcaggacaacaggctcaatgccggtttgagctggcgtttttaa

SEQ ID NO: 16455 - DNA, 624 bp, Escherichia coli
atgctactaatgatgaaaaaatacaaattcacttttctttttactgcgttgctgaacaccttttttctgaatctatttccgttgagtgcagcaggatactatctgaatgtcgtgttacaaattattgcaggagttaacctgttgcagcgtcgccatcagatagtttcttttatgatactactgataatttttgccatcacacattggttacacaacatcagttcaatgacattattgtattatgtaagctatctgttttttttcttcatactgtccgtgatagtgttccgccaggtgattttctctgccaaaataaatacagaatcagtttgcgctgcactgagtggttttttgcttattggatatatggggttttttatgttctctgcgatagaaagttatatgcccggtgcgtttcggggattgtcacaggacaaactgcagatgatgaacgaactcttttactactcatttataagtattttgacggtagggtatggtgatattgtggccgtcaactggcctgcccgtaatgccactatactgatgatcctcatgggctatatttactctctgatttttatttcccgtatcgtaagcggactttctatatcggaaaaataa

SEQ ID NO: 16456 - DNA, 462 bp, Escherichia coli
atggcggttaaaatcacgcctgaagagttcagtatgttaatccggcgactgagcacgcaatggcgcgtcctggcgccttctgccgagtttcgcggcgggcgttttgctgatacggataacattatttatcagcaaatccggggatgggatgacctggtctggcaggagaaatcccacatgtcacccaatacggttatttcaccgataacagagacgctcttttattttaataaagacactatccagattgcggaaacggatgccatgtcggtgctgatatttgcccgcgcctgtgacatcaatgccatgtcacggctggattatatgtatttatcaaacgggaataattctgattacagttatcagcgactgcgcgaccatattcgttttgttctgattgagtgcccgcaaaggtttgaaaactatttcatggactctcaggagatgatacatgtttactga

SEQ ID NO: 16457 - DNA, 492 bp, Escherichia coli
atggcaattccagtttatctgtggctgaaagatgatggcggtgcagatatcaaagggtccgtggatgttcaggaccgtgagggcagcattgaggtggtggctcaggagcactgcctctacatcccgacggataacaacacaggtaagctgaccggtacccgtattcacacaccgttcctgtttaccaaggagattgattcctccagtccgtacctttacaaggccgtgaccaccgggcagaccctgaagtctgctgaatttaagtggtacaaaatcaatgacgccggtcaggaggtggagtacttcaatacgaagcttgagaacgtgaaggtggtgaaggttaatccggtcatgcacgacatcaagaatcccacctacgagaagcataaccaccttgaacaggtggaactgcgctacgagaaaatcacctggacttacaaggacggcaacatcattcattccgacgcatggagtgagcgtaccaccgcgtaa

SEQ ID NO: 16458 - DNA, 399 bp, Escherichia coli
atgcattatgtcactgaatttacagccgcgacgccggacattgccgaagcgcattttctcatacgcctgagtcttgaaacagattgtgccgatgttcatgactctctagcgtacgttggtgatgacttcgttttattgcatgtggttgggtgtgaagaaaacttcgcccgcaggcatattcccggcgcgattcatttgccccataagcaaatgacctcagagagaatggctcaatggtcgaaagatactctgtttgtggtgtattgcgcgggaccacattgtaatggagcagaccgggcggcactcaaactggcccagctaggaaggccagttaaaatcatgctcggcgggatcaccggctgggaagatgaaggctacgcctttgcaacaggaaaataa

SEQ ID NO: 16459 - DNA, 993 bp, Escherichia coli
atgccagaaaagcgcaaaatgatgacaatttcacaacgccccctggtcgttgtcttggcctatgatgggctatgtacttttgaatttggcgtcgcagttgaaatattcggccttccacgcccggaaatgggtgataactggtatcggtttgctgtcgctgcggtagaagccggtgcgttgcaagccactggtgggatccgggtggttgcggatggagggctggagttacttgccgacgccgatatgattattattcccggttggcgtggagtagatgaaccggtgccagagatgctatgtgaggcgttacgcgaaactcaccagcgaggaactcgtctggtatcgatatgttctggtgtatttgttcttgccgccgcaggccttcttcaccagcgtaaagcgaccacccactggcgctacactgaacaactccaacatcgttacccttctattcatgtatgtgacaatgttttatatcaggatgaaggacaagtcatgacttccgcagggagtgctgcagggatcgatctgtgcttacatatcgtgcgtaaagattatggtcacgaaattgcaaacaatgtcgcccaacggctagtcatccagccgcatcgtcacggagaacaaccacaaaacatgacgcgtccgatggcttcgtcgcgagaaagccagacgtttggcgcattattcgactttttacagcaaaatctggcgcaaacgcataccgttgcctctcttgccgggcgagtgaacatgagccaacgcacttttttaagacgttttgccgccttaacgggtatgacacctgcccgctggctgcttaatgagcggttaattcgcgtgcaggattatctgcaaaattcggctttcagcatcgataaaattgccgagctgacggggtttggcaattcagccttactaaggcatcattttctacagcgttttttattatctccttcgcaatacagaaaaaacagccgtcctccttcacattaa

SEQ ID NO: 16460 - DNA, 591 bp, Escherichia coli
atgtctcgaatttatgcttactgtcgggtatcaactctggaacaaacaaccaaaaatcaacgtcgggaaatcgaaagtgcaggttttaacatcaaatctcagcaaataattgaagaacaaattagcggctcagcagcaaccagtgagcgtcctggttttaaccagttgcttgatcgactgaaaagaggtgatgcattgattgtcacaaaactggatcgcctcggttgtaatccaatggatatcagtaaaacggtggaacaactgaccaaagcaggtatcaaagtgcattgcttagcattggggggcgttgacctgaccagtccatctggaaaaatgatgatgcaagtaatttcagcagtcgctgaatttgagcgagaccttttacttgagcgtactcattcagggatattaagagcacggggcgcaggaaagcgatttggtcgcccacctgtgttaaatgatgaacaaatacagagggtactagagcaaattaagtcaggtataaatataagtgacattgcccaagaattcaaaacctcgcggcaaaccattttaagagctaaagcaaaaaatcagacacctgatatataa

SEQ ID NO: 16461 - DNA, 588 bp, Escherichia coli
atgggactggatgatttcggccttagtatcttagccggacttcttgcaaacagacttgatttctcaaaaccgaagggcacttcagctcaaatgaatgaagttataccagatgtgattgaagaaccagacaaattctcgctaagtgcaaatttgccaaaaaaattcaagacattcgacgtatggagtgatttggacaaattgctaaaggttgtgaaagaacccaaaatatctgttttgatagaggagcaaccatcaacgtactatcggctccctagcttggttctggaatctcaaatcacaggggaatggtatgttttcccgcgaggccgcatgagttttgagggcaatggaggtggcatacagaacgcagaagtaatcttcaatcagttgaaagaagaaaatgttccggtgggagtatgggtgatcgatcaagctcttctcgaccgcctcgataacggacaagaatgttggccaaccatacgattacaaatagtaccattcttggccgcaccatcgagcgaatacccatggttcgaaatacaacgaaacgttgcaaaactcacagaattccatttgactaatgattaa

SEQ ID NO: 16462 - DNA, 228 bp, Escherichia coli
atgcttaaagttgacgcaattactttttttggcagcaaaacaaagcttgccaatgccgcaggagtgagactggcaagtgttgctgcttgggggatactggttcctgaaggtcgcgcgatgcgtctacaggaggcatctggcggggagcttcagtatgatcccaaagtttatgacgaatatcgtaagacgaagcgggcggggcggttgaacaatgaaaatcactcctga

SEQ ID NO: 16463 - DNA, 408 bp, Escherichia coli
atggatacaagaaccctaggccagcgagttctggcgcgacgaaaagaattacgcttaacacaacgagaagctgcgcgcctcgctggagttgctcacgtcacaatttcacaatgggaaagagacgaaacccagccagtcggaaaacgattgtttactttagcggatgctctgaagtgctcacctacatggctaatgtttggtgacgaagacaaggcaccagtgcctgcacaagaacttcatatggaaacagagctaactcccaaccacaaagaattgatcgaattattcgatgctcttccatcttccgagcaggaagccttgctgtctgaaatgcgcgcaagagtagaaaacttcaacaaactcttcgaagaaatgcttaaagcgcgtaaaaataaatcaataaaataa

SEQ ID NO: 16464 - DNA, 537 bp, Escherichia coli
atgatttacccaacgaatacaggaaaaagcggagaacaccttcgtctcaccacgctggaaagtgtctggattcagggaaaactacgtatgtgggggcgctggtcgtatattggcggcggcaggtcagggaatatgtttaaccagttgctggcatcccaaaaaatgacaaaaacagccatcaatgaagccctgcgcagattgaaaaaagcgggaattgataaaccagagttggaagcatttttgcgtgagatgatcgaaggaaagcaaaaaagctggttaactcactgcactgatgcagaggcactaaaaattgatagtgttataggtgaagttctggcggatcatccaggactactaaatgtcctgagtcagcgttatgtggggcgagggatgagtaagagaaggatggcagagttattaaacgaacagtacccagagtgggcgttgattacatgccgacgtcgtgttgagcagtggttgcgtgttgctgagttcattttgtattcacctatgagagaagcgttcgattatgcttaa

SEQ ID NO: 16465 - DNA, 600 bp, Escherichia coli
atggcgcatatacaactggtcaaacaaacctcttccggattacttctcccggcgacgccggagagttgcgattttctgcatcaaatcaaaataggtgagtggatacacgcagactttaagcgtgtgcgtaactacgcattccacaagcgttttttcaaactcctgcaactgggattcgattactggactccggtcggtggggcgatcacgcctcgcgaacgagaactgctgtctggtttcgtggattacctgtgcgaatcagttggtcgggaacacacaccagccctgagtgatgccgcagagcaatatctaaatacagttgcgacacgcagaacccgggatacggcattgctaaagtcgtttgaggctttccgcgagtgggtaaccattcaggccggattttacaccgagcatctttatcctgatggtagccgtgggcgtcgggcgaaatctatcgcgtttgcgaatatggacgaaaccgtgtttcagcaggtttataaatctgtactgaatgtgctgtggaactggattctgttccgtaaattttcctctccggaacaagtcgaaaatgtggccgcgcagctgctggagtttgcgtaa

SEQ ID NO: 16466 - DNA, 1092 bp, Escherichia coli
atgcttgagcaaacagtaaaaaacatcaattcacgctttggctggcgcaacacccgtaagcttcttggttcatcactgggtgtaacggcccaaggattacccctttttattgaacgtgtaaatagtgtagttcagcataatcccgacctaaaagacagaatcgacgatttctggaaaggtttaatttttagcgggaatcgattactttctatttatagaatcaccgatgaagacgtagcaaaattacaaacaattttcacaaatcagaaaaaggacaatagccccttctcagaaaaatacccaactcctttatccagagaggagctgttagttgctgatactgagctgcattttgctgaactacgtcaagatatcattcgtgataaacaaattgacactgctgtttttttatccaaagcgtattacactgaagtgatagagcttgacccaacacatcttagcgatgcgggtatggaattacgtgctaatggtggagaaataaaatgcaaaacacgccaagtcacgcaatgctttaataccatcatgctaatgcctgcagaaaaaatattaattcttacgattgatttatctatccttccaagaagtgaatcacagcctcaacaataccttgtggctaattttataaaaaaagaagctggcgttattttaaacaatcctcttgaattatttggttcaatacaagatctttacgagaaagtagatggcagaatttctcatgtatcttttatcacctcagatggcaatacaagttctttaaaactcaaaccaagtcaaaagtgtttgcgtcaagatgtttaccatcatagtggagagtccgcaagcccaatattgacaaagtttaagttgggaaaaatttgggatttaccacaaagttcttcacatattttatcagtagagttaatattaccagggaaaaggacaatgcttgataatcctagaattaggttgcatgaagcaattgcgaagaactgtaacaacattgattcgattatatttattgttgaaaaaatattggattctgttaagtcctgtgaagagaaaagaagagcaagatcatcaggccataaatga

SEQ ID NO: 16467 - DNA, 429 bp, Escherichia coli
atgaaaaagagtatatatcacgacattatcacgcaaatagagcaggattttaatgatcctgttcgcagtgtgtgtcgtgatctttttctttttctggttagtaaagatgctaaaaatatcaatcactttacatacaaaacccttatcaatggtttaacctatctaactgatacgaaagatgactatatcctgctaataaaagcaactgattatttatctagctataaagcacatctattggatatgcattttcaatacattgataatttaacggaagaaccaataccagttgaagatgatcttatttcctatgctttagacacaggaagtttttaccatccagaaactggcgaattggttgataattttagccagtatctttatccatactttactccttcgagtcttttggagagtctgcatgagtga

SEQ ID NO: 16468 - DNA, 642 bp, Escherichia coli
atgagtgatgtaaacatctgtactgcagaccttcaatcattaattagaatggatcctgaatttaggggaatggttcaaagaaaattagctgcagacaaaaatatttttgtaaagcaactctatgaagatttagacgacgctattcagaatttagaaaatgacaaacacttctatcaagatgcaaagtggggagaggacgagctaacagcgtcgatcaaaaatttcctgaaaggtaggttttatgatgttgaacatgatactcaacatggcggtcacgttgatttattagttaaacatcaattcggaaaattcgaatggatcggtgaagcaaaattatggagaggccccaaatctattcataatggctggattcagctaaccgaacgttacggcacgggtacgtcacgtgacgatcatggaggaattctaatttatataaagtctgacaaatcagcagtaaaattcaatgaatggaaagaatttttctctacgaccgtttcggacgcagaaattgaagcggaaggctctcccctccgctttaagagtatcacaaagcatccagcaacagcgcttccatatcatgtaagacacatgggagtatccttataccattacactggtaaaaaaaccgctgactcttaa

SEQ ID NO: 16469 - DNA, 522 bp, Escherichia coli
atggaaataactaaagaacgattattggaaatagcaaatcttagtgatagggcattaagtgatgggagaattatttctcctgatgcttatgaatcagttacaagtatagaaataacaacaatggctagaatgctgcttggttatttcaaaatagaaaataaaaaacagatggatagtaatgttgatatatgtgagattttagacgattggggggcttgggttgtggctggtaatagttctattgattggcaggaaatagctgataaatataaaaatgttgttcctcatggtaaaaaatcacgccgtcagtgcagcaatgatgaagggcgagttattgacattagtatccttaggttagaaagatataagcaacaagaatatgagttaattgttgctcatttcgtgattggtttatctcttcgtgctattgcaaagcaacaaggatgttcagatggaacaattcgtaaaagattgcaaaaagccttaggttttttgactggatatatagcaattaccagttaa

SEQ ID NO: 16470 - DNA, 312 bp, Escherichia coli
atgagtgaaattaaagaaatacctgtggtacgtgatgagtatggctgctggacgcattctgaatatgaaaaattctgtgatggtcgggaatatatttcaacggaagagtttaacacctggatggaggaaaataatcttcaatacgtcctccgcttcagagacgaaggatgtactgaccttgatgcgtgtgatgccgatatttctgcatgggaaccggaacgaccagagggcgatggatggtttattggttcgatacatgacaccgaagatggcctggtttgtgtatggctgagaaataagactgaaacataa

SEQ ID NO: 16471 - DNA, 255 bp, Escherichia coli
gtgagtgaatcaaaatgccaggttaatggcaacaagatagaaccatgtgcagcactggcaaagtcccttgagcatgatgctgaatacacgatgcggaaaggtctgctgatatacaaaatctggaatgagagtttaactcgcggccctgatttggtgatgttgcgttccggtgaattttctaaatcaccagtgcgggtttcatgttgtccgttctgtggtgaaagtctgaaaacgtgggagaacagaaatgagtga

SEQ ID NO: 16472 - DNA, 759 bp, Escherichia coli
atgcctcgtgtgctgggacgcctgccgtatggcccggataccgtacctgtccgcagctttaactatgttgaagaggtgaaaggaccggatcaccataaatatctctggacgaacgcgtcttttgcctttgccgccaacatggtgcgcagttttgtcaccaacggctggtgtgttcagatccgcgggcctcaggccggtggtgcggtgcaggatttgccgatccatctgtatgatctgggaaccggtaatcaggtcaaaattccgtcagaggtgatgattccggaaacgcgggagtttgaattcgccaatctgggctttattccgctctcttactacaagaaccgggattatgcctgcttcttctccgctaactccacccagaaaccggcactgtacgatacgccggatgcaacggcgaacagccgtattaatgcccgtcttccctatatcttcctgctgtcccgaattgcgcattacctgaagatcattcagcgggaaaatatcggtaccaccaaagatcgccgtctgcttgaactggagctgaataactggatccggggactggtgacggagatgaccgatccgggtgatgaactgcaggcctcacatccgctgcgtgacggaaaagtggtggtggaagacatcgaagacaacccggggttcttccgcgtgaaactctacgccgtaccgcatttccaggtggaaggtatggatgtcagcctgtcactggtttcgcagatgccgaaggcaaaagcgtaa

SEQ ID NO: 16473 - DNA, 1338 bp, Escherichia coli
atgaagatttatcgtccactgtgggaagacggggcttttctgatgccccagcagtttcagcagcaggctgcctgggatgttcatctggcagacagcgttgcccgaatggggctggcgcatccctggggcgtggtggccgcagagtttgatgactctctgttaccgctttcacggttgaatgccacccgtctgattgttcgtttcccggacggaacgcttattgatacggaacgtgcggataatctgcctccggcctgtgatttatcgacggtttctgatcgttccctggtggatattgtgctggcgctaccgttactgaatgctaacggcggcaaccttgatgatggcagtgagagtgaacgtccgcgtcgctggaaatcagaaagggtgaatgtgcaggagctggccgggcatgagcaaagcgaagtggcggtattgcggcataacctgactctgcgcatggctcatcaggaaaatgctgcctggctgacctgtcctgttacccgtcttgttcgagatgcacagggacagtggtgcagggacccgcgttttattccccctctgctgacgctgtctgccagtccttcgctgatgactgaacttgcggagttgcttcatcacctgcaggcgcgtcgtcagcgactgatgtccatgcgtcgggagaacaatgcccgtcttgcggattttgcagtggcggacgtctcgttgttctggttgctgaatgccctgaacagtgcggagcctgttctgaaagagttgcttgacatgccttaccgtcacccggaactgttgtacagggagcttgcccggctggcaggctccctgctcacattctcgcttgagcataatgaggatgcggttccggcataccgtcatgaaacacctgaaaatgttttcccacccttgctttctttgctgaatcatctgctggaggcaagcctgccttcccgtgtggtcttcattgaactgaaacaaaagggtgtgatgtgggagggggcattacatgatgcgcgtctgcgcgagggggcggatttctggctttcggtgcgctcttccatgcccgggcatgaactgcagacgaagtttccgcagttatgcaaagccggaagccccgatgatgtgtctgaggtggtgaatgtggcgctgagcggggtcattatccgtccggttacgcatgtaccggcggccattccactccggctggaaaaccagtatttcgcgctggatttaagtacggatgcggcccgggcgatgctggacgcggggcgttgtactttctacaccccggcatcgctgggggatgtgaaactggaactttttgcggtgctgcggacatga

SEQ ID NO: 16474 - DNA, 654 bp, Escherichia coli
atgaataaacctgttatctcccgggctgaacagattttttatcccggctggctgatggtcagccagctgcgcagtgggcaaccggttgaggatggtaaggccctgtatcgccgtgcctgtcagttggtgacgcaggcgcgtgaagagctggccgaagcaggattcagtcagaaaagcagtgacaccatgttgtatgccttctgtgccctgctggacgagagtgtgctgaaccgcgaaaaaacagatgatggctggcacacctggcagcaggacccgctgcaggctcatttttttggtacgctcaatgccggtgaagagctctgggagtgtattcgtgagcaactgaaattacctgcgccggatgtggcggtactgacatgcctctgccgtacgcttcagctcggttttaccggtcagtaccggtcgcaggatgatgagcgtcgcgaagatgtaatacgcgcactggcagcgcgtgttcctgcatttactttcgcacaggatacgccggtggtggtgcgtgcaccgggttaccgtgctggcagaacgatgtactggttgtcatgggtggcgggtattgtgatgctggctggtttctggtgtgtgctttcttctgtgcttgcagaccaggtggcacggcttaccgggcagggataa

SEQ ID NO: 16475 - DNA, 1731 bp, Escherichia coli
atgcacgtacgttcccgtctctggctgacaatactgagtctgttcctgacactgtggctgatttcgggattcctgccgctgtctgtagtaaaccagataatactgaccctggtttcagttgtggcggcggggcttgtgctgtggtaccagtggcgttgtctgtcttcccgtcgtgatatcccggagaaggccggcgatgacggtctgccgcctgagtattttcagggacatgtgctgcttgttgccggaaactcagatgcgtggttcgaatccggtcaggcataccgggaaacagcatcgggatggtatcttcgtgtggatacgccggagcagatgagaatactggcagaacggttgtcgtataaccgtccggccctgtgtggccaggtcgtggtcatgctgggacttttaccggagcagcatacctcagatgagactttcctgccgtggttgcggaactggcagcgtgctgtcatgcagtgccggcagtggctgaataccacgccaccggtgctggtgacactgatggtttcagagccgtcaccacaaagcacatccttaaataagcactctgcacactggtttacactgacaccggacctgccgggaatgcatatacgcctgacagaagccggagccattccggcagaggaatggctgcaggcgtgtgatgcagcgtccaggctccggtgcgtcagtgaactgttatggctgaatgccatgttgtcctggtacaaccgggttactgatgccctgacagatatttgccggcaggagcacttttatttccggccggttgccgtcggattctgtctgacgtcggttgcggcccggcccggtaatctctggcaacaacaactgacgtccctcactgcactgccaccgcctgccggtgtgtcatcacaggcactgccgttgccggatattctgctgtccggtattccccgtcatcgtggactcagtcactggcacagactttgtcgccagatgggggcgattgtcggtgtttttcttctgctggctatgctggcgtcttttatgaataaccagcgactggttcgcagcgtgggggaacacctgatggcctggcaccggatgcgcggatattcatctgaatcgaaaacaactgccctgcaacgtcttcaggctgacagccagttactgaacgactggcagcaacatggtgtgccgcagcgttacggactgggattgtatcagggaatgtggctgataccgccggttgagcgagcgactggtgagtggattgcaccactgcctccccgtccggtaatacagaaagttactcagacgccgaaaacggttcgccttaacagcctggcgctgtttgatgccggtaaatggacgctgaaaccgggcgccacaaaatggctggtgaatgccctggtggatattaaggcaaaagcaggctggctgattgtggtcagtggccacacggacaataccggtgacccgcagcgcaaccaggccctgtccctgaagcgtgcagaggcggttcgcgactggatgcgggataccggcgatattccccaaagctgttttgccgtgcagggatacggtgaaagccgccctgtggccccgaatgacacggcggaaggccgtgcgcgtaaccgccgtgttgaaatcagtctggtaccgcaggccgatgcctgtcgtctgccggacgcttcccctgcgccggaagagggcgcatcagaaaacataacggagtaa

SEQ ID NO: 16476 - DNA, 492 bp, Escherichia coli; identical to SEQ ID NO: 16457

SEQ ID NO: 16477 - DNA, 429 bp, Escherichia coli
atggcagtgcaggcgttcacagacctgtgcaagcttcatctccacaatggtgcgcatggcagactgtgtcagcggacggtaaatcacggtccggaaacgggcgagcagtgcaggctggaagtggtcgcgcagcagcggacggataagctcatgcagctccgattccgttgtctccggcttttcgctcagttgctgcatcagaaggtcactgcccaggttggaggtcatcagaatgaccgtattacggaagtcaatttcacgcccctcaccgtcgcgcataaagccccggtcaaatacctgataaaacagattcagtacatcccggtgggccttttccacttcatccagcagcaccacactgtacggacgcttacgtacagcttccgtcagaatacccccctgaccgtatcccacgtacccgggcggtga

SEQ ID NO: 16478 - DNA, 3051 bp, Escherichia coli
atggataatatcctttttgtaaatcttggcgatatccacctttctttaaaaaataaatctaggatagaacaaaaaatttctgccattattgatgtaatagaaacgcaaaaaatcttaaaacgaaaagagcatgtttttattctaatatcgggtgatatagcctttagtggaaagaaagaagagtacgaagcactttcaaaattatttggcatcatgaaagatagatactttttaattatgtgtccaggaaatcatgatcataacttcagtgattactcagaggtggcgagaaatgcaatgttaaatatccctatcgataagatagatgatgcagctattgcgtttgcaagttctgggatggaagcttataaagcatttgaaaaagaatttagtagttttaatcccattgaagaaaatgaacttagtaaaagatatgagatagatctttcatcagagacattttctatagtcaccttaaatactgcttggtgttctaaaatacatgaacgtggtggtgatattagttgccctgaaaataagatcataagaagtattgggacaccaaacaatataattatattccatcacccactttcatggtttgaaccaaataatagtaaagccattagggatataataagaacaaattattcaatagttattaccggacatgagcatattactgactcttttaaaatagatgctgaatcttcaacaacactcatgattgagtccttgccgattgatgatagtcatgtgtccgaaaatggatttataaccttcgaaattgaaggtggtgatattcttgtgagtacacatatatggaatggttctacttataatgaagggaaagttattttgaaaagtgatgtgattgaatctaaaaaatcaatcacatcaaatacttttgaagtgaataagaaattttatgattttttacaggagcttggggttgagtatatacacccatcatcaagaaagttaacattagatgatgtttttgtgtaccccaatatccgtgatctttctgatgataaagaacaagcaagaaagatgtcatccagtaaacttcttaataatagaggaggggatagaatagtcttaattggcgatgagttttgtggaaaaaccacaatgttaaagaaatattatctggatacaattgaaaaagaaaagcttgtattatatttagatggtagcatcatcaagaaatcaaataaaaaggttactaagctactcaatgatgcaattacattacaatatgtgaacaagactttagcagaattcatgggctataaaactgaaaaaacgttactaatagataactttcatgatataaaaggcgatgtgaattctttgcgtgattttttatctccttttgaaaaaatattcgataaaataataattactcttagtgatagcagtaagtttgcaggcgttgatatccttgaatcaagcccattttcatctgattataagcaatacaaaatactaaaatttggctttagattgagatatgagttagctaatcgttggaatatgctcaaagagacatgtgtcgaggagaggagtgcattaatccatgagaatgattcttctacaaagatgattaacactattataggaaaaaattatataccttcaacgcccttctttttactaacaatgcttcagtcgattgataacgaacaatcgtcagatcttaaaaccagttcatatggatattattatcaatttcttattacaagtagtttaaacaatgcttctgttcgcaaagagcaattagatgagatatttaattacattaccgaacttgcatattatttttataaaaaaaggacaaaagaagatagcaaagataatctatgggattttaatcatcagttttgctgtgaatatggtgtgcaacttgattttggggaacgattcaaattattagtaaaagctaaaataatggaagtagttgaatcagataattatagatttaaatataactatgtgtattatttttttgttgcaaaatatttttctgatcatctaagagatgaagaagtagtggatgatataaaaagattagcttcaaccttacatttaaaacaaagcatgaatatttttatgtttcttacacaccattcaaaggagcaatttatattagatctaataactaatcaggcgaaattattatttaacaagtttgaacctgcgagtattgatttagattcggattttatcaacagtatcgtagataatcttccggaagtgtcatttattaaaaaagacagacttgaatttaggcgggggattgaagatttaaaagatattcaaaccgaacaaatcaactcagatgagaataataatgaggcagatgtagaagagaaaaatatagaaaacaatcgttcaaacgatgaaattgatttaaatcttgagttaaatttaacagttaagtcgttagagctattagggcaattatcacgaaattattatggttctttaaaaatcactcaaaaagaactactcttagatgaggccataaatgcgccactaaggtcattaaatttcttactgagttcggtccgtgatgaaccagagaagacaatagatatgcttgaacaaaaaataaatcaactattggaaggaaaaaagaactctacttcaacagaagttcgtgcgttagctcgtaaaatcctgtttaatatgttgtttactatcacttattcaattgtttctaaaattgcatcttctattggaagtactcatttacaacctgttattaatagagtttgcgatactaaaaatagtgatgccgggaagcttataaaacttgcaagtattttagaagtagggcaagttatatctatagatgaacttaagagattaaatggaagtttaagtaaaaataacctttcaaaattattagtaaaagccttggttgttaattatttatatatgtttgaacgcccagataagcaagttcaacaaatctgtgcagctgtaaatataagatatgatacaatttcaaaagaaattgggtttcaaaaaattaacaaatag

SEQ ID NO: 16479 - DNA, 225 bp, Escherichia coli
atgatcggaagcatgccaggtcgtaatcgattcagatgccattttgcaccttcagaatttgagcctgctacagttgttcctgataaggttctggataaatatgacgagtatttaccagagtctttgcttgcgaaagggtacgaggcaaaggcgcatgatatagaaagaacgagcatctggctgctgaaacaccttcggtggactggatatatagtcagggtataa

SEQ ID NO: 16480 - DNA, 360 bp, Escherichia coli
atgcgtatagagtttgttttgccttacccgccgacggtaaacacctactggcgacgtcgtggcagcacatattttgtatcaaaaaccggtgagcgttatcgccgggatgtggcgcttattgttcgccagcagcgactgaaattaaacctgtccggaaggctagcgataaagattattgcagagccgccggataagcgccgtcgggacctggacaatattctgaaagcaccactggatgcactgacacatgcggggttgcttatcgacgacgagcagtttgatgaaattaatattgtgcgcggactgcctgttcctggtggtcggttggggataaaaatcacagagctggagcgcgcatga

SEQ ID NO: 16481 - DNA, 1047 bp, Escherichia coli
gtgcgggtattagtgactcctgaaattgctcaccgtctggggattgtacttttcaggcccggtcctgatgcgatgcctttgtttatgcaggggcgtgtgctggtggagcctgaaccgaaaagcatgcgcgggctgccgtccggggtcgttcctgccgctcgccagccgctggcggaagataaatctctgctgccatttttcagcgatgagcgggtgattcgtgctgccggcggcgctggtgcactgtctgactggctcctgcgtcatgttaaatcctgccagtggcctcatggtgactaccatcacagcgaaaccgtcatacatcgttacggtgctggcgcgatggtgttgtgctggcactgcgataaccagctgcgcgaccagacctccgaatcactcgggcaacttgctcaccaaaacctgtcagcatggatgattgacgtcatacgccatgcaatgaatggcacgcaggagcgggaactgtcgctggctgaattatcctggtgggcggtccgcaatcaggtggcggacgcgctaccggaagcggtattacgtcgttcgctggggttgcgtgcggaaaaaatccgctcaatgtaccgtgaaagcgacatcgtaccgggagagcagaccgccatcagcatactgaagcagcgcacaaaaaatcttgcgccgctgcctcacgcccaccagcaaaacccgccacaggaaaagacggcggtcagcattgccgttgatccggagtctccggaatctttcatgaaacgacctaaacgtcgccgctgggttaacgagaaatacacgcgctgggtaaagacacagccgtgtgcgtgttgtggtaagccagccgacgatccccatcacctgattggtcatggtcagggcggaatggggacaaaggcccacgatattttcacgctaccgctgtgtcgggagcatcacaatgaacttcatgcggatccgctggcgttcgaagaaaagcatggttcccaggttgatttaatttttcgttttcttgatcacgcctttgcaaccggcgtgcttgggtaa

SEQ ID NO: 16482 - DNA, 279 bp, Escherichia coli
atggcgcaaaattccagatcacacaattctgataatctcgccgtccttgccagcaggcgcgggcggcgttctcatgcattcaaatctgactggttccagcatgatccatgcactgaagaacaggccgaatggctgatccataactaccgcagacgtgggtatgagtttaggaaagccctcagcctcgattatcgtcactggataatctacgtcagactcccttattccgaacgcccaccgcgtccgtcccgcacattccagcaacgcatctggaggtaa

SEQ ID NO: 16483 - DNA, 153 bp, Escherichia coli
atgcgaaggagctatgtgttttgtctggtggtggtttgcatcaccattctgatatttgtctggatggttcgcggttcgctatgcgagctgcacatcaggcagggaaacacagagctttcagcgtatttagcctacgaagttgaaaaacgttaa

SEQ ID NO: 16484 - DNA, 525 bp, Escherichia coli
gtgagcaagattgactatcaggcactgcgtggggcggcagaagcaataaaaatagcagccacaccacaaaaattgctggcatttcgtatgaaagccacacctcaggttgtgttggaactgctggatgaactggaaattaaaagcaaacgaattaacgagttaatcaagggtggtgaaaacgccaaatacgtgactgaaattttccgacttgagaaagaacgcatggcgctggcggcggagaatgcggggctgaataaatttatcgtacagagttgctacgtgtttgatggcgagcaggatgaactatctgatgcgtatatctgcgcaacagacggaggtatgccgcaaaccccggctacagatgctttcctggctgatgtacgggcggtggcgtttgacgaacttcgcgcggcgtttgtcaggcacgtaaaagttgcaggactggatgaggccgataccgtaacgcttaaggaagtgacagaagcattgttgcattgtgcggaacagattcgcgcgcctgaataa

SEQ ID NO: 16485 - DNA, 396 bp, Escherichia coli
atggcgaaaccttttacacccgaacagcgggaagagctgaaggcacgaattatcggattggtacgcaaaaatggacgcatgacgatgtcgcaactggagagagcgacgggagctggctggcattcggtccggcgctgccttgtggatgtactggcttgtggtgatttatacatgtccggggaatacggtgtttttgcatcagagcaggcgtatcgtgaatggcgtaagacaccggagaaaacaactgaccagacactgattcgaaagttaccagacggagaaatacgccgctacgacaggagccagaacataatctgtcgcgagtgccggaagagtgaggttatgcagcgagtgctggcgttttatcaggggaaatttcaggaggtgatgctgtga

SEQ ID NO: 16486 - DNA, 1572 bp, Escherichia coli
atgaatgtagaaaaatttgactggacagaagagttacatcagaccatggtgaagagcctggttacatcattcgggctggattttctgttgttaaatgatcgtaagggtggtgatgttgacactatccataatgtgcgtaatggcatttatgccacggaggctgagcgacagcggtatgaaggtcgtggcgactatgattctcatcattaccacagccatgagaactacatcgcgacgaaccggaaaggaaagcgtgcacatcaggcagggactcttactgatgcatatacaggcgaagtgtttgcttcagacgataaaaaaaatctggatcatattatttccgctaaagaaattcatgatgattcggggagaattcttgctggacgggatggtgcagaactggcaaatgacgcttcaaatctggcattcactcatgagtcgctcaataaatcaaagaaagcagactcaatggatgcgtttatttgcacgctgcagaaaaacagagaagatacgttaaggcagatagcagagcttgaatctaaggcaacgctgacagaaaaggaaaaaaaacgtctgataagtctgagaaaaaaatctgatgcagatactgagcgtatggaaagggctgataaatatgcccgggaaaaatacgaggccacgattaatcagagctattacctgagcagtaagtttgctactgctgtcgccagtgcttcacttaattccggttttcgtatggggacgcgacagatgctggggcttattcttgccgagatctggttcgaactgagggaacgaatcccgcatattatcagacagcaacggaactcattcagcgccggcaaatgcctgtccgaaataacgtcagcattacgtgcctgccaggaacgagtacaggaaaaattcagttcttttttaattgcttttaaagatggtgtcatcggagggatactgtcaggtattaccacaacgctgttaaatatattcctgacaacggaaagaatgattgtccggcttatcagggaaatgtggaacaatctcgtacaggcctttaaagtcctggtatttaacccggagggattatcgccggggcagttagcaaaagcggttactaaactgatagcagcaggtgtggctgttgccggaggggtgatgataaatgaggcgatggcgcagatccttatttttccatttggttcagagcttgctgccttttgtggtgcgctgacgacaggtattctcgggctggtgatgaattattatctcgaatatagcgaggttatgcagcgggtatgggcatttctggacaaatttaaggacaagttccggcggtcactggaatactttcaggcagtcaatgctgaacttgatcgctaccttgtagaacttactgcactggaattttctgttgatgctgccgcgttaaatcacttttcgcttcatctggatagcgtaaacagtgagatagagcgcggacttctgctgagagaagaagtcagccgacgagggattgcgttgccgtttgagtcagggaatgtggcttctgttcgtgactggttaaataagcgatga

SEQ ID NO: 16487 - DNA, 474 bp, Escherichia coli
atgtgcaaactgactaaagaagaagaatacagcatcatcagtcggacaatgacaaatattcgttcactgcgcacgtatgtacgcgaacttgattttgagcaattactcgacatgcaggaaaagctcaacactgttattgaagaacgccgtgaagatgctgaacgaaaagcggctgaacgtaaggaactggaaactaaatgtcaacaggtatttgagtacatcgtttctgtggggcttgacccggaagaatggcagggtccagtttctgctattgcagggacaacggaaaccaaacgcaaacccaaaggcggtgtgagaaaagcgaaatatatctttgaggatgagaacggcgaaaccaggacgtggtctggtaacggtaaaatgccacttgctttgcggaaacaggttaatggagattgtaccctggaaactttcctcattgaaaaccccaatcaacatgaacaaagtgaataa

SEQ ID NO: 16488 - DNA, 747 bp, Escherichia coli
atgaaaaaggttattgctgtttcagcacttgcaatggcaggcattttttcggcccaggctctggctgatgagagcaaaacaggcttttatatgaccggtaaagccggtgcttcagttgtgactcagactgaccagcgcttccgtcaggactttggggatgatgtttataagtataagggcggtgataaaaacgatactgtatttggtgcaggccttgcggtgggctatgatttttatcaacattacaacgttccagtgcgcacggaagtggaattctatggccgcggagctgcggactcccgttatacactggatacatggcattctccgatgggggatggtggtcgggaagacacacagaacaggctcagtgtgaataccctgatgatgaacacgtattatgatttcagaaacagcagtgcatttactccatgggtatctgttggcctgggttatgcacgggtacatcataaggcgacatatactgatacctcctggaatgaatctggcgagataagtgatatttctgcgttacattactcgggatatgataacaacttcgcatggagcattggggccggtgttcgctatgacgtaaccccggatatcgctcttgacctcagctatcgctatctggatgctggtaaatcctccctgtattacaaggatacagaaggggataaatataaatcagaggctgacgttaaaagtcacgacattatgtttggggtaacttatcatttctga

SEQ ID NO: 16489 - DNA, 195 bp, Escherichia coli
atggtatatcctcgtccgccaatgacttttatttgcacgaaatgtaactggaaaaaaacaattacccatgttaactgtataagacctttttcttcatgcccccaatgtgggtgtaaagaaattgcggtacgtcgtgcaggtgtcatcccgattttattggcagcatttacgtcaggttcttttcctgaacgttga

SEQ ID NO: 16490 - DNA, 618 bp, Escherichia coli
atggatgtgaacagggcacaatgtataacgacgaaagaatatttcagccgtctgtacgatgatatttgtcataatctgcaacagacaacagatgatatttcaaaactacatgttgataatgaagacgggaaaaaacagcttaacgtaatgatggagcaactgcagacattacagaataattttaatcataagctgaattatctgaaacagcatgctgaatgggacagatttactgttgccttttttggtgaaacaaatgctggtaaaagtaccattattgaatctttaagaattttttttgatgaactctctcgcaaacagcttttacaaaataatcagaatgatttgcaacaggcggagcaggtgttgtgcgaaaacctggaaatgctacgtcgtgatttaatacaggcatatagcgaagttgccaataaaactcgtgacatcagattgtctgctaagtgtttgcaacaaattatcgctaatgaaagtcagtctcgtttgcaaattttacaacagcaaactcatgctaaagttcgtttcacgttattagcgactgcgtgtggctgttttatagcaggtgctggcgggatggcagccttgttgagtcaaatatggtag

SEQ ID NO: 16491 - DNA, 429 bp, Escherichia coli
gtgacgccaccagtcatcctcgcgatgaaaatccggcatctcaatccccgccagatgataagcatcccggaacagcgtgtaacagtccgtcaccccgtgctcaaagcgccgcccggtgagatgcggcacacagcggaacttatgaatcgtcccccggcagaccagccaccacggcaaatcactctgcacctgcagccgccggtcggcctcactcagccagggcagaccaccggggtgactgtggaccagcgccacaatctcaccctgcatttctgcctgcagccagtcttccggcgacatacggaaatacgcctccggctcaccggagatattcacgcaggggaaatatctttccccctccggcgtgcttaccacgaagccgcacgactccgctggcgcacatcgccgggcgtgcgccagaatcgctga

SEQ ID NO: 16492 - DNA, 1764 bp, Escherichia coli
gtgagccgtgttcctgacggcgttgctgaatacagcgtatgggggctgaagctgccgacgctgtgccagcgcctgttccgctgcgtgagtatccgtgagaacgacgacggcacgtatgccatcaccgccgtgcagcatgtaccggaaaaagaggccatcgtggataacggggcgcactttgacggcgaccagagcggcacggtgaatggtgtcacgccgccagcggtgcagcacctgaccgccgaagtcaccgcagacagcggggaatatcaggtgctggcgcgctgggacacgccgaaggtggtgaagggcgtgagcttcctgctccgtctgaccgtaacagcggatgacggcagtgagcggctggtcagcacggcccggacgacggaaaccacataccgcttcaggcaactggcgctggggcgttacacgctgacggtccgggcggtaaatgcgtggggacagcagggcgatccggcatcggtatcgttccggattgccgcaccggcagcgccgtcacagattgagctgacgccgggctattttcagataaccgccacgccgcatcttgcggtttatgatccgacggtacagtttgagttctggttctcggaaacgcggattaccgatatcaggcaggttgaaaccacagcccgctaccttggcacggggctgtactggatagccgccagtatcaatatcaaaccgggccatgattattacttttatatccgcagtgtgaacaccgttggcaaatcggcattcgtggagtccgtcggtcgggcgagcgatgatgcggaaggttacctggattttttcaaaggcaagataaccgaatcccatctcggtaaagagctgctggaaaaagtcgatctgacggaggataacgccagcagactggatgagttttcgaaagagtggaaggatgccaacgataaatggaatgccatgtgggctgtcaaaattgagcagaccaaagacggcaaacattatgtcgcgggtattggcctcagtatggaggacacggaggaaggcaaactgagccagtttctggttgccgctaaccgtatcgcgtttattgacccggcaaacgggaatgaaacgccgatgtttgtggcgcagggcaatcagatattcatgaacgacgtgttcctgaaacgcctgacggcccccaccattaccagcggtggcagtcctccggtattttccctgacatcagacggaaagctgaccgctaaaaatgcggatatcagtggcagtgtgaatgcgaacgccgggacgctcaacaatgtcacgattaatgagaactgtcagattaaggggaaactgtcagccaatcagattgaaggcgatattgtcaaaacggtcagcaagtctttcccccgcacgaacagttatgccagtggcaccatcacggtaagaatcagtgatgatcagaaatttgaccggcaggtcatgataccgccagtgttattccgcggtggtaagcatgagaatttcaacagtaataaccaacagtcatactggtattcaacctgccggttaagagtgacccgcaatggtcaggagatttttaatcagtccacgacggatgctcagggcgtattttcctcagttatagatatgcctgccggacaggggacgctgacactgacattcaccgtatcttcatcaggagcgaataactggacaccaacaaccagtatcagcgatctgctggttgtggtgatgaaaaaatccacagcaggtatcagtatcagctga

SEQ ID NO: 16493 - DNA, 2445 bp, Escherichia coli
gtgcgtgcaaaaacaaaattaatagcggggagcgcgcctccggtgttttttcgccgtgctgcactggcgcttgctatatcagcggtgtttgccagtgttgcgaccgttgccggtgaaaagctggatatgtcctttatccagggcggtgccggagttaatccggaggtctgggcggcgctgaacggtaattatgcgccggggcgctacctggttgacctgtccctgaacgggaaggagagcggaaagcagatactggatgtgacaccggaagacagtaaggaactgtgtctgtctgaggcatggctgacgaaggccggcatttacgtcagtgcagattactttcgtgagggatatgacgccacacgacagtgctatgtgctgacaaaagccccgtcagtgaaggtggattttgatgtttccacccagagtctggcgctgtccattccccagaaagggctggtgaagatgccggagaatgtggactgggattacgggaccagtgcatttcgcgtgaactataacgcgaacgccaacaccggccgtaataacacctccgcctttggctctgcggacctgaaggccaatatcgggcactgggtggtgagttcttcggctacggccagcacgggtgacagcggggacagctctgccacgataaatatgtttacggcaagtcgtgccattcgtctgttaagtgcagaccttctggtcgggaagacgtccaccggtgacagcatgctgggcagcacggggacgtacggggtgtcactgagccggaacaacagcatgaagccgggcaacctggggtacaccccggtgttcagcggcattgcgaacgggccgtcgagggtgaccctgacacagaacggacgcttgctgtattcagaaatggtgcctgccgggccgttctccatcacggatgtaccgttgtacaccagtggggatgtgaccatgaaggttaccggtgaggacgggcgtgagcagacccaggtctttccgctggcggtgatgaatggtcagctgagtccgggagagcatgagtttaacctggctgcaggtctgccggacgatgacagtgatatggatggtgcggtgtttgcagcgtcatacggttatggtctggagaatctgacactgcgtacggggctggtgtttaaccaggactggaaaggtgccagtgccggtatggtggtggggcttggctggctgggggctgtgtcagttgatggggcatatgcatcagcgaaatatcgcgatggcagccacagcggtaacaaggtgcaactggcctggagcaaacaactggaaaccaccaacacgggtctgcgcctgagctggtcacgacgaagtgaagaatacgaagacatgtcttcctttaatccgtcggaagtgtacagccaggtgaaccaggggcgccgggtgaaggatgagtggagtgccggcatcagtcagccggtcgggaagctgttcagtctgtcactttccggctggcaacggagttattacccggcctctgcaatcagtgctcaccgccagcaaaaggacagcggtaaggagagaggggtgaccggcacgctgagcacgcagattgaaggtgttggcgtgaacctcagctggaccggttcgcggaatgcggaaggtgaaaataactggtcagcatccgcttctgtttcggtgccgttcatgttgcttgaccgtcgttacagcagcagcacttcggtgagcaccggtaaggatagtggcacgggcttcagtacggggctttccggttcgctgaatgaccgcttcagctatggttttggtggtggtcgtgacagtgatggtggtaccagcagttatctgaacgcgtcgtacagcggtgaccgggcttatctgagtggggctctgaaccagtcgtcatccggaggcaccagtggctctgtgtcagcgagtggctctgtactggcagtgccggcggcgaaagacatcatgttcagccgtacgactggtgacactgtggcagtggtgaacgtgaaggatacacccggagtgaaggtgacgtccggtgacggacagacaaacagtgatggcaacctggtggtgccgctgaacagctatgactggaacacggtgacgattgatgcgggcacgctgccgctgagcacagaactgacgaacaccagtcagaaggtggtgccgacggacaaggcggtggtctggatgccatttgatgccctgaaagttaagcgttacctgctgcaggtgaagcagcgtgacggtgagtttgtaccgggtggaacctgggcgcgggacagtaagaacacaccactgggctttgtggccaacaatggtgtgctgatgattaacgcggtggatgcgccgggtgatatcaccctggggcagtgccggatacctgcggcgaaactgcaggatactgagaaactacaggagattacgtgtgagtaa

SEQ ID NO: 16494 - DNA, 543 bp, Escherichia coli
atgaaaaatttatcgctttcagtacttctgcttctggcaggaggcggggtttctcacgccgctgttcagaaaaccgtattcagtgctgacgtggtggcttcggcctgtcatgtggtggtggatgcggatagcaccggcaacagtggccggctgacattcgggacttaccgcaagtccacgggggcgtctgtgccgccgcgtgacttcactgtgcgtctgtatgagtccggtgccacggttcagggctgctcagcctttcaggcagggcaggtcgccaccctggattttggtaacccgggacagttggacgcagggggcgtggtcacccgcggtgccggtgatggtattcgcgtggatgtgcgggcggtggatacacaggcagattatcgcggacgtctgactcaggacagtcattcggtgaattacccggtggagtttgctgctaaaggacagtttcgttttcgtgcgcagccggtgtttccggcgaacgtgaaagcgggggaatacacaggtgcactgacctttgtggtcacatatcagtaa

SEQ ID NO: 16495 - DNA, 300 bp, Escherichia coli
atgagcgacagttatctgtatctgaccaagaagcacgggcgtactttgtcgcccggaaaaatgtcagagagccagttctggttattagctgaaatatctccggttcacagtgaaaaggttcttaatgcgctgagggattttctggttctgggttatacccgaaaagaagcctgtgagcgacacagtgtttctccggggtatttttccggggcgctgaatcgttttcagcgaatcagtcagacggtggacagattaattcctttttacctgtcagagacccgttcgccatattcggggtga

SEQ ID NO: 16496 - DNA, 1746 bp, Escherichia coli
atgacgcccggggagaggagggtggcttcacgactggagagctttctgaatgatgactgccttgtctggtacgatattccggtgggacggaaaaaccggcatccggattttgtcattattgatccggagaacggactggtatttctggaggtcaaggactggacggtttccacgctgcgccaggcaaatcaggagcaggtcacgctggaaaccgacggtcttctgaaatcagaaatcaatccgctggtacaggttcgtcgttatgcctgtgatacggttaatgccttacctgcagacccgggcttacggcagaatgacggtcagtataagggacggctgaacctggcctgggcgtatggtgtggtgtttacccgcattacccgtcagcaactgaagacactggcagggaatgatgagaatgcggtggaaaaaatttttccttcagcacagacaatctgccaggatgaaatgacgcagtctgttttacctgaggtattccggcaaaaaattgccgggatgtttaccacgggattcagaacccgggtgacaccccggatgagagatattctgcgcgcccatctgtttcctgaagtgaccgtgaaacagaactcacaaatcaaaatcatggatatccagcaggagattctggccagaaatattggtgacgggcatcgtgtcattcacggtgtggccggttccggaaaaaccatgattcttttgttccgttgcctttacctggctgaaaccacacccggaaagattctggtgttgtgctacaacattaccctggccagttatctgcgggaatgcattgaagccagaggggtggcgtcacgggttacggtatcccattttcacagctggtgtgcctcaatggtaaaacgccacggtattcaggtgacggctgacagaaaggattacccggagaaatgcttcagtgcactggaagaggccgtggacagcggaaaaatcacccgaaccggatatgatgctgtactggtggatgaggggcatgattttgacagtcgctggctggccctgattgcccgtctgtttgataacgcatcccgttcactgctcctgatgtacgatgacgcccagtccatttaccggcgggagcgggccctgaacttttcactggccagtgtggggattcaggcgcagggacgcacttctgtcctgccggtcaattaccgtaatccgaaacgcattctgcactttgcttatgcattctcccgcgagtattttgaaaaacatcagaaccgtgaaataccactcgttcagccacaggcgggtggtgaagagggcacagaaccggaaatcctgcgttgtgcttctgaacgtgatgaagccagacaggttgcagactggctggagaagcgccatgccctgtgcggtcactggagtgatatggctgttctgtgtccggcagagttttcagtgaaacaactgaaagaggttatgacacaacgcgggataccgtttgccacctgctttgacagtgaaggtaagaagacatactcgcgacgcaaggatgtggtgcatttactgacgtaccagagcagcaaggggctggagttcccgtatgtggcggttatcaatgcgtctttcgttcattctggtgcggcggatgagtctgaagtgattccggtgctttatgtggcgttcacccgggcaacccgtgaattactggtgacctgttaccgtgaaaacagtatcagtcgtcaccttgaggattttgcataa

SEQ ID NO: 16497 - DNA, 537 bp, Escherichia coli
atgaatgattccactatttcatcgttaaaagaaaaactgaatacatccacatggcatctggtattactgggagccgccacatatggtgtttatccactgatgtggctgtataaatatcaggacaccatcatggatgaaacccgtcagcgattctcctcttctgcaatgattatctggatggcagtatgcctgggaatatccgccatgctgaaaatggcttttccggttcagatcgacgaatacggtgacgtctatggttacagccgcggtgctgaaaccatgtacggtattgccacgctggtctcgctggtctggattatcctcaccatcatctgggctttcagagccagagcggctctgcaacaatatgcactgacacagttccgctttgaattaaaaatgaacccggtatggacatttttatttcacattttctacatcaattattgtattaatgccatgccggaatcgctggcaaaacaccggataatttatggtgaaccagactcccgcccccgggataactcacctcagtaa

SEQ ID NO: 16498 - DNA, 1302 bp, Escherichia coli
atgctgaacaaaaaactgaacatgcgggtattacgtcattccctgatgatagcttcggcaatatccgttcttaccggttgcgactattttaccgacaactgggaaatcagaaacggcgcatgccaggccatcagtagtgaaggaaatgaaactgccctcatttctgatgaaggtatggtttttatgagcatggacaagggatgtccggataatctcgattttccgggaacccgctttatcactaccagaatcaacgaccagacctggaaatctctcatggtatgtaacagcgccacgggatttcgcagaatggtgacgctgggggataccccccgtgcagcaccggatatggcagcccgtgccataccggctttcacacacttcatgggagcaaccgttaccattgaagggaaaacggccaccttccgtaaaggtaacttcaccgaagcctgtaagacatttattccgaaatcactcagccacacggatacccggaagaacaaaaagatgacactggacgagtttctgtattccggagacaggcaaccgcactcccctgaaacagaaatcaccagtctgcaggaacggatgatgacagaatccgggtatgaaaaagtgaatggagaatggcgtaagaaatcacggatgcctacaggcggctacaccaacgaacaggcaggctattcatcaacaacaaagcgttttaataacgccgataacaatccaccggatacacatattcagacgccggcttacgatgccaccgtcacttctcccgggaaaactgataccgggtccggggggcaaaatccccctgaaccggaaaaagccaggccagcagcacctgattcgcaatctgcgatcccggcgacagcactggcagactgtacgctcacaaacggtaaggctctgtctgctcttgcacaggatggttttccctacacctaccaccttctcaaaaaagacggcacgctggagctggaattaaaagaaggcatgtttggcgtcagtgcctttcattactggcgcgatcttaaccggggtaaaggaaaactgaaatatctgcgttttcataaaggttcatacgactatgtggttgtgcagcgctacgacggagaaacaccggcatttgatggcattctcgtgtttaaccagggaacccggattgccaccctgaactgcagaaatactttctctgaattgttcgccattgagcagttccctgacaacagccacaaagacaacgaggatatggctgattttattgaaggttacactgtgagaggagaagcagtccgctaa

SEQ ID NO: 16499 - DNA, 960 bp, Escherichia coli
atgacaggattatctgagcaggcaaaagaacttcatatgatgatggggcggagaaaaccgccgaagatacaggctgttcttaacacccgatactggaaaaacacagaaaaaacgataaaaagaactgtaggtatgaatattcatacgctcagtcagtggtgtggagaacaatatgagaagatgtttatttcaaaagtggcagaagtctatatgcttcaccatacggcagcaatattgaggcgtaaaggggtttatgtggatgtttttaagattccctcaaaaataatgaacccgcctgaagcgagagccaattgtactggttgcccttcttctcagaatgtctctcctttttttgcttattctgagcctaacaccataaaaatttctgaaagtataagaataaatcattcatatactctagttccaacctatataaggaaaaaagtctcatctctgatgggggattcagaacttcgttatgtgtattcattttccggtagtttatattcttatcttcttgagaaacatccattgtcagaagttaaaaaactgatggaggatttaccctcaacggaagatgaaaacttcaggaggaatgaaacaggcagcgagcatctgaagaagattctcggtgtaaaaacaagagtatctgaactttttataagtcagttttctttgctgtttagatttctccacactaaagaatatgtaagagacgttatatttaagcctgtagaaaatgatatgtcgttaagtgaagaactggcccatgtgttattttttacattattgcattcggatataatgtctaggtttagtttaagagaattattcttcagaatagaaagtggacgcgataataataagaaacgggatcttatacgcgaatatgtaagcgatgtaacaaaagaatattcgttatgtatacctggcgtagtcagtcggcacgataaaaaatag

SEQ ID NO: 16500 - DNA, 804 bp, Escherichia coli
atgagcgcagatggcatttccgatttaataaaaccagaaatatttcttgtcattttccctggtacaacaaccacagcaaaacggggtggcgccgggtggttgaataataaaagagtcgtgttctgggtatggctttatatcagtaaagccagttataagaagatggggatttttcagcgcggttctgcgcccgaatcaataccctatcgtgaataccattttccctcataccctgacacccatgaaaaaaggaaaaaggtattacgtgactggatatccttcatgcgctcccgttttaatataaatcagatagctcagttctgttatcgtatggaaaatgaatgggcattcacctttgataatatccacgttccacgacactttcgggagggaactgatgacacagaatggtcatggaattacattaagaaaaaacgattattttccctgagcggcctgcaacacattcagcctcagaataatgctgaacgaaagcttctcattaatgctttttttgatacctgtcttattgaaaacaaccctgccgacgatcttgagataaagaacatattactcagaaagatgaatgcagcgttttataaaagaaagagccgggcgcgtgcgcgaattcactcccggaataaccaacagatgtcagtcagttcaggaacggataaacaggtaaatattcgtcttaaggatttgcagtatcagcaacttctttttatcacgcagaaagaaaacaaaagtaagtcagaaatcataaaggaactcattaccagagcatacagggcgatacaataa

SEQ ID NO: 16501 - DNA, 450 bp, Escherichia coli
atggaaaaggcttacgaagaatacttcgaaggccttgccgaaggcgaagaagctctcagcttcagtgagtttaaacaggcactcagaataagaatgtgctctcacaatgacgcggagcacaaatatgagaagcaaaatcagaccgcagaaaattttgttctggaacccggagaaacgcttttcaaaattcccgttacgtgccccatttgcggttttacatcagaagaacttgacgactcctgtaacaatcaggaaacaaccaagtatgtcgaagatgataccgagtgcgcacgaagaacgattatatccacgagtccaaactccagggccaataaatctcactttgagagggtgattaatccactcccccaaaccaataaaaaagatgccggaggacaaaaaaacccaatggaacaacgggatatctgtcaaaaaaagacgttccattaa

SEQ ID NO: 16502 - DNA, 552 bp, Escherichia coli
atggcggcagtggcggggttgatttttcctgctgagttttcagtgtgctgccggttgactctggcgcgggcaagatcaacaacagacgtgtatttcccggtttctttgcgttcggcttcgcgacgttttttccaggtgcgtaattctgtctggatctcaggccattttgcacccggcttacatttatgtttaacccacccgatggcgaacagctttagttctgaatacatgacgttaacttcaggcattttcatcaatgcctcaacgatatgcccgtcgaatgttgccatgtcctcctgcaacaattcctgtgcactaatcaccatatcaacggtgatgttttcacatgtaccgaacttaaccaggaccgcgttctgtacttcaagggacagcttgtcaaaattgacgttcatcggatcggattctggttcgatcgggacaaaagaggctgactcttcatcccagcggttttccagcatatattcggtatcccaggagtcgatggcagggcggggcatgccgggtttatcctcgcaaacaagaaatttataa

SEQ ID NO: 16503 - DNA, 1035 bp, Escherichia coli
atgccaccacatgtaaagtttaatatagataattatctgaaaaacattcatgacattcgcgtctacaatttttacagaagatttctctacttaaatggcatgcagatcagcgatgtgaattactatacggatattgatagttgtaggagagaaatcactcatatttttgactgtgcagatatggtcacacaggaaaaaaaagatttattaatgagaatggaaattgccagagagaaggaaattctcccgttgcatgaatttggctggttacataatgatgaacgagcaactttctggttatgcagttatttattttacagtgataactataataagatgattactggaattgaaaattcattcattcaaaacgcctcaataatgccaggcacaatccaatacccccctaatgaatataactcactgggatttcatgacgtgcctgatagtcataatgggagagttgaacgcatcatcagattctttgatacattaacccagcttccctatcataaagataaaacaaacatgactgctaatcctcttatgaaagatcaggtgctttttaattttaaagacaaatggaaatcaatatatcaaaaacctcttcctgtcaaatggctaccaaatcaggaagaggctgtttcatgggcgtgggattttttgaaaaaacacgttgacaattgcgcaattaaagggcaattcgagtgtgatgttcctcatgtcacacgttcatttgtacaaaatacaaaacctctaaatcatgcagaaagattactatctgtacgtgcagcatttgacctttgggaaggtaacgatgacagaaagaaactacttttgatgaattttaataaagcgtggaatcagaaaaaacttcgtgaaacgcgtgttgataaaaaagcattaaatacgtatttaaaaacaaagacaaaaatgcaactagatgagttagctgaacattatgatatgcgtataagcgatacgctggaaaaattaattactcagcattacaagcaactgttccagggcaaataa

SEQ ID NO: 16504 - DNA, 228 bp, Escherichia coli
atgaagataaaaagaacattacttataatgctttcccgatttatccgtggcgcaggtatggggttaggtgcgtcgggtattgtatttacagtctggttcttttttctctcatcttctgaatttaaatatctgtggggagggctctctgttgcgttattttttgtcggttatctgatgtatcgatttgcatatgcatatatttacgatgaatgggatgattatcagtaa

SEQ ID NO: 16505 - DNA, 642 bp, Escherichia coli
atggacagtgctaaagaaattgcccgggatatgctggagtccgtaaatattaatggggatgggtttctgggggccgtcgggaagggactcatatctttgccagtcagtctcggttatatgggatatgattttatagataccgggcataggcgggaaaaccagaatgacaaattcagaatgaccagactggtagaaaaaggcattttcagccgtgatattattgggaaaattatcagtatttgtcttgaagactttgtatcccggatcaatatggaaaaaataggctccattgtgaagaacgtttcaggagacctggcaggcagaatggcatttgctgaattaaccggggttaaactgggtgaggttctggcatccagagggctggcatctttttttgccgggagttttgccgggttgttattatctgttggcgcagagacatcgcgtgcgatttacacatcccgttttctgaaagacagaaatccggtgttgcatgataagctgaaagctcagggggatttggaccttttgtactttcttgttgaagatattgtgcgcccgtttgaacgagcctgtattgtcgcagaccgaaattcggctgagtttgaccggatatgcgaatattttttcggtggtttatga

SEQ ID NO: 16506 - DNA, 1020 bp, Escherichia coli
atgaaatatacaccggttggcgttgatatcgcaaaacatctgattcaggttcacttcatcaatgagcacactggcgaagtggtggataagcagcttcgaagcaaggattttctgacattcttcagtaaccgggagccttgcctgattggcatggaggcttgtgggggctctctgcactgggcacgtgagctgaaaaaactggggcacgaagttcggctgttgcaggctcgcttcgttaaagcgttcgttatgggcaacaaaaacgatgtgatggatgcgcgtgctatctggatggcggtacagcagcccagtaaagaaatcgccgttaaaacggaagagcagcagtcagttctggccctgcaccgttcgcgcagacaactggtgaagttcagaaccgcgcagattaatgccctgcatggcacgctcctcgagtttggtgaaaccctacacaaaggtcgggcagcgatggacagagagctaccggcagccctggagcgaatgaagacgaagttgccgccgtatctcatcaccgtgcttgaagaccagtacaccaggttgagtgagctggatatgctgatagatgaccttgaaaagcagcttaacagcgtggcacggcagagcgaaacctgtaagcgcctgatggaaatccccggtgtggggccgttaatcgctacggcggcggtcgccaccatgggaaaggcctcagcatttaaatccggacgtgagtttgccgcctgtgtcggtctggtgccgaagcagacgggctccggtgggaaggttcgcatgctgggcataagcaaacgcggggatacctacctccggacattatttattcatggggcaaggtcggcagcattgctgaccaaagagcccgatccatggatcacggagctgaaaaaacggcggccgacaggtgtggctatcgtggcaatggcgaacaagctggcacggacagtgtgggcaatagtcgctcatgatcgtaagtacgacaaaaatcatgtcagtatcaggccatattaa

SEQ ID NO: 16507 - DNA, 225 bp, Escherichia coli
atgttgcctgtaacgacaaaacttcctgctcactggtcggagcactctcgtgtgcgttatgtgtggggtttagatctttgggttcctttgggttccgtgatccgtttttgggtgtctttgatggaaaatttgggtgtctttggttattttccatgcagaaaagagttccgtttttggggctgttttgtgctgaaacataaccgtttttggtactgtttttattaa

SEQ ID NO: 16508 - DNA, 552 bp, Escherichia coli
atgaaaatcacccctgaacaggcttgtgaggctctggattcttgggtatgccgaccaggaatgacacaggagcaggcgacgatattaatcacggaagcattctgggctctgaaagaacgcccgaacattgatgttcaacgcgtcacgtttgatgatggcgcggttgatcaacgggcactgggcgttaaccgggtgaaaatatttgaacgctggaaagctatcgacaccagggataagcgggaaaaatttacggcgctgattccggcaattatggaggctatccggatcagcgatttcaggttgtattgtgaaattactgacggaaaaagcattacgtacatgatcgccgggttaaacaaagaatatggcgatgtggtggagtccgggctgctttttgcggatccagctgttgtggaacgtgagactgacgagcttatagaaaaagctattgctttcaagcatgcgtatcgtcagcaataccaacattactttgcagataaacaaatatctgtctggggttcgtatgagtatcgatgcactacgatgggctaa

SEQ ID NO: 16509 - DNA, 702 bp, Escherichia coli
gtgaatttaaaatctgtttcacttggtgatgttaaaactcttgcaaaacgtctttgctcccacactcgagatgtcactttccctttaacgcactcctctgctttaaatgttgtctctgcaatgctgggataccgcaattataatactttgcgggctcaatattcagagtcccagaaaagtaaagaacctgttaaaaaacacaatgattgcagtgacatggaatcatttctttcacgggtttttgatttaaataagatttgcggggcaaacatgcagagcatatatctgcctgcattttgtgctgctcagtttagttccacagaaacatctgttgttaacgcgctaaagtcccttggacgccactttattcttgttgatgcgtgggggaagagtgagcgtgatatttatagtgctattattggtaagtcagtaaaaacaatatcgcttgggtggcgggcaaccagagaacaactgcttttgaatgacactatagttgttttgagcggtatatcacaatcaactataaacaagaaggttggttttgttcgtggcctgattaaaactctggatgatgctcacttcgaaaatataattccggcgggtaatttgatttttatagactccccttcatttcttgaaaaaaactgggatgttattggcgcttactttgctgtttcaggtccggcttactatatgacatag

SEQ ID NO: 16510 - DNA, 1338 bp, Escherichia coli
atgcactctcaaatctgggttgtgagcacgctgcttatcagcatcgtgttaattgtactgaccatcgtgaagttcaaattccacccgtttctggcgctgttgctggccagcttcttcgtgggaacgatgatgggcatggggccactggatatggtaaatgctgttgaaagtggaattggcggaacgctggggttcctcgctgcggttatcggccttggcacgatactgggaaaaatgatggaagtatccggggccgcagaaagaattggtctgacacttcagcgttgccgctggctttcagctgatgtcattatggtactggttggcctgatttgcggcatcacgctgtttgttgaagtgggcgttgtgctattgattcctctggctttttcaattgccaaaaaaaccaatacctcattgttaaagctggccattccgctgtgtaccgcattgatggcagtgcactgcgtggttcctccacatccggctgctttatatgttgccaataagcttggcgcagatatcggttcggtgatcgtctacggtttgctggttgggctgatggcatcactgatcggtggcccacttttccttaaatttctgggtcaacgactgccctttaaacctgtacccacagagtttgccgatctcaaagttcgcgatgaaaaaacactaccgtcattaggcgcaacgttattcaccgtactgctacccattgcgctgatgttggttaaaacgattgccgaattgaatatggcgcgtgagagtggtttgtataccttgcttgagtttattggcaaccctgtcactgccatgtttatcgccgtgtttgtcgcctattatgtgttgggtatacgtcagcatatgagcatggggacaatgctcactcacacggaaaatggcttcggttctattgctaatattttgctgattattggggccggaggcgcattcaacgccattttaaaaagcagcagtctcgctgatacgctggcagttattctctccaatatgcatatgcacccgattcttctggcctggttggtggcacttattctgcatgctgcggtgggctccgctaccgtggcaatgatgggggcaacggcaattgttgcacccatgctgccgctgtatcccgacatcagcccggaaattattgcgattgctatcggttcaggtgcgattggctgcacgatcgttacggactcgcttttctggctggtgaagcaatattgcggcgctacgctcaatgaaacatttaaatactatacgacagcgacatttatcgcttcagtcatcgctctggcgggcacattcctgctgtcatttatcatctaa

SEQ ID NO: 16511 - DNA, 714 bp, Escherichia coli
atggcgtggactgcaaacggcactggtggttctgttgagctgagcggtaccctgactccggtagaaaaagttaccccgtgggaagttaaagttggtgatgctgtaactggtctggatgcgcagattcagaaaggccagaaagtagttaatgttgctgtaaacaaggcaattccggttctgggtattcgtaatgctgatgagaatggttttaaggggcagaagggcattaagccccagattgactataagggggctgtaaatatcgatggtttcaaaaatggtgttaccactgtgtctatggaagtgcgaggtgagagtggggataaaatcggctctttagaagcaccattcagcgccgctgctatcgcttcttggagcggtgaatatacaggaagtcaagctgtgtatgcatctgaaagtaatactggattttacggtggtttaggtaagaatagttcggctattcgcgcttttggaagttttgaacttattaccgcattatcctctgaatttattgagaaatggaaacaacagggcgaatggcagggtgagggtaatgagctttttgaaggcctgacggccacctattttagtgcctatggtagtggtattgagaaaggccagactatcaagatcactcttgatcaggctgcttccggcgatgctccaatcaaatggaatgcagctctgccggttactgttacctacatgtaa

SEQ ID NO: 16512 - DNA, 234 bp, Escherichia coli
atggcacccgaaccggatgacgatgatgacgaaacatgggtactgttcaatgtcatgaacggtaaccgcgctgaaatgagcccagaagccgccggcattgctgcctgtctgatgacgtacagccatcacgcctgccgtacggagtgttatgccatgacggtccactattaccgtctgcgggattacgccctgcagcatccggaatgcagtgccattatgcgtatcatcgactga

SEQ ID NO: 16513 - DNA, 603 bp, Escherichia coli
atgaaaatcatcacccgtggtgaagccatgcgtattcaccgtcagcatcatgctgacagcaactggtatgaaaacgtgtatgaagacttcagggcggtctgtgacattttcgggattaacctccgccagcgcgttttccggctcagcagcggcaggtttatggaagagccgtgcatctggttcagcggattctgccgccagggggacggagcctgttttgaaggacgctggcactggcagtcagcaacagccaggagagtccgggtgtatgccccgcaggaccgtgagcttcatcgtatcgcggatgccctgcaggcggtacagaagcgtaacttctggcagttacaggctgaaatcagtcaccggggatgttactgccatccgtacagcatggatatcaccgtcacccggaacagtccgactggtcagactatgacagccgatgcggaagccgctgtcagcgaagccctgtgcgacctggccttctggttgtaccgtcagctggaaaacgagtacgactggctgacctcagacgccgctgtggatgaggccattcacatcaatgcatataccttcaccgaagccggtctgcgcgccggctga

SEQ ID NO: 16514 - DNA, 1029 bp, Escherichia coli
atgatgtcaacaagctatctaagacatctggtttttattagtttatctatcgggatcctgtgctatttatgggttagttctgatcaattaacctttacatttggcgtcgcaacagcagttgcatattatttctcagcaattgatgttttttctgtatataataatgccgtattaaattcaaagctaaatacgtactgtaatatcacaggcttacttataagtcttattgttagatatataatagcgcattatgagttggatattagatatttgtgcataccgattatacttgtaacatgtattccgtttgtaatgaaagtatatttatatcatagcaaaaaaattaattttcaacctagaattgataaaaaaagatatggtaaatatctaattaagacaggtacacctttagcgttttcaacagtttcagctattatttatacaagagttaccttattttttataatggcatattgtggacctggtgagctcggtatattctctgtagcaagtcagttagcaacatcgtggatgtttataacctctgcttttattacttcatatttcaccaaaatttatactgagaaagatgagtctattgcattaatacaagcagcaaagctaaacggaagtgtactattttgtgcaataattgtgattttaatattagttttaattggtaagaaattaatcttaacattatatggagtcgcctatctgcaggcatatgatgtaatgcttattttatgtatcaatacattattttcttgtatgggacctgtagctagtaaatttataatattcaaatctgggttttcttttttatcactgaaaatgatgctaacaatgcttttatcaataccttctgcgtattttctaacaaaagaatatggtatttatggtgcggctattagtacaataatcacagaatttttatccttaacattaatgaattatctatttagaaatggcattatatttaaattgcattataaaatgttttttattaacacatatgcgagaaattaa

SEQ ID NO: 16515 - DNA, 396 bp, Escherichia coli
atgctgttaggcgtccatactggattacacgatcagatttctgtccaggatattggtatcgacaaccttaccgcagcggatggccttgcagttggtcgcgcatcaggctttgtcgggcgggcaatggagcgtctgctggatggcttctatacccttagcgatcaaaccatgtatgatatgcttggcttgttggcgcaggaagaaggtatttgtcttgaaccttcggcactggcgggtatggccggacctcagcgcatgtgtgcatcagtaagttaccaacagatgcacggtttcagcgcagaacaactgcgtaatgccactcatctggtgtgggcgacgggaggtggaatggtgccggaagaagaaatggaacaatatctggctaagggccattaa

SEQ ID NO: 16516 - DNA, 243 bp, Escherichia coli
gtgctgccagcgcagcatctgcccaaccgcagcgacacaccggtgatcaagatcagcgccaaatggctgagagaagcgggatttgagatcggcacgggcgttaccgtgaagatctcggaaggctgtttgatcctgcttgcggataacaacgaagcacaggaactgcgcagggagctttatcaggttaaacaggtggttaagggggtgcaggacgggatgtttagtgtgctgaacgggaattaa

SEQ ID NO: 16517 - DNA, 492 bp, Escherichia coli
ttggcgatctactttgatgatgcgccgtcagcgcaactgactcatcactttctgatggatgaagaaatcctgccagtttgtagcccggaatacgctcaaagacatgctttaaccaacactgtaattaatcttcgccactgtacgttgctccatgacagacaggcatggagcaacgactccggtacggatgaatggcatagttgggcgcaacattatgcggttaatttgccgacatcttctggaattggctttgatcgctctgatttagccgttatcgccgcgatgaatcatattggggtggcgatgggaaggaaacgtctggtacaaaaaaggcttgccagtggtgagctcgtcgcgccgtttggcgatatgacggtgaaatgccatcagcattattacatcaccacattaccgggcaggcagtggccaaaaattgaggcatttattacctggttaagagaacaggtatgtccgtcttgtcagtatcagtga

SEQ ID NO: 16518 - DNA, 249 bp, Escherichia coli
ttgcattaccttgcagaccgcgccggtatcagaggccggttcagcgacgcagatgcataccacctggaccaggcctttccgctactgatgaaacaactggaactcatgctcaccagtggtgaactgaatccccgctatcagcataccgtcacgctgtatgcgaaaggactgacctgcgaagccgataccctcggcaactgtggttgcgtttatctggctgtttatccgacacccgaaacgaaaaagtaa

SEQ ID NO: 16519 - DNA, 378 bp, Escherichia coli
atgaaaacattatccgacacacatatacgggaggcatcgcgctgcccgtctcccgtcaccatctggcagacactgctgtcccgactgctggaccagcattacggccttacgctgaatgacacaccgttcgccgatgaacgtgtgattgagcagcatattgaagctggcatttcactgtgtgatgcggtgaactttctcgttgaaaaatacgcgctggtacgtaccgaccagccgggattcagcgcaagagcctcgtcgcagttaatcaacagcattgatatcctccgggcccgccgggcgacaggcctgatgacccgcgacaattacagaacggtaaatgacattacccaggggaagcatccggaggcgaaacaatga

SEQ ID NO: 16520 - DNA, 492 bp, Escherichia coli
atgaagaaaacaatgatggcagccaccctggtcctgagtgctctcagtattcagtcagcactggccgctgaatacagcgagaaaacgcagtatctgggggtggtgaacggtcaggtgtcaggtaacagtgtggtgaaggtgacccgcacaccgacagacccggtgctgtaccgctcaggcagtaacagcccgttacctgcagagctgataatccggcatgcagaaagccgcccggcttccggcggactggcaaacatcacggtgaaacaggctctgccggacaacagggaagcctgcatcaccctgaagacagccctgatggttgacggaaagaaagtgactctcagcgccagacagcagggtgaggatgtggtgataaccgtccctgaggcacagaagctggttgagttaagaacggatgcaccggcagagctggaagtcccggtcagttaccggggaaatctgcagatagcgctgcaggtggaggactga

SEQ ID NO: 16521 - DNA, 315 bp, Escherichia coli
atgaataccggtctggttctctattttgacattatcagcgccaggagccttaaccagaaccattgtgtcgcccagcggctgtccaaaggtgatgccatcagcatgagcaataatgccaccactcattccgtaataaatctggctgctgtcaccactccgactgtaaccgacattcgtattaccgtaagctccacgataattaagagaactgtaaccactggtgccagacgatgtattacccccgtgggtgttaccgacctgaacactataattcaggttattatccggcagcagagtgccataaactcccgatag

SEQ ID NO: 16522 - DNA, 234 bp, Escherichia coli
atgttgaccataacaagccacgacagcgtgttgctgcgtgccgacgatcccctgatcgacatgaactacatcaccagtttcaccggcatgaccgataaatggttttataagctgatcagtgaaggtcatttccctaaacccatcaaactggggcgcagcagtcgctggtacaaaagtgaggtggagcagtggatgcagcagcgaattgaggaatcacgaggagcagcagcgtga

SEQ ID NO: 16523 - DNA, 312 bp, Escherichia coli
atgaacaagaaaaccaaacgtactttcacccctgagttcaggctggaatgtgcacagctgattgttgataggggctattcgtatcgacaagccagtgaggcgatgaatgtcggttctaccacgcttgagagctgggtacgtcagctcaggcgagagcgccaaggtattgcgccctctgcaacacccattacccctgaacagcaacgtattcgcgagctggaaaagcaggttcgccgactggaggaacaaaatacgatattaaaaaaggctaccgcgctcttgatgtccgactcactgaacggtttacgatag

SEQ ID NO: 16524 - DNA, 327 bp, Escherichia coli
atgcatatgcacccgattcttctggcctggttagtggctcttattctgcatgctgcagtgggctccgctaccgtggcaatgatgggggcaacggcaattgttgcacccatgctgccgctgtatcccgacatcagcccggaaattattgcgattgctatcggttcaggtgcgattggctgcacgatcgttacggactcgcttttctggctggtgaagcaatattgcggcgctacgctcaatgaaacatttaaatactatacgacagcgacatttatcgcttcagtcatcgctctggcgggcacattcctgctgtcatttatcatctaa

SEQ ID NO: 16525 - DNA, 168 bp, Escherichia coli
atgcgtccggtgaaattgaatgaccttcatgccgggatgcagtggatcccactggtaccagaacagaacaatattttgccttactccgctcgtctgaagtcaactcagaagtccgtcaatccgggactggtgagggcttcggcaacctttacccttgaatttcaataa

SEQ ID NO: 16526 - DNA, 264 bp, Escherichia coli
atgggagttgagcagaataatttcagggacatgttgaccggttatctgtccggcccgccgcagacgcagcatgtgtttggtgtatccccggcggcccgggtcacgaacgcgggtctggcaggcgaagaatggctgaaagccttcccgctgcaggctttccagcactgtgatggtggggatccaggtatagttctcgcttctggatgtgtgcttatcttccccgaatacgctggggacgacctgcatcagttcttcgcgagttaa

SEQ ID NO: 16527 - DNA, 327 bp, Escherichia coli
atgcatatgcacccgattcttctggcctggttggtggcacttattctgcatgctgcggtgggctccgctaccgtggcaatgatgggggcaacggcaattgttgcacccatgctgccgctgtatcccgacatcagcccggaaattattgcgattgctatcggttcaggtgcgattggctgcacgatcgttacggactcgcttttctggctggtgaagcaatattgcggcgctacgctcaatgaaacatttaaatactatacgacagcgacatttatcgcttcagtcatcgctctggcgggcacattcctgctgtcatttatcatctaa

SEQ ID NO: 16528 - DNA, 327 bp, Escherichia coli; identical to SEQ ID NO: 16527

SEQ ID NO: 16529 - DNA, 414 bp, Escherichia coli
ttgctgattatcggggccggaggcgcattcaacgccattttaaaaagcagcagtctcgctgatacgctggcagttattctctctaatatgcatatgcacccgattcttctggcctggttggtggcacttattctgcatgctgcggtgggctccgctaccgtggcaatgatgggggcaacggcaattgttgcacccatgctgccgctgtatcccgacatcagcccggaaattattgcgattgctatcggttcaggtgcgattggctgcacgatcgttacggactcgcttttctggctggtgaagcaatattgcggcgctacgctcaatgaaacatttaaatactatacgacagcgacatttatcgcttcagtcatcgctctggcgggcacattcctgctgtcatttatcatctaa

SEQ ID NO: 16530 - DNA, 414 bp, Escherichia coli
ttgctgattattggggccggaggcgcattcaacgccattttaaaaagcagcagtctcgctgatacgctggcagttattctctccaatatgcatatgcacccgattcttctggcctggttggtggcacttattctgcatgctgcggtgggctccgctaccgtggcaatgatgggggcaacggcaattgttgcacccatgctgccgctgtatcccgacatcagcccggaaattattgcgattgctatcggttcaggtgcgattggctgcacgatcgttacggactcgcttttctggctggtgaagcaatattgcggcgctacgctcaatgaaacatttaaatactatacgacagcgacatttatcgcttcagtcatcgctctggcgggcacattcctgctgtcatttatcatctaa

SEQ ID NO: 16531 - DNA, 249 bp, Escherichia coli
ttgcattaccttgccgaccgcgccggtatcagaggccggttcagcgacgcggatgcgtaccatctggaccaggcctttccgctgctgatgaaacaactggaactcatgctcaccagcggtgaactcagcccctgccatcagcataccgtcacgctgtatgccagagggctgacctgcgaagccgacaccctcggcagctgtggttacgtttatctggctgtttatccgacgccagaaacgaaaaagtaa

SEQ ID NO: 16532 - DNA, 327 bp, Escherichia coli; identical to SEQ ID NO: 16527

SEQ ID NO: 16533 - DNA, 1410 bp, Escherichia coli
atgtcttttcttgatataaaaaaaatgagtaaagagaggtttaatgcttttgttgattggaccagaatgccaaatactgaacttttaggctatgagtttgagtggtactgtagtccgagagagttcctgctaggggcactattattggatcaaatcgatgaagattatagcggtattgttttagcaagagacttaagtgggagatatagatgtattgacctatttactagtgtttcagaaatgaattctgcacgagcaaaactaaagaaattaatgcggaagcatactaaattaaacgtaaaagtatttccacaaggtgatgaaacttataaagcaatggatttattcacacctatagttacaccagataaacttcatcatcatttttcattatttggtaaatacgcgaactggtcgcctgcaacagggataatcaaggaaatgatgaatcattttgaggatgtcgacgggaattttatagagcagtttcagacaacaggttttgatgcccggctatgggagttatatcttttcgcatatttacgagaggaacacttttggctagataggcagtttaatgctcctgattatgtggcacgtaagtatggtaatactatttgcattgaagctgtaacggttaatccaacagggaatgatattaatcaatcatctgaaatgctatctgaacctaaaagtaaggaagaattgctagagaaaatagagaattatatgccgattaaatttggaagttctctctattctaaactgaaaaagaaaactcgatactgggatctagaacatgttaaggggaatcctttaattttcgcaattgctgattttcatgaaccaaactctatgatttggtcccatagtgcactttggcagtatctttatggtattcgctatgagcatgttaaatctgaagatggatgttacagtttagcaactaagaaaattatatcgcatcaatttgagaaaaaggaaattccttcaggatttttcttcttggatgagtctgaaaatatttcggccgtccttagttctaatagtggtactatatcgaagtttaatcggatgggaaaactggctggttttggaagaagtgaccttagattatttaggagtggttactgccatgatcatgacccagaggcattatatccagcagcatttagttttgaagtgaaagaaggcgatattacagaaacatgggcagaaggtttaaatatgtatcataatcctaatgctaaatatcctgtagatcctgatttatttccttcaatagcacatcattttcttgaaaatggagaggttaaaagtatagtgcctgactttcatccgtatacatctattaccataaatgtcttaactcaaaataataaaaaacaaaaaatcagagtagatgagtaa

SEQ ID NO: 16534 - DNA, 741 bp, Escherichia coli
atgactgtgcacaagctctctggtgcgtttttccacgatatgcaggttgagtggccctgccctaactgcaatcagaaaaccctacagatcattaaagaaagtttcgtctcgtatgacacacatgatacccgaaaattccgcagtgaagattggtttgaaccagaaatggattcatctattttcagttgcatggcccgctgttcaagaatgcaatgtggtgaagttgtggcctgtactggtaagagtggatgggaacaaggttgggatgaagaaagaaatgatattgagtactatcaatggcacagacctttcaccttttacccatcactgcatcctttcgaaatacctaaaaaatgcccagaagaaattaccgaaccgcttgaagcctcattttccattttcctaatacagcctggcgcagcagcaaacctaattcgaatttcagttgaaagaatgctaaccgctatggatgtagctgaacgtaatgataatggcaaacgcataactctacaccaccgtttagggatgctacctgaattatacggatcgttttcaagacctcttatggcaattaaatttttaggaaatgccggaagccatacctacgatgaagtaaaagtcaaagacattgaggatgcttttgagattatggagtacgtcgtcaatgacttgttctccggtcgcaaagaatctgtcgaagtattgacgaaacgattaagtgaaaaattcaaagaaaactga

SEQ ID NO: 16535 - DNA, 729 bp, Escherichia coli
atgtttaggttgaaccctttcgtacgggtcgggctgtgtttgtccgctatttcttgtgcatggcctgtgttagcggtcgatgatgatggcgaaacgatggttgtcactgcatcttccgttgaacaaaaccttaaagatgctcccgccagtatcagcgtcattacccaggaagacctgcagcgaaaaccggtacagaatctgaaggatgtcctcaaagaagtgcctggcgtacaactgacgaacgaaggggataaccgtaagggcgtaagtattcgtggtctggacagcagctacaccctgattcttgtcgacggtaaacgcgttaactcccgcaatgccgtcttccgccacaatgatttcgatctgaactggatcccggtcgattccatcgaacgtattgaagtggtccgtggcccgatgtcgtcgctgtacggttccgatgcgctcggcggtgtagtgaatatcatcaccaaaaaaatcggtcagaaatggtcgggcaccgttaccgtcgataccaccgttcaggaacatcgcgatcgcggtgatacctataacggtcaattctttaccagcggaccattaattgacggcgtgctgggaatgaaagcttacggcagcctggcaaaacgtgaaaaggatgacccgcaaaactcaacgaccaccgataccggagaaacgccgcgtattgaaggattctccagccgcgacggcaatgtcgaatttgcctag

SEQ ID NO: 16536 - DNA, 1701 bp, Escherichia coli
atgcgactgctcaaccgtcttaaccagtatcaacgtctgtggcaaccttccgccggaaagccgcaaaccgtcaccgtcagcgaactggccgaacgctgtttttgcagcgaacgccatgttcgtacgctgttgcgtcaggcacaggaggcgggatggctggagtggcaggcgcagtcaggacgcggaaagcgcggacaattacgctttctggtcacgccagaatcgctacgcaatgcgatgatggaacaggcgctggaaaccggaaagcagcaagatgtgctggagctggcgcaactggccccaggtgagctgcgcactctgttacagccgtttatgggcggacaatggcaaaacgatacgcccacgttgcgtattccctactatcgcccgctcgaaccgctacaaccgggctttttgcccggccgtgccgagcagcatctggccgggcagatattttccggcctgacccgcttcgataataatactcagcgcccgattggcgatttagcacatcactgggaaacctctactgacgggttacgctgggatttttatcttcgctcaaccttacactggcataacggcgatgcagtaaaagcctcccacttacaccagcggttattgatgctgttacaactgccagcactggatcaattatttattagcgtgaagcgtattgaagtcacccatccgcagtgtctgaccttctttttacatcgccccgattactggcttgcgcaccgactggcgagctattgcagccatctggcgcatccgcaattcccactgatcggcacaggtccttttcgcttaacacaattcacagcggaactggtgcgcctggagagccatgattattaccatttacgtcatccgctgcttaaagcggttgagtactggataactccgccgcttttcgaaaaagatatgggaaccagttgtcggcatcccgtgcaaatcaccattggcaaaccggaggagctgcaacgggtcagccaggtcagtagcggcatcagtttaggtttttgctatttaacattgcgcaaaagtctccgactgtccctctggcaggcgcgaaaagtaatctccattattcatcaatccggtttattacaaacgttagaagtcggagaaaacctgatcactgccagtcatgcattactgccaggctggactattccgcattggcaagtaccggatgaagttaaactaccgaaaaccttgacgctggtttatcacctaccgatagaacttcataccatggcagaacgcctacaggcgacactggcagcggaaggctgtgaactcacaattatttttcataacgcaaaaaactgggacgacacgaccctactggcacacgcagacctcatgatgggcgacagattaattggcgaagcaccggaatataccctggagcaatggctgcgttgcgatccactgtggccacatgttttcgacgctccagcatatgcacatttgcaatcgacactggacgcagtgcaagtaatgcctgatgaggaaaaccgatttaatgccctgaaagcggtttttagccagttaatggcagatgcgacgctgacgccgctgttcaactatcactatcgcattagcgcccctcccggcgtgaacggtgtgcgactgacaccgcgcggctggtttgaatttaccgaagcctggcttcccgcgccgtcgcaatga

SEQ ID NO: 16537 - DNA, 369 bp, Escherichia coli
atgaatgaacaaatcaaacaggatatcgatctgattgagattttattttatctgaagaaaaagattcgtgttatcctttttattatagctatctgtatggtaatggtgctgttgtttctgtatatcaataaagataatataaaagtgacttacagtctaaaaataaaccagacaacaccaggcatacttgttagctgtgatagcaatatgaaccgccccgggtttcctggagagtgttttatctgtgaactcaggctgccagatcatcgtttccgatggaagcataataagctttttctgcttctgccggaggagtatggcccagcctttccagcaatcgtcgattgttataccagtccacccacgtga

SEQ ID NO: 16538 - DNA, 1575 bp, Escherichia coli
atgacggtctcaaccgaagttgaccacaacgaatacaccggtaacggcgttacgacatcgtttccgtatacttttcgaattttcagaaaatcagacctggttgttcaggtgtctgacctgaacgggaacgtaacagaattggttctggataccggttatacggtaactggggcgggcacttatagtggcggttctgtggttcttccgtctccgcttgctactggatggcgaattacgatagatcgtgtgcttgatgtagtgcaggagacagaccttcgcaatcagggaaaatttttccccgaagtgcatgaagatgcctttgactacctgacgatgctgatccagcaatgttttgggtggttcagacgtgcattgatgaaaccatctttgcttgcaaaatattacgatgcaaagcaaaacaaaatttctaaccttgcagatccatcatttgagcaggacgctgtaaataatcgctcaatgcgtaattatgtcgatgctgcaatcgccggggttgttggtggttttggttggtttattcagtatggttctggggctgtgtaccgaacgttccaggataaaatgcgtgatgctattagccccaaagattttggagctgttggtgatggtataaatgacgattccactgcaataagcgcgtgccttgaagcctcatctccaggttataaaattgacggattagggcttacttttaaagtatcaactcttccggatgtcagtcgatttaaaaatgctcgttttttatttgagagaataccgggccagcctcttttttatgcttctgaagattttatccagggagagttatttaaaattacagatacaccgtggtacaacgcctggacgcaggataaaacgtttgtatatgacaatgtcatctatgcgccttttatggctggagaccgccatggtgtaaataacctccatgttgcatgggttcgctcaggagatgacgggaagacctggacaacgccggaatggcttacagatttacatgaaaactatcccacagttaactatcactgcatgagtatgggggttgtcagaaatcgcctttttgctgtaattgagacgcggaccgtgagcggaaataaactgcaggttgcagagttgtgggatcgcccaatgagtcgcagccttcgcgtttatggtggtataacgaaagcagcaaatcagcaagtcgcttatattcgcattactgatcacggattatttgctggtgattttgtcaacttctcaaactctggtgttacaggtgttaccgggaatatgacggtgactactgttattgataaaaatacttttacagttacgacgcaaaatacccaggatgtggatcagaataacgagggtagatactggagttttggtacatcatttcactcgtcaccatggagaaaaaccagtcttggaactattccttcttttgttgacggaagcactcctgttactgagattcacagttttgcgacgattagcgataacagttttgctgttggctaccataatggtgatattggtccacgcgtgaaccgccccgggaatcctggagactaa

SEQ ID NO: 16539 - DNA, 420 bp, Escherichia coli
atgaaaacaattgatatgttggctaagtatctaaatgaatggccattaaaatattctcgtatcgttcaggctgaagactgcgttttttatggcgtttttgctggtaatgaaatgcattacgaagtaattcagagtgagggactggccgggttaactcttagcgaagaccatggtactagcgttacgttccatgactggataacagcacaacgttctgaaatggaaaaaggcgatgtgtttgatatttctcgctctgtttgcgctaaagcaaaaagtgataatgattacatgagcgaacacttatacaacatgaagttacaatgcctgcatgcggcgcttattcagaataggcaattcgataaaacaagtgccatcaatattgcggaagccatcaacgctggatttgatgccattaagtaa

SEQ ID NO: 16540 - DNA, 150 bp, Escherichia coli
atggctaagtacatcgtgactatcgaaggatttaatgattgcaaggttgttgagtttgaagcagacacgccagaggatgccgaagaaataggcagagacatattctatgaagaatgcaactacggcgtatcacctgctacagaggactaa

SEQ ID NO: 16541 - DNA, 582 bp, Escherichia coli
atgaagcacttttcgccagatatcgcgctggcattgttggatgaacaggaaaggaaccagcaatacatcaaatcccgcgaccaggagaacgaggatattgcgctaacggtagggaagccgctaatcgaaaacggccggcttgttgccgatacgctacgccacttagctgataacgaaatcgactctgattattttgctatcacctcaacgaatgagaacggtactgaaattgatcatgagatggctattaccgattacgcactgcaagctgccggaactgtagacgaattggttgcggcgttggaatccgcagagaagcgcattgcagaactggaaagcaacgaagtccgtgaagtcggaaatcagtttcttgttgttcgccatcctgggaaaactcctgtcatcaagcactgcactggtgacctggaagagtttctgcggaagttaatcgaacaagacccgttagtaactatcgacatcattacgcatcgctattacgggattggcggtcaatgggttcaggatgcagttgagtatctgcatatgatgtctgacgctgacattcgcatcaaaggagagtga

SEQ ID NO: 16542 - DNA, 918 bp, Escherichia coli
atgagcaacgaaattgcaatcaccaatgatgtgttggctattcggggaatcgatgaagttacatggagcgctctgaaaaacagtatttaccctggggcaaaagatgaatcggtaatgatggcagtcgattactgccgggcgcgtcaactcgatcctcttcttaagccggtacacctggtaccaatgagtgttaaagactcgaagagtggaaagaatgaatggcgcgacgtggtcatgcctggcattggactttatcgcattcaggcctaccgttccggcgattacgcaggcgctaatgaacctgagttcggtccagatgtaacacaaacgctttcaggcgtggaggttaccttccctcagtggtgtaagttcaccgtcagcaagcgaatggcaagcggggaaatcgtagagtttagcgccaaagaatactggattgagaactatgcaactggggggcgtgacacatcggcaccaaatgccatgtggaaaaagcgcccttatgcgcagttggcaaaatgcgcagaggcacaggcattacgtaaagcatggccggagattggtcaacaagccacagctgaggaaatggaaggtaaatatatcgactcaactgacattattgaatgtgacgtaactccaagaagtcaggcaaagcacggcacagcatccagcatgaacagtctgatcaacgctaaaacagtgaaaaagcctgatgagcaaacgcgtaaagcggatagccgtgatccagaagaaatgctgatggcctttaccaccgcagcgatgaattacagcactgtctccgaactggataaggcttacaaatacattgcacaaaaactttcagatgatgacgaactgctggcaaaagccaccgacgtttacagcgttcgtcgggaagaattaaacgaaacatctatgtaa

SEQ ID NO: 16543 - DNA, 258 bp, Escherichia coli
atggctgaaagtactgtaacggcagacagcaaactgacaagtagtgatactcgtcgccgtatttgggcaattgttggggcctcttcaggtaatctgatcgagtggttcgatttctatgtctactcgttctgttcactctacttcgcccacatcttcttcccttccgggaacacgacgactcaactactgcaaacagcaggtgtttttgctgcgggatttctgatgcgcccaataggcgttggctatttggccgcatag

SEQ ID NO: 16544 - DNA, 822 bp, Escherichia coli
atggctaaagcaaactcttcattttctgaagtgcaaattgcccgtcgtattaaagaggggcgtggccaagggcatggtaaagactatattccatggctaacagtacaagaagttccttcttcaggtcgttcccaccgtatttattctcataagacgggacgagtccatcatttgctatctgacttagagcttgctgtttttctcagtcttgagtgggagagcagcgtgctagatatacgcgagcagttccccttattacctagtgataccaggcagattgcaatagatagtggtattaagcatcctgttattcgtggtgtagatcaggttatgtctactgattttttagtggactgcaaagatggtccttttgagcagtttgctattcaagtcaaacctgcagcagccttacaagacgagcgtaccttagaaaaactagaactagagcgtcgctattggcagcaaaagcaaattccttggttcatttttactgataaagaaataaatcccgtagtaaaagaaaatattgaatggctttattcagtgaaaacagaagaagtttctgcggagcttttagcacaactatccccattggcccatatcctgcaagaaaaaggagatgaaaacattatcaatgtctgtaagcaggttgatattgcttatgatttggagttaggcaaaacattgagtgagatacgagccttaaccgcaaatggttttattaagttcaatatttataagtctttcagggcaaataagtgtgcagatctctgtattagccaagtagtgaatatggaggagttgcgctatgtggcaaattaa

SEQ ID NO: 16545 - DNA, 2109 bp, Escherichia coli
atgtggcaaattaatgaggttgtgctatttgataatgatccgtatcgcattttggctatagaggatggccaagttgtctggatgcaaataagcgctgataaaggagttccacaagctagggctgagttgttgctaatgcagtatttagatgaaggccgcttagttagaactgatgacccttatgtacatcttgatttagaagagccgtctgtagattctgtcagcttccagaagcgcgaggaggattatcgaaaaattcttcctattattaatagtaaggatcgtttcgaccctaaagtcagaagcgaactcgttgagcatgtggtccaagaacataaggttactaaggctacagtttataagttgttacgccgttactggcagcgtggtcaaacgcctaatgcattaattcctgactacaaaaacagcggtgcaccaggggaaagacgttcagcgacaggaacagcaaagattggccgagccagagaatatggtaagggtgaaggaaccaaggtaacgcccgagattgaacgcctttttaggttgaccatagaaaagcacctgttaaatcaaaaaggtacaaagaccaccgttgcctatagacgatttgtggacttgtttgctcagtattttcctcgcattccccaagaggattacccaacactacgtcagtttcgttatttttatgatcgagaataccctaaagctcagcgcttaaagtctagagttaaagcaggggtatataaaaaagacgtacgacccttaagtagtacagccacttctcaggcgttaggccctgggagtcgttatgagattgatgccacgattgctgatatttatttagtggatcatcatgatcgccaaaaaatcataggaagaccaacgctttacattgtgattgatgtgtttagtcggatgatcacgggcttttatatcggctttgaaaatccgtcttatgtggtggcgatgcaggcttttgtaaatgcttgctctgacaaaacggccatttgtgcccagcatgatattgagattagtagctcagactggccgtgtgtaggtttgccagatgtgttgctagcggaccgtggcgaattaatgagtcatcaggtcgaagccttagtttctagttttaatgtgcgagtggaaagtgctccacctagacgtggcgatgctaaaggcatagtggaaagcacttttagaacactacaagccgagtttaagtcctttgcacctggcattgtagagggcagtcggatcaaaagccatggtgaaacagactataggttagatgcatctctgtcggtatttgagttcacacaaattattttgcgtacgatcttattcagaaataaccatctggtgatggataaatacgatcgagatgctgattttcctacagatttaccgtctattcctgtccagctatggcaatggggtatgcagcatcgtacaggtagtttaagggctgtggagcaagagcagttgcgagtagcgttactgcctcgccgaaaggtctctatttcttcatttggcgttaatttgtggggtttgtattactcggggtcagagattctgcgtgagggttggttgcagcggagcactgatatagctagacctcaacatttagaagcggcttatgacccagtgctggttgatacgatttatttgtttccgcaagttggcagccgtgtattttggcgctgtaatctgacggaacgtagtcggcagtttaaaggtctctcattttgggaggtttgggatatacaagcacaagaaaaacacaataaagccaatgcgaagcaggatgagttaactaaacgcagggagcttgaggcgtttattcagcaaaccattcagaaagcgaataagttaacgcccagtactactgagcccaaatcaacacgcattaagcagattaaaactaataaaaaagaagccgtgacctcggagcgtaaaaaacgtgcggagcatttgaagccaagctcttcaggtgatgaggctaaagttattcctttcaacgcagtggaagcggatgatcaagaagattacagcctacccacatacgtgcctgaattatttcaggatccaccagaaaaggatgagtcatga

SEQ ID NO: 16546 - DNA, 1668 bp, Escherichia coli
atgagtgctacccggattcaagcagtttatcgtgatacgggggtagaggcttatcgtgataatccttttatcgaggccttaccaccattacaagagtcagtgaatagtgctgcatcactgaaatcctctttacagcttacttcctctgacttgcaaaagtcccgtgttatcagagctcataccatttgtcgtattccagatgactattttcagccattaggtacgcatttgctactaagtgagcgtatttcggtcatgattcgaggtggctacgtaggcagaaatcctaaaacaggagatttacaaaagcatttacaaaatggttatgagcgtgttcaaacgggagagttggagacatttcgctttgaggaggcacgatctacggcacaaagcttattgttaattggttgttctggtagtgggaagacgacctctcttcatcgtattctagccacgtatcctcaggtgatttaccatcgtgaactcaatgtagagcaggtggtgtatttgaaaatagactgctcgcataatggttcgctaaaagaaatctgcttgaattttttcagagcgttggatcgagccttgggctcgaactatgagcgtcgttatggcttaaaacgtcatggtatagaaaccatgttggctttgatgtcgcaaatagccaatgcacatgctttagggttgttggttattgatgaaattcagcatttaagccgctctcgttcgggtggatctcaagagatgctgaacttttttgtgacgatggtgaatattattggcgtaccagtgatgttgattggtacccctaaagcacgagagatttttgaggctgatttgcggtctgcacgtagaggggcagggtttggagctatattctgggatcctatacaacaaacgcaacgtggaaagcccaatcaagagtggatcgcttttacggataatctttggcaattacagcttttacaacgcaaagatgcgctgttatcggatgaggtccgtgatgtgtggtatgagctaagccaaggagtgatggacattgtagtaaaactttttgtactcgctcagctccgtgcgctagctttaggcaatgagcgtattaccgctggtttattgcggcaagtgtatcaagatgagttaaagcctgtgcaccccatgctagaggcattacgctcgggtatcccagaacgcattgctcgttattctgatctagtcgttcccgagattgataaacggttaatccaacttcagctagatatcgcagcgatacaagaacaaacaccagaagaaaaagcccttcaagagttagataccgaagatcagcgtcatttatatctgatgctgaaagaggattacgattcaagcctgttaattcccactattaaaaaagcgtttagccagaatccaacgatgacaagacaaaagttactgcctcttgttttgcagtggttgatggaaggcgaaacggtagtgtcagaactagaaaagccctccaagagtaaaaaggtttcggctataaaggtagtcaagcccagcgactgggatagcttgcctgatacggatttacgttatatctattcacaacgccaacctgaaaaaaccatgcatgaacggttaaaagggaaaggggtaatagtggatatggcgagcttatttaaacaagcaggttag

SEQ ID NO: 16547 - DNA, 1527 bp, Escherichia coli
atgagaaactttcctgttccgtactcgaatgagctgatttatagcactattgcacgggcaggcgtttatcaagggattgttagtcctaagcagctgttggatgaggtgtatggcaaccgcaaggtggtcgctaccttaggtctgccctcgcatttaggtgtgatagcaagacatctacatcaaacaggacgttacgctgttcagcagcttatttatgagcataccttattccctttatatgctccgtttgtaggcaaggagcgccgagacgaagctattcggttaatggagtaccaagcgcaaggtgcggtgcatttaatgctaggagtcgctgcttctagagttaagagcgataaccgctttagatactgccctgattgcgttgctcttcagctaaataggtatggggaagccttttggcaacgagattggtatttgcccgctttgccatattgtccaaaacacggtgctttagtcttctttgatagagctgtagatgatcaccgacatcaattttgggctttgggtcatactgagctgctttcagactaccccaaagactccctatctcaattaacagcactagctgcttatatagcccctctgttagatgctccacgagcgcaagagctttccccaagccttgagcagtggacgctgttttatcagcgcttagcgcaggatctagggctaaccaaaagcaagcacattcgtcatgacttggtggcggagagagtgaggcagacttttagtgatgaggcactagagaaactggatttaaagttggcagagaacaaggacacgtgttggctgaaaagtatattccgtaagcatagaaaagcctttagttatttacagcatagtattgtgtggcaagccttattgccaaaactaacggttatagaagcgctacagcaggcaagtgctcttactgagcactctataacgacaagacctgttagccagtctgtgcaacctaactctgaagatttatctgttaagcataaagactggcagcaactagtgcataaataccaaggaattaaggcggcaagacagtctttagagggtggggtgctatacgcttggctttaccgacatgacagggattggctagttcactggaatcaacagcatcaacaagagcgtctggcacccgcccctagagttgattggaaccaaagagatcgaattgctgtacgacaactattaagaatcataaagcgtctagatagtagccttgatcacccaagagcgacatcgagctggctgttaaagcaaactcctaacggaacctctcttgcaaaaaatctacagaaactgcctttggtagcgctttgcttaaagcgttactcagagagtgtggaagattatcaaattagacggattagccaagcttttattaagcttaaacaggaagatgttgagcttaggcgctggcgattattaagaagtgcaacgttatctaaagagcggataactgaggaagcacaaagattcttggaaatggtttatggggaagagtga

SEQ ID NO: 16548 - DNA, 1617 bp, Escherichia coli
gtggttaggctagctacatttaatgacaatgtgcaggttgtacatattggtcatttattccgtaactcgggtcataaggagtggcgtatttttgtttggtttaatccaatgcaagaacggaaatggactcgatttactcatttgcctttattaagtcgagctaaggtggttaacagtacaacaaagcaaataaataaggcggatcgtgtgattgagtttgaagcatcggatcttcaacgagccaaaataatcgattttcctaatctctcgtcctttgcttccgtacgcaacaaggatggagcgcagagttcatttatttacgaagctgaaacaccatatagcaagactcgttatcacatcccacagttagagctagctcggtcattatttttaattaactcctatttctgtcgaagctgtttgagcagtaccgctttacagcaagagttcgacgttcagtatgaggttgagcgagatcatttagagataaggatcttacccagttcatcgtttcctaaaggggcgttagagcagtcggccgtagtgcagcttttggtttggttgttttcggatcaagatgttatggattcgtatgaaagtatttttaggcactatcaacaaaatagagaaattaagaacggcgttgaaagctggtgctttagctttgaccctccgcccatgcagggttggaaattacatgtaaaaggacgttcttctaacgaggataaggattatttagttgaggaaatagtaggtttagaaatcaacgctatgcttcctagcacaacagctattagccatgcctcttttcaggaaaaggaggcaggtgatggtagtacgcagcacatagcggtttcaacagagtcagttgttgatgatgagcatctacagttggacgatgaggaaacagccaatatagacacagacacacgagtcatagaggctgagccgacatggataagttttagtagacctagtcgaattgaaaaatctcgcagggcaagaaaaagtagccaaactattttagaaaaagaagaagcaacaacaagtgaaaatagtaatttggttagtactgatgagccacacttaggtggtgtcctagcagcggcagatgtgggtgggaagcaggatgcaaccaattacaactctatttttgctaatcgatttgctgcttttgatgagctactttcaattctaaaaactaaatttgcatgtcgggtgctttttgaagaaaccttggttttgccaaaagttgggcgtagccgattacatctgtgtaaagatggctcaccaagagtgattaaagccgttggggtgcaacgtaatggcagtgaatttgtattgctagaggtggatgcatcggatggggtgaaaatgctttctaccaaagtgttgagtggcgttgatagcgaaacatggcggaatgattttgaaaagatacggcgtggagtggtgaagagctcattgaattggccaaatagtttgtttgatcaattatatggacaagacgggcatagaggggtgaatcatccaaaggggttgggggagctgcaagtatcgagagaggatatggaagggtgggctgagagagtggttagagagcaatttacgcattaa

SEQ ID NO: 16549 - DNA, 126 bp, Escherichia coli
atgaaggtggtgtacctggctatccaggcggcgaccaagaaatggacgatgccgatccgcaactggaagccggccatgaaccgttttatgatcgaatttggtgaccgtttaaatggccacctttaa

SEQ ID NO: 16550 - DNA, 378 bp, Escherichia coli
gtgtctgccgccaaagctcttgcctatgcactttgtgacaagttggaaagcaaaaaagttgatgaagtcgtacgaaatcttgtttctagcggctggaatattagggaagtggcctgggaagcttcgtcctttgatcatgaaatgccctactttgacacggggcgggacttcgatattggatttcctgacacgctgtcatccaagattgagtttttgaccgcgaatggatcaatcgtccaagcacgtgctcgcctgcacttcaagcaggctctaatttttgccaaggcgtccaaacatgtcgccgcgctcaagaactcattggattactactatggatcgtctgtaatcccccctcaaaaccacggaggctatttgtag

SEQ ID NO: 16551 - DNA, 372 bp, Escherichia coli
gtgtcatacgaacctccaagagacggttacacaaacgggtacattgttgatgtcatgtatgacaatcgcccaagtaagtatccagctgtgttcagaacgtacgtccgaattccagactatgtcgaactagataacgcggaggagctggccgacgcaatcattcgagaggttgagttaaaggaggcatggctcacaagggtcttggggaactcagccgatcctgacgcttctgtgggcaagtgggaccggcgcctagcgcagtgcggtggtattgatgagatgtcaagtggggtgcaggcaacatacttcagtccaaacggtcagctggtcggcttagtggcatacattgatgccgaatggatggatgaatag

SEQ ID NO: 16552 - DNA, 498 bp, Escherichia coli
atgcgcgatctgttgaaggtggttctaagcctcgtacttgcgatggcatcggggcaggcacttgctgacctgccaattgttttagtggatgaagctcgtcttccctatgactactccccatccaactacgacatttctccaagcaactacgacaactccataagcaattacgacaatagtccatcaaattacgacaactctgagagcaactacgataatagttcatccaattacgacaatagtcgcaacggaaatcgtaggcttatatatagcgcaaatgggtctcgcactttcgccggctactacgtcattgccaacaatgggacaacgaacttcttttccacatctggcaaaaggatgttctacaccccaaaaggggggcgcggcgtctatggcggcaaagatgggagcttctgcggggcattggtcgtcataaatggccaattttcgcttgccctgacagataacggcctgaagatcatgtatctaagcaactag

SEQ ID NO: 16553 - DNA, 525 bp, Escherichia coli
atgaagatttcggtgatccctgagcaggtggcggaaacattggatgctgagaaccatttcattgttcgtgaagtgttcgatgtgcacctatccgaccaaggctttgaactatctaccagaagtgtgagcccctaccggaaggattacatctcggatgatgactctgatgaagactctgcttgctatggcgcattcatcgaccaagagcttgtcgggaagattgaactcaactcaacatggaacgatctagcctctatcgaacacattgttgtgtcgcacacgcaccgaggcaaaggagtcgcgcacagtctcatcgaatttgcgaaaaagtgggcactaagcagacagctccttggcatacgattagagacacaaacgaacaatgtacctgcctgcaatttgtacgcaaaatgtggctttactctcggcggcattgacctgttcacgtataaaactagacctcaagtctcgaacgaaacagcgatgtactggtactggttctcgggagcacaggatgacgcctaa

SEQ ID NO: 16554 - DNA, 537 bp, Escherichia coli
atgtctaacagtccatttttaaattctatacgcacggatatgcgacaaaaaggttatgcgctgaaaactgaaaaaacttacctgcactggattaagcgttttattctgtttcacaaaaaacgtcatcctcagaccatgggcagtgaagaggtcaggctgtttttatccagcttagcaaacagcagacatgtagccataaacacgcagaaaatcgctttaaatgccctagcttttttgtacaacaggtttttacaacagccgttgggcgatattgattatatccctgcaagcaagcctagacggctaccctctgttatctctgcaaatgaagtgcaacgcattttgcaggttatggatactcgcaaccaagttatttttacgctgctgtatggtgcaggtttgcgcattaatgaatgcttgcgtttgcgggttaaagattttgattttgataatggctgcatcactgtgcatgacggtaagggtgggaaaagcagaaacagcctactgcccacgcgcctaatcccagcaataaaataa

SEQ ID NO: 16555 - DNA, 327 bp, Escherichia coli
atgtttgtctttccctccagcacgctctgcaaccacccgtataacggcaaattatgccgccatcatctgcatgactccgttgcgcgaaaggcattgaaggcagccgtacaaaaagcaggcatcgttagcaagcgtgtcacttgtcatacatttcgtcactcgtttgctacgcatctattacaagcggggcgtgatattcgcactgtgcaagaactcttagggcataacgatgttaagaccacgcaaatctatacgcatgtgttgggtcagcattttgccggcaccaccagtcctgcggatggactgatgctacttatcaatcagtaa

SEQ ID NO: 16556 - DNA, 321 bp, Escherichia coli
atggtgggcaactgggcgcaaagcattttacacggcggggtcattgcgtcggcgctggatgtcgccgcaggtctggtgtgcgtgggaagtaccttaacccgccacgaaaccatcagtgaagatgaactacgccagcggctatcgcggatggggaccattgatcttcgcgtcgattatctgcgcccaggcagaggcgagcgttttactgctaccagtagcctgttacgtgcaggcaataaagtcgccgtcgcccgcgttgaattacacaatgaagaacagctttatattgccagtgccaccgccacctatatggtaggttga

SEQ ID NO: 16557 - DNA, 543 bp, Escherichia coli
gtgtgcccgcaagagttcggtgagtttctggtggcgattttcgaccactggattaagcgcgacgtcggcaaggttttcgtaatgaatatcgaatgggcgttcgccaattttgtcggcgcaccgggcgcggtttgccatcatcagccaacctgtgggcgctcggtgattgttgaacacaacggcgatgtttacgcctgcgatcactatgtttatccgcagtatcgactagggaatatgcttcagcagacgattgcagaaatgattgattccccgcaacagcaggcatttggtgaagataaattcaagcagttaccggcacagtgtcgcagttgcaacgtgttaaaagcgtgctggggaggctgcccgaaacaccgctttatgctcgatgccagcggcaaacccgggctgaattatttgtgtgccgggtatcagcgttatttccgccatctaccgccatatcttaaagcaatggctgatttgctggcgcacggtcgtccggccagcgacattatgcaggcgcatttgatggtggtgaataagtag

SEQ ID NO: 16558 - DNA, 552 bp, Escherichia coli
atgcgcaggtctgcatttgtgaggatgatgatttttacaacgttgtttgtagggggagcttctaccgcagttgctaaaaactgcaaaaaaggaataccttgtggtaactcgtgtatagctgttggtaagacgtgccggattggctcttatgccccttcatcttataaaaatcattcatactcttatccttcatcctctattcgaagctcgcaatcaaataattcacgaaaaactgaaggggtgaaaacgactcctgctgccaaaaattatctttgccaatactctattgcatcaatcgaaaacggacgtttaggggcattacgtgttcagggatacgcacaagtaactttatatgcagatagcttcaaggctaacagattaaatggaacatatttgatatcgccaaaactgaatgctaacggcaagtttatgatggcagatgataaaagcaaggtttatgcttatgattcttggctattaaattttgcaataagcgatcgtatcacaagaacgacagaacaatgggatcgatgtaagctcaatcaaaaataa

SEQ ID NO: 16559 - DNA, 231 bp, Escherichia coli
gtggaaagagaattaaggagagtgagtaaagttctcattagcaaaaagcagctgctggagatgattccactgtgcgagcgcacgatctacaactttgaaaagcagggaaaattccctaagcgcatcgcacttagtagtcgcaaggtcgtgtgggatttagccgaggtcgaggcatggattgatgcgtgcaaacattccggctcggcccctcgtcccggaatgggggcctga

SEQ ID NO: 16560 - DNA, 1059 bp, Escherichia coli
atgagtagccgaaacagcggtcttaagcccataggcgcggtaataggcgactctggcgggctactggaacgccttgaaaatatcaggaagcggaacagtgaccgaactccggctgctgaacgcggtagaccgtctaacgtctcgaccgtgcatgaacagatggaaagggcaaaagagcgggacaaagcgttgtcacttgtccgcaagcctccacaaggcgacgctcagccagatttttttgcgcccagcctttatgacgtgggcggccgcgacaatcgcagcgtcatggatgtggccgtgttccgtttatccaagaaggacaagcgagccggagaactgatccgctacgacctgccggatggatacgtggaagtgtccgcaggagcgcacggaatggcctccgtttgggactacgacattgtgctgatgatggtgtctcacttgaccgaagctatgaaccgctatcgagaaggaaagggtggcaagccggggagagtgtttcggctgcatgttagcgacatcctcagatttgcccgacgtggtaacggtagtagtcaggttaagggagtggaagccgcgctagatcggttgcggggtactaccatcaagacagtgcgcgaaagcggcaagttccggacaaccgaagccgaggggctgatcgcgcgctatcgtgttctgtcacgcacggacaccaagaagataagttctgtcgagattgaagccccggagtggatttatcgagaagtcaccgagggcaagcggccggaggtacttacagtacaccgggactactttctgatcgagccgggcataggacgctttatctaccgactggctcgccgtgccgcaggcagggatagcgctaaatgggctttcaagaccctttacgaacgcagtggaagcggtggctcgttcaaaaaattctgtttcttccttcgcgggatcatcaaagccgatgacctgcctgaatatgccttgtgcgaagaagcggggaaggatggccctctactggtcatgaggcaccgcaattcctcgtcggaaccgctgggcggttcctag

SEQ ID NO: 16561 - DNA, 309 bp, Escherichia coli
atgattgaatatctgattttttgcgtggtggccttcgctgccgccttcggcatgtacttgctgcgcgaatacctgcgctcgcggggctatgggccgcaactcgatgcgtttgcgcggtggctggaaccacgagagcaacgcatgaaccgttatcgctttaaggctgctaatggcctgtttggggcggcgcagtccatcaaccgcctgcccctgttcggaagcaaacatcaggtggtaatgatagagcaactgcgcatggccatcatgtccgaacaagcactaagggagcgccagcagcgccgcaaatga

SEQ ID NO: 16562 - DNA, 174 bp, Escherichia coli
atgaacccgtatagcaaaccaatccccggcacccttgctcgcatgaaggtgcccggcatgtcagcggaagcggtggctaaggctgacgcgccaatagcggttgggaaccgccagagcgatgaaacccaatcaactgctgccaaggcggccaatgcaccggagactgaccaatga

SEQ ID NO: 16563 - DNA, 1500 bp, Escherichia coli
atgctgttgatgaccgggagtgcaatggccgccggtttacaaagtaatgtggagatgaacgggctgctaacagacattcataatgcgtctgctcagtgggggccaaagttgcagggctatgccagaaacttgctgttcctgctcgctgggattcagtttgtttggacgttcggcaacctgatttggcaaagcgccgatgttggcgaaatgttccgcgagctgatcaagttcgtcatgacgataggctttttccttgccttgctgacgtactccacagagtggagcacggctatcgtgaacagcttccgcgaagcgggatcgcaagcctccgggtttgcgcaggagttgatgcccggtgacgtgttcaccttagctatcaaattggcacaaaaagtcctgtcgaacatttcgttgtttgacctcgaaactgcggttgtgattgcgctatccggcgtcatcattttgctgtgcttcgcgttcatcgccgcgtttatgttcgttacgcttgtcgagtcgtatgtgattatcaatgcggccgtgctgttcatcggtttcggcggctcacaatggacacgggaatttgcaatagccccgcttcgctatgccgttgcggtaggcgctaagctgttcgtcctgaccttgattgtcggcctgattatgtccgtatcggacaggtggttcgccaactacgacggcactattgggccaacattgacactattgggcctgtccttggtgtgcgcctatctgtctcggtctatcccggagctgattgcgggcatgatcaccggctcatcatttgggggaggcagtgcgatcggcggcatggcaatggcggccgctgcggcggctactggcttggcggcaggcaccatgatggcgggcggcgcaaacgcggccggtggtgctgcgggtgctttgggcggcggttctggtggtggcgctggcagtggactggccgacagcatcaatgccagcatggccggtggccagcagaaccccgcagcgtccgccatgccgtccatgaacagtgcggcgaccacaagaacggcaacgggcggtagcgcagcagctcagtcagccggttctcgcgtcggtggctcgcaggcgggcaaatcgccgtcaggtagcggcatcaacagccagagcgacactccgcgcagcagtggtctgagtgggccgcagcaggcggcgcaaacactgaaaaaagcggcctccggcgcgaacaacttggctagtgtggccgcccgcggcctcgggacgctcgccgctatctctgtgccgggtatggaaggcgcggcgagcatgggcggcggccccccaccgcaaatgcctgacagcgatgagggtgacgaaaaacgtccagctaacagcggtgtatccgcggatgttgccgaagaaacaaacgttattcgtcccgcacaagaaccgtccgccgccccggctcaaccgaacggcgtggagaaatccaacaacccgaaacaggaaagtgaggcatga

SEQ ID NO: 16564 - DNA, 183 bp, Escherichia coli
atgacgatttctaagattcttcttttggtgttgtgtctcggttctgctgtgggtggggccgtaatgactagcgtcgtcatttcttcgggcgaagaatgttcggcttcacagaagcaaaaagcggcggctaccaaaaagttctgggaagggaaagacgaacccggcccgtcgaaggggttttga

SEQ ID NO: 16565 - DNA, 792 bp, Escherichia coli
atggaactagaatcgcaaaaaatgtcggcttatgccgcccgaaaattcggtcgaggcgcggcgctcgctcttgcaatggcaagcgcaggccttggtgtaagtctctacatggcaccggctccggcctatgccatctactgctcgaactgctcgacgttctatcagcagatgtacgagtacgccgaagcggtcaacacgcaactgaacacggcccagcagttgcagacgcagatccagcagtacgacaacatgattaagcagggcatgtcactgcccagccgcatgttcaacaccatcactggcgaccttcagcgcgtggccagcatctacaactcggcgcagtcgctcggccgcaacatcagcaatctggacgaacagtttcgccagcagttcaaaggctatgacagctatctgaactcgattggccaagggcaaaacaacatgccgcagcgctatcgggactgggcacaatccggcttcgataacgcccgcacggccatgcaggccgctggcgtaaatacgagcacattcgaggatgagaacgcgatgctggatcagttggtgagccgttcgcagtcggccgttggccgtcagcaggccattcaagccgggaacgagattgcggcgcagaacgtgcagcagctccagaaactgcgcgatctggtggccacgcaaatcaccctgcaaggcaactacatggccaaacaaaccgaacaggaagccgtgaaggacgcggccagtgaaaggttctggggaggtacagacactcccggcccatccaaggggttttga

SEQ ID NO: 16566 - DNA, 225 bp, Escherichia coli
atgaagacagttcaccgcatcagcgcattggccaatcaactcaacgaactgcaagcctgcctcggtcgagccagtgggcggcctagcaacagcgttatggaagcccagcgcatagcggccgagctggcttcttcactcgaagattggcaccttgaaacgctacacattcctgaaccggagcgtgacctctatcgcgcacagaatccctattacgctgcccactga

SEQ ID NO: 16567 - DNA, 210 bp, Escherichia coli
atggcacgaaaaaccctcgcagagcgccgttctgatgccctttcagagcttgaaatggcgaaagccagattggcaaaactcgacaatgaggcagcagaaagaataggaagaattgcaataaagtcaggattggttaatcttgagcttacggacgatcaggtccgggaagaattcgacagaatcgtggaaaggatcagcaaggggaattga

SEQ ID NO: 16568 - DNA, 1077 bp, Escherichia coli
atgacggcagtcgagctaccagaggatttttttgcaaatatacaaggggttttccgcaaaacacctgttttacttattgggtcgggattctcatgtggttatggcctgccagggatgggggcgttggctgagcatctggctaataacgtttatgacgcactctcgacggattcggcacggaatgcttggacccaatcaattaatgcgataaaggagaatttggagacaggcttaaataatattccacttggaatggcggggtgggatgagattttgtcggcaatccgtggggaaacagcgaagctaattcttgataaaacaatagcggcagaggcgcaaattcttgtcgaaaaaatagcggaccaccatgccccctcacgccttctgaagcgtctatttttaggatctcctcagaatgcggaaagcattcatgtcatcacgacaaattacgataccctgctagagctcttttgcgatctggcagagttgccgttagacactggatttatggggtttcgacggcgtaggccgcgacctcatccgctttttcaaactcaatacagccgagtgttagtagccgaaaagcgccaacagcaggtcgatcaccgtctatgtaaaacggtgcgattatacaaaccgcacggttctatcagttggttgacaacaaaagatggaccaattgaagtactaaatgacgtatctgttgctgagcgagctattgttgtgccgggcccttcgaagtaccaagacgcattagtcaacaccctatttgacgcaatgcgtactgagatgaatcaggtacttgcggaggctcaagctctcctgtgtataggtttcgggttcaacgatgatcatttacaaggcgttatcaaacaccgtttggcggctggaatgcctgcaatcatagtcactcgtgattcaacctccagcattgatcggttgctcggtgaacatcctcacgtgatcgctttgtttaaggatggtgatggagctatttgtcattggaatggtgagcagttcagagtgtccgagcctctttggcaacttgacgatttcctcaaaaaatttctggagtga

SEQ ID NO: 16569 - DNA, 1791 bp, Escherichia coli
atgagtatttttaatttttcagaagagcaatccttgggagaagttcgcagtgttgaaacctcaagaataactgtgcgagtgactgacggccagcgtttacagaaagcacgagttggaagattagtagctattcaatctgtaggagatgaatggttaattggaattatcgaaagagtttggcgacatccagtagagttgccttcgtttccagaagtagatgaaacaattgatttgtcagcagtgccgcaagaagaaaatggaatttctataagtttggtaggaacttatcgttctcgtgatggcctgcgaaaggatgtatttacgcgtgcagtatttatattgccagagattaataggtcagtgttccctattgaggaaaagtcactcgaagattttatgggcatattaagcgcgtcatctaaagctgatgcagtcgcgccgctcaaagtgggtacttatactttagatggcaaagctagtgcttatattgacggtgataaactttttcaacgtcatgcggcgttattggggagcaccggttcagggaaatctttcactgttgcttccatacttgaacagtctgcgcagctagctcacgccaatattgttgttcttgacttacatggcgaatattccagtatgaagttcgcttcccattatcgtatcgcgggcattagcgatattaagtcgaagggggatggtgcaatttttctgccgttctggttgctgacctatgatgagatgcaatcggtatttgttgatcgttcgggagataatgcacctaatcaggctctggcccttatggattccgtggtagagatgaagcgtgctgccatagcggcgcttggcaaacatgaattacttgaaggttttacggtcgatacgccagtaccttacaatttagatgacttggttaaatcccttgataagaaaaatgaagaagttattccaactggggaagaatacgtcactggggcgaagaaggggcagcctaagactgaaaaaggtccattgaacggcaaactctctcgattcctcattcggttgaagacaaaaatgaatgatcgacgttatgccttcatgtatcaatctcccaaggaatacgaaacttatgaagcattgcacgaactagcgagtaagttgctcggtacgggaaatgttgcagatggtgtaaatccaggtatcaaaattatcgacttttcagaagttccctcagatattttgcctgttgtagtaggtttggttgggaggttgatctatcaaattcagttctggagcgatccgggtaaagatggtgatggacgtcatccagtagtgatcgtttgtgatgaggcacacttgtaccttcccagcagtgcagcctctactggaccattagaaaagcgggctttggagaactacgagcgcatcgcgaaggagggacgtaaatacggtgttggtttaatggtggttagccagaggccttctgatgtgagtacaaccattttgagtcaatgtagcaacattataagtttgcgtctcgctaataagacagaccaatctgtagttaagcaacttttgcccgagagcttggaggggttgatggaggtgctgccgacgctggacgtaggtgaagctgtcgttgtgggagatgcaacattgctacccacacggattaaaatgtctaagcccaagcatgagcctcgtagcgcaactattccgttctggacgcgctgggataagccaaaggccgacgttgatttgattgctgccgtagagaacatgcgtcgacagtcgcggaccaacgattga

SEQ ID NO: 16570 - DNA, 198 bp, Escherichia coli
atgaaagatagaccgcataacgtggcgatggccgagcacttccgcgcccatccgacgtatgcagcggagctgcttgctgaagtctgccgcgaaggcaaccctgctgagctagccattctgttgcggcagatggtcacggcctcggcaggtgatgagaggtcggatgacaccgatacagagcgcgctctacctctctga

SEQ ID NO: 16571 - DNA, 294 bp, Escherichia coli
atgcagacattcgaaaaactgaaagcgattaggaaagcagaaggcttaacacaggcgaaattcagcgaaattagcgggatagctctaggaacagtcaaaaattacgaaagtgggcataaagaccctggtctcagcatcgttatgcgagtcacaaatacgcctttatttaaaaaatatacgctctggttaatgactggtgatacgtcaccacaagctggtcagatcgcgccggctctcgcacacattgggcaaaaaccaacagaatcagaccactccgaaaaacagactggttaa

SEQ ID NO: 16572 - DNA, 273 bp, Escherichia coli
atggaagtcaatgactatgtgattcagtacccgattgatgcggtacatacggttaagtttgcagagttacttggtaagccagaaacggctgtagtcaagatggtaaaagagaataagttgccagttattgagcttcgtgatccaagtaagccgaacgctcgtgtcggtgagaagtgggttttcattccagagtttaatcgcgctgtacgagaggcgttttataaccgaccagttgaacagcgtgatgcatggcttttgtggatggggttgtga

SEQ ID NO: 16573 - DNA, 1026 bp, Escherichia coli
atgattacaaatcttgattcaatgccttctaatgagccttatttatgggctgattatattgagatattggccttaactaatatcgacaggtcattcagtcgaggagacctatatagcacactgcaagctcaacccgaagcagtactagctgaaacagatgaagcagaagaagagggcgtttatgatgttgatgatgaaaatgatacgcctgtacgcaagagaacaaaacgaagtgttagtcgagcatatactgacagaaagtggagctatgcgataggcttcatacgacaacgcattgatttatttggggatagttacccttttactttatcagaagacaacgatactgtagagttacgtgatatatcagaaaagccactggaacatttagaaagactatatttagctttactaatctgtgctaacataaaatatgtcaacataatgagcagaagagagataacgcgcagttttgaactaattagtttacctatttttgaaagcctaatgcctagcggtagcataataaaagcatgctgggcttctggtggtcaagcggccccttacactggaactctatataataaatttaagagtattgcttccgatatccgttgcacagcgaacttcaaagaacgagatttcagtcgaggaaatagtggtgacggaggccttgacataattgcctggcatccaatgggagatcaacgagatgccatccctatttcttttgttcagtgtggctgttctcaagaagagtgggaagcgaagcagcttgaggcctcacctgcgatgctctacagtaaattccccgtagctcaccgatgggcaacttattatttcttacctcaagatctacgatggatagatggtgagtgggcgcataaaaataagttaggcgatgctatttttgttgatcgcctaagattaatcaatttaaccagagcatctgataatattgatcacagtcaaaatattagctatctagatatcatccttgatccttccagcgcgatcgctgcttaa

SEQ ID NO: 16574 - DNA, 1074 bp, Escherichia coli
atggataacaaaatcgtagaaattgagacaaataagcttgattttgaccctaaaaacccacgtttctttcgtctcaatgatgccagtaacgctgcaacagtcattgaggaaatgttagatgacgaaagtgtccacgatctaatgctatcaatcggtcagcaaggttactttcctggagaacctttattggcagtaaaaagcaatggaaactacatcgtggttgagggaaacagacgcttagctgctgtaaagttgctcaatggagatctgcttcctccaaaaagaaaacttaaaggtgtgcaagaaatcattgatgatactaccaataaacctaagaagcttccctgcatcatttatgaaaaccgagaggatgtactgagatatatcggttatcgtcatataactggggtcaaagaatgggactcattatctaaagccaaataccttaaagagttatgtgatactttttattcacatgagcctaaagagatagtattaaaaaatctggctcgtgagattgggagtaaaccacattatgttgcaacacttctcactgcactgaacttatatgaagtcgcgcatgaccatgagttttttaatttacccatgaaggcttctgacgtggaattttcatatataaccacagctttgggatattcaaaaatcacaaactggttaggtctacaggataaaaaggattttttagacccaaatttaaatgaagaaaaccttaagcgtttattctcttggttttttgtgcctgaccaacaaggtagaaccatcatcggtgagtctcgaagaataaaagatattgcagcagtggttgagaaacccgaagcaattgaaattctcatgaaaagttcaaacttggatgaagcatatctatataccagcggagaaagagaagcattagataaagcactaaacgcagctagtgttaaattaagagtagtttgggatatgctacttaaagctaaagaattaacattagagcatgaagaggctgcatctgaaatttttgagatgtcaaaaaatattagaaatcagatcagaagcaaaagggaggatgattga

SEQ ID NO: 16575 - DNA, 2199 bp, Escherichia coli
atgagttttaacgcaaaggatatgacccagggcggtcagattgcgtccatgcgtatccgcatgttcagccagatcgccaatatcatgctttactgcctgtttatttttttctggatactcgttggtctggttttatgggtaaaaataagctggcagacgtttgtgaacggctgtatttactggtggtgtaccacgctggagggcatgcgggatttaatcaagtcccagccggtctatgagatccagtattacggcaaaaccttccggatgaacgctgctcaggtactgcatgataaatatatgatctggtgcggagagcagctatggtccgcattcgttctggctacagttgtggcactggttatttgcctgattaccttctttgttgtctcctggattctggggcgtcagggtaaacaacagagcgaaaatgaagtcacaggtggtcgtcagctgacggagaacccgaaagacgttgcccggatgctgaaaaaagacggcaaggactccgatatacggattggcgacctgccgattatccgggattccgaaatccagaacttctgtctgcacggcacggtcggggccggtaagtcggaagttatccgtcgtctggccaactacgcccgtcagcgtggagatatggtggtgatttatgaccgttcaggggaatttgttaaaagttactatgatccctccatcgataaaatcctgaatccgctggatgcccgctgtgccgcctgggatttgtggaaggagtgcctgacacagccggattttgataataccgcaaatactctgatcccgatgggcacaaaagaggacccgttctggcagggttcaggacgtaccatttttgcggaagcggcgtacctgatgcgtaatgaccccaaccgcagctacagcaaactggtggacacactgctttccatcaaaatcgaaaaactgcgtaccttcctgcgtaattcaccggcggccaacctggtggaagagaaaattgagaaaacggcgatttccatccgtgctgtgctgaccaactacgtgaaagccatccgttacctgcaggggattgagcataacggtgagtcttttaccatccgtgactggatgcggggtgtccgggaagatcagaaaaacggctggctgtttatctcgtcgaatgccgacacccatgcctccctgaagccggtgatctccatgtggctgtccattgccattcgtggtctgctggcaatgggagaaaaccgtaaccgtcgtgtgtggtttttctgtgatgagctacccacgttacacaaactgccggacctggtggagatcctgccggaagcccgtaagttcggtggctgttatgtgtttggtatccagtcctatgcccagctggaagatatctacggtgagaaagcggctgccacgctgtttgacgtcatgaacactcgtgcctttttccgttctcccagccataagattgcagagttcgctgccggtgagattggtgagaaagagcacctgaaagccagcgagcagtattcctacggtgctgatccggtacgtgacggggtatcgaccggtaaggatatggagcgccagacgctggtcagttattccgacattcagtctctgccggatctgacctgttatgtcaccctgcccggaccgtatccggcagtaaaactctcactgaaatatcaggcacgtccgaaggttgcccctgagtttattccgcgtgacatcaacccagaaatggagaaccgtctgagtgccgtacttgccgcaagggaagcagaaggtcgtcagatggccagcctcttcgaaccggatgtgccggaagttgtttccggagaagacgtgactcaggctgaacagccgcaacagccgcaacagccgcaacagccgcaacagccgcaacagccgcaacagccggtgtctcctgccataaacgataagaagtcagattcaggtgtgaatgttccggcaggggggatcgagcaggagctgaaaatgaaaccggaagaagagatggaacagcaactgccacccgggatcagtgaatccggtgaagtggtggatatggccgcttatgaggcatggcaacaggaaaatcatccggacatccagcagcagatgcagcgtcgtgaagaggtgaacattaatgtgcaccgggagcgtggggaggatgttgagccgggagatgatttctga

SEQ ID NO: 16576 - DNA, 234 bp, Escherichia coli
atggtcacagaataccgaggcaatatcggagatactcagagcagcatacgtggcgaagaaaatattgtaggaagacagtattctgaactacaaaatcaccataaaacagaggcattatctcagaacaataaatataatgaagaaaaatcgggtcaggaaagaatgcccggggctgacagtccacaggaactgatgaaaagagcaaaggagtatcaggataagcacaagcaataa

SEQ ID NO: 16577 - DNA, 1212 bp, Escherichia coli
atgcaacctgggaaaagatttttagtctggctggcgggtttgagcgtactcggttttctggcaaccgatatgtatctgcctgctttcgccgccatacaggccgacctgcaaacgcctgcgtctgctgtcagtgccagccttagtctgttccttgccggttttgccgcagcccagcttctgtgggggccactctccgaccgttatggtcgtaaaccggtgttattcatcggcctgacaatttttgcgttaggtagtctggggatgctgtgggtagaaaacgccgccacgctgctgatattgcgttttgtacaggctgtgggtgtctgcgccgcggcggttatctggcaagcattagtgacagattattatccttcacagaaagttaaccgtatttttgcgaccatcatgccgctggtgggtctgtctccggcactggctcctctgttaggaagctggctgctggtccatttttcctggcaggcgattttcgccaccctgtttgccattaccgtggtgctgattctgcctattttctggctcaaacccacgacgaaggcccgtaacaatagtcaggatggtctgacctttaccgacctgctacgttctaaaacctatcgcggcaacgtgctgatatacgcggcctgttcagccagtttttttgcatggctgaccggttcaccgttcatccttagtgaaatgggttacagcccggcagttattggtttaagttacgtcccgcaaactatcgcgtttctgattggtggttatggctgtcgcgccgcgctgcagaaatggcaaggcaagcagttattaccgtggttgctggtactgtttgctgtcagcgtcattgcgacctgggctgcgggcttcattagccatgtgtcgctggtcgaaatcctgatcccattctgtgtgatggcgattgccaacggtgcgatctacccgattgttgtcgcccaagcgctgcgtcccttcccacatgcaaccggtcgcgccgcagcgttgcagaacactctgcaactgggtctgtgcttcctcgcaagtctggtagtttcctggcttatcagtatcagcacgccattgctcaccaccaccagcgtgatgttatcaacagtagtgctggtcgctctgggttacatgatgcaacgttgtgaagaagttggctgccagaatcatggcaatgccgaagtcgctcatagcgaatcacactga

SEQ ID NO: 16578 - DNA, 942 bp, Escherichia coli
atgcttccatcggaaacgatgatctggcagcctgagttcacagataaaacactctccaggaaacccggggcggttcatgttgtatctggagtaaaacctgatcctgagcttgctgcttcaattaaaactgaaattgacagcttagatgcaaaaatcaacgaagccaaagctgatgctcgtcagtatagtggtggtctgataaaggtactaaaattatctactgttgccactgaagagcagactatggcaatgttgcagcaaaagtacctcacagccaagtatggcctcgctgaagttaagctggcatcagtacaagataatgacgcaaaaaacagtactgaaacggaagtaacagccaaaaattcccaagatcaacttcctttactcccgccagcggatggtccgtttggcttagaagccggtcttacacagaaaaacatcgaagatatgatcggtgctaagctcaagccactaccagacagtgtgaatctgtatacttctgataaattaccgaagcaaaacgcagattttgaaatgtatggtttgttgatctccccgaaagctggtttatgtcaaatacgggctttaggaaaaaatattgatactgatagctatggattggctcttaaatccaagtttgaagaattgagtaattctttaagttctctgtatggaaaggctgatactacagactttttgctggctggttcaatttggaaagatcctcaggactggatgagggggctaaacaaaaaagaacgcttcttatctgccacatggaagggaacaaaagaaataccattaaaaaacaatattgatactatctctattgaggccagagcgaacaattccactcagggatatgtctatctgcagtactcatttacaaatgacgaaatttgtcaggcagaaattgaaggggcgaaaaaaagttccctttaa

SEQ ID NO: 16579 - DNA, 324 bp, Escherichia coli
atgaaagataatctagaaaaactaattgaaaatactttaaaagatattctattagctaatgctgctctaacattcatttttgcaataccaatggctattatcagtaggcatgggatgggcatcacaatctggtttataactgtgctcattgcacctgctctgtgtgcagtaggtgcatggcttgtatctcgaacattcggccatgctgaggagttctttcatcgtcggtgggctaagcgaatttatgttttttatactcttgcggctgccgagtttttgcttgtgtactcaatcgcgcaaataatgaaaaatctgatgaaataa

SEQ ID NO: 16580 - DNA, 168 bp, Escherichia coli
atgaaaaatcacggagtaaagccagttttactttcccggaggcagatcgaagccctgcaacgcatccaggacgaagagcgtcagaaatctgtgcttggtgtggcaccgtcgattcatgttactgcccggcaactgatggataaggcacttaaagaggtgaggctgtga

SEQ ID NO: 16581 - DNA, 273 bp, Escherichia coli
gtgaaattaaatatcagagtggataaacgccagctatggcagaaaaaagagaacagcgaggcattcagggctttgctggtggaaaatcttcggcaccggttcagtggagagttgccagatgcactggggaagaaactggaatccctgacagtggaaattggcgattatggctttgttgatgttgaaagcacgactgccaacacagaaatcgtaaaacaggtcgtcaatgatgtaatgaaaaccacgcttagccagccatcctggcgcaactga

SEQ ID NO: 16582 - DNA, 528 bp, Escherichia coli
atgttgatgagtaaagccgaatacgccaaatacaaaggcgtaagccgccagacagtttacgactggctcgagaaaggcgaagtggtcatgtccggtaaaaaaattgatgtggaagcgacagagcagcggaacagcccaccagcacaggggaaagacaccatttctgaaatgtggccagaaagaacgctggaaatgacatggggcgagttctggaaagcagttaaggccagagacggtaaaattcctgcgccagtaacggacgagggcatacagcagcgtgtgctgtatgcagccggggaattaggctgggaagtgcactttcttgatgatggtgctatctgtcttgaggatgatgaagggcagcattactttgaaaaatacaatttgcgaggtaatgccaggctggcaattcgtatgctgcgttgcgaactctgctatgttgccagcgattgtcccgatgaacaggacacatggagtgaggcaggactaaacgccttggctgaatgggaaaaatcaggccatcaatga

SEQ ID NO: 16583 - DNA, 180 bp, Escherichia coli
atgaccatcaccgaagccgatatgctggagatgctccgcagcattgccgaaatcaaacaaccagcaagcaaaattaacaggtgttcagcgcctgtttccgttgtgctgcaacaggaacgccaccagcatgatgatgtgaggccgtatcagtggaagaaaccggacaggctgcggcgataa

SEQ ID NO: 16584 - DNA, 1227 bp, Escherichia coli
atgattgcaggcgcgaaaagagggagaaacgaacgcaaggggcttcactcttggcatccatactatgcgggctattcagagtcatttgtggcttctgttttgcaggctgaaggagttaagtcgtccgctaccgttcttgatccttggatgggaagcggtaccactggtatagtttgtcaaaagcaaaccataaagtgtattggagcagatattaatcctgtaatgagctattttgctgcagccaaaagtagggataatatttcagcgctggattataccggagagcaactcctggaaaggatactgctttgctttagaaaaaaaacaaaagatataactgagtcatcgaagggctatccacttattgaacagttacaaaagttttataaatgtatctgtgatcagtttatggataaaggacaaaatgatatcgtaaatcctttaaaagcattttattgcagtgttttattttatactgttcgcaatgtccttgatgttaggtcaacttcaaatcctacatggatttctaaaaaagtagactttaataataaatttgatatttgttttgaatataataaaaattttaaaattatgcgtgagcagttaagtgaatattatggcagcgctaatgggggggcatgttactcgattttaaacgtggatagtaaaaaattaaatattaaaagtaacacaattgatcttgttattacatcgccaccgtatttaacacgaatagactatgccgtttctactcgtcttgagttggaaataattttagggagtgagggatataagtctcttagaaaggaaatgatgggcacgacgactgtgcctaaagttgcggatgaaattaataaaaaatgggggccattgtgtatggatgttttgtcatcggtaacatcgcatacatcaagagcatctggaagttattaccttaaaaataaaattagatatttttctgatgcgtatgagtcattaatggaaatctttagagttttaaaggtaggttgctctggttattttgtaatacaaaattcatattataaggaaatagagattccgctttatgatatttattgtgaaatggcgctttctattgggttttcagaagcgaaatgtgtgagagaagatcaagttaaagcaatatttggacaaataaataccaagtcaaaaaattatattaaagataaagtttattttgaaaaaatcataaggataacaaaatga

SEQ ID NO: 16585 - DNA, 1113 bp, Escherichia coli
atgaatgacgtaactaaattgctatctcagatagatgaaaaaagagatgaggtagtaactgattcttataccatatcatggcgtgaagtaattaatctatataaagaaaatgagataaccatttctccagactaccaaaggctttttcgttgggataacgcaagacaaagccaatttatcgagtcattacttttaaatatacctacgccaacactttttttctacattgataataatggtaagcaggaggttatcgatggattgcaacgtgtgagtactataattagatttttttcagaggatatttttaataaggaagaaatagataatgcaaagaaacaaaactctgtaaatgatgtccgtaatccaactgttcttgatgatgtgcctataattacagaattaaatggatggactgcaaaaggattgccggacaaagttagccgaactataaaaaatgcgcgagtaaatgttgttattttggagcaagaaacaaaacctgaaactaaatataatgtttttaaacgactgaataggtctggtgttcgtttgagtgaccaggaaatacgtaattgcatggctagattagcagggaatgaatttgcagatcgcttacgtaagatggccgaaattgatggtattgttcaagctcttggaataaatgaagatggccaaaaatctcaaggtgttgaggaagctttgctacgagttatggcatctttgacttatgcggataaatttagccatagtgtaactgactttttggatgaatttatgttctacgcggcagaacataatgttattgatattaattttgaattaaaaataaaaagaacttttgatttgataaatattgctggtttatctggtaaagcatttaaatttagaaaggatggtgctccaagtggcccgtttagtactaatttattagatgttgttgctgttggtatttttagtaatgtagataatttaacacctgctgaggtggcgaaaagatttgattatttaatggatggtgagatcaaagaattaagagcttgtactggttctggatctaatactaaagccaaattagagaaaagaatcgctcttgggaagaaggtgtttggataa

SEQ ID NO: 16586 - DNA, 762 bp, Escherichia coli
atgagaatatcagatttcgatgatttcaaggtgatgttggaaaagacgaaaaatgaaagtcttggattccttgagagcataaagtctattaatgagtttatgtcgagatcaggtgataaagacaaggaggatatgtttagaataatatcggtcccaatgatttattcttcttgggagggtttttttactgaaacaatgtcagtttgcttaaatacattgaaactctcagatagagaggcatttagatactctgcagaaattcgagcactttggttgcaacgagaaccattttatagcaagtatgtagatatgataaaaaatatttatgatgctgactcacaccgaagcattgtccataatggcgcccaaataaaaaagaaagttacgaagggggcgtttaaactaacaagtgaggtaattcaacacattgacaggtttaataaatccacattatcagattgcgatgtttctgaattagttatgacattttccaatgtgaatgaaatggttgtcaaggtgaatttcgatgctataggtttggattattcatcacttgatttatcgcaactaggtgaggttgttggccttagaaattctttgggacatggggagtttaaaagtagtgttaaccctaggaaatttaattcaataattgtgtatgtggaaaatctgatcatcgatttgaatcaatgtgctataacgtggttggataaattagaagatgaaataactaagcctgaagataatgagactattcagtga

SEQ ID NO: 16587 - DNA, 153 bp, Escherichia coli
atgccgcacagcaagtggaaatggatgcaaatttccgcacagcatttccgcgatgtaagtgtttgtagcaaagccatgacgaaaagctgtggcagccttaacatgctccccattcagaaaatgcagaagaccaagttcataccagtaaggtga

SEQ ID NO: 16588 - DNA, 483 bp, Escherichia coli; identical to SEQ ID NO: 6584

SEQ ID NO: 16589 - DNA, 597 bp, Escherichia coli
ttgacgttttgcggggacctgccgtttgttccctccggtattcaccatcacctgtttgagaaccttcgccgcaaggggcatcactgccacggcctgacgcacctgtcctgggcagaacgcaaaattttttaccgggttttgggtaaaaaattttgtgggctgttcatttaccctggacagtcagtgcggcaggttgtggctgtatcagctcccggcgacaggggctcatacgggtgtgtggcacttggcaggcaatgggcaggaacccgccgcaacgacgtgaagcgcggtttgcgaaacggcgttgccccttacatcccggcggccttttgccgggatgccgggagcgcaggccacggcgcgacagaggcggcgcgaccggaacggtcgctgcaagcccggggtttcgcgtcagggatggaagcccgccagggcggagacagctccgctggctccgttcacgacagcccgccccgccagggggacgcccggaaaaggcataagcaggagaacaacaaaacagacaataatcagggcagcagtaatcagagtcagaacaggaggaaaaagagaataatcaaagggaaggtgatgtga

SEQ ID NO: 16590 - DNA, 237 bp, Escherichia coli
atgttgacctcaataacaggccacgacagtgtattgctgcgtgccgacgctcccctgatcgacatgaactacatcaccagtttcactggcatgacagataaatggttttacaagctgatcagtgaaggtcatttccctaaacccatcaaactggggcgcagcagccgctggtacaaaagtgaagtggagcagtggatgcagcaacgaatcgaggaatcccggggggcagcagcatga

SEQ ID NO: 16591 - DNA, 294 bp, Escherichia coli; identical to SEQ ID NO: 5034

SEQ ID NO: 16592 - DNA, 501 bp, Escherichia coli
atgttcagtgataatgtgactaatgcgtggtggtttatctctttgtatctatttttattaatagcattaacatttgttacctttggtaaaagtaatcttatgaggtttattgcacatcatttcaatcttgagtattcagacagaaagttaaaaatgctcgacaaaaaatggcgcgacattcaactatttaaaataattaacggaatcaatgtatcaggcatcgaagatgtgagaatgatacagcaggggctgattgatggaaaactaaaaacatcgtattttttccttactcgcttctggggtgacataacaaaaccaccacacataattaaaacaacaattgtaattctggccagtattatttatattctcttcgcatgttatatacacaatgaacaatccgctatagtaaggtggatttgcccctatatttccagacacctgttatcacttaacccattactggcttgctgccgtagatattcccgtggcgagcgataa

SEQ ID NO: 16593 - DNA, 636 bp, Escherichia coli
atgaacactctcgcaaatattcaggaactcgcgcgcgcactgcgcaacatgatccgcaccggcattatcgtcgaaaccgaccttaatgccggtcgctgccgtgtgcagaccggcggcatgtgcaccgactggcttcagtggctgacccatcgcgccgggcgttcgcgcacatggtgggcaccttccgtgggggaacaggtgctgattctggccgtgggtggtgaactcgacacggcgttcgttctgccggggatttattccggcgataaccccgcgccgtctgcgtcggcggatgccctgcatatccgtttccctgacggggcggtgattgagtatgaacctgaaaccagcgcgctcacggtaagcggagttaaaacggccagcgtgacggcttctgattctgttactgccacggtgccggtggtcatggtgaaagcatcaacccgcatcaccctggacacaccggaggtggtctgcaccaacaggctgattaccggcacgctggaagtgcagaagggcgggacgatgcgcggcaacattgaacacaccggcggtgagctctcatcaaacggtaaggtactgcatacccataaacaccccggcgacagcggcggcacaaccgggggacctctatga

SEQ ID NO: 16594 - DNA, 531 bp, Escherichia coli
atgagtgattcgcgactgctgccgaccggctcatcaccgcttgaagtcgccgccgcaaaagcctgtgcggaaattgaaaaaacgccggtcagtattcgtgagctgtggaacccggatacctgtccggcaaatctgctgccgtggctggcgtgggcgttttcggtcgacaggtgggatgaaaagtggccggaagcgacaaaacgcgccgttatccgcgatgcctatttcatccactgtcataaaggcacaataggtgcaatccggcgtgtggtggagccgctcggctatctcatcaacgtgacggagtggtgggaaaacagtgacccgcccggcaccttccggcttgatattggtgtactggaaagcggcatcacagaggcaatgtatcaggaaatggaacggctgattgctgatgccaaacctgcaagccgccaccttattggtctgaacattacccgggacattcccggctacctgtttgccggtggtgtggcttatgacggcgatgtaattacggtttaccccggataa

SEQ ID NO: 16595 - DNA, 2022 bp, Escherichia coli
atgagcacaaaattcaaaaccgttatcaccactgccggtgcagcaaagctggcagcggcaaccgcgccgggagggcggaaggtcaacattaccacgatggccgtcggggatggcggtggtaaattgcctgtcccggatgccggacagaccgggcttatccacgaagtctggcgacatgcgctgaacaaaatcagccaggacaaacgaaacagtaattatattatcgcagagctggttattccgccggaggtgggcggtttctggatgcgtgagcttggcctgtacgatgatgcgggaacgttaattgccgtggcgaacatggccgaaagttataagccagcccttgccgaaggctcaggacgttcgcagacctgccgcatggtcattatcgtcagcagtgtagcctcagtggatctgaccatcgacaccacaacggtgatggcgacgcaggattacgttgatgacaaaattgcagaacatgaacagtcacgacgtcaccctgacgcctcgctgaccgcaaaaggttttactcagttaagcagtgcgaccaacagcacgtctgaaacactggctgcaacgccgaaagccgttaagacggtaatggatgaaacgaacaagaaagcgccattaaacagccctgcactgaccggaacgccaacgacgccaactgcgcgacagggaacgaataatactcagatcgcaaacacggctttcgttatggccgcgattgccgcccttgtagactcgtcgcctgacgcactgaatacgctgaacgagctggcggcggcgctgggcaatgacccgaattttgctaccaccatgactaatgcgcttgcgggtaagcaaccgaaagatgccaccctgacggcactggcggggcttgctactgcggcagacaggtttccgtattttattgggaatgatgttgccagcttggcaaccctgacaaaagtcgggcgggatattctggctaaatcgaccgttgccgccgttatcgaatatctcggtttacaggaaacggtaaaccgagccgggaacgccgtgcaaaaaaatggcgataccttgtccggtggacttacttttgaaaacgactcaatccttgcctggattcgaaatactgactgggcgaagattggatttaaaaatgatgccgatggtgacactgattcattcatgtggtttgaaacgggggataacggcaatgaatatttcaaatggagaagccgccagagtactacaacaaaagacctgatgaatcttaaatgggatgctttgtatgttcttgtcaatgccattgtaaatggcgaagtcatatcaaaatcagcaaacggcctacgtattgcttatggtaattacggattctttattcgtaatgatggttcaaatacatacttcatgttgacaaactccggtgacaacatggggacttataacggattaaggccattatggattaataacgctactggcgctgtttcgatggggcgtggccttaatgtttcaggggagacgctttcagaccgttttgctattaacagcagtaatggtatgtggattcagatgcgcgataacaacgctatctttgggaaaaatatagttaacactgatagcgctcaggcgttgcttcgccagaatcacgctgaccgcaagttcatgataggtggactggggaacaagcaatttggcatctacatgattaataactcaaggacagccaatggcaccgatggtcaggcgtacatggataataacggtaactggctttgtggctcgcaagttattcctggcaactatggcaattttgattccagatatgtgaaagatgttcgacttgggtcacagcaatattatggagtgaacaactggcaaacatggaatttccagtgcccgtcaggtcatgtattgtctggtattaatgttcaggatacagggtccaactctgccgataatatagcgggcgtttattacagacccgttcaaaagtatataaatggcacctggtataatgtagcgagcgtttaa

SEQ ID NO: 16596 - DNA, 900 bp, Escherichia coli
atgagtggtattcgtataactcaggctattgataacaatcagattttagtaaatgtaaatacttttaattatagtgttaatccctatccactcaaatgtcctgacccaaattgctctgctcatttggtgtatgtcaaaagccatattcgtcggagttttaataaaaccttgcatatccccgccttctttagactggaaaaaaatttcacgcatgacaaattatgccagtatggaacttcaggattgaatacaatttatgcaagtgattccagtcatgatatcagccgtgcgcttgccacaggtaataatatattccgtatacatatactcgatgaagatgatatctctaaattaagcagaaaagctgcagctatgcaggcaaatccaccttctgatactacagaccgcgtttatgtcaagagaggtcggaaagccccttatgtgaagaacatggatagcttacgggagatctatgaatatggaaaagctcaccccaacaagagaaacagcataaaaattgttactggaacaagtactgtaacgtggtctgattttttctatgaaacaacgcagttagaacgattgtcaacttacctccagaaagtaaaaatagctcaggttgctgtaattatgaaagtgcatgtggcgagaatccctatggcgaaatttaattatcgacacttcattgaaggttcgccaatgaggataaaagggggctttaatatatatcctacgattcaattaggaaatgttactccaaaattatttccgttgagtagcattgtcatggtactcggtaaatttactattccaacaaatagaaaaatgataatggatccaatatttgagcgtgaagtcagaaccatagtttctagtgaagagcaagtgctaattctttga

SEQ ID NO: 16597 - DNA, 1548 bp, Escherichia coli
atgtcagaaccacgtctgggtaatctgattaccgttttactacctgcgcgtagttacaagatcaactgcgctttgaccactgaaaaactgatgcctggaattgaacagtttgcatgtcgcttgctgctgatttttgatcaactctatcccagcgagttacagaattactttggtctaactgatcgtgagcgagaggtattgcttgatgggttgctggctaacagactgatcaacattaatcctgatgggcatattgaggctagctcattcctacgtaagcatgcagctaataatggtgggaagccaagtttagttaaatatcaagaatgtacggaggaagttgcattcgatctactaactctttcgatatgtaaaccgcaaccaaatcgtcgttttacttctggactgccagagctattgccgcggcatcagatcgggggagatgctgctgcggtaacagaggcttttagttcccagtttcggcaccatcttttgctcagccgcaacagcgagtatgagcgtcaacggactaaattatataagataatgggctgtagttcgcatgagatggtgcagctcccaatagagatagaggttagctacggtgtttctgctgggagcattgagccgcagaaatttactcgttcctatgaatatttaggtaacacccggctgccgctttcaaacgagctggaagctcatatcgcagattttttgggagaacataaactagatgaattcggtatcgactgtgaagatttctgtaaactagcaaatgataaagtgttgttacaatttgctaatggttataagttcaactattccggctggatagaggctcgtgaacaacgtaaaactggctacggtacttcattgactaccggcatgttaggggctgtttatttgccgcacaattctaagctgttcattagtatgttgcataatgcattacgtgattatataggtaaaacagctccaaaagcgctgtggtatagcagtaaagtaccactgtggggagctaatggtagtcaactttcgcgttttactcgcgctctaggcgatatacttggcaattatgccgatgataagattgctcgcatttcgcttttacactcaagtgcagatgaaggtgaaaaacgtcaagagcgtaagcggcacttaggtcgttttcctaccggtattggccttacttcagaggctaaatttgatcgtttggagatcctcttaattcctgatgtgattgctttggtgcaataccacggtcaacctaattctgatagtgcattaaccctgccgattggttatataactgttgagccagagcgtttagaattacttaaaaaactaatgattaagcgaactgaaggggctgttgcaaccattacttggtctgaatcaaaatttgaaaatttagcttcgctattacctgttgagtttctgattaaactgaataagaaaagcggtgaagatgtggatgctgcaataaaaaaaatgcagatctataaccgtgctgaaaccgcacgggcaattttatcgctacgcaagtag

SEQ ID NO: 16598 - DNA, 4959 bp, Escherichia coli
gtgaagtatcagatagtaggtggtgctggcctgcaccgcagcgaaaccaaaacagttgatatgatggttaagcagttaccagatagttggtttggctatgctggcttagttgttactgatagccaagggtcgatggaaatcgatatgctaattattactgctgaccgtctgctattagtcgagcttaaagagtggaatggtaacatcacatttgaaggggggaagtggctgcaaaatggtaagtcacgaggcaaaagtccctatcagatcaagcgtgagcatgcactgcgactaaaagatttgttgcaggaagagttatctcgtaagctgggttactttttgcatgttgaggctcatgtagtgctgtgtggcacagctggtcctgaaaacttgccattaagtgagaggcgctatgttcatacccgtgatgaattcttgactataggtaacccaaaaaattacgaaaagctggtgcaacacactaacttttttcatctttttgaagggggaaagcctcgaccaaattctgatgaggcattacctataattaagtccttctttgaaggaccaaaagtcaggcctttgccactaaaagaaagcggttatcttgcgaacgataagccattctttagtcaccctcacatggtctacaacgaattcagggctacccacaaagacaatagtcaacacagaggtctgctacggcagtggaactttgatgccttgggtgtagcaaacgcaatgcaaacattgtgggctgagatagctctgcgtgagactcgagtcggtcgcctagttcgtcatggcagcgcaactatgcaggattatatgttgcgtgctgtaagggaactatccgaggaggatataactgatgatgcccgtgagctgtatgagttacgccgtagttttagccgattagatgagattctagatagcgaagctgacggatggagtaaatctgagcgtattgatcgcgttcgtgcattattagctccattctcggaattacatagcttgggtatcagtcattgtgatattgacccgcacaatctatggtacgcaggggatcagaagagcattgtcgttactggctttggcgcagcctcactggagggacataatagcctagagtcattgcgtccgacattgcaaagtgctccatatattttgcccgaagatgcttttgaagaagcagttgagccctatcgcctagatgtattcatgttggctgtaattgcttatcgtatttgttttgcaggtgaatcattactgactcctggacagatgcctgaatggagagctccattaactgatccttttagcggtattctaaatagctggtttgagcaagctcttaaccttgagccaagtaaacgctttccacgtgcggacataatgctcaatgagtttaatgcagctactaaggaacatagccaagaatttgatgaagctaaccagatttatcaagaattaaagcaaaacaaattctttcgcgaagggatgaacagcgttggtgtgttaattgagtttcctccacttcctgaacagttgtctatggtttactctgctcttgctgctattgctacgactggcagcatcagttatcactgtgaacaaggtgggaaagctctgcaggtaaaattgtgggatggtgttattttgacccctcaacaacctggtgttaaccgccgtatccacgcttttaagcaacggatcgataagcttacgcatataaatctgccaactcctaaggtgcagtcctatggactattaggacaaggcggcttgtatgtagtgagcgagtatgtggatggcctaccgtggtcacagtttattgctgagaacgtgttagtacaatcccaacgttttacaattgcggaaaagttgatcaacaccattcatgcttttcatgaaaagcagttacctcatggagatctttgcccagagaaactgctggtacaagtcggggagcagacagtaattactctgattggattgcttgaattcagtgatgaattaactgcagataatcgctaccagccagagaatcccgaaagtactgatgcttttgggcgagattgctttgcagtatatcgtatggtggaggagctatttagtgaagatatgccagtactggtgcaggctgagctagaacgcgcaaaacaaaccgttgacggtatacctatcgcgctcgatcctttgctgcagtcaattcgagcaccggaacaagctgagattaatcaagttgtggcgtctgagtcacaggataaggtaattcctgtttgctggggcacagatgattggccgcaagaagtgaagcttctagaacaaaatgatgggatctattattttcaatgtaactggtcatctaacccacgctttgcgcatgaattgcgttgttacatcactggcctaggagagcggctattgatagacttagatcctgataatcgcactattaatagaatagtgtatgaaaaaggattatcgatcgaagaaagtataaaggctggtaaatattcccaggctaaaattaatactcaactttcattacaacgtggctcacttaatcagcgtaatacttttattgaactactgtttaacctcgagccagtaattgatgccatcattgagcgagctaatcctaatcaagagatggatgaagatgacttcgatagtagtgagtcaagcccaattgagttatggcaggcattatctgatacagaagtagacctacgagatatagtcaacatcgactctactgactttcaggaatcaccgagtggttgcttactctacccatatactacggaatccggtgctgacctcagctttgaacttgatgataagatcattgtttatattaaagataagcgtgaatcagtgcaattaggggaattgcagctaagtgagactacgccgagtctattggctattcgctttgattttgatgctgctcgtaagcgaattagtagcggcagccagctacaattggaatcgatccgtgacaaatcatcaagagagttgcgtcaaagagcccttcaacgggtaattgaaaacaaagcagagatccagcatctgccacagtattttgattaccaccagaaaccctgcatgcagcaaatgcaaccgcggccatccgcggagacattacgcgcactttatgatcagcctggacaacgttttaatgaacagcagctaatggcatttcaacagttggtcgagtttggaccagttggagttctgcagggaccacctggaacaggtaaaacaacatttatttcaaaatttattcactatctgtatcaacattgcggtgtgaataacattcttttggtcgggcaatcccatgcctctgttgataatgtagccatcaaggctcgagagctctgccatacgaaaggaatggaactggatacagtacgtattggtaatgaacttatgattgatgagggtatgctaagtgttgcaactaaagctcttcagcgacagattcagcataaatttcaccgtgaatatgatctgcgagttagctccctaggaaagcgcctagggatggccccattattagtccaacagttatgtcagttacatcgtacgctgaatcccttgatggtgacatatggccaatatagccgtgagctggataaagtagaacaaataaagagtagtagtattagtcatcaagagcgactggctgaattattagaacaaagcaatcagcttaaactgcgaacacaagaaattattaactcaatattcgatgacagcttgctgaaaactcttgtctatgatgaaaccttgataagacagttggctgagcaagttgccatacaatacaattataacaatccagagaaccttgaacgttttatgcagctattggaaatgagccaagagtggatggatgtattacgcggcggcgaggctggatttgatcgatttatgttcaaaagtaagcgattggtttgtggaactcttgttggtgttgggaatcgtcgactagaactagctgagtccagctttgattgggtaatagttgatgaggctggccgagcacaagctgctgaattgatggtagcgctgcaatcaggcaagcgggtgctgttggtaggggatcataaacaattgccaccattctatcatcaacagcatcttaagttagcctctaagaaattagaactcgggaaagggatcttttatgagtctgattttgaacgtgcttttaaagcaacaggcggcgtaacactcgatactcaatatcgaatggtagaaccaattggcgagttagtatcggagtgcttttacgctcaagatatcggtaaactgcattcatcgaggaaagtctcgccagattggtattccaagttaccaatcccttggaacaaaactgttacttggatcgatagttcgagccctaatgaagcaggtgcagaagaacataagggtaatggtcgttactataatcaacgagaagtccggctactgctagaggctttgcagtcattgtcgagtgatggctgcattgcacagcttgagcaaactattaccacagaacagccatatcctattggtataatcacaatgtatcgtcagcaaaaagaggaaattgacaatgctatcagtcgggctgaatgggctgcatcgttacgtggtttgatcaagatcgataccgttgattcatatcagggccaggaaaacaagataattatcctcagtctggttcgcgataatcccaacaaactacaaggtttcctgcgcgacgcgccgcgaataaacgttgctatttcgcgagctcaagaaaggttattgattctgggagcaaggcgtatgtggtcaaagaccaataatgattcagcacttggaaacgttcatgaatttattagtaaacaggttgcagtagatgaacccaactaccaaatcctgtgtggtcaaagtctgcttggagataacaactaa

SEQ ID NO: 16599 - DNA, 444 bp, Escherichia coli
gtgaaggaaagcgacccgcgctggtgtgccgatggctttgagttcggttgtgatgatgacgaaaaactgcgtgtcacgttcgcactggactgttgcgatcttgaatccatagactgggccgcaagcacgggaggttatggcaaagcaacggtgcaggatgtcatgtcaggagcgatagaaaaacgctttggcgatagaccgggatggcccatccagtggctgaccgataacggttcggcttatacaactcatgaaacacggcagttcgccagagagttgaatctggagctctgcacgacggcagtcagtagccctcagagtaatggaatgagagaacggttcgtgaaaacgatgaagagcgattacatcagtatcatacctaaaccggacgtgttaacggcagtaaaaaaccttgcggaggcgttcgaacactataacgaatag

SEQ ID NO: 16600 - DNA, 846 bp, Escherichia coli
atggaaagagaatcacagccagcacgtaccgggctgacgcaggccctggcccttaacaacgatatctggcgggccagtttttatcgtttctgccagctgctggagctggaaaatccggacgggccaaaactgggcacgaccagccatccgggcgatgacccggtgcgattcaggccctggcccgggatgggattcccggtcagcaccctgaaagcggtggagatcgacgaagaccgtccgacattacccccaacgatccgcacgacatttctcggaatgtatggggtggactcacctctgccgacgtcctggctggatgatattgcgcagcgccgtgaaggacatgaggcgctcacctcatttctggatattttcagccaccgcatcaccacccagtactaccggatctggcgaaaatatgcgtatccggccactttcgaggagggggggcgcgatgccacatcgcagtgtctgctgggactggtcggactcggtatacccggcaccgctgaacaggtggcaacgccggtttcccgtttcctggccttactgggtgccatgcgattacccacccgcaatgctgaaggcatccgggctctggtgagtctgctggcaccggatacccgcgcacttatcaccgaacccgatccggttaaggtccatatcgataaccgcagtgggctgggtgccggaaaccgcatccgtctttcgcagcgggccacgctgggtaaaacggcaggggaagcatgcagccggctcctgatgacactggaaacagcggatccggacgaggcggaaggctggttgcccacagataaccggagcaggatttaccgcctttcttag

SEQ ID NO: 16601 - DNA, 1674 bp, Escherichia coli
atgctgaatctggataagcctggtgcctgcgatcccagtgtggaacgtctgtttgaaggctttgccttcctgatgggacgtttgcgtgaaaagctggatgatgacctgccggagctcaccgaaggtctggtgagtctgctgtggccgcactatatgcggactatcccgtcgctggccatcgttgagttctcgcctgactggcgtagtctgcgtcaggccgaaatactggctgaaggcttttccgttctgtcccgtcctgtcgggccgcataaaaccgcctgccagtaccgggcgacccgcgatgtgttgctacaaccgctgcaccttgcagatgcccgtctccatactgaatccgatggccgctctgctatccgtctgcgcttcgaatgccctgaaaaagtggactggagtaaagccgggatcgacaaagtcgccatttttcttaacgcagaggcgccggtaagtgctgcgctacatctggcaatgacccggcgtgtacatgccatgtatgcgcgtcatgccgggacatataccggacgtcgtcagtttgacggctggtgcagacccatgggctttgacgacaatgactgcctgtggaagaaagctgatacagccttcagtggttaccagttgctgctggagtatttcagcttccgtccgaagtttatgtttgttgaactgcgcggcctcgacaccattgggctcactgcggccagtacctggtttgaaatcgacattgtgctcagtgaagcctggtcatccggtttgccttttgagacagaaaacttccgcctgcactgtgcgccggttatcaatctctttaccctggaagccgacccgctgatccttaacccgctggataacgagtacctgctcaggccgctgcgtcttcaggatggtcacaccgaaatttacagcgtcgataacattcacggctcggtgaagaacggcagacacccttatgtcccgttcaccagcttccggcaccggggcggtatgatgcgccacgatgctcctgaacgttattaccacacccgtgtgaaacggggaccctccggcctgtatgacacatggttagttctcggggggcgttcgttcgagctggagcagttgtccgataaaccggagtccctctcgatgcgaatcaccgcgaccaacgggcagcttccgcgcagggcgctggaaagtacgctcctggacagggtggtcaaaaccggcaaagtccccgtcagagtcctgaacctgaccgcaccgacgatgccactgtatcccccggcaaatgaccggtttcactggcgggtgatgagtcacctcggatcaaactttctcagcatgatggacaatccggaggtgctgcgggggacgctggcgctctatgactggaccgacgatgaaatgaaccgccgccggcttgaagccatcgttgctgtgaagcacaccctgatccgccgttttgaaaagggctttatgctccgtggcgtggacattgaggtcacgctgaatatggataattttgccggcgagggcgatgtgaatctcttcggggagatgctgcaccgtttctttgcgctctatgctgatgttcaccttttcaaccagctcacactggtactgcaacccacagggaaacgactgagatggaaagagaatcacagccagcacgtaccgggctga

SEQ ID NO: 16602 - DNA, 501 bp, Escherichia coli
gtgcaaataaccgaagccttactttcagcgccgggggaaatccggcgttttgttcagcagggggtggaccactggccgcgtctgctggcatttcacttcacgctccattcggcagaaggaaacatcaacgggcaacagattcatgcattctgtacttccttttatgaacgtattactgagcgtaatcacacgaccagtccatcatcgccggtggtattacgctggttgcgggaacaacatggaggagcaacaatgcgatgcctgttgctgctcagccagacgagtatttgtcacccgcgagccagtgtcacagttgatgaacaatgttcgcaagtggtggatttactgcagcagacctggcgggggatggatacgggcggacaatgtcgggtggaaaggtgttttcgggttacccggcctgatacatcagagcaatacgttgcgttaaaaacggctgttcagtctctgatgccactggttattgcaacaatcatccggtga

SEQ ID NO: 16603 - DNA, 1365 bp, Escherichia coli
atgttatcaatatttaaaacggggcaagcggcggatagtgttccggcggagaaaattcaggtgacatatcgtcgctatcgtatgcaggcgttacttagcgtatttctggggtatcttgcatactatatcgtgcgtaataatttcaccttatcaacgccttatcttaaagagcaattagatctcagcgccacacaaattggcgtactgagtagctgtatgcttatcgcctatggtatcagcaaaggagtgatgagtagccttgccgataaagccagtccgaaagtctttatggcgtgtgggctggtgttatgtgccatcgttaacgttggcctgggattcagcaccgcattctggatttttgcggcattggttattctgaatggtcttttccagggaatgggcgttggtccttctttcatcactattgctaactggttccctcgccgggagcgtggtcgggttggtgctttctggaatatctctcataacatcggtggtggtattgttgcaccgattgttggtgccgcttttgccctactcggcagcgagcactggcaaagtgcgagttatatcgttccggcctgcgtggccatcgtttttgcggtaattgtgctgattctcggtaaaggttccccacatcaggaaggtctaccctctctggaagagatgatgccggaagaaaaagtcgtcctgaatacccgacagacggtaaaagcaccagaaaacatgagcgcctttcagattttctgcacttatgtattacgcaataaaaatgcctggtatgtctcactggttgacgtatttgtatacatggtgcgcttcgggatgattagctggttgcctatttatctgctgacggtgaaacatttttcaaaagaacaaatgagcgtcgcatttttattttttgaatgggccgcgatcccttccacgctacttgccggttggttgtcagacaaactgtttaaagggcgtcgtatgccattggcgatgatttgtatggcgctgattttcatttgcctgattggctactggaaaagtgaatcgttgtttatggtgacaatttttgctgccattgttggttgtctgatttacgttccacaatttctggcttccgttcagactatggagatcgtgcccagctttgctgttggctccgcggtaggtttacgtggttttatgagctatatcttcggtgcatctctgggcaccagcctgtttggtattatggtcgatcatattggctggcatggcggattttatcttcttggctgcggtattatttgttgcatcattttttgctggttatcacatcgtggtgcaattgaacttgaacgtcacagagccgcatatataaaagagcactaa

SEQ ID NO: 16604 - DNA, 1806 bp, Escherichia coli
gtgaaaaacgcaccgaatttaaaatatcagccgaaggataaattcaccgaggtaatcatttttgccgggacggatgcttacgcccatgctcaacactggattgaaagcgaaggacgaaaacacggcgataacgtgcctcctgtttacctggggccaaagcaaccggcagacctggcgaatatccgcattgtcgacgatgaacgccgctttgcgcgtgtctatctcgcgggggagatagagccaatccagatcaatgctattgctgaaaagctggcgctggctggtgtacaggacgcgaaattatacaaaggtatcaccgaccgggagccggaaaactggcgcgactacctgcaacggatccgcgaacaggcagagagtggggaagtttcagcgatgaaattagccacaaaaaatattgacctatccaggccagcactaaatcagatgggagccagccagagaggggaagtgttacttgaatattatggaagagcactggctataaatgatgattctgatgtagttcaccattacaacggaattgtctgggtgcctgtatctgataaggaactccagcggtctatggcgaagatttttattgatgctggaatcagttattcgcaaaacgccattaaatttgccgtagacacaatgaaattgagcctgcctgttatgggcggggcagacaggaatcttattggattcagtaacggggtatttgatacccggacgggaaattttcgggagcataacaaaaatgactggttgttaaatgccagtgaattaccgttcagcccaccagcagagggggaaacgctggcaacacatgcgccgaatttctggaagtggctgcgtcgttcggtggcagataatgatcgtaaagctgatcgcgtactggcggcattattcatggtactggcgaaccggtacgactggcagttattccttgaggtaacaggcccaggcggaagcggtaaaagtgtgatggctgagatttgtaccatgctggcgggtaaggccaacacagtatcggcaagcatgaaggctctggaagacgcaagggaacgcgcgttagtagttggcttttcgctgattatcatgccggatatgactcgctacgctggcgatggtgcaggaattaaggcaattactggcggcgacaaggtggcaattgatccgaaacataaagccccctactccacacgtattccggcagtagtgcttgcggtaaacaataacgccatgtcattcagtgaccgaagcggggggatctcgcgtcgtagggtgatatttaatttctctgaggtcgtaccggagaacgaacgcgatcccatgctggcggaaaagatagaaggcgaactggcggtagtgattcgccatttgctaacacgatttaccgaccaggacgaagctaaaagactactttatgagcagcaaaaatcagaagaagcgctgttgataaagcgcgaaggtgattcactggtggacttttgcggctatctgatgtcgttggttaaatgtgaaggaatgatggtgggcaatgcggaaatagtgccatttagcccgaggcgatacctgtatcatgcttatttagcctatatgtcagcgcatggcctgggaaaaccagtatcactgacacgctttggtactgatatgccaggagctatggcggaatacggaaaggagtataagcgggctaaatgcactaaaggcccggataaagggcgagtgataacaaatgttctgttagatgatgatgctgatggctggttgccagcagctacagggattaacgacagaacataa

SEQ ID NO: 16605 - DNA, 291 bp, Escherichia coli
atgaaaaagaaatattctggctttactgccagcggcctctctcggcctgaaatccgccccggtgatattttccgggacaccagacgcgggggacgggtggttattcgtcacgttacgccaggcaatatcacctaccgccgtgaggcttacgaatatgactgcgtaatgccgcgccgtcagtttgagcgtgattttattctggtggaaaacaaacaacaggcagtggcgagacgtgcagccacgaatattaaaaaaatccgggcaatgttggttgcgggaggtaagaagtga

SEQ ID NO: 16606 - DNA, 201 bp, Escherichia coli
atgcataatcatgaagcgcatgtacccgtagtgcttaatgtgccagatgatttcaccggacgcgtgctggtttacctggataaagggaaagtgaaatcacaatgccgactgaaaagtaatgagattgttggttctcctgaatttttttctgaactttgtattcgtgcggaaataaaaccggaactgctgacaggaaaataa

SEQ ID NO: 16607 - DNA, 234 bp, Escherichia coli
atgcgtgatgatcgttttaattccctgaaacaggagtttgatggcgcaccggaagatacatcgggcgcattgttgagcattgctgacatgatgaaagctgcatattttcttatcaataccagtggctacaagtcagagggtgaaatgattcttagtattgcgtcggactatgctgaatatgtggcagagacgcgttacagaagaaaatctctggaggatgtaagccatgcataa

SEQ ID NO: 16608 - DNA, 225 bp, Escherichia coli
atgtgtaatgcaacatggcctgatgcagcggtagacgctatcaaaacgctgatggattcacttattgagatttctgctatcgctggtgtggcgcataaacacgcagccagagaatcagaatgcatctcccattatttagcatttgtgcagctaaaagccgatcaggcactggataaggccggaaaaattatcatggctgatgtgcaggaggtgcaccatgcataa

SEQ ID NO: 16609 - DNA, 366 bp, Escherichia coli
atggctggaacacagcatacccaaactcaccctaaatttatatacaccttcctggcggtgcaccgtgattgcattgctgacggtaaaaacactgtacacgtagccgccgatacgctggttgatgcctgcgagatgctcaatgacatgggctatatctcggcaacatggaaagggcgcgaagaaaacacgctgtttattcagaaatgcgaaaacaattttatctggcgttttatcgccctgagtacggcacaaccgcgcgtgattcacatcgaggccaccagcgaacaggaagcacgccagcaatctcctgatggctgcgtgatggtattcgctgcccgtattcgccaggaggtggagcatgtgtaa

SEQ ID NO: 16610 - DNA, 306 bp, Escherichia coli
atggcaacaggaaacatcaacagcagatcgcaaatgaaaaatatccgcttcccccatgatgtaatcgaggaaatggaaaattcgaaaacggaaggggaaacaatagccgctttcgtgattacagccgttcgcggtgaaatcgcccgccgccaggcagaaggaagcggagaaaatcccctggtttcttcgctcgatgccctagcgcaggtggaaaaaatcggagtcaaagctgccgaggaaatcgggcaactcgtcaccgtcgcgcgtgaagaactccagcggcgcaaagctaaagagcaggaataa

SEQ ID NO: 16611 - DNA, 801 bp, Escherichia coli
atgaaatttccaaaaacgcccgtacaggggcggggcttcgttcggcctgaaaaccagaatctgcaaaatttcggcgaaattatcccgattatttccggcgttattggcgggagtgaaaccactattgttagcgccagagcgttacataaggcgttaggtgtagggcgcgttttccgttcgtggatcaaggggcgcattgaagaatatgggttcacggaaggcgtggattatgaggttgttgaatatttgagccgacccgatccggtgagcgcaaaatctcgccagcaaaccgctcttgagtacatcatcacagtgaacatggcgaaagaactggcgatggtcgaacgtaccgaacagggccgcgccgttcgccagtactttatcaaatgcgaggaggagctacacaaggttgcgcctgttcgttccgcagcgttacgccgggaactgaaagcccgtatcacagttgccagctactttaagccaatgtgtgccgcgctggaggcgtaccgggctgaactgggtaaaaacacactccagcaccactacaccacggaagcgaacatgctggcgcgtatcgtgctgggtggcatgactgcaaaacagtgggcactggcgaacggcattacaggcgaaccacgcgaccacatgagcacgttgcagcttgagcacctttcttaccttgagcagagcaatatcacgctgattgagttaggccaggactaccaccagcggaaggctgaattaattcgtctttcgcagcgttggttagcccgtcgtatggaggaaaacagccatgtgtaa

SEQ ID NO: 16612 - DNA, 198 bp, Escherichia coli
atgtcaaatacgcttattcgtttaacagaagttcagcgtagaactggatatagcaaggcatggatttatcgccttatggggcaaggtaaatttcctgcatcagttaaaattggctcgcgagctattgctttcgttgagagtgaaattgacgagtggattaatcagcgtattgcggaatcacgcggaacagctacctga

SEQ ID NO: 16613 - DNA, 798 bp, Escherichia coli
atgattgatattcatgccgaattaaacgaatacaaaaaagattttatttctttacgtgaatttcttgagatcgtgcttaaggtcgctggtgatgattatgatgtttcagatgtcataacttggatactcaggagaataagcggagaacatatccgcctgtacacagtaaatgaatttaagctgttggaatctttttgtaacccgtatcgggatgaatttgataatgatgttctttatagaaatctgaatgcggttcggaaacgtggttgtttacctggtgagagggatgaaaatggttttctggtgtccggttattgggaagatcccgaatttgagaacattggatttataaggggtgaaattttcgcaatttttcccgatgtccttgacgcgttaacgaagctggaaggcgctaactcttctgaaaatgacgaggcacaaggacgcgatattgaaaagaaagagttgcgtacagaggatgatttattatcccaaatcgcaatgctggaaaaagaaaacgcagagttaagggcaaggatagagcagttagagcaagagcgcccgatacacttatataaatactgggataaagacccattagctaaggctattgagattagaaacagagagtgggccaattacgatccagaaaatgattttgccaccaggggaaatcaagaagcgataaccagggagcttaagcagtggggggcaagtaatgcacttgcaacgctcatagagaggactgcctgccctattaaccgagacaacagtcaaaagaacgcaaagccggattaa

SEQ ID NO: 16614 - DNA, 1245 bp, Escherichia coli
atgaaaaagattttactcgcattaacgctactattttcttcatgtgctttcgcagggtcagagcttgaattaaataaagtcaagctaccggaggctatttctcttatttatagtgaggtgcttaaagtcccgtatatgctagatccacagcttgttaataatgaacgaatgattacattcaggttaacacctgatattgatgaacgggaatttgtaacccgttatcttggcaatatgaacattcgaatatggacgaaaaagggtgttgattttatcgcgccctatacgccgaaagagccggttaagccacgttatacatggacttatacgcctcagtaccgttctgttgcctacctgtctgatattcttggcggctacgtttcaggctccttcaataacagtggagccgtgatttctgacgattcgctaaaaggttcatcaggggcaagcaactacatcaatcgaaccggtgatattctggtttattatggtacgaaagaggatatcgccatcctgaaaacactggtcacttcgctggatacgatgagtgatgaagtggttgtttctggttatgtttttgaggttcagacctcgcagtctgacggctccggcattcttttagcggctaaaattctgtctgataaattcaatatttcagttggtgctgccggactggataattttatcaatattcgaaccggctccattgatgccattttcaatctgcttaaaaccgacagtcgttttactgttgtcagtgcgccacgactgcgggtaaaaaataatgcctcagcgtctttttcagtcggctctgatgtgccagtactgggcagtgttacggtgaataacaatacgaccacgcaatccgttgaatatcgttccagcggtgttttgtttaacgtaacgccatcaatcaaaagtcggacaatggatctcaagattcagcagcagctttccaactttgtgaccactgaaaccggcgtcaataactcgccaacccttatcaagcgtgatgtaacaaccgaagtcagccttgcagatggtgatattattttacttggtggccttgctgaacagaaagacagtaaggccagttccggctggagcttcttcggttcccgtaccagtgaaagcaacaagactgatattatggtgatgcttcaggtcagaaaggttgaccggagcagggcgacgccccgcagcgccgcgaggagcggtgaactgttccgggacaacctgaactga

SEQ ID NO: 16615 - DNA, 1713 bp, Escherichia coli
atggaaattgggttcccttttatgggggatcgtctcagcttatgtcgttattcttgggctaagaggctgacggtttattcctttattttttcctttctctgggtttcctttccccgatattcatattcatttgtaccagcaattgcagcagtggctgcgcgggctgttattcctaaagtcgttggccgggtgcttgttcgtcgctttgctgccaatgatgcgatttatacggcatcacagcttacagcaacccgtgtttttgttggccgcgctgcggctaatgctgccgaatacttgcctgctgcctcatcatacaaaatgagcggtgttgcaacgtgggcgggtattgctgctgctgtatcatcttttgttccgtcttctttgagttcatctgacggctcggtaatggtaatgactaacggtaaaaagatttccgataatttatatgaagtaacgtacagtggtcaaagtggtgaaagtaagacgataaccgttaattttgaaccacaggaattaagtccggtaatccttcatgttagtcgtaataatgtggatgcgggttctccagttgtaggtgttgaaacaggatattccacgccagataatgcgctttattattatcaggattcgaaagagctaatttattactatggtgataatccaactgaaattgccagaaattatcttaatgactataactcgcgtacttatactgaaacactaacgaattttgaacgcactgtgacgaataaagttgtcaacagtaatggagatgtatcctttactgaacagaattataagtttacttatccttcctcattttatgaaatacctgagattacacacttgtatagcaacccggccgcatcttcatttcccgcaggtattcccatgtatgaaaatgtagcagggcttcccatgtattacagcgttgcttatttaacagcaggcaagcaatatcagtatcacaacacgccttgtaaaacgactaatcagtcaaatggtggatattcgacgatttgcgccgttcctgaaaaagaggattacaccgcaaaagatattgatgaaaagagtgagcttactatctggaccaataccaaatataaagccatgacggaagtactggaggccggaaatattgagtccatgattgattatctggagtatcttgatagtgttagtgtatcgccagcacttcttgccgacatgattaacgagctgtggtctgaagctgccgttaatgccgattataacggcttaccgtttaaagaggtttcaccggctgaagtaacttctgcgatgtcggaacttaggctatctccaacgttattagatatgctttcacctgtatctgacagtgcgggggctgacgtcaatattgatattaccattaataacaactcagggtctgacactggaaataatggcaatatagatttgggagaagatcccggtgtaaaagagcctgagcttgaagaaacgccaacggcaagagatattttaacgccaattattaacttgttgccttttacaaacgaatttaacatcggctctcgttcagcatcctgccccgttgttgaattcagcgtgtttaatcaccagtacagaattgactcccattgtccgttaattgagcagaacagaagcgccgtagaaaccatatttctgattatatggggatttgttgcgctccgtattattctgagtgcctaa

SEQ ID NO: 16616 - DNA, 252 bp, Escherichia coli
atggatacatcaggtttcgatattcagtttgataatcatattcctgaaaatggttaccgtattgaaggttatttatgtaatgcgaacaatgcaaaagaatgtcaggcaataatggtacgttctgaaccatttcatcaaattgattattctgcaatgggaaattactggacattaggttttggctctgtcctgctgctctggcttttttctgtaggtgtgggacaggtaataaagatggttcgtactgcttga

SEQ ID NO: 16617 - DNA, 318 bp, Escherichia coli
atgtctaattatggtctttttgtaaaaggtaaaatgcttggtgctcgccagcgtaataaggtcaatggtcagggatactataatgaaattggtgttggcttagagattcctgatggttttggtggcactaagcaagaccagattattattcgtgtatctcaggctcttgttaatgccggtgtaatgaatcaggcaaataattttatcggtaagttagtccagatacctgtatatgttcgcgtctggtcaatggaggggagggaaggagtaacttataacatttcatcagatggcggcattactgaaataaaaggctga

SEQ ID NO: 16618 - DNA, 1053 bp, Escherichia coli
atgatcgactggtttaccggaatcctgccttgcacacaccgaccgttaccggctggtagtgtcgtcagcgtcgatgctgacggtgcagtggagtgggaaacagtaaaacggttgacagttcgcggttcgcatgagtccacaatgaaagtaaggtctgttggatctgatggtgaaggtcgggcaacacatctctacattgacggtaatccatcaaagtttttgcaaggtcactctgttatcggttccgacgatttgcaagggttggtgttaacagcttacgccagaatattggcattactgcatattcctcatgatctaccatcctatcggcaggtcatggaagggcaatttaagatctcgcgcatcgatatcaattacatgtattcattgtcaacattagaaaatgtccgcgcatggttatatgccgcagaatttaaagctaaaactcgccacggtcgcgcctgtggtaaaggtggcactgtttacttagggaaaaactcccgtcgttggagcctgaaattttattcaaaatatgatgagcatacatctggcaaaaaagggcaccagatggcagacgaattcgttaaagctggtttactggactggtcaaaagataaattacgcattgaattaacattaagaacaactgaattaattgatttgaatcttacgcttggtaatagctggaatattgagacgcccaataaattattctctgactatgtagggagaatagaaatgaatcaaaataccatattaactgatgaaaaaataattaatctcccaagaaaaatacagtctacatatttattgtggaagcagggcgcgaacatgaaagagatgttaccgaaacctacattctaccgacaccgtaaagaattactttctttcggaatagatattaacttttattgtgagtcaccggattctaataacgttgttccgttggttcgtactcttgaagccaaaccagccaaaattccatcatgggtttatgagaaaggtttaattttcgattataaccgtatttcacatgccagtaactggcattaa

SEQ ID NO: 16619 - DNA, 447 bp, Escherichia coli
atgggcaacaatgagcatgaagttatggcggacaaacagagagcagaacgtatcaaaaaggtaattctggaacactcgacttatgaagaactggccgagaagactggcattagcgtgagtacgctggtcaggatagcgtccggcaaaactgaacctaaattcagtgacatcattcagatagctaaaattactggtgcagacttaaacaccttagcttatggctatgctcttgatgttaaagaagaagctaccgagcggaagctaatcacttctgcggatggatatactgatgaagaaaccactaacgcacataatttcatcgtgtggaacatcaggacactggaaaaacaagatattctggcactcgcaaggcaggtttctgccttaagttcatacacttacagtactaaaatgtttatgaaaaaagcggtgtctggagaagagtaa

SEQ ID NO: 16620 - DNA, 429 bp, Escherichia coli
atgggcagcggagcaggcgcgcaaaatccacaattgaatattgtctcattctctgagaccttcaacctttattacacatccagatattctgcaaaaacactcgataaaatcgatgatttcattgagcattttgaaaaatacaatctctttggcgatcctttaaaaggatatccagcttggactggcaaagtatcgccatcgtggaaagtgcctgatcattacgaaaacaaagaagctattgagaagtatgctagagctaacaaattatggcatgctcatttaggcgatccggtttttaaagatacgtttcatgggaaatacaaggtttctgactgggttattcatttccagcggctgacaccgaaccatataaagcttttagagcttggataccatgacccaatgaagctacctcaaaactttgaatga

SEQ ID NO: 16621 - DNA, 171 bp, Escherichia coli
atgaaaaccgaacaacgtcatgatcttgttaaagatattgaggtttttggcgtatccttgtctctgttgatttccagagcgaatgagaagtctgttacaatgccatctggtctaagtcgggagcagagaagagcatgggcagcggagcaggcgcgcaaaatccacaattga

SEQ ID NO: 16622 - DNA, 429 bp, Escherichia coli
atgacttactccgttaagaataaatggaaagctggcggtttgtctcttggctggacagcagtgcctaccgtattgttttttatacaaaacgagaaaaagctaacttcagtggcctttaacacactacttaacctgatcgttcactggtggagtttgcaagagtggccgcatccgtcaatggaaagtctagccatacgtatgggggtttctgtacggactgttcagagagctatcaatgatcttgaaaaagctaatctcttggacaagaaaccaacatcgaagagtgatcgccgatatggtggtcgcaatatttatgatctaacaaagctagttgactacctagatacaatgggtccatcagtagctgaacaagttaagaaaccacgccataaaaaaccggtatataccgtaagaaaaacgacagcttaa

SEQ ID NO: 16623 - DNA, 312 bp, Escherichia coli
atgggagttcagcaggatgatttcagggacatgttgcccgtttatctccccgtcacggcgcagacgcagcatgtgtttggtatacccccggcggcccgggtcgcgcacgcgggtctggcaggcgaagaatggctgaaaaccttcccgctgcaggctttccagtacggtgatggtgggaatgtacgcatatcgtttactgcgggaggtatgccgatcttccccaaaaatactgggtacatagtgcatcagttcttcatgtgtcagcggacggtcacggcgtatctggtttacatgaccaaaacgacttgctaa

SEQ ID NO: 16624 - DNA, 264 bp, Escherichia coli
atgacctgctccccgttgtttcacacagaatcgtgtacagggtcgaagttctggctcaatgtgctgactgaactgaaaaaccgcggtctgaacgatatcctcatcacctgtgtagatagcctgaaaggctttccagatgccatcaacacagtatatccggaggccagcatccagttatgcatcgtgcatatggtgcgcaacagcctgcgcttcgtgtcatggaaggactacaaagccgtcactcgcgacctgaaagagatttaa

SEQ ID NO: 16625 - DNA, 519 bp, Escherichia coli
gtggcagaacgtcctgaccagctgtgggtggctgattttacttacgtcagcacatggcggggcttcgtctatgtggcgttcatcattgatgtatttgccggatatatcgtggggtggtgggtctcatcgtccatggaaacgacattcgtgctggatgcgctggagcaggcgttgtgggcccgccgtccgtccggcaccatccatcacagcgataaaggctctcagtatgtgtcactggcctatatggagcgattaaaagaagcaaaactgctggcatcaacagggagtacaggcgactcgtatgacaacgcgatggcggagagcatcaatggtctttacaaagcggaggtaatacaccgtaagagctggaaaaaccgtgcagaagtggaactggccacactcacgtgggtggactggtataacaatcgacgattgctggaaaggctgggccatactcctccggcagaagcagaaaaagcttattatgcttccatcggaaacaatgatctggcagcctga

SEQ ID NO: 16626 - DNA, 234 bp, Escherichia coli
atgtcggactgccaccctgttttattgcccgaaggccctttctcacgcgaacaggcggttgtcatcacaacagcttaccgcaatgtgcttattgaagatgaccagggaacgcatttccggctggttatccgcaatgccgaagggcagctacgctggcggtgctggaattttgaacctgatgccggaaaacagctaaattcgtatctcgccagtgagggaattctcaggcaataa

SEQ ID NO: 16627 - DNA, 678 bp, Escherichia coli
atgaataccagagctctttttcccctgctgttcactgttgcatccttctccgcctccgccggtaactgggctgtcaaaaacggctggtgtcagaccatgacggaagatggtcaggcgctggtaatgctgaaaaatggcacgattggtattaccggcctgatgcagggatgcccgaatggtgtacagacgctcctgagcagccgtatcagtattaacggtaacctgatccccacatcacaaatgtgtaatcagcagacgggattcagggctgttgaggtggaaatcggacaggcgccggaaatggtcaaaaaagccgttcactccatagcagagcgtgatgtgtccgttttacaggcatttggtgtacgaatggaattcacccgcggtgatatgctgaaggtctgtccgaaatttgtcacatcacttgccggtttttccccgaaacagacgaccactattaataaagattccgtcctgcaggctgctcggcaggcatacgctcgggaatatgacgaggaaacaacagaaaccgctgattttggctcttacgaagtaaaaggcaataaggttgagtttgaagtattcaatcctgaagaccgtgcgtacgacaaagtgaccgtcacggttggtgctgacggtaatgccaccggcgccagcgttgaatttatcggaaaatag

SEQ ID NO: 16628 - DNA, 378 bp, Escherichia coli
atgaaaacattacccgacacgcatgtacgggaggcatcgcgctgcccgtctcccgtcaccatctggcagatactgctgtcccgactgctggaccagcactacggccttacgctgaatgacacaccgttcgccgatgaacgtgtgattgagcagcatattgaagctggcatttcactgtgtgatgcggtgaactttctcgtggaaaaatacgcactggtacgaaccgaccagccggggttcagcacctgtacccgctctcagttaataaacagtattgatatcctccgggcccgccgggcaaccggcctgatggcccgcgaaaattacagaacggtaaataacattaccctgggtaaacatccgggggcgaaacaatga

SEQ ID NO: 16629 - DNA, 198 bp, Escherichia coli; identical to SEQ ID NO: 7894

SEQ ID NO: 16630 - DNA, 435 bp, Escherichia coli; identical to SEQ ID NO: 7895

SEQ ID NO: 16631 - DNA, 975 bp, Escherichia coli
atgctgacacaggcaatggactatgaccggattctggcaggctcccgcagccatcagaccggtgtaaacggtgaaaataacagcgtccgtctcagcattcagggcggtcatctcggtcacgataacaacggcggtattgcccgtggagccacgccggaaagcagcggcagctatggcttcgtccgtctggagggtgacctgctcagaacagaggttgccggtatgtctctgacgacaggggtgtatggtgccgcaggccattcttccgttgatgttaaggatgatgacggttcccgcgccggcacggtccgggatgatgccggcagcctgggcggatacctgaatctgacacacacgtcctccggcctgtgggctgacattgtggcacagggaacccgccacagcatgaaagcgtcatcggacaataacgacttccgcgcccgcggctggggctggctgggctcactggaaaccggtctgcccttcagtatcactgacaatctgatgctggagccacaactgcagtacacctggcagggactctccctggatgacggccaggataacgccggttatgtgaagttcgggcatggcagtgcacaacatgtgcgtgccggcttccgtctgggcagccacaacgatatgacctttggcgaaggcacctcatcccgtgacactctgcgcgacagtacaaaacaccgtgtgagtgaactgccggtgaactggtgggtacagccttctgttatccgcactttcagctcccggggtgacatgagcatgggtacagccgccgccggcagtaacatgacgttctcaccgtcccggaatggcacgtcactggacctgcaggccggactggaagcccgtgtccgggaaaatatcaccctgggcgttcaggccggttatgcccacagcgtcagcggcagcagcgctgaaggttataacggtcaggccacgctgaatgtgactttttga

SEQ ID NO: 16632 - DNA, 207 bp, Escherichia coli; identical to SEQ ID NO: 6094

SEQ ID NO: 16633 - DNA, 198 bp, Escherichia coli; identical to SEQ ID NO: 10863

SEQ ID NO: 16634 - DNA, 249 bp, Escherichia coli; identical to SEQ ID NO: 11349

SEQ ID NO: 16635 - DNA, 330 bp, Escherichia coli
atgaaaaccttccgctggaaagtgaaacccgggatggatgtgacatcggctccttccgtcagggaggtgcgctttggtgatggctattcccagcgtgcgcctgccgggctgaacgctgacctgaaaacgtacagcgtgacgctgtctgtctcccgtgaggaggccacggcgctggagtcgtttctggctgagcacgggggctggaaggcctttctgtggacgccgccttatggttacaggcagataaaggtgacctgcgcaaaatggtcgtcgcgggtcagtatgttgcgtgttgggttcagcgcagagtttaaacaggtggtgaactga

SEQ ID NO: 16636 - DNA, 330 bp, Escherichia coli; identical to SEQ ID NO: 16635

SEQ ID NO: 16637 - DNA, 753 bp, Escherichia coli
atgattaaatccttattccgtctatctttacgtatggtcactggctttgtgcaaagtctgattaaactttgcggattaaattggaccgcaccagattacagtacgctttgtagaagacaaaagcatattgatattgcaatcagctaccaaaaaagtagcgatgggctgcatctactcgtagactctacaggcatgaagtttctaggtgagggcgaatggaaacgcaagaaacatggagctgaatatcgtcgccaatggcgtaaactacatattggtatagatgctgaaacccttcaaatacgcgctattcaactcacaaccaataatgtcagtgattcacaggtgcttggtgatttacttaatcagattccacaagatgagcagattgactctgtttataccgatggagcttatgacaccaagcaatgccgtcaggtcattgcagatcggcaagcacatgcggtgattccacctagaaaaaatgcgaaaccatggaaagatacaaagagtagctcgctagagcgaaatgaattacttcgaacagttaaacgtttaggcaggagactatggaaaaaatggtcaggctatcatcgccgaagtttggtggaaaccaagatgcattgcatcaaattattaggcgataaattaatggcaagaagctttcctagtcaggtgaatgaaattcatgcacgtgtagcagtcctcaacagatttacggaattaggtcgaccacttacccaagttacgccttaa

SEQ ID NO: 16638 - DNA, 291 bp, Escherichia coli
atgaaaacattacctgtattacccgggcaggcggccagttcacgcccgtctccggttgaaatctggcagacactgctcacccgactgctggatcagcactacggccttacgctgaatgacacaccgttcgctgatgaacgtgtgattgagcagcatattgaggcaggcatttcactgtgcgatgcggtgaactttctcgttgaaaaatacgcactggtacgtaccgaccagccgggattcagcgcctgtactgaaccgccccgggtttcctggagagtgttttatctgtga

SEQ ID NO: 16639 - DNA, 159 bp, Escherichia coli
atgattggttctggtgttttgattcagatgagatttacgttatcgatggttaatcgtttttatggtgtgttgaaaagtaacgttttcacgataagaaaatcgattctgatattggtgaactttgttcttgtggcagggttatctgtaaacaggttttaa

SEQ ID NO: 16640 - DNA, 222 bp, Escherichia coli
atgaaaatcatcacccgtggcgaagccatgcgtattcaccgtcagcatcctgcatcccgtctttttccgttctgtaccggtaaataccgctggcacggtagcacggatacatataccggccgtgaagtacaggatattccctgtgtgctggccgtgtttgcagaacgccggaaggacagttttggtccgtatgtccggctgatgagcgtcaccctgaactga

SEQ ID NO: 16641 - DNA, 141 bp, Escherichia coli; identical to SEQ ID NO: 6191

SEQ ID NO: 16642 - DNA, 381 bp, Escherichia coli
atgccaggagcggtggaacgccgcttcggcaacgagcttccggcgtctccagtggagtggctgacagataatggttcatgctaccgggctaatgaaacacgccagttcgctcggatgttgggacttgaatcgaagaacacggcggtgcggagtccggagagtaacagaatagcagagagcttcgtgaaaacgataaagcgtgactacatcagtatcatgcccaaaccagacgggttaacggcagcaaagaaccttgcagaggcgttcgagcattataacgaatggcatccgcatagtgcactgggttatcgctcgccacgggaatatctacggcagcaagccagtaatgggttaagtgataacaggtgtctggaaatatag

SEQ ID NO: 16643 - DNA, 327 bp, Escherichia coli
atgactaaaaaaacacttttttcccccgaagtccgtcaacgggcagtccgtatggttctggaaagtcagagcgaatatgactcacaatgggcgacaatttgttccattgctccaaagattggctgtacgccggagactctgcgtgtctgggttcgccagtatgagcgggataccggaggcggtgatggtgggcttaccaccgctgaacgtcagcgtctgaaagagctggaacgtgaaaatcgtgaactgcgccgcagtaacgatatccttcgccaggcttccgcttattttgcgaaggcggagttcgaccgcctctggaaaaaatga

SEQ ID NO: 16644 - DNA, 135 bp, Escherichia coli
atgctgctttcagcactgccaaccgggattaccggcgaggcaacgggcttccggatcgcgcactccacggcgatcgcgggcgaaatcactgaacgcccagataaggtccttaaacagggcttcgcagtccggtga

SEQ ID NO: 16645 - DNA, 366 bp, Escherichia coli; identical to SEQ ID NO: 5940

SEQ ID NO: 16646 - DNA, 1914 bp, Escherichia coli
atgaatcactggtacaccattaaggcggcggatgttcgcggagcggcggatatatctatctatgaggagattggcggcttcggtgttactgcaaagcagttcgcggaagacctgaaagcccttggcgatgtttcacatatcaatctgaggatccattcaccaggtggtgatgtgtttgaaggcatcgccatctataacctgctacggaatcatccggcagacattacggtttatatcgatggtgttgcggcttcaatggcttcggtggtcgcaatggctggcgatcgtgtagtgatgccggagaacgccatgatgatgatccataaaccgtgggggatctctggcggaaatgctggcgatatgcgtgattatgctgatttgctggataaggtggaaaccgtgttaatccctgcttatgccagaaaaacgggcaaatcagcacaggaaattaccgccatgctggaggatgaaacctggatggatgggaaagaatgccttaagcacggttttgctgatgaattgttgccatccgtcagagcaatggcgcgaattgaatcgaaacgcacaggagattttttacatatgccggaaaccattaaaggaatgattacaccgccacagggagcggcaaatattgctggtaatgaacagaagcgcatcaatggaataagtgaagtgtttagcctgttcggcagtcgttacgacgggatcaaaatggcgtgtctggaagatgcatcatgtacaccggaaatggcccgtgaaaagctgttgaacgagctggggcgcgagtccacgccatccaataaaaataccccgcctcatatctatgctggaaacggaaacataacaggtgatgcaattcgtcaggggctttattcccgtcttgggtatgaacggcctgaacgaggcaacccttacgcgatgatgagtctttttgaaatggcccaggcatcactggttgatcgtggtatcactgtgagcggttttattaatcgctcgcaggttgttaatgcggcttttacacacagcagcagtgatttttctcatattctggctggtggggctgaaaaatctgtactgaaaggctggcaggacagcggcgaaacgttccagaaatggacgcgtaccggttcgctttcaaactttcatgaagcaaagcgcgttggtctgaatggtttttcaaagctggataaagtaccggaaggtgcggaatataaatacatcaccaccagcgataaaggtgtacctattgcgctggccacgtacgggaatatattttccgttacccgtcaggccattatcaacgatgacctgacccagttaactacaatccccatggcgatgggacgcgcagctgccagaacagttggcaatctggtttatctcctgttaaccagcaacggcaagtttacggatggtaaagcgttattccatgccgatcataaaaatcttattgcgaaggatatggacatggaggggcttaacgaagcccgtaagctgatgcgcctccaggaagacgctaacggcgattcgctgaatattacccctgcatttgtcctggtccccgccgcgctggagtctgccgcacatcgcgccattctgtcatcgtcatcactctttccggttgatggcgtgggcactatcaatcagaaccccggcatcattaacgtggtgaaagatatggcggaggtaatcgttgagccacgtcttgataaagccaataacaaggagtggtatgtggcagcggcaaagggtatggacacgatagaggtcgcttatcttgatggtattgatacgccatatcttgaggagcaggagggctttactgttgatggcgtcgcctggaaggtgcgcatagatgcaggtgtcgcggccctcgactatcgcggattactgaaatcgagtggagcatga

SEQ ID NO: 16647 - DNA, 714 bp, Escherichia coli
atggaacttactgatactcaaaaaatttttctgaataatgcggctaaaagatctttcagagacatggctgatcaagattatctaactgctcgtatttgctttaaaaacaatcttcctttccaatttttatggatgtctcaacaagcaattgaaaaatatataaaatgcattcttatttttaatagaatccctgttaaaaatattggacataatcttgttgcaggaattaaaaaaattaatgatattccatatattaaactagatctgagtgataaaagcatatatttcatagagtatctaaatgaccaaggaccaaatagatacttccaaaaagtcatgtatactaatgggtttgaaattattacattagatagaactgtatgggaattacgcagatactgccgcttactaaattatcaactcaaaacccctaaaggtgagctaatagatatgctagaagtagaattacggaaaattgagcactcaaggaatgtaccgccacataaatataaaatcacagatggttatttggaaaagcgattaaaagacaataaatataatcacggaaacattttaacatggaagaatctattttttgggaagacgaaaaagaacacaataaaaattggacgctcacaacgtatcagttaccctactcaatatatacatcctgaaagcttagagttattcaataaatttttcaaaactaactaa

SEQ ID NO: 16648 - DNA, 2310 bp, Escherichia coli
gtggctctggggatgagtgcgttcccctctttcatgacgcaggcgacgccagcaacgcaaccactgatcaatgctgagccagctgtaaccgcccaggcggagcaaaatccgcaggtggggcaagtgatgccgggcgtgcagggcgcagatgcgccagtcgtggcgcagaacggtccttcccgtgatgtgaagctgacctttgcgcaaattgcgccgccgccgggcagcatggtgctacgtggcattaacccgaacggcagcattgagtttggtatgcgcagcgatgaagtggtgacgaaggcgatgctcaacctcgaatacacgccatcgccatcattactgcctgtccagtcgcagttaaaggtttatctcaatgatgaactgatgggcgtgctgccagtgaccaaagaacagttgggtaaaaaaacgctggcacaaatgcccattaacccgctgtttattactgatttcaaccgtgtgcggctggagtttgtcggccattatcaggacgtgtgcgaaaacccggccagcaccacgctttggctggatgttgggcggagcagtggactggatctgacctatcagaccctgaatgtgaagaatgacctgtcacacttcccggtgccattctttgacccgcgtgataaccgcaccaacaccttgccgatggtctttgcgggtgcgccggatgttgagctgcaacaagcatctgccattgtcgcctcgtggtttggttcgcgttcaggctggcgtgggcagaacttcccggtgctctataaccaactgccggatcgcaatgccattgtctttgccaccaatgacaaacgcccggacttcctgcgcgatcatccggcggtaaaagccccggtgattgagatgattaaccatccgcagaatccttacgtcaaactgctggtggtgtttggtcgtgacgacaaagacttgttgcaggcagcgaaaggtatcgctcagggtaacattctgttccgtggtgaaagtgtggtagtgaatgaagtgaaaccgctgctaccacgtaagccgtacgatgcgccgaactgggtgcgtaccgatcgtccggtcacctttggtgaactgaaaacctatgaagaacaattacaatccagcggtcttgagccagcagcgattaacgtttcgctaaacctgccgccggatctctacctgatgcgcagtaccggcattgatatggatattaattaccgctacaccatgccgccggtgaaagacagttcgcggatggatatcagcctgaataaccagttcctgcaatccttcaacctgagcagcaaacaggaggcgaaccgcctgctgctgcggattccggtattacaaggtttgctggatggcaaaacggatgtctctattccggcgctgaaactgggcgcgaccaaccagctgcggttcgactttgagtatatgaacccgatgccgggcggttcggtggataactgcattaccttccagctggtgcagaatcatgtggtgattggtgacgactccaccatcgacttctcgaagtattaccacttcatcccgatgccggatctacgcgcctttgctaacgcgggcttcccgttcagccggatggcggatttgtcgcaaaccatcaccgtgatgccgaaaacgccaaacgaagcacagatggaaaccttgctgaataccgttggctttatcggtgcgcagacgggcttcccggcgattaacctgacggtgaccgatgatggcagcaccattcagggcaaagatgccgacatcatgatcgtcggtggtatcccggacaaactgaaagacgataagcagatcgacctgttggtgcaggctaccgaaagctgggtgaaaacgccgatgcgccagaccccgttccccggtattgtgccggacgagagcgatcgcgcggcagaaacccagtcaacgctgacctcttccggtgcgatggcggcggtgattggtttccagtcgccgtataacgaccagcgcagcgtgattgcgctgctggcagatagcccacgcggttatgaaatgcttaacgatgcggtgaacgatagcggcaaacgcgccaccatgttcggttcggtcgcggtgatccgcgagtccggtatcaacagcctacgtgttggcgatgtttattacgtaggtcatctgccgtggttcgagcgcttgtggtatgcgctggcaaaccatccgattctgctggcggtgctggcggctatcagtgtgatattgctggcgtgggtactgtggcgtctgctgcgtattattagtcgtcgtcgtcttaacccggataacgagtaa

SEQ ID NO: 16649 - DNA, 1272 bp, Escherichia coli
atgcagcacaacacactaccgaaacacgatcagaaattgccgtttacacgctacgacttcggctgggttttattatgcataggcatggcgattggtgccggaaccgtgctgatgccagtacaaattggcttgaagggaatttgggtatttattaccgcagcgatcattgcttatcctgccacctgggtagtacaggacatttatttaaaaaccctttctgaaagcgattcctgtaatgactacaccgatattatcagtcattacctggggaagaactggggaattttcctcggggttatctactttttgatgattatccacgggatttttatctactctctctccgtggttttcgacagcgcctcgtacctgaaaaccttcggtttaaccgatgccgatctttctcaatctctattttataaagtcgccattttcgccgtactggtggcgattgcgtctggtggtgaacgattactgtttaagatttccggaccaatggtggtggtcaaagtggggattattgtcgtgttcggttttgcgatgatcccgcactggaatttcgccaatataaccgccttcccgcaagcctccgactttttccgcgatgtcctgcttactattccattttgcttcttttccgcggtatttattcaggtacttaacccaatgaatattgcctatcgtaaacgggaagctgataaagtactggcaacccggctcgcgctgcgtacccaccggattagctatatcacgctcattgcggtgatcttgttttttgccttttcgtttaccttctcaattagccacgaagaagccgtttctgcctttgaacaaaatatctcggcactggcactggccgcgcaggtgatccctgggcatatcattcatatcacctctacggtactgaatatctttgccgtactgactgcattctttggcatttatctcggtttccacgaggccattaaaggcattattctcaatctgttaagccgaattattgataccaggaaaattaactcacgcatgctgactctggcgatctgcacttttatcgtcattacgttgacgatttgggtttcgtttcgtgtatcggtgctggtgttctttcagttgggaagcccgttatatggcattgtgtcgtgcctcattccgtttttcctgatctataaagtctcacaactggaaaaacttcgcgggtttaaagcctggatgattctgctgtacggcattttgttatgcttgtcgccactgttgaagttgattgagtaa

SEQ ID NO: 16650 - DNA, 1536 bp, Escherichia coli; identical to SEQ ID NO: 5172

SEQ ID NO: 16651 - DNA, 711 bp, Escherichia coli
atgaaaagcgatctcactataaaaaatagatattgtacaattccacaagcgaagttccgtaaatgggatgaaatggacgttttactctggaagttaggaaaaaatgattcgcgtcgccgttcaggagtatattatttaaatgcttataaagatgcatatgtacaatataatagagacaaaataattaaacatgcatacgccgctggaattcgtccagagttactgggcggcgtggcctggattgagtcaggaggtatgcctgaaaattataagtttcagatatatgaaacaaaaagaatgatcggattgttagatatgcctgaaaataaaacatcatttggctcaatgggtatacaaatacgaaccgcagcgattactctaggtctagacccttcagaattaactaccagaaatcagttagagttagcgacatgcctaatggaggatgattttacctttcaaattgctgctacttatttaagagatcttgttctttttgattatccctcttcggcaacactgtatatgacgaatgagcagtatattatggctggtattagatataatcgtggtgttgaacgagatttgggtttttttatttgtttaattaataatttgcctgcgcgtgatacagatgattataaattcatctcttatggtatgaggttgttagagattagagaacatatcaaaaaattgattaatgagtaa

SEQ ID NO: 16652 - DNA, 483 bp, Escherichia coli
atgcgctacctgcatctggcggacaaacacgatctgccgcgtattgtcaccattcagaacccctacagcctgttaaaccgcagttttgaagtaggtctggcagaagtcagccagtatgaaggggtcgaactgctggcctattcgtgcctgggtttcggcacactgaccgggaaatatctcaatggtgcaaaacccgctggcgcacgtaatacgctctttagtcggttcacccgctatagcggtgagcaaacgcaaaaagccgtcgcggcgtatgttgatatcgccagacgtcatggcctggaccctgctcagatggcgctcgcatttgtacgccgtcaaccgtttgttgccagcactctgctgggcgcaaccacgatggagcagctgaaaactaacgtcgaaagtttgcatctggagttgagcgaagacgtattagctgaaattgaagcggtgcatcaggtttatacgtatcctgcaccataa

SEQ ID NO: 16653 - DNA, 240 bp, Escherichia coli
gtgagctggtttggtgagaaatgttatatacattgtcaggttagtttagggagtttatttatattcccaaaacaaaaaaattttactgatgaagaacaaaaacgttttttttctgtttgtaatagaatgtccttggattttattttaacatttaaaactaatatgcccttcttacgtgtttctgttgactctatgaaaaataaaccgcctgtttgggatgtttatgataaatccaaataa

SEQ ID NO: 16654 - DNA, 300 bp, Escherichia coli
atgaattttattttttggtttgtggtcttaataggggcgggatatttgtggaggaggaggggttggttcagtaaaataaggaagcaatactcaaggagaaaaacaacattaaatggtaacaaaggatgtttatataataaaaaaaatgacaatgatgctttggaaggtaatggggattgtaataatttttattctgagaataaagaaagtttcttttggttaatgatcgagagaggtattaaattttacagaaaagaatatttgactacgattactgaaaaaaatatcatgataagttag

SEQ ID NO: 16655 - DNA, 408 bp, Escherichia coli
atgagtgataaaacagccgcttccagaggagaacgctggggcataaaagcagcttataaagcaaaatggctaatcaaaaaattgaaggctttcgataagaactgtgtggcaagcgccaaaagcaaaaatatgccgggttggctggggcatattccactggtatctataactctcgcagtcatcgcgttactggcttatttcagtttgtacatcctatttacctttggagcgttggtgattttattttctgtaatagaacacattgatatttcttcaggaaataacattcaatccactgataacaataatgaatggcaatccaatctcgttggcaatagtgacgactttagaaatggcaaccaaggttttggatattatatgaacggaataaatattgacgaagattag

SEQ ID NO: 16656 - DNA, 1230 bp, Escherichia coli
atggctataggtggggtttatatcacccaaacccttatatcaatgattatcatgcaatctgtaccaaccttactaagaagtgaaggattttctctctctttaattggattgacttcactttttatgcttccttggacacttaaatttttatggtctccatttattgaacgcctgagattaccttttggaaaaaaatttcgccgttcacgtaacttgattcttattggtcaatcattggttgctcttttagtttttttacttattctaataaaccctaacgataatataagcaaactgaataatctttggatttttggaatatttatcctatgtgcattcttaacatcgactattgacattgcatgtgatggcatggcggtagaacagattaaggcaagtaatagagggtggggaaatattgcccaagttggcggaggagaaataggagcattattaggcactagtggttttttattaatttccagttattttagcttaaatactgcatttgctatatcagctctaaccatcatattacttacaattccaacactctactttaaagaatcagatagactaaccacatctgaaacttaccatatacccaaattatcatatgcatttaatcgaaaagaggtaagaattggtattttattagtagttttattagaaggaggtaacagaatcacagatatgattaccggacctctattaatagatataaatattacattaaataatattgcactattaataggaagcttcaatttttgtgcaagcctatttggaacacttttaggtggtatattaataaaagtatttggcatatggaaatcaattttcattacctatggtttacaaggtttaatttttactttcatatccatggctataggaataaaatatatcccacatgaaatactttttttacttatagggttcaaatatattcttttttctgcaggactagtttctttttacactggtttaatgagcttatcttcattgaaacaagctggtattgatttcactattttccaatgtacaaatgcttttacagcaatcattgctactctattaggcacttggacagcggagaactggtcttatcattttgtttttgcaatatcatctatttatacttttatcgcagtactaatttccattaaattaataaaaaaacgccttaaactaaatatttcatcaaacaattttgagcaatatgtataa

SEQ ID NO: 16657 - DNA, 738 bp, Escherichia coli
atggataactatgaagattattatactcagtctgctgaaatgtatgatattttaagcgaacctcattgggaaactcgtaaagatacatttataaaatccttgaagtttatgggagtaaaaacaggcaactggttaaatataggttccggcactggccaagaattaagtataattgcgcaaatgtttccagacatacatatttttgcaattgaaccgtctgcatctatgcgtattggcctaatgacaagaattatgatgttacctgaaatacaacaccaagtaactgtgattgctgatacatttcaaaataccattctaccaaaatcattttctgccgctattatatgtggctgtataggatattttaatcagaatgatagaaaaatattatggaataagcttgcaaatgggctagaaaaaaaaggtgctattttggtagatacaatgccgtttaatacgccttgtaacatttctaagatactattaaatagtaaaaaaatagggaaccatatctatgaaatttatttaagtggcaaacctatagatcaagaggctattcgttggaatatgaattttaaaatcatagaagacgataaagtcatacgaaattttaatatagaaagagattggtatacttttggaattgaacaagtaattaaggaggcatcaagagaaggattggtccatgaaaacattagctcaagtactgtaccaatggcaatcctccgccataaataa

SEQ ID NO: 16658 - DNA, 4944 bp, Escherichia coli
  misc_feature (3473)..(3482): n is a, c, g, or t
atgaaaatattaagtgatattaataacataaaagaattatgttccaagcaaataaacattgacaaaaataaattttcagataaggacaatctgataaaattaggtcttgattcaattggatttatgcaatgtttatatattttccaaaaaaatggttatgctataacattaaaagatttgtatttaaatccaacaataaaaggatggtataaaatattaaaaaaatcagatataaataaaaaagaaagaaaagataatatatatacacataaaacaataaaaaatgctggtgagttttcacttacacctatacaacatgcctattttgtcggccgtttgaataaacaaactcttggtggtgttgcttgccaaatttatcaagaatttgatggcacccctaaatttactccggaaagtctagagaaagcattagtattattatcaaaacgtcatcccatgttgaatatagtatttcaccaacagggtacacaattttggtctcctaacccaaatagaaaatatgttacatatcatgattttagtaaattaccaaaagatgagtatgagaaaaaacttttacaattacgggaaaaattaagccatcaggtactaaatgttgaaagcggtcagttaattgattttcacatgatatcgctacctaacaacagatatcgtttatgtactaatattgatatgttgattgcagatggtacaagttattcattactctttactgaactttgtttattattgagcggagaaatactgcctcagttagatgagcactatgacttttaccattatttacaagataaaaaacagtatgaaaacaaagaatcagcatatcaatattggaaaaataaaatcccaaacctaccagactctcctcttctgccattatatatggatccagaaaaaataaataaaataaaaattaaacgccttagctggacatttagctcaaaagaatggaaaaactttagtaatttggctaaagaaaataatattacaccttccattgcattagcaacctgtttctcatctgtacttgcaagatggactggccaaaatagcttattactcaactttacattatttgatagaaagccattagcccctgcagttaataatattatagctgattttactaatgtcattcttttagaaatgaaaacagacaatcgaccattaatttcattatctaaagacaatcaaaatacatttattgaagcttggcaacattctgattattctggtattgatatcattagagaccttcgtaaaaatggcacccatccttatgggtgtcctgttgtctttactagccatattaatcaaccacttattgataaaaatatagaatctgtattaggttctataggatggggaatatcacaaaccccacaagtttggcttgatcacatggcaattaacaaaagtggaaatattgttttacagtgggattataacaatgacttgttccggaatgatgttataacaacaatatttgatgtttatatttctcgtatacgccaacttgccaacgatcctaatgcctggattgaaacccaacctgatttaattcctaaaaaacaattaaaaaatagaatatcagttatcaaaaaagataattcactattaccacatacactgcataagtctattttccataattattcaaattcatcaaaaattgctgtcattgatatcgactctcaggaatggagctacaaaaaattattatctaaagcaacaatactcagtgatcaaataatacaacaaggttataaaccagaagacagaattggtgtatgtatgccaaaaggagtagggcaaatcattagcgttctggctattttattaatggggggaacttatgttccgattgatgtactacaaccagaagaacgtataaaccgcattgctaaaaatgctcagctttcattactcatcgtatctgatagcgatccatcctattcaatctatgctacattttgtaacaggattgtttggcaaaaagttcaaccctccgagaataaaccactacacaatatagatatatctcctcatcaagcagcttatgttatttatacttcaggttctactggagagcctaaaggtgttgttgtatcccatgccagcgcaatgaatacctgccttgatctcaatcggcgatataacatttcagacaaagatcgggtacttgccatatcagcactacattttgatctgtctgtttatgatattttcggtgttttaaatgccggagggactcttgtattagttaaagaagatgagcgccgtaatcctgatgcatggttacgacttattaaccaacataaaataacactttggaacagcgtacctgcactgtttgatatgttactaacctatgcagaaggaatagggtcatccattccacaatcgctgctattaatctatctctctggagattggattgggcttgatctcccgacacgttactataatttctgccctgatggacaaatagtcgccatgggaggtgccacagaagccgctatttggtctaactattttaatgtcacaacattagacccatcctggagctcgataccttatggatatcctttatccaaccaacgttatcgtattgttaatgctagaggagaagattgccctgattgggtatcaggagaactttggattggtggtgcaggcgttgcgttaggctacctaaacgatcccgaaaaaacagcacaacagtttgtaaaacaaaatggtgaaaattggtataaaacaggtgatatgggaagatatctccctggcggtatacttgaatttttaggaagacgtgaccgccaagttaagattggcggataccgtatagaaccaggggaaattgatgctgcattcaataagcttcagggtgtgcaaaatgcgattacactatgccttggtaatggtaataaagaaaaagcattacactcttttgtgatactaaattcgggtaattaccaggatattatcagttcaaatagcaccttttctcccctctactatctgcgctcaaccccaataaatgtacaacaacaatcccaagaaacggcaatcatagctggatttttatatgattatcttactgaacaaaatattgatttcgacaacctcttgtcagaaaaaaaatcagcagatgaccatagcattatcgctagctatcagtcattaatggctaattggctaaatttaatagcacaatatccacaaactacactcaattcccccccaactaatagtacccagcgaacgctaatagaaaatttgcagcgccacaaaaacaatttaacagacatactcaaaggtaaaaaatcagctctaacactatttgatgatccctattggtcaccagaacaagtcactatgcgtattgatggaatgcactactccttagaaaatttactacaacaaataagagaacttcatcattcactaannnnnnnnnnactaaaaaggccaataaaaatcattcaattaggtgctagaagcggtatttcagcaaattatattctgcaacgattacccactaatatggttaccctactgctaactgatgagtctctttcaatggtaacgcaagctaaccaaaatttatcagattatcaaaatagttatgctgagcctcttacagaagtatttcttcataaaaatcgatatagtgcagatatcatttggatgaacaattatcttcatcgattagacagcccacaaaaagagatacaaaaattcgtttcactctgtgctccgagtggaatgatttttatacaagaagtgttacatgcccctgcacaatcactgataagcatctctttattacaacaaaatggtagtgatcctgctgatgaattattaacagcaaaaaaatgcaaagatatctttagcgcttctactgcgacttataaaagtgaaggagttaacggcgaaatattgacacagttataccaagcaccagaaaaaatttatttaccagataaaaataagctagagcatgatttgcgccaatttttaccagactatatgatcccaaaacatatttattttctaactgagttccccttaaccgcaaatggcaaaatagataaccaatcattaaaattgtattgtcaggaataccaagaagaatacctaaatcaacaacctatcaatggtaaagaacagatcatcataacaatatggcaaaagctccttggcaccaacaagatacaccgtcacagtcatttctttcgtgaagggggagatagcctagttgctattcgattgatctctgatttaaaccatattggctaccaagttgaactggagcatatctttgcttatccgatcctttctgattttgcacaaaatataaagcagagcgaagttttcgaaaaacagccagcaatttcacataacgaggcgtatagatacaatccatttccactcactgatattcagcaagcttacttagttggacggcaaaataattttacacttgggggtgttggtacacatttttttgtccattttatagcggaaaatttagatgtacctaaattagaacgtacaattaatcagttgatttctcgtcatgatatgttacgtggtgtcattattaatggacaacaacaagtacttaaaaaagttccttattattccgttaaaacgcattatatccctacagaaaaaagtgacgcttttctagtattacgagctcaacttgctaacattgtttatgatccagaaatttggcctttatttactattcaagttatcaagaccaaagaacaaccagatcatatttttattagccttgataacttattccttgatggaatgagtatgcagatatttttcagtgaccaaagatcacaggtataccaatcgagtaattgtaatgaggtaaaatcaccaagtacttcatttatttga

SEQ ID NO: 16659 - DNA, 513 bp, Escherichia coli; identical to SEQ ID NO: 9303

SEQ ID NO: 16660 - DNA, 312 bp, Escherichia coli
atgaaaaattataaagtcgcagtcagctatgatatgtctgactctatttcaactcatcgtaaatatgttaatattctacatactgacttctcttatattgccgcaattattatttcacttgataatattcaagatggaaggctcgattttattgaacaaaatagctttggacagcctgtattcgctattattaataaagataaagttattccgactaatattattaatcgattaacaggtgtaattgatttaaataaaaagaatacagaccggattcagccggctgttcccagactgaccgataatatctga

SEQ ID NO: 16661 - DNA, 207 bp, Escherichia coli
atggagcgctttttcaggagtctgaaaaatgagtggatgccggtgacaggctacaccagcttcagtgaagctgctcaagcgataacgggttatatcgtcgggtattacagcgaactcaggccgcacgaatataacggtggattaccaccaaatgaatcggaaaaccgataccgaaaaaactctaaaaccgtggccagttttagttga

SEQ ID NO: 16662 - DNA, 2379 bp, Escherichia coli
atgaatatcatgaaaaaaagtaaactctctattattttacttatacttttgtcgtctcctttatatggaaaagagaataatcaagataaaagccaagaaaaagaaacatcaaacgatgttattactgttaaagcaacatcaataaaaaacaaagagacattctcctctttattactcaataatcgagaagagataaaaggaaaacaacttgaacaaataaaaacaaatacgattggtaataccgtttcaaaagttgctggtgtacaagcggaaggttttggcccaaatgcggcaaggcctgttattcgaagtctctctggcaatagagtcgggattttagttaataatcttccgattaatgatgtttcatttattagtgggaatatgcctattcctgttgatatgaatagaattaacgaaatatcaattagtaaaagctccgaagcactactttatggtggtagcagcagtggtggtgcaattcatttgtgggatgatcgaataatgacacagtttcctgaaaaagcaatttcaggtgccgtgacatttaatggtagcactaataatggtaacggtggatcagtaaatattaaattcagtaataaagaaaactggatttttaatctttccggtgctactaaacgagtctcaaaatataaaattccaacacgctctaaagttggtgcttgctatagctatcaacagctaaaagaccactctgcattacgtgatcaatgccaagtggatatgaaagtgtttactagccgtaaccctgaagcgtatccttacattagtgagttttggaaaaaatatcaggttgaatatgagttaagcgaggatgataaatatacctttaaagataaggactatttttcaggtattggttatgtagataatgaacctaacttacgatataaacctggtagccccacatctattgaacatgtcacacctccaaagcattatgttgaaaataataataacgaaattcccaatagctttttaaaaagccaaagtggtaacgcatcactctcttatatcggagatgacggttacttaggtttttctgtcactgattttcaaacatcgtatggagtgccaggctatgcttatctcacaactaaaacaactcgagaaaggtataaacctgtttcggtttcaaatagtaatcgaagaatagatatacaaggaaaacatgatcatttagcaccatttttaagagacagtgctttttattattcttattctgaatctaaagatgaagagttagtcggccaaattgcttcatcggtatttaatacaaaaagccatcagttagctttagaaactgcacatactccgctatttaatcgacttaatggtgcgtttgggatcaacggtaattatcgtgatctgaaaacgtctggttatgatgcttatttacccagtgtattaaccaaagagtacggaatatattgggttgaatcgttaaatttatctccttttgagctcactgctggatatcgtaaaggttacactcaacataatctcaatattccagcgaattataatcgtggtagagggcaaggttctaatttacaaaaccgtcattttgatacaagtgcaaatacactcgctctatcttttacaccaattgatgaatggacattaaaactacaacaaaatatttcttatcgagcaccagaaattaatgaactttatacacatggccctcattatgcttatttaattgaagaacaaggaaacagtgaatttaataccgaaaaaagcaaaagtattgaattatcatctgttattgagattggcaatttctctaataaacttaatttgtataaaacagactacagtggttttaaatttagacgattaacgggtatcagtcgtggtgctggtcctgttatggaatgggatgacaccgatcttgaaacaaaaggattagaatatgaatttaaatatttatatgaaatgcctcatgatcacaatctaacatttacactatttggtgattttgtcgaaaataaaagcaaaagaaaactgtttattgcaggtcactatttgccaaatttacctaatgaaaagcatggtatcagtatttattaccaacatgatgaattaactgcatttagtagtgcaacttactataaaaaacaaaaagaaagcggtgggttaatgtatggtggagatatggcctttccttcctatacgttagttgatgcggggattggcaaaaaataccaccttgataaggtagatgtttcggttgattttattattaataatctcaccgatactgaagcaagacctgcatcttctcaattgaaatatttagtcccattaccgggtcgaaattatgggataaatgtcaaaattgatttttaa

SEQ ID NO: 16663 - DNA, 2082 bp, Escherichia coli
atgaaaaaatctatttttaattatacaacattttttatttcaatgagttattccttatttgcaaatgcaagccctgcaataaaatcaactgaaaatcggaacaatgaggtattagaggtctattcaacacctttgcatactccgcaagagaaaatggcgatccccgtttctgttctgacacaagaagatctacgcgctaatcgtagtgcctcgattgctgaaaccttaacatccttaccaggttttcatgccagcttttttggtggaggctcagttcatccagttattcgaggaatgtcaggcaatcgagtcaaggtattacacagtggtagtgatcttatggacgtatcctctattggtgcagatcatacaatcaccagtgaaccctttttaagtcaacgcattgaagtattaaaaggcccttcaacattactttatggaggaggcacaataggcggtgcaattaatgttattgatagcaagattcctatgtcagtgcctgaaaaaggctatgagggtgaattgcattatcaatacgattctgtttctaaaggaaatacaggatcagtaggattaacgttaggagaaaataatttggcgcttcgccttgagggtactaaacgttatcaaagtgattacaaacaaccagaacctttacatcaaggagaaactagccgtttagcaggatcttatcaagataaccaatcggcaaatattggtgtatcctggctttttgatgacggttatatagggattggttatggtgaacaacatcgtcgatatgggctgcctggtcatacgcattttcatgatcatgaagatgatcaccatcatcacgccccaattcgccctcctttaatcggccatcatcatcataatcacaatcatgaataccctgatgaacaacatcaacatggtattccttatattgttatggatagcaaacgatgggatcttcgtggtgaaaaaaacaatccatttactggtattgaatcaatacgtttcagtgcggtcagaaccgattatcatcatgatgaaaaagaaggaaatgaagtcagtacctcatttaaaaacaaaggcgatgaattaagactgacatttacacatcaacctatttggggttggcatggtgttattggcgggcaatttaaccagcgtgattttagtgctcaaggagaagaagcttatgtaccgtcaacaaaaacaaaaaatcactcactctttttattagaagaataccaattaggtgattttcgctatgaattaggatttcgccaagagtggcaatcactgttaaatagagaaactcaaaaaaataataagcagagtgcatcttctatttctgctggattagcatggaattttacacaagactattttttaaatttatcactttcacacacgaaaagattacctgttgcagaagagctttacgcgaatggtgttcatgctgcaagtcgaactattgaaaaaggcgatcctaatttaaccgcagaggctgcaaataatattgatattggaataactaaagtaacaggtgatattcaattcaatatgagtgcctattataaccgtattaataattatatttacggtcaatttacggggactgaattaaataatggctatcgttcattacaatatgttcaaaatgatgcacagtttaaaggtatagaaggaaatattgattattactataaccaagatagcttaattggtatttctggtgattatgttagagcaaatttactacacaataagggaaatataccaagaataccggcttatcgtttaagtacttatattaaacatagttttacagaaaacgtaattggacaaattcgcattgatcattttggaaaacagaataaaacagcagactatgaaacatccacagaggcttataacacagttagtttaggtagtgaatatattggttatttagataacacagattataccttatacgccaagattaataatatctttgatgtaaaagggaaagacagcacctcttatattaaagatgaaatgtatttacctggtcgtaatattatcttaggcgctactcttacattctaa

SEQ ID NO: 16664 - DNA, 738 bp, Escherichia coli
gtggcgctgccctttgctgctgacgcctgtctggtcgcctcatcttttgaagcagacgcagatgatgccgatgacgccgccgaactggcggacgatgcggcagccgtttttgaggattctgcgctggtttccgacgctttcgcgttcgtcttggatgtcttcgctgcggaagcagacctcgctgctgcgctggcctgtacagcggcttcgccagccttcgttgtggctgttgaagcagacgatgcagcactttctgccgattttccggcggcggtggcactggctgaggcctgcccggcacttgttgacgcggcactggcagataatgcagccgctgtttttgagtctgccgcagctgaggcgctctgtcccgctgccgtttcagaagacctggcgttcgtctcggacgtttttgccgccttcgcagaatttgctgccgccgttgccgaggaagctgcgctgctggcgctcgaggctgcgttcgtttctgatgattttgccgcctcttttgaagccgacgcatcccgtgctgaagtggctgcttctgacgctttcgtggtcgcggtggatgcagaagtggctgctgattgttgtgacgctgcggcattcgtttctgacgttttcgcggcactggcgctggtagctgccgcgctttttgatgactctgcagcagcagcactttttgctgcttcacgggcctttgtcgatgccgttcctgcgctggaagacgttgactga

SEQ ID NO: 16665 - DNA, 753 bp, Escherichia coli; identical to SEQ ID NO: 5304

SEQ ID NO: 16666 - DNA, 579 bp, Escherichia coli
atggccataaaaggtcttgagcaggccgttgaaaacctcagccgtatcagcaaaacggcagtgcctggtgccgccgcaatggccattaaccgcgttgcttcatccgcgatatcgcagtcggcgtcactggttgcccgtgagacaaaggtacgccggaaactggtaaaggaaagggccaggctgaaaagggccacggtcaaaaatccgcaggccagaatcaaagttaaccggggggatttgcccgtaatcaggctgggtaacgcgcgggttgtcctgtcccgacgcaggcgtcgtaaaaaggggcagcgttcatccctgaaaggtggcggcagcgtgcttgtggtgggaaaccgtcgtattcccggcgcgtttattcagcaactgaaaaatggccggtggcatgtcatgcagcgtgtggccgggaaaaaccgttaccccattgatgtggtgaaaatcccgatggcggtgccgctgaccacggcgtttaaacagaatattgagcggatacggcgtgagcgtcttccgaaagagctgggctatgcgctgcagcatcaactgagaatggtaataaagcgatga

SEQ ID NO: 16667 - DNA, 462 bp, Escherichia coli
atgtatacgggtgaagcactgcctaatgatcgtgaatcaattttttggctaaatatactggatatttcagctaaacctaaatttgaaaataaaaataatttaaatgtaaactcaaattatcttcaactcccgatccatagtcgcataaagctattctatcgtccagaaaaactcacacgttctctcagtgaggcctataattctgttatatggcatattgaaaaacaaggagcaaaggcctttctttgtgcagataatcaaagtccttattttattacttataatcatattactttgattcagagcaactactcacaatcaattaatccagtagatatggttgctccttattcttcaatacgccttcctatacatggaaatatgtcgggatatggaaaagtgaagtggacagttgttaacgattatggtgggcatgaattaagtgagtcagctctgaaataa

SEQ ID NO: 16668 - DNA, 1089 bp, Escherichia coli
atgaaaccggcaaaaaaagtggtgattgtaggcagtaaatttggagaggtttatctcaatgcatttatacaacctcaagacaaatggcatcttattggccttttttccaaaggtagcactcgttctcgagaattatctaaagcattcggtattccactttttactcgatttgatcaactacctgaaaaaatagatctagcttgtattgttgtgcgatcagccattgttggtggcgaaggtagccaacttgcgcaagcatttttacaacgggggatctcggttgtacaggaacatcctgtacatcctgatgaaattaccagactacaatcattagcagaaaaaatgcattgccactatatcgttaacagcctctatccacataataaagcaggacgtttatggatagaaaacacacagaagatatatcagcaaatacaacaacgaccagtgtggggacaaattatcacaagcaggcaattaatttattccgccttagatatatattgccaagcaatgaaattacaccctaatgatattacagtcacattagaaaaagataataccccgctacaatttctacgactatccaaccctactggtgatttgcttttatgcctacaaaaacatttgtcatctaacgatcctgatcagcatagcctcgtgatgcatcatatgatattaggctggccagctggttatttaactctcgctggaagttatgggccagtagaatggaataatgcgctttatattcatcatcaccaagatagtaaaaaagccatgtatcaatctcctgccacgatggagcttgatgaaccactgtttcattcatttcatactccaccaaatagttggcaggatgtgatggaatatgaagcaccagaagctattaattacttactggcagagatagataaatgctggcaattacctaatgataaaaaaccaatgattttacaaccccattaccaattagctttatctcaattatggataaaaacattgcaaacagcaggtaaagccattgatggcacaattgcgccatttaagcgaatgaacttcaccaaaagtagtggacggagaaaataa

SEQ ID NO: 16669 - DNA, 909 bp, Escherichia coli
atgattaatgaaatcattgcattatggtctgagttattaggtcgtgaggtcaatagtacaaatgatttcttccgttctggaggagatagtttgattgcaaccaaaatgatcagccaattacatcaacggggatatccagcaacattacaacagatttttacctatccatgcttagccgatttttgtgctcatttagagcaggaaaagcaatctcaacgagagtactcctctttgatacctctaagcgctgtatctgctccaaaaccttaccactactttatggtacatgcttctgatggtgatcccggtgtttacctacctcttgctgagtcgttaaataatacagtgtggggattaacagttacagatgcttcaaaactaactgatttggatacattgttatcattacatttatctagcataaaaacagcacaacagactggcccttatattcttattggttggtcatatggtgcttttattgccagttaccttgcagaacaactctcgcaacaaaatcattccgtattattagtattaatagatcccgtctatcgacatgattttattaaattttgtcatgatgactcagatagttcatcagatgaaaataagcagcttgcatgcactaaaagacttatgtcattcctacctgaaagtgacctaccattatctgatgatatcgcctgtttatggctggaagccaccaaccacccaacagaatggacatcacctgaaaaagagtggtaccaacgattaccgccacatacccaacatcactatttttcaggggagcactggtcaatactgcaagatcgcgctaccagcacacatctggccgaaatcattgatcagtgggtgcaacaaaaactttctaataacggatatccatccgaaggaggtaattaa

SEQ ID NO: 16670 - DNA, 600 bp, Escherichia coli; identical to SEQ ID NO: 10080

SEQ ID NO: 16671 - DNA, 600 bp, Escherichia coli
atggctccggaggactggctgcaggcagagatgcagggtgagattgtggcgctggtccacagccaccccggtggtctgccctggctgagtgaggctgaccggcggctgcaggtgcagagcgatttgccgtggtggctggtctgccggggggcgattcacaagttccgctgtgtgccgcatctcaccgggcggcgctttgagtacggggtgacagactgttacacactgttccgggatgcttaccatctggcggggattgagatgccggattttcatcgcggggatgactggtggcgtcacggtcagaatctctatcttgacaatatggaggctactggtttttaccgtgtcgcactgacagaggcgcagccgggcgatgtgctgctgtgctgttttggttcatcggtgccgaatcacgccgccatttactgcggcgacggtgagctgctgcaccatattcctgaacaactgagtaaacgagagaggtataccgacaaatggcagcgacgcacacactccctctggcgtcaccgggaatggcacgcatctgcctttacggggatttgcaacgatttggccgccgcatcgaccttcgtgtga

SEQ ID NO: 16672 - DNA, 960 bp, Escherichia coli
atgctcatactgaggtacatccccttatccgcatggagtaaaagccctgagttaacaattaatttgacattatttaatcggcatcctgtacatcctcaaataaatgaagtacttggtgattttacctcattacaattactcgattggtatacctgtgatctttggtcaaacagtatctcaatgatgcaaaaacgtttacataaagatatgcaacatcgtagtgtttcagccattaaagtaatgcgtgaaatggcaattcaacgacagatgtctcatatagagatacctgtcgtttttacctgtgcattgggctataaacatgatgaaggttttctttctcatcattcatggctaaaacctgtttggggaatatcacaaacaccacaaacatggctagatcatcaagtatatgagtcagacggtgaattatatttaaactgggattttgtcgaacaattatttgactacacaaccattttttccatgttccagcaatatgaacatatactcactaaactggctactgaaccacaatcttggcaattgccactaaataaacttataccaagatgcaataatctcgtcatcaccccagttttcaatgccaaaaataatcaaaacacacattataaacaatctactgatacacaaaaaacaggtcagacaatacaaaaactacaacaacttgttaagcaagttattggaataacgttagcacctgaaacaaattttttcgaagcaggtgccagctctttacaattggttcaacttcatgcagcactacaaaaaaatggctatagccatattacaattactgatctgttcgctagtccaaatctaagtacattagcgcaattgctttggcaaaacacttcaccaacatgtgagcaatattccgaccgagacaaacacaaaaacaagagaaagaaacggttacaactacgaactcatagtagataa

SEQ ID NO: 16673 - DNA, 819 bp, Escherichia coli
atgatccttgaactttcagagcataaacaacatgataaacattttactctccctaaaaatagcgatattacttttaaagatgtctgtttggatcatggtgataaaccgatattagagaaaattagttttaatgcccaagcgggtacaacaactgcaattgtaggccacagtggtgcaggaaaatcctcattattaaaactaattccccgtttttatgattgtacttctggccaaataaaaataggtcaatatgatatcaactactggccagaaattgatttactttctcaaataagtgttgtttttcaagatgtatatctatttcatggaactattttagaaaatttactcatagcaaatcctaatgccttatttgaggatattatcaaagcaactaaagcagccaatattcatcatgttattgaaaaactcccagcaggatataatacattaattggtgaacaaggaaataaactttcaggtggagagaaacagcgattatcaattgcaagagcactattaaaaaactctccaatcctacttctcgatgaaattactgccaatgttgatgctgaaaatgaaattttgatctatcgcgcattaaagagtctatgccagaatcggactgttattatgatcactcataacctacatactattattaacgcagataaaattattgtgcttgataatggaaagattattgatacaggtacacacacccatttattaaaccaatgcccaacctatcaaaaattatggaatgattatagtcacactattcattggcaattaatccaggagaataataatgattaa

SEQ ID NO: 16674 - DNA, 402 bp, Escherichia coli
atgtacgcaaaatcctttatcgctcttgatggcaacggacgtctgacgggcgcccgtactgcacaggccgcaccttatgctaactacacctgccacttgtgtggcagtgcactcagataccatccgcaatacgacactgaacttccctggtttgaacacactgacgacaggctgacagagcacggtcaacagtgcccttatgtcaggccggagcgcagagaaatacagttgattaaacgtctgcagcaattcgtaccggatgccttacccgtggtgcgtaaagccagctggcactgcagacaatgtcaccacgattattatggggagcggtactgcacacactgccagaccggaggattcagtattccccggacaactcaggaggaaatatgcgaattctga

SEQ ID NO: 16675 - DNA, 336 bp, Escherichia coli; identical to SEQ ID NO: 12930

SEQ ID NO: 16676 - DNA, 369 bp, Escherichia coli
gtgtcagacacactccccgggacaacgcttcccgacgacaataacgaccgtacctggtggggactgccctgcaccgtgacgccctgtttcggcgcccgtctggtgcaggagggtaaccggttgcattaccttgccgaccgtgccggtatcagaggccggttcagcgacgcggatgcgtaccacctggaccaggcctttccgctgctgatgaaacaactggaactcatgctcaccagcggtgaactgaatccccgccatcagcataccgtcacgctgtatgcgaaaggactgacctgcgaagccgacaccctcggcagttgtggttacgtttatctggctttttatccaacatccgaaacgaaaaagtaa

SEQ ID NO: 16677 - DNA, 2019 bp, Escherichia coli
atgttacgtaatggaaataaatatatcctgatgctggtgagtataattatgctcactgcgtgcattagccagtcaagaacatcatttataccgccacaggatcgcgaatctttactcgccgagcaaccgtggccgcataatggttttgtggcgatttcatggcataacgttgaagacgaagctgccgaccagcgttttatgtcagtgcgaacatcagcactgcgtgaacaatttgcctggctgcgcgagaacggttatcaaccggtcagtattgctcaaattcgtgaagcacatcgaggaggaaaaccgctaccggaaaaagcagtagtgctgacttttgatgacggctaccagagtttttatacccgcgtcttcccaattcttcaggccttccagtggcctgctgtatgggcccccgtcggcagttgggtcgatacgccagcggatgaacaagtaaaatttggcgatgagatggtcgatcgagaatattttgccacgtggcaacaagtgcgagaagttgcgcgttcccggctcgttgaggtcgcttctcatacatggaattctcactacggtattcaggctaatgccaccggcagcttattgcctgtatatgtaaatcgtgcatattttactgaccacgcacggtatgaaaccgcagcagaataccgggaaagaattcgtctggatgctgtaaaaatgacggaatacctgcgtacaaaggctgaggtaaatccacacgtttttgtttggccttatggcgaagcgaatggcatagcaatcgcggaattaaaaaaactcggttatgacatgttcttcacccttgaatcaggtttggcaaatgcgtcgcaattagattccattccgcgagtattaatcgccaataatccctcattaaaagagtttgcccagcaaattattaccgtacaggaaaaaccactacaacgggtaatgcatatcgatcttgattacatttatgacgaaaaccgccagcaaatggatcgcaatattgatgtgctaattcagcgggtaaaagatatgcaaatatctaccgtgtatttacaagcatttgctgatcccgatggtgatgggctggttaaagaggtctggtttccaaatcgtttgctaccaatgaaagcagatatttttagtcgggttgcctggcaattgcgtacccgctcaggtgtaaacatctatgcgtggatgccggtattaagctgggatttagatcccacattaacgcgagtaaaatacttaccaactggggagaaaaaagcacaaattcatcctgaacaataccgccgtctctctcctttcgatgacagggtcagagcacaagttggcatgttatatgatgatcttgccggacatgctgcttttgatggcatattgttccacgatgatgctttgctttcagattatgaagatgccagtgcaccggctatcgcggcttatcagcaagctggctttagcgggagtctgagcgaaattcgacaaaacccggagcaatttaaacagtggacccgctttaaaagtcgtgcgttaactgacttcactttagaacttagtgcgcgcgtaaaagccattcgtggtccacatgttaaaactgcacgaaatatttttgcacttccggtaatacaacctgaaagtgaagcctggtttgcacagaattatgctgatttcctaaaaagctatgactggaccgctattatggctatgccttatatggaaggcgtcacagaaaaattggctgatcaatggttaacacaattgaccaatcagatgaaaagcatcccgcaggctaaagacaaatcaattttagaattacaggcacaaaactggcagaaaaatggtcagcatcaggctatttcttcacaacaactcgctcactggatgagcctattacaactgaatggagtgaaaaattatggttattatcccgacaattttctgcataaccaacctgaaatagacgttattcgtcctgagttttcaacagcctggtatccgaaaaatgattaa

SEQ ID NO: 16678 - DNA, 159 bp, Escherichia coli
gtggctttcctgcgttcggttaaatcccggcgcggcatttttgccgggggatcacttattaagggcgcatggactgaacaaaccgcagaaatctacagctggctggcttgtggcgcgggtttcattgatgttagcttatgccaaaacctggcatcttaa

SEQ ID NO: 16679 - DNA, 912 bp, Escherichia coli
atgactgaaatcgttgcagataaaacggtagaggtagttaaaaacgcaatcgaaaccgcagatggagcattagatctttataataaatatctcgatcaggtcatcccctggcagacctttgatgaaaccataaaagagttaagtcgctttaaacaggagtattcacaggcagcctccgttttagttggcgatattaaaaccttacttatggatagccaggataagtattttgaagcaacccaaacagtgtatgaatggtgtggtgttgcgacgcaattgctcgcagcgtatattttgctatttgatgagtacaatgagaagaaagcatccgcccagaaagacattctcattaaggtactggatgacggtatcacgaagctgaatgaagcgcaaaaatccctgctggtaagctcacaaagtttcaacaacgcttccgggaaactgctggcgttagatagccagttaaccaatgatttttcagaaaaaagcagctatttccagtcacaggtagataaaatcaggaaggaagcgtatgccggtgccgcagccggtgtcgtcgccggtccatttggtttaatcatttcctattctattgctgcgggcgtagttgaagggaaactgattccagaattgaagaacaagttaaaatctgtgcagagtttctttaccaccctgtctaacacggttaaacaagcgaataaagatatcgatgccgccaaattgaaattaaccaccgaaatagccgccatcggggagataaaaacggaaactgaaacaaccagattctacgttgattatgatgatttaatgctttctttgctaaaagaagcggccaaaaaaatgattaacacctgtaatgagtatcagaaaagacacggtaagaagacactctttgaggtacctgaagtctga

SEQ ID NO: 16680 - DNA, 219 bp, Escherichia coli
atggaaagagtccccctaaagcagactgacagacatcacaaatccccgggtggggatttgtgtataagagacagcctgataggggggcgcatacattatgcatacatactctcggatattgtaaaagttttttatataattactaagttagctaccatcaataaaatattgacgttagcaggtaacatcaacttaatatataaaaatattcttaggtga

SEQ ID NO: 16681 - DNA, 558 bp, Escherichia coli
atgctagtgactaagctcgctgacgtgagattggattcaaaatatctcatatggagcgtggccttacagtggtcaaaattgcacattcagtgcatgaaaaaatccctgagaatacagtttggcgagcgggtaaaagaactgcgcattgccaccggattgagccaggaggcctttgccgatcggtgcgggtttgcacgtagttatatgagcagaattgaacgtggtggctctaatgcgtctctggatgcgattgaggtgctggctaacgctctgagcgttgagccgtggcagttgttagcgcctggcccatctgaagataacgactcggaactgttggttccatacgcagccgatggttcctgttttcaccccggtttggcgagcacccgtgatggctcgtttggcgtaggtgataaagcggctcagaagcgttttggcacgtttgctgaagctcttgagtatcttcgtagcatggagacagcaaaatggcgtaggcctaatcctagcggcaactggggtatcgtatcagcggttcggtgggacaaactgagaaagtag

SEQ ID NO: 16682 - DNA, 495 bp, Escherichia coli
atgacgggagcagactttttactaccgattgcagcgggagccgcgattagctgggccagttatagtgtagttgcccatgctgtatcaaagcagcacatcagcacgctacgcgcaactgtatggggtgctctgggcactctctcattggtgctgggcgtatgcgccttttctgctgtaggtgctgagcatcagacagcacgaaaagatatcgtatgtgcagatgacaacccggaatgctatgcgaaaacgcaccataacccggtcagggagtgcaaaaaggtaatggatgagaaagcgaagtttcgccatgtgtggcaagaaagcgaagcgcctgtatttaatacttatctctggcacgatgagaatgcgaagattattcaggcatttgggcaacaagctaaggtagttaacggcttggggatgctagctccgcttcaatacttttgtgttttcaacgcaaaaacaggagaagtcattgcggcctctttcgaataa

SEQ ID NO: 16683 - DNA, 846 bp, Escherichia coli
atggcttacacagcaactgttatccctgtaatgattgcttctcctggtgatgtcgctgaagagagacaagtcattcgtgaaatgatccatgagtggaatgatataaattcagctcgttcaaaagtaatgttgacaccaattggatgggaaactcatacatcacccgaattaggagttaggcctcagaagttgattaatcaaagattattagtagattgtgatttattaatcggtgtgttttggactcgtctaggctcaccgactgggaacgaggccagcggaacagtcgaagaaatccaccgtcatttgaatgcgggaaaaccggcaatgatttacttttcctcaaagcctgttgcccctgaaagccttgatagagaacaatatgagtctcttaaattgttcaaaactgagtgcatgcaaaagggattgatagagtcttttaatgacttatctgatttcaaagacaaagtccgtaggcaactttcgataattatttctagtagcccttatttgtcttctcttatatctaccattaacaattctcctgatgcgaatacaagtcaatctttgccagaaagtaatttgtccgccgatgcactcagtttgctgaaattggcatgtgtcgatgatagcggaacaatttatgtgataaggcatttaggtggcacggatattcaagcgggaaatcaatcctttggtggaagttcggctagagaggtagcccgttgggagggcgcacttaacgaactgttatcctttgattatgtgattgaaagaggggcaaaaggacaaatgtattatgttactcataaaggctggacatttcttgaatctttaaatgaataa

SEQ ID NO: 16684 - DNA, 561 bp, Escherichia coli
atggcaacttttggctacggacgtgtttcgacatcgcagcaggatactgagaaccaacggctggagcttgggcaggctgggtggcaaattgattactggtttgccgatgttgttagcgggaaggttccggcaatgcaacgtaaagcattttctgaaatgctcaataaaatccgcgatggtgaaacgttggtggtagcgaagcttgatcgtctggggcgtgatgcgattgacgtcctgcaaacggtaagggcgctggctgaccgtaatatcaaggttcttgtccaccagcttggtaacacagatctcacttctgccgctgggaagttgctattatctatgctcgccgcggttgcggagatggagcgtgatctgctgattgagcgcactcaggcgggactatcacgagcaaaagccgaaggtaagaaattgggcagacctcctaaaatcgcgtcagaagcccgtagagagattttagagaaaaagaatagcggtttgagtatcagtgcgttagcgcgtcaatatggcgtttcaagagcgactgtagcagctattaccgattga

SEQ ID NO: 16685 - DNA, 915 bp, Escherichia coli
atgcttattcagaaaaagcgtattcgaaatattgataattacatacctaactttgatggccgtgatatctacattgcacattctttgccagatgcggggaaaacggactctattggtttctcaagtcaaagagctttaggtgaagaagtcctccccaagattttagggccaataaccagattcaatgctaatggcaaatcagtacctgacaaaacagcacctaaagaaactgcatacagacaaatttcatggactagaaagcaatggatcggagggggcgcaactcaagaagttactgacactcgtgaaattgagtataagcgctacaagagaatcctcacccctccaccaagcatagagttaaagattgtagagaatcttcaaggggagaagttgatcatctctccaaagctaagtttgacagctaacaacaaagagttagtggctcactgcattaatctttttttagagctttttgggttgtgcgaaactgttgacgaccaacttaataccatcgttaaaagtaaatctataaaactaaactggagcctcctgcctcagggtcaacagccttggagtactatcggctcaaaaatcctttcagctattaagatcaggggaaagggcaataccgctgttgttgaaggcagacttgaacttatcaatagtaaaaaaccagatttcgtagcggttgggcaagctgggttccaaggctacgtgatatttgggttcacaggccaaaacatttacgtgctagaaagctcacaatgtaataacgcaacttatatacttaacaataattggcagcagttatcccagctaactaaagccgaaatactagacggaaacttgcaccatgcccgtgtcatccaccgtgtaaactgggcagcagaaatacttaaatacttaccataa

SEQ ID NO: 16686 - DNA, 1206 bp, Escherichia coli
atggcggttgatattaaagatgtcgaacaggtcgcgcaggagctgcagcagaagtttgacgacttcaaagcaaagaacgacaagcgcgttgaggcgattgagcaggaaaaaggcaaacttgccgggcaggtggaaaccctgaacggaaaactcagcgagctggaaaatctcaaaagcgaccttgaaaaagagctgcttgagctgaaacgtccggcaggtggtgcgcaaaataaactggccaccgagcataaagaagcgtttgtgggctttctgcgtaaaggccgtgaagacggtctgcgcgatctggagcgcaaggcattacaggtgggcaccgatgaagacggtggctatgccgtgccggaagcactggatcgcaacattctcaccctgctgaaagatgaagtggtgatgcgccaggaagccacggtgatcactgttggcggttccgactacaaaaaactggtgaatctgggcggcacggcttccggatgggtgggcgagactgacgcgcgctccctgactgccacctcaaaactgggactgattgaacctttcatgggggaaatctacggtaacccgcaggccactcagaaaatgctggatgatgccttcttcaacgtggaggcctggatcaacagcgagctggcgaccgaatttgccgaacaggaagaaattgcctttaccaccggtgatggcaccaagaagccaaaagggttcctggcgtatgaatccaccgatgaaaccgataaggttcgtgcgttcggtaaacttcagcatattgtatccggtgaagcgacgacggtgaccgcagacgccattatcaaactgatttacacgctgcgtaaggcacaccgcactggcgcgaagttcatgatgaacaacaacagcctgtttgccatccgtctgttgaaagacaccgagggtaactatctgtggcgtccggggctggagctggggcaaccgtcctctctggcgggttacggtatcgctgaaaacgaacagatgccggatatcgccgctgatgcgaaagctattgcatttggtaacttcaagcggggttacaccatcgttgaccgtatcggtacccgcattctgcgtgatccgtacaccaataaaccgtttgtcggtttttataccaccaagcgcaccggcggcatgctggtcgattcgcaggccatcaaactgctgaagattgcagcggcgtaa

SEQ ID NO: 16687 - DNA, 555 bp, Escherichia coli
atggttaacggcgagcagtcgcagattgtgagcttaagagcgcaacttactgaagcaaaatataaccttgagcagactgtcattcgcgcaccaagcaatggctacgttactcaggtactgatccgcccaggtacatacgcagctgccttgccgttgcgtccggtgatggttttcatccccgagcaaaaacggcaaattgtcgcccaatttcggcagaactcgctgttacgtctgaaacccggcgatgatgcggaagtggtgtttaacgcgctacctgggcaggtgttccacggcaaactgactagtattttacctgtcgtgccaggcggttcgtatcaggcgcaaggggtactgcaatcattaaccgtcgtacccggcacggacggtgtgctgggaaccattgaactggaccctaacgatgatatcgatgccttacccgacggcatttacgcccaggtagcagtttactccgaccatttcagccatgtttcggtgatgcggaaggtgctgctaagaatgaccagttggatgcattatctttatttggatcattga

SEQ ID NO: 16688 - DNA, 612 bp, Escherichia coli
atggatctattgattgttttaacttacgtggcgctggcgtgggcggtctttaaaatcttccgcattccggtaaatcagtggacgctggcgacggcggcgctgggaggcgtgtttctggtgagtggtttgattttgttgatgaactacaaccacccttacacttttaccgcgcaaaaggcagtgatagcgatccccatcacgccacaggtgacgggaattgttactgaagtcaccgacaaaaataatcagcttattcagaagggcgaggtgctttttaagctcgacccggttcgttaccaggcgcgagttgacagacttcaggctgacctgatgacggcgacgcataatataaagacgctgcgcgcgcagctcactgaagcgcaggccaacaccacccaggtttcagcggagcgcgaccgcctgtttaaaaattatcaacgttacctgaaaggcagccaggcggcagtgaatccgttctcggaacgtgacatcgacgatgcgcggcaaaacttcctcgcgcaggacgcgctggtgaaggctcggtggcggagcaggcgcagatccagagccagctcgacagtatggttaacggcgagcagtcgcagattgtga

SEQ ID NO: 16689 - DNA, 1704 bp, Escherichia coli
atgaaaataaaattacgtattactattatattaatttcagccttatgcatttttaatggattattgactcctggtgcatatgccgcaacagcgaatggatacgtagcaaataaagaaaatctacgtagtttttttgaaacggtttcatcatatgcgggtaagcctacaatagttagtaagcttgccatgaagaaacagatcagcggaaattttgatttaaccgaaccctatgccttgattgaacgcctgtcggcgcagatggggcttatttggtatgatgatggcaaagctatttatatctatgactcatcagagatgcgtaatgcactgattaatctgagaaaggtatcgacgaatgagtttaatcattttttaaaaaaatcaggtctgtataactctcgttatgaaattaaagggggaggcaatggtactttctatgtttcagggccaccggtgtatgttgacctggtcgttaatgctgcaaaattgatggagcaaaacagcgatggcatcgagatcggacgaaataaagtaggaataattcatctggtcaacacattcgttaatgatcggacttatgaattacgtggcgaaaagatagttattcctggcatggcaaaagtactatcgacattgttaaataataacattaagcaaagcactggggttaacgtactttctgaaatttcaagtcgtcaacaactaaaaaacgtatcacgtatgcctccttttcctggtgctgaagaagatgatgacctacaagtagagaaaataatatcgacagctggagcgccagagactgacgatatacaaattattgcatatcctgataccaacagtttacttgttaaaggaacagtatctcaggttgattttatcgagaagttagtagctacgctcgatattccaaagcgacatattgaattatctttatggataatagatattgataagactgatctagaacagttaggagctgactggtcgggcacgataaaaattggatccagcctaagtgcatcatttaataattcaggttcaattagtaccctggatgggacacagtttattgcaacaatacaggcacttgcgcaaaaaagaagagccgccgttgttgctcgtcctgtcgttttaacacaggagaatattcctgctatatttgataataaccgtactttctatactaaattagtcggcgagcgtactgcggaattggatgaagtaacctatggtacgatgattagcgtgctaccacgatttgctgcgcgaaatcaaattgaattactcttgaatattgaagatggcaatgaaatcaattctgacaagaccaatgttgatgatctgcctcaggttggtagaacgcttataagtactattgcgcgcgtgcctcaagggaaaagtcttttgattggtggatatacacgagatacgaatacctatgaaagtcgcaagatcccaatattaggcagtattccatttattggtaaattatttggatatgaaggaacaaatgcgaataacatcgttcgtgtctttcttattgagccaagagagatcgatgagcgcatgatgaataatgcgaatgaggctgcggttgacgccagagcaataacacagcaaatggtaaaaaataaagaaatcaacgatgaattactgcagaaatggataaaaacttacctgaatcgtgaagtcgtcggaggatag

SEQ ID NO: 16690 - DNA, 1317 bp, Escherichia coli
atgtcaggagaacacacgttaaaagcggtacgaggcagttttattgatgtcacccgtacggtcgataacccggaagagattgcctctgcgctgcggtttattgaggatggtttattactcattaaacagggaaaagtggaatggtttggcgaatgggaaaacggaaagcatcaaattcctgacaccattcgcgtgcgcgactatcgcggcaaactgatagtaccgggctttgtcgatacacatatccattatccgcaaagtgaaatggtgggggcctatggtgaacaattgctggagtggttgaataaacacaccttccctactgaacgtcgttatgaggatttagagtacgcccgcgaaatgtcggcattcttcatcaagcagcttttacgtaacggaaccaccacggcgctggtgtttggcactgttcatccgcaatccgttgatgcgctgtttgaagccgccagtcatatcaatatgcgtatgattgccggtaaggtgatgatggaccgcaacgcaccggattatctgctcgacactgccgaaagcagctatcaccaaagcaaagaactgatcgaacgctggcacaaaaatggtcgtctgttgtatgcgattacgccacgcttcgcccctacctcatctcctgaacagatggcgatggcgcaacgcctgaaagaagaatatccggatacgtgggtacatacccatctctgtgaaaacaaagatgaaattgcctgggtgaaatcgctttatcctgaccatgatggttatctggatgtttaccatcagtacggtctgaccggtaaaaactgtgtctttgctcactgcgtccatctcgaagaaaaagagtgggatcgtctcagcgaaaccaaatccagcattgctttctgtccgacctccaacctttacctcggcagcggcttattcaacttgaaaaaagcatggcagaagaaagttaaagtgggcatgggaacggatatcggtgccggaaccactttcaacatgctgcaaacgctaaacgaagcctacaaggtattgcaattacaaggctatcgcctctcggcatatgaagcattttacctggccacgctcggcggagcgaaatctctgggccttgacgatttgattggcaactttttacctggcaaagaagctgatttcgtggtgatggaacccaccgccactccgctacagcagctgcgctatgacaactctgtttctttagtcgacaaattgttcgtgatgatgacgttgggcgatgaccgttcgatctaccgcacctacgttgatggtcgtctggtgtacgaacgcaactaa

SEQ ID NO: 16691 - DNA, 1368 bp, Escherichia coli
atgtctggagacatcctacaaacaccggacgcaccaaagccacagggcgcgctggataattattttaaaattaccgctcgtggcagtaccgttcgtcaggaagtactggctggcttaacgacctttctggccatggtttattccgttatcgtcgttccgggaatgctgggcaaagcaggttttcctcccgcagctgtgtttgttgccacctgtctggtcgcgggcttcggctcgttgctgatggggttatgggccaatttgccaatggcgattggttgcgcgatttccctgacggcgtttaccgcattcagtctggtactcgggcaacaaattagcgttcctgtcgcactgggcgcggtctttctgatgggcgtcatcttcaccgccatttccgtaaccggtgtgcgtacctggatcttacgtaatttaccgatggggatagctcacggtacaggtatcggtatcggcctgtttctgctgctgattgctgctaacggtgtgggaatggttatcaaaaacccgattgaaggcttgccggtggcgctcggtgcgtttacctccttcccggtgatgatgagcttgctggggctggcggtcatcttcggtctggaaaagtgccgcgtacccggcgggatcttgttggtgattattgccatctcgatcatcggcttaatctttgatccagcggtgaagtaccacggtctggtggcgatgcccagtctgactggcgaagatggtaagtcgctgattttcagcctcgatattatgggggcactccagccaactgtacttccgagtgtactggcattggtgatgaccgcagtgttcgacgccactggtaccatccgtgccgtcgccggtcaggcgaatttgttagataaagacaaccagatcatcaacggcggtaaagccctgaccagtgactcagtaagttcaatattctccggcctggtgggcgcagcgcccgcagcggtttatatcgaatcagcggcaggaaccgccgccgggggtaaaacagggttaaccgcaaccgtagtgggggcgttattcctgctgattctgttcttatcaccgctgtcatttttgatccctggttacgccactgcacccgctctgatgtacgtaggtttgctgatgttaagtaacgtctcgaagctggatttcaatgattttattgacgctatggctggcctggtgtgtgccgtgttcatcgttctgacttgtaatatcgttaccggtattatgctgggctttgtgacactggtcgtaggccgcgtctttgcacgcgaatggcaaaagctgaatattggtacggtgatcattactgccgcacttgtcgcattttacgcgggtggttgggcaatctaa

SEQ ID NO: 16692 - DNA, 345 bp, Escherichia coli
atgttcggcatggtactggcgacagggattcgaattctgtcgcgctgtaactacaccaccaaccgttacaacctctatattgtggcgatcagtctcggcgttggcatgactccgacgctctctcacgatttcttttctaagttaccggccgtactgcaaccgttgctgcatagcggcattatgctcgcaacccttagcgccgttgtgctgaacgtcttctttaatggctatcagcatcatgctgatctggtgaaggaatccgtctctgataaagatttaaaagtcaggacagtacgtatgtggcttctgatgcgcaagctgaagaaaaatgagcatggagaataa

SEQ ID NO: 16693 - DNA, 654 bp, Escherichia coli
atgaaaaaagctaatcttacaggtacgttggtttgctttgtcgcatgccttatttttttgtcgtccggtgatatttttcgtgaaaagccaatcgctctaatatggttccttcgacaaaacatactcttttttacgggaactcttgcgtggtgtctgatgacgctgacgatgtgtttatcgttgcgttcatcatggcttaacaaagtgctgggcggtctggataaagcatggcgattacataagtgggcaggaatatgcgccatagcgtttgctttcgcccactggctggatgaaaaattaccccagttattcgtcgcctttggctggcttactcaccctggtaaaatcgttgatattaacctgacgccagtacaagaaaattggcttcatgcgggactgttagcgggtgaatgcgcaatgtttattattatagcgatggtttgcgtatctcttagcaaaagagttccctatcatttatttcatcttgttcaccgtttgttccccgtcttttatctggcaattgcctttcatgtgtttactgctttgtttaaatcatactggtgggaaactcctgctgcgtatttattaattttaattactattccgggcgtctttgcggctttcatttcgctggtaatgactccaacttactga

SEQ ID NO: 16694 - DNA, 837 bp, Escherichia coli
atgccgtctctacgttccgcttacgtttgtaatttgtcgccggagttccagcctccaaagcaccatacgcacaagctgccgctggtgttatctgatgctttacagcgcattaatgggcgtgatcttacgtgtgaggttgcgttctacgttaatcaaccgtcagagcggaagcgccggataaacgagcatcgtcgtcgggcgattaatgctgtgatcgctgcgattttgcaccatgtaaacatcatttctaagcgggttctggccagtgctgaggcgttggctgatttttgcggcctgtctaccgtatccgaagctgggaacaagtctataacacgctgtacaagggcgttgtcgcaactgaaagcgttaggttttattgattatgaacgtcgctgggatcgggtgaataaacagtattggccagcgaaaatagagattcgtgatcaactgctggaaaccgttggtattactgaacaagcatggagacgtgcggttagccagaaacttaattacttcaatgcgaagaatagcgaacggcttaaaaaagcgataacggaggctgattataagcgtattgttattcaggagcagatggagaatgtatggcgtcagaggaagacggccagagagataaaggcaaaacagaaagcagcggagagagctgcgcgtcttgttcgggaaaagggagaggccgaacttcgtcatcaaatcactagagaggttagccaggaatttgctgatggcatgtatcctggagctgaccttgcatatttacgatccctcgttgagcagcgttataacaggttaagaaagacctggaaatcactccaacattaa

SEQ ID NO: 16695 - DNA, 288 bp, Escherichia coli
atggataaagatactgttttaaaaatgttgaatccggcttgtttaaaaaaagcggatgaatgggaatctcctacatgtggagaagttcgggcagtcattggcctgaccggaatgagcggctcgcagttggccaaaaaacttggcttaaaagatagtcgcaatgttcgcaactggcagatgttaaaggagtccacatccagatccagcattccgtatgcagcctgggcgctgctgtgttacttcgctgggttagggttaatcttcattgataacaaaacagatgtttga

SEQ ID NO: 16696 - DNA, 264 bp, Escherichia coli
atggaacttgtacgcaaaacacgcaaagagttcttggacctgtatcgcatgggagctttcacttgtgttgtggctacccaggacgaagtgacaaaaagctggcggctttttgctctcaataaaaaagggattgccgttttcattgaaaaagcccgtggtggtatccgcgaatgggcgggattgaattatgtggctgatttttgcgcagctatggggattcgtcgctgggaagtccatatgccaggagtaaagtcacaaaaatag

SEQ ID NO: 16697 - DNA, 348 bp, Escherichia coli
atgtggacggtactttttagccagcgatttgacgactggctaaatgagcaagaagacgctcttcaggaaaaggttttggctgatttgaaaaatctacaggtttacggacctgagttacccaggccatatgccgataccgtaaaaggttctcggtacaaaaatatgaaagagcttcgcgttcagttttctggccgtccgataagagccttttatgcgttcgatccgattcgccgggccatcgttctttgtgcaggagacaaaagtaacgataagcggttttataaaaaactggtgcgtatagctgaggatgagtttgcagcacatctgaacacactggagagcaagtaa

SEQ ID NO: 16698 - DNA, 300 bp, Escherichia coli
atgagaacattagatgaggtgattgccagccgttcacctgaaagccaggcgcgaattaaagaaatggcagatgagatgattcttgaggtcggcttgcagatgatgcgtgaagaactccagttatcacaaaaacaggttgctgaggcgatgggtataagccagccagcagtaacaaagctggagcagcgcggaaatgatttaaagctggcgacattaaagcgttacgttgaagctatgggaggcaaattaagcctggatgttgagcttcccacaggaaaacgaatagcgtttaacatctga

SEQ ID NO: 16699 - DNA, 381 bp, Escherichia coli
atgagcatgattaaaatccgcaaaaacgctttccttaaaattcaaactatcctggctggttctgttggcgtgatttgccgttcttcttcaagccgcatcgatgacggctacgatgatgagtatcgtgtgtcctcgtgcgatgaggctttaacttggctgaaggagaatcaggagcgtgcccaggtatatctggaaacagagaacggcaatcagatgctgcgtattagcggtcgttatggatttgaaactacattcatggcctattttaatcaggcttactttgacaaggagttggcctggtacactgatcgcatgagcaaaagcgagccagccccgattacaccgcctaacaataaaccatttttattcctcgttaagtaa

SEQ ID NO: 16700 - DNA, 426 bp, Escherichia coli
atgagttcatctgcttttgtcaccgtggtcactggtgtaagtgtttttgttctaggccaactcatcgtcaaaggagctattgagccttacatttcattcagggaacaactagggaaaatatccaatctgttattgtgtaaccaagcaaaaatagtgaatcctggctcgaacttaaagccagaaatcattcatgatctaaaagattccgcagcacagttaatggcgaaatattccactttacctttctatatcaaaaagttacatatcggctttcgtcttgttccatcagccaccgagattcttggggcagctcgaaatttgaactatatagcgtcaatacatgaaggtaagactggggagaatccatctaagcatctcgaagatattggccatatgctcaaaataccaactacctattcaagctaa

SEQ ID NO: 16701 - DNA, 273 bp, Escherichia coli
atgacgggttacgaattgaaattatggcgtcgtgggatgaactggacgcaggagcgagccgccgaagaatttgggatatcgttggctacatataagcgatatgagaagggggagccgccgagggtcattgagatggccattcgcgttctgtcgtttgacgatatggttaaggatctttcacatcttgataaagatgcgattctgttaaggctgcaaacccttgtatgggaaaaggttaaagtgtcgtcagaattggaacaagggatcaaatga

SEQ ID NO: 16702 - DNA, 636 bp, Escherichia coli
atggggatgctggtggcgtttattattagcctgattttgtgtttcttcgtagttcgtggtgcatatcggaaacaatgtggctcatcttctggtagtaagttcaaagctgttttagtgagtgggtttcttgggattgctacttttgttgttgttaatactcttgcggctgtggccttgataccagaagactccggcactacggctactaccggagctgctttcgatggtgtgaccgtagataagtttaagcagctatataatgatgaccttgaaggtatcgctacatcaggaaaatccacctccgctataagaattaagtcagttaaacaaggtaacaacacagttgaatttgccatcaactcatctgttaacggtcgagctagagttgataaggatgggaagatttcagagttattatggcgagtatctaagcctagctctgattccttgctttctatggccgtagctgttgaagtcttggatgcatcaagtgatagagacacagtgatcgcgcagttagagcagattgttaaatctgatacgcagaaagctgagtttaagactaagagaggcgagtattacgtttctcgtgacaaatcagggcacgtgtcgctactgattacaccgaaatattaa

SEQ ID NO: 16703 - DNA, 1182 bp, Escherichia coli
atgaaaacgcttccgatcgttaacaccctacagcctatcctgcataaccagatccccgttatcactactgaactactggcgcaattgtatggaaccgagcgccaacgtctgacaaacaatttcaatagaaacaaggaacgttttatagaaggtaaacacttttttaggatagaaggtaaagagttacgagagttgaagaacaaaaactctttaagagttcctgtgagagtagttaacgaaccatctttaagatggttacaaattcccccgaaagttcgctccctcatcctctggacagaacgcggggctgcacgtcacgccaaaatgcttgaaactaaccaagcgtgggatgtgttcgaacggctggaagacagctatttcaaccagaacgcgcaaacggcctcgaccgttaccgtctcgccaaacaatgctcgtgaggttgtcgatacgctcaacgccaaaccaatgttttacattaaggtgtgcaataacgagccactcacaacctcagccgatgttgcccaggcattcagcaccacaaacaattccatcgtgatggccatcgatgcgttacgcattcctcgcacagctgcgtcgcgtcatttctttaaagagcaacgaccgttggaaggaagcgaccgcgaaataacaatctatcgcatgacaaaagacggatttaccttgctcatggagagcatcgacggtccaggcgtgaaagatatcaaactggcctacattgaagcctttaacgctatcagcagcgtgttaaaaacacagtacgagcgtgatctggctaaacggctgtaccaggaaaaaacgattatccgcgcggcaacagagcataatcggctattaacggaaccgaactacaggaaggaactaatcaaggagtttgacaaggcaacagggaaaaccaaagcggcgctaaatctgccagcaatgactcaggaaaatgtgatatcagccttacttcttgatctgctcagaaacgccagagcacttatcagctttgacgaaaacctgaatcctcagctcaagctactaccaccgacaggcaaagtagtcgaccaggctgatcacaacagcatactcagcgtactggatgcaaacctgccagccaggacactacaggagctgataaagatatcagcggataaactggccgcaggtgcaaaaccataa

SEQ ID NO: 16704 - DNA, 288 bp, Escherichia coli
atgatgaccggttacgccaaccctgtacgtctcaccacctcactgattggcgtcagcggtggtgattattccaatatcaaaactggaactatcatcatgacaaacctatcccatgactattacgtcaacctcgtaaagatccttctcaagaaagcctcatacgccgataaagtccgcttggctgaaatcatcgagcgcgaagctatgcgcatcgccagcaacgataacgctgtttctgacgcaaaaatctccctcgtaaccaaagtaattatgggaggtgcaaaatga

SEQ ID NO: 16705 - DNA, 249 bp, Escherichia coli
atggccgcaccatcaaaaccaccaaagaagaacagcaaaggcgtaccgccatcgatcgaacaaccgcaggttttcgacccgactgaaacgccaaccagaaccaaatcaggtggggcacaaatggcgtttaacgtcgaccctgaatttaaacgtgagtacaaaacattcgccagctcaatggatatgtcattgaaagaagtgctgacaaaatcttttgagttactcaaggctcaatacaaccagaagtaa

SEQ ID NO: 16706 - DNA, 654 bp, Escherichia coli
atgactatctctgtaggtattttcaacggaaaaggcggcgtaaccaaatcaacaattgcccgtgctttagcagttgcttatgcaaaggccggctggaatgtatgcctgatcgatatggatgtgcttaacggaacggtaacgcgttgggtacaacgcagaatggccaacaatatcgaaccagcaatcgcggcacagccgtgcggcacaccatcacaagtccagaaaatcatcgaatcagaagtatacgacctggttatcgtagatggcggtgcctacgcatctgaatcagtaccgaagctctctgaatttctggatatggttattttgccaaccagattctctaccgatgacctggaaaccaccgttaacacagctcacggcatcgttaaaaagggtgtaccaatcaagaaaatttgcatggtgttttccggcgcggctgaaaacgaagctgactatattgaagcccaagagtacctggctaatacgccatactttgttgtcgataagtacattccccacaagccagctctgagcaaagctcaggataagggcttaagcctcattgagtgctcatacgttgcgccacgcaaaaaggcagacgacgttattcaggggattatcaaccagcttgaggctctgactactgccgcgtaa

SEQ ID NO: 16707 - DNA, 375 bp, Escherichia coli
atggaattacatacagccaataaaaacgaaactctgatcactgctggaatcgaaatccaagcgttgaacatagcgattgagtgtatgttatgccaaatcattgataatgagaaagatatcgactggatagaatctatccttcatctggcatcagaacaaaaagtctgcctcaaaacggccttacaatacgatgtgccagcggtatcgaagctgtgccagccattgatggcctataacagggctattatttctgtatgcctcatgattcttgatgaaaacacccctcttagcgaccgctcagaagctgctctaaccctctcacgtaaacagcgacagctagcaaatcaactgatatcaacgatagctgacctctga

SEQ ID NO: 16708 - DNA, 663 bp, Escherichia coli
atgaaaagcaacgacgagaacatcaagaaagaaataggtctgcgcattcagactctacggaaacaatccggcatgactgccggagatctccagcaagtcactggaataggcttaagcaccttgcagaactatgaggccggattaagacaaccatctatacctgccatcaagaaaatcgcgcacgccctgaaagcatcagcgccttatatcgcgtgcttaacagataacccgttcccaccccagaatactaacgctcctgttattcctgggcttgtagctataaaaaatgacatagcatcgcacgccggagaaaagccagtgctggcgatagaacaggagattctacgaagcaagaacatcaacccatcgtctctgtcagttctccagagcaacgatgagctaaagctaatgtcaccaacaatatcccccggctcccaagtcctgattaatacagacgatacagagattcatgaggggatctatgcccttgaagacagaaatggcctggttgttttgaggcactgtagagtcataccgggtgacaatgctgttatgctgtcaaccgaaagggatgctgaaatgaacactaagcatctgaataacgaggagtttaagcgttataaagttcttggccgcgtagttagtgttgtcaactggttatga

SEQ ID NO: 16709 - DNA, 495 bp, Escherichia coli
atgacctttcaggagtgggttgacgaaaatggaggccaaattggtgttgccagaaagtttggctttacgtcatcactgattggtgcctggtatcgcttcgagagattccctcgtgcggataacctgacgctgctggtggcgtattcggaaggccggattaacgtccagcaatgggcggcagattttgccgaacgtcagcgccagcgtagcgatggcacatcggttcggcagaacaagatcaaagggaatctccctgttaactgcttatcaaggctgaaagcggttttctctgagctggggatgcctgcggagcgttgcaatctacgcggtccgcgattcattgctcgctggaaacactcacacgtaaccgtttcagaggttcgtgatgcgattactgtgctggagcttaagaataaagattccagcgatatcgagctgattcataaggagattagcaacgcccggcgttcagcacttgggaggcttgaggaatga

SEQ ID NO: 16710 - DNA, 516 bp, Escherichia coli
atgatgattctggccttctttggtgataatcaccagattcaatcgcaggtggtgcactaccttgatcaaacgattaaaggatttgttatcgatcatattgataacgatagcaaacatctatctgtagatcagaaaattggacgtgtgcagcgactggttgccagccgtaacagacgtgacaccgtcacagtagtcacggggataacggaggtcatggagtaccagatgttgctgcatcgtggagctgttttctgcgttcttcctggcattctgccagcaattcttgctcgtggttttgtccctattgatgagtcgtttttatatgtaaccccaagccgttcccttctggatacggaggcgaagcgtcgcatttatatgatgccggacgaggcattttctgaatgttaccgccgtgaaatgaggttgggtaaacgagaagtgtctgttgttcgtgatggcaggtttttaagaagccgcccggtgaaaagcaccagaaatgacgggggccatcaatga

SEQ ID NO: 16711 - DNA, 234 bp, Escherichia coli
atgagtagttatgttcgcggtgctgcgatgcattgccagaatccccaattctggcgctttctgaccagtaaaacagggaagaacgtttcaaacagttctgaggcctctgtgattctgcgtgagttttgcgggatctcatcccgtaaagagctggcaaagaactacgcggccagaagcatgtatgtccagttaatcaacgagttcaacctctttatcaatggtaaggggcgctga

SEQ ID NO: 16712 - DNA, 405 bp, Escherichia coli
atgaacggacgtacaccaacgaagaaagagaaactttatatacaagcggtgctcactcacgtgggttgcatagcttgcattattgatggccgtgaaattgagaatccagagctgtggacggagctacatcacgatcctgattacggcagcgttgatgagaattgccacttccatagctttgggttgtgcgcatcacatcatcgcggtgttgtgcctggtggtgggcgcgtgcctccgcatattgccgttcgtcaccctcccctgagtaattgtgctcgctttgttgagcgttatggcaccgatgaatttttgtgtgcgcagacgtgggagctgttgccgcagtcagttaaagacgaaattgggtttgatcttagtcttggtgaagtaccaggggataccaaatga

SEQ ID NO: 16713 - DNA, 333 bp, Escherichia coli
atgagatataccggctttcgcaaaccagcgaccaggaaaagcaaatacggcaataaaaaaactgttgtcgatgatatcgcttttgatagcaaaaaagaggctgattactactgcgaactgaagctactgagaaaagctggccgcgttgtgacgtttcttatgcaggtgccttttcatctgccaggtggtgtcgtttataaacttgatttcatggtgttttatgacgatgggacgattgattgtgtcgacactaaaggtgtgcgaacagacgtctacatcatgaagaaaaagcaggtagaggcgctttatcccgtcacgatacgggagatctga

SEQ ID NO: 16714 - DNA, 378 bp, Escherichia coli
gtgagacgcgatctggatagcttgtttgagctatgggcgctgtgggtgcgcaatggctgcaacgcccgtagcggtttcgcgtcgatgttagaaatgatgatggttacgcgttgccagtttaccggagggggcggcgcaccaaatgactcactggaaaccagtatcgagggagcggtgacggccctcacggtagttgatgagactgcggcgctggttgtccgaattgaatacggggcgtgggagattcggggcctcgacataaatgcaccgcatattgataaagcccacgccctttctcttagtctcagacagtatcgccggaagctggcaaaagccagggcgtatgttgtcgactatttgaaaaagcgaagagagtga

SEQ ID NO: 16715 - DNA, 1068 bp, Escherichia coli
atgaataaacaagtaattatttctgactggatcaacaaccctaacagccggttaagcactgatactggctacctattacgccatgttaatggtcgtatggtcaaaagcgatgagcacgaaacctttttctttgttgaagacgatgggcgtatctatgaggatggttactcttatgaagcccaaactggttgtatccctgcggagctggtggacgtaacagaagatctgcgcaaagcatggcttgaacagcagcagcgcggagatgattacgtaaacacctatcaggaacgccagaacgcgcgtcttgcccgatatattgctcgtgcagaaaaagccagaaaagaaggtgcggtagcgcataagcgagcgcatgacctgttggacgtgatcccgttaggccagccgattttagttgaccattatagcgcgaaaggccatcgccgccgtttgtctaaagctgatgcgttattaagaaaagcgtttgttgaatgcgaaagtaaagcatcacactacgagagcaaagccgcaggtgttggtcgtaatggaatttcgtctgatgatcctgatgcgctatttaagttgcttcgtaagctgcaaggctgcatgaagtcacacgtcaaaatgaaggccgcaaataaggccattcgcaaatacaaaaaagaccatttacagcagctttctgcattaatcgatctcaggtttacagaaagcgaagccaaagagttactggccggagatttctgtgggcgcatcggattcccttcatacgcactgagcaacaataacgccgaaatcaaacgactacagagccgtattaaggagcttgaatcggtcaagtctgtaacaggagcacagcgcgaagaatacgacggcttttctatggagatagatccagaggataaccgcatcctgttttatttccctggcaaaccagaggcaaacattcgttcgctgcttaaatcacgcgcctttaagtggagtccaacccgtaatgcatgggttcgcaagattactccaaacgctctggctgatgcccgatatctgaaagaatcgctattgaaagcctga

SEQ ID NO: 16716 - DNA, 282 bp, Escherichia coli
atgaaacgcaaaattattaacccccaagatgtgattaatttcctgaccgatcacccatgttcaaaagtggacgtaatcgcggagcacattggtgtgtcgcagaactctatgcgttgcagactgagaagcatggttgccgaaggacagataacaaccaggaaaataaatggttgcctgtactactccgctaaaccggaattgccatttggcatgaatcctaactccatgttgtttaacaccttattagccaaagttaagccgttgagaggggctgtggcatga

SEQ ID NO: 16717 - DNA, 366 bp, Escherichia coli
atgagcatcaaaacccataccggaataatcatcaccattgatggtgagaaaagagtgaagttgcgcgaaacgccgacaacctggtgtgttggtccgaaagaaacatatcgcaaggaagatggccgtcgttgtggggcaccactttcccgccgtcgcctccttttgagcacgataaaacctatcgggcaggttgagcaaccaacgactccggtaacgaagatttcagacaagagtctggcaaacctgatcgccgatgcggacacggtgctggagcggaacacccccgttgcagatgaggaatggtggcaggatttccgagccgcaatgctagagcttcaggaacgtcgtcgggaggagttgaagtga

SEQ ID NO: 16718 - DNA, 249 bp, Escherichia coli
gtgagtggatcaaattgtcgaattaatggcaatcgaatagagccgtgtgctgcattggcaaagtctcttgagcacgatgctgaatgctcagtaagaaaaggcttactgctatacaaaatctggaatgagagtttaacccgtggacctgatttggtgatgttgcgttccggtgagttttctaaatcacctattcgagtctcattttgcccgttttgtggtgaaagtctgaaaacgtgggagggagagtga

SEQ ID NO: 16719 - DNA, 684 bp, Escherichia coli
gtgaaagagcgcggcatgatttttaacgatgagatggtccgggccatcctcgaaggaaggaagacgcagactcgccgacctgtaaaaaatgtcagggccgataactgcctggttatccgtaaaccgacaaagaaacgcaatggtgtctatacccacgttatggatgcacctgaacatggtttatgcccgttcggtaacgttggtgatcgcatatgggtccgtgaagcgtgggcgatattaggcaatgaggatggttgcagtgtggactggaacgacaacctttgtcgtggcgatgagaagaacgcagcaaggatttatcgggccagttgtgagcaaaaaccgggggattatggcttatggtcgatacccgatgatgccgactggaagcctcacactgtgaatgaaaagtttgatggtgggtggcgtccatcaattcacatgccgcgatgggcatcgcgtattttgctggaaattactgacgtgcgtgtggaacggctgcatgacatgagcgaggcagatgctaaagcagaaggtgcatctccggcgacgtacacgattacgccacctgaagctgtttatcgcgttggctttggtgatatctggcgcggtatttacgggcaggataactggctatctaacccgtgggtatgggtaattgagtttaagcgtattcaggaagcataa

SEQ ID NO: 16720 - DNA, 342 bp, Escherichia coli
atgagcaaatcacttaatgcacgttgtattcgccgttgggaagtcaaatttaagcctgtttgtgattcgaaagttagccctcacatgcgtaaaagttttttgcgtgggatgcgtgaattggggcttattacggctgaaaacatggttgaaagcatggctgagaaaaatgccaagtttgactacgacggcaaggacacaggctggtcgccggagttttctaactggtatgaagggcatcgagaaaagtatcgtaaagaggctcgtgaccatctggatgaagaagccacaaacgatgaggtcgataaagaaattgaaacagagctggagtcttggaatgactaa

SEQ ID NO: 16721 - DNA, 441 bp, Escherichia coli
atgaccactattaccagagaacaggcacagaaaattattgaagcagccgatgaggttattagtgcgctggccggaactaatgaggatgttaaccctgatagcgataacatgctacgtctgtgggatgacctgaatgaccgtcacgcgccccctgaagttgtgcgtgagctggcacgaattgcactggcatcactgggagcagaaccggtggcgtggatgcgtgatgacgcagatggtcgtgagtataacgctcgcaatgaattttctggtggagggggaggagttccactctacgccacccctccagtgccagtagtaccggaagaaaaaccaatgcctaatcctcttagcatgtacgcggttgatgctgttgccgctattgcagaggttagaggctggaacgcctgccgtgctgccatgcttcagggaaaaggaaagtga

SEQ ID NO: 16722 - DNA, 276 bp, Escherichia coli
atggctacttttaccaaagagcaattgattgcccatattcgtgaacgtaaggaagcgcgccagagaatgttggatacggtaactattcaccccggatttcgtgaatatcttgaaagagagcttgctacagatgaaattgcactggcatccttggcatcaacacctgttgcatggctagttggagggcgtttgttcacaactgagatagctgcggggatgtacgctagtgaggtgaggaaagcagttaagccgctattcttttctgcactactgtga

SEQ ID NO: 16723 - DNA, 396 bp, Escherichia coli
atgtcagcagaaccaatttccggtacggtcgttgctgctggtggcctgatgggtgccagcgtttttggtattgcaactggtattgattacggcgttgtattcggggcatttgctggcgctgttttctatgttgctacagcggtgaatattagccgtctcaagctgattggctatttctttacatcgttcattgttggagtgattggagcgccgttagttggctcatttcttgccaaatggaccagctacaacgatcgtcctctggatgcgcttggtgcggttattgtggctgcattgaccattaaaatcctcacgttcgtaaacagccaggatctcggtagcatctttggaatgctttcccgcttacgtggagggggttcaaatggtaagcagtga

SEQ ID NO: 16724 - DNA, 297 bp, Escherichia coli
atggtaagcagtgacccgtcagcactgattaatgcggtgctttgcacagtaatagtaatggcgctgatgctttatcgacggaaagactccaggcatcgtccatttgtttcctttctggcttatatctacgtcattgtatacgccaatgttcccttccgttatgtgttcggtctttatcaagaatcccactggctggtggttattggaaatctgattatctgcatcgttgttctgtatttcaggggcaatctggcgcggatagttgacgcattagggtttaatcatgaccaaagatga

SEQ ID NO: 16725 - DNA, 543 bp, Escherichia coli
atgaccaaagatgagatttttaacagcattcttggaaaagagggcggctatgtggatcaccctgacgacaagggaggcccaacaaagtggggcattacccagaacactgcccgtgctcatggataccgtggcgatatgcgcgatttaactcgcgaacaggctctggaaatccttgaggctgattactggtacggaccacgctttgatcaggtggccgcattatcctctgatattgccgcagagctgtgtgataccggtgtgaatatggggccaacagtagcgtcaaaaatgcttcaacgctggctgaatgtgttcaatctgcgtgggaagctgtatcccgatttggatgcagacggacgaatcggtccacgtaccattaatgcgctgcgtgcttatcttgggaatcggggaaaagacggcgaacgggtgatgctgacgtcgctgaactgtacgcagggcgaacgctatctggagttggcggagaagcgcgaggctaatgagtcgtttgtctacggctggatgaaagagcgagtggtggtatga

SEQ ID NO: 16726 - DNA, 279 bp, Escherichia coli
atgactggtttgaaggccgttttgtcatttattggcacaattatattggttgcattcggcgcgtttggttttggtcgtatgaagggacgagaaaaggccgaagatgaagctgaaaagcagcgcattaatgagaatgcagccgccgtaaaagccactgcggagcggcgtatagaagtgacaaaagaggtggggaatgtacagcagagtgttaaccatatggctgatgacgatgttgatcgcgagctgcgggagtcgtggaagcgtcccggtggtggttga

SEQ ID NO: 16727 - DNA, 588 bp, Escherichia coli
atggaggcaattgcattgtttaatctgatttatgctgatcccccctgggaatacaaagacaagtgtaaggatgggaatcgtggagctggttttaagtatccaacgatgaaagctgaggagattgctcgtattcctgtctggcagcttgctaatcctgaatcgtgtttgttggccatgtggtgggttccgactcagccagaagaagcgttgctggtggttaaagcatggggattcaggctgatgaccatgaagggcttcacatggaacaaatgtggtagccgccaaccagataagctggtgatggggatggggcatatgactcgtgcaaacagtgaagattgcttgtttgcggtaaaaggcaaactgccgacccgtcttgatgcggggatcattcagtcgtttacatcgcctcgtctggagcattctcggaagcctgatgtggtccgtgacaagctggtaaagctgttaggtgatgttcctcgtattgagatgtttgctcgcggtgatttacctgatggctggcatggctggggcaaccagtgcaatggaggtatccagttgcatgatgctctctggcaagtggtatag

SEQ ID NO: 16728 - DNA, 261 bp, Escherichia coli
atgaaaagtagcgatatggtagaagctctcgaaattaacgcagcaatcgatactatgattgctgaccgtcaggcaattgctgatcgccaaaaacaccacgttgatgtattacaagaaacttgggatcttgtgcgcttggggcatcagtataaagaagctgggaaggactggtatcgctgggcgaaagctacagcaattagactgtgggaaagcacgcaatctcgggcagaagagctgaaagataacggggtgagtctatga

SEQ ID NO: 16729 - DNA, 198 bp, Escherichia coli
atgagctacattccattctctcgcgcaacgacagcacagcgtatcgagatcattgcgaacgacattgagcgtcttaatgaagatgttaaccaaatggttgatacgggcgatttaactctttgcaagctgttaaaagtgcaagccatgatgcgtgatctacagaccaaagcaaaaattgtctcgatacatgctgaataa

SEQ ID NO: 16730 - DNA, 456 bp, Escherichia coli
atgccttcgacaagcaccaaaaaagaaatggcggttagtgatgtgctttacgcgctttcgactatatgtgacggagcaatgatgaggatgaaagtcctccatgaagcatacggaaaaagtcacgatgaggcagctaaagagtgcctgaatgagattgtggacttccttgatagccatcggtcgctgatagctttcgataaccagccgcaagccgaagaatgccagaagcgcgagtataaaacgatatatgggaataagttctcctgtctaagcgagttggctgcaaaggtggccgacattctggagaacaacagcggtcggatgcatcaggttagatatcagtctgaatatgaagctctaatcatgttagctgatcagttagttgataccggagctttacagctcaactgcgtaaggctatctggtcatccgataaaaattaatggaaggatataa

SEQ ID NO: 16731 - DNA, 153 bp, Escherichia coli
atgaatggtcttggcatttttctggtgattatggccgtgtggttttgtttctcgctggtggttgttgctggtgtcctgtggcgcatcttagtggcgcagagagcttttcggcttaagcgggagcaaatgcgccttgatttctatcgaaagtaa

SEQ ID NO: 16732 - DNA, 411 bp, Escherichia coli
atggaaaagaaagaagataaaccgattgccattggtgcagagtctgttccgtttaagtttgaattatcccaactggtaacaatgcgtatcagtgacgaatggggagaagttcaagcccgtgctcagtatgcaaatggcgaaaaccagtatctgattcactatcaggcggctgatggccgtgctaccacagagtggttcggtgagtcgatgctgattgcgatggaggataaacgtcatcctggctgccctgtttttgcctgtattgatttgccagaaggcgcggtacttgaagacgacgaagaagaatgctcatctgatggcgaacttgtcattaccggaatcgttgatggtaagccggaatactctcgtattgaggtaaataacggctgcctccgtttgatccctgcgtaa

SEQ ID NO: 16733 - DNA, 624 bp, Escherichia coli
atgacaaaacatcttaatgtggtttctttaccactttctgtgttgattggttatgaaaagaacgctcgcacacactccgtggagcaggtagatcagattgttgccagcatacaggagtacggatggactaatccgatcctgatagacgagaacaacgttgtaattgctggtcatggtcgaattgctgcggccactcagttggggatggatgacgttccctgcattgttctggaagggctaacggagaatcagaagaaggcatatcgtctggccgacaaccgtattccgctgaatgctggttgggatgaagagttgttaagcgcggagcttgcagatcttgcggccgatgattttgctctggactcaattggttttactcagcgcgaactggataacttattgagtgcggcggtctacgatgacacagagggtatggatatcccatttgagaaggatgaggccaaatcaggcgtaaaagttcagtacctgtcatttggaggtcataaaatcccggcaacggatgaggaagcggatcgttttgactgcgcggtatctcgttatgttgatgataatggcagctatatcggatttgtatccgcattgctggctggggaggtgtgctga

SEQ ID NO: 16734 - DNA, 1374 bp, Escherichia coli
atgcttcatctcaattacgacataacgcacctacgcggcgcggaatataacccgcgttttattggtgaggatgatcttgcgaggctggcggaaagcgtcagggagctggggcttgtgaagccattgatagtgcgcggcgatttgctggtggcgggacaccaaaggacgaaggcgctacgtaagttgggaataacgcgtgctgcggtgtatgtgttgccctgtgaaacgacggtatacgacgaagtacggtttaaccaactgcataacggaacggattttgatagcggagatgagcgttgcagggtgtccggtctggaagataagcatggttttgttcaggtatcggcaagccagatctcaggcaatatgcgcgcgaaaatggcatatgttcgaaagaacatagcggaactggttatcaagtatggcccgtggggtggttgtgttgctactcagtctggcgaggttattcactgtgctcagtatgcattagcagcgaagatgacgcgcacaccgctaacggtgtttgtgatccctgatgctgagaaggaaaaataccaaagttatctgaataaaacttatggtgtatttgagtattctcacttggagaaaacaacatacatccagacgtatgcgcagcttatgcggttgcgtaatggtggcagcctgaaatcaaacctgtatgagtcgttgatcctcccgatcattgccaagacgccaagaggaattgattttggttcggggcagggagactacgcgcgaatgctcagggcaaagggatataacctgcatgatctagagcttttccgccgtaagggcgctggaaacactctggataggaccgcaacaaaccggatgattgatacgctggtggacgacttaaaaacgcgagggcgttacgactacgtgatttgcgatagcgttttgaactcggtcgatagtgtcgaggctgaatggtccgttctgacggttctgaaaggcttgtgtaaagctggtgggtcaatattcttttctggccgtagccgtggagagctggaaacagtcctgaagcaaacacaagcggcgagttccaaaagccggctttattttattgatcataacggttttaccgcgttgtaccggaaggggcactggttttaccagaagtttcactctgatgaggaagtgaagcagttgtgtcgtgtacatggtttcaggattaagcggtcaatattcaactgtaagagctggtatttgcacgtcattaacgatgattcccttagttgggcgagtctggagaaagctgttcgttttgagtttgagttgccgttgcctggtggttcaacaatcggacgctctgatgatgtgctggcggctttccggccgttgattaagtag

SEQ ID NO: 16735 - DNA, 720 bp, Escherichia coli
gtggctgacagaattgagataaagattgatttttcttctcaggatattcaacgacaactccagcgccttgaagaacgcgaattgccgttcgcaatggcgcttgcggcaaccagaacggcaaaggcttctcaggctgcgattaagaatgaaattaatcgggtatttgacaggcccacgccgtggattcagaactctacttacgttttggccgcaaagaagagtgatcctacagccattgtgtatgctcgtgaatggggaggaacgccagcccctgtaacgttgactccgcaaatcgaaggtggccaacgacagtacaaacgctcagaaggggcgctaagggctggtggatatttgcctaacggctggcagcttgctcctggtcccggcgcaaagctggacaaatacgggaatatttcgcgggggcaattacagcaggtcttatctggcctaagagttcagcgagatgcgcatcaaaatcgccgtcagggcaagcctacggagttttttgttgttcgacctggtacaagtaacccgcttcaaccaggcgtctggcagcgcgttgggcggcgtcctacgttgatccttacgtttatccagcaacctaactattcgcagcgtcttgattggcatggcgtggcgctgcgtgctggtgaggatgcgtttgctgatgaagtcacaaaggctattgatgacattctttctaagaccttctctcgttaa

SEQ ID NO: 16736 - DNA, 591 bp, Escherichia coli
atggctctaaaaatcgaatatttaccagtcggtaagctgctcagatacgccaaaaattcacggactcattcagatgagcaagttgaacagttggtgaacagtatccgtgagttcggtttcactaatcctgtgctgatcgatgaaaagaatgaactgattgcggggcatgggcggcttgcagcagccgaaattctggaaatggataaagttccagcgattcggttgagtaacctttctgaaaaacagaagaaggcttacaggattgcagataacaagctggccttaaatgctggctgggatatgcagcttctggccgaagaagtcaaagcgttaatggatgatgattttgatattgatctgcttgggtttaatgatgcagagcttgacgaaatgttaagcgatgaacagccgcaggaagaagacgataattcttcccctgttgttcaaattaagtacctggctattgataaagaacgtattcccgcgacggatatggaaattgcattgttgctggatgtttatcgtcagtaccacgacgcgcatgaaacgcatgagggatttgttcagtatcttgctaatggttgcaagtaa

SEQ ID NO: 16737 - DNA, 552 bp, Escherichia coli
atggccatcgtcagtaagtcagagtttgcccgccgaaaaggtatttctccggcaatggttacgaagctctgtcgttccggtcgcattccagtgctgaaaagcggcaagctggattttgataaagctagtgcggcttatgaagcgagccgacaggttggtcgtgaggtatctgctgaaaatggaaaaagagggcatgggatatcttcggaacaaccagagttacccgctgatgatgccggattagctggtggtacttccggtgttgcggtgcaattcaacaaggctaagaccgcagaaaaaatttatcaggcaaagctgaaacgccttgaatttgaagaaaaggaaggctctctcatcgctaaagatgcggtcagggatgatgcatttctggcagctaatgaattgcgtagccgcttatttagtattgctccaagagcagctccccgttgtgaaggcaaaacagccagggagatcgaacgcattattgaagacgagattaattttgcgcttcaggcgctccaggaatcccgatttattaagcaggaagaataa

SEQ ID NO: 16738 - DNA, 1857 bp, Escherichia coli
atgggcgaaacagtatggagcaccgcttttttccgtgcgcttcgccctaaatcacggctaactgtttccgaatgggctgataagtatcgtcatgtagcgccgggaacgtctccagagccagggccgtggcgtacaagccgagtgccatatttgcgtgaaccaatggatgttattggtgacgctgatacagaaacagtagtgatgcaatgtagctcgcaaattggtaaatccgaattacagctaaatgttatgggttactttgcagatcaggagccatctcctcagttgatgatttatccaacggtagaggcggctgaggctttttcaaaagagcgtattgatccgacgttcaaatattcccctggtttgaaacacaagctgcatgaagggaaagaggggcgcggtgcagccaaaaagtccagcacgactatacgtatgaagcattacgctggtggatatatagcacttgttggtgctaattccccagcaggtcttgcatccaggccaattcgaatactgttagctgatgagattgatcgttacggtgtgacgcaggagggcgacccactaaaactaggtattcagcgtactaccaactttcataatcgtaagaaagtttttgtttctactcctgttttggaggaaacgagcaaaatccacaagtggtttaagctctccgatcagcgttactaccatgttccttgcccatgttgtggcaccatgcaggtgatgaaatggtcgcaagtcagatgggataagagcgattcaggtgaggcgttaccggaaacggccagatatgagtgctgtgagtgcggcgggattatgcgcggatctggtaaaccagacgttgattggttggcgaagggggtatggatagctgaacatactggagttaaaggtattgttggttttcatattaacagtctttactccccgtgggttgcattgtcagagctggttgaagaatttacggaagcaaccagaaaccgcgataaaaatggattaatggagtttattaaccttaagctgggtgagccatggaaagaggatgctaaagacgatatcgatcctgaatacttgttgcaacgcagaataaggtttgaagagtttttaccagatgatgttttattgttaagtgctggtgttgacgtacaggacacgtatttagtttgtgaattggtcggttggggaaaaggtaaggagtcatgggggatagaatataaaatattcccaggtgatcccgcacaagatgttgtctggaaacaacttgatgaatacttactccgtagctggtcattccgtgacggtcgaaaattacagatttcttccgtttgtattgactctggtgggcattttacgacagaggtatatcgctttactaagccgagagaatcaaggcgaatatactctatcagggggcgtggtggggtaggtttaccatttataggaaagccaagtaataataaccgtgtgggtgctatgttgtttaatttgggggttgatgatggtaaagggaccatcatggcaagaattaaactacatgatcctggtcctggttatatgcatttcccattagattctgacagaggatatgataccgaatactttaaaggattattatcagagaagaaaatatttgaatataaaaatgggcagacaaaagaaaagtgggtgaaagtctacgagcgtaacgagcctcttgattgccgtaactatgcaactgccgcgatggaaattctgaaccctaattttaactggcttgccgaacaggaaatgcgaggtaatgtgtatgtgcagaactcgtcaggtatacgtagaagacgccgtagagttataagtaaaggcgtaaccatatag

SEQ ID NO: 16739 - DNA, 240 bp, Escherichia coli
atgaacaatgaagcattttctctgactgaagccagagagatgttatctgtctggcgggaagcatatcgcgctattgctattggcggtcagtcatataaatttggtacgcggcagttaactcgtgcggatttatcagaagtcagaaaagagatggattactggcgtaatgaagtagaaagattatcagcaggtatacgccgaggcccacgaattaaacgagtggtgataagagatttatga

SEQ ID NO: 16740 - DNA, 1575 bp, Escherichia coli
atgaatattcttgatcgagttattgcgccgttttcacctcagagggcattaaatcgagctttggcaagaaaacggttagaagcacttgaaggtattaataaccttggatattcacgtcatggtgcaagcactcataaaaaatcattaaggggttggtttagtaaagctggttctcctgatgatgatattgttaaaaatatagataaattgcgtgagcgttctcgtgatctcttcatgggaaacccgctatcggttggcgcaataaaaactatcaggacaaacgttgttggttccggtttaaaactaaatgcgaacattgatgccgatttcttggggatgacgcaggaagaagcgcgagcatgggaaaagcatgttgagcgtgagtttagattatgggctgattctccaaattgtgatgcatcaagaatgtgtacttttggacaattgcaatcattggtccaaatatctgcgttaacatctggcgatatatttgctgcgctaccagttattaagcgtaagggtgttatatatgatttgtgcgtctatttaattgaaggtgatcgtgtttgcaatccagaggatcgttttataccaaatctttacggtggcgtagaggttggtgaatttagcgagcctgtggcgtactgggttgcaaaacatcacccagccgggacttctggttttgtaacccgcaagtgggaacgtattcccgcatatgggagtaaaacaggaagaagaaatattctgcatgtcatgcaggattttgaaaggcctgggcaacgccgtggcgttcctgtacttgctcctgttattgaagcattgaagcagttaggacgatacaccgatgctgaattggttgctgcggttgtgtcagggatgtttactgtctttattaaaacagacgctcctgatggaccagtcggtgaatcgggtatccctcagtacgagcagatcgataaccatgatgataacacccaagaaatggggaatggctccatagtaagtttgggtgaaggtgagtcgatagatacagcaaatcccgggcgaccaaatacggcatttgatggttttgttgtcgccatatgccgtcaaattggggctgctttagaactcccttacgaactcttggtaaagcattttacagcaagttatagcgctagcagggccgcattacttgaagcctggaaaatgttccgtatgcgacgtgactggatggttcagtcattttgccaaccgatctatgaggaatggttggccgaagccgttgctaaaggtcgtgttattgcccctggttttttttatgggcctgaatatcgcgctgcatggagtggcgctcaatggtatggcccatcacaaggccaattagatccccttaaagaagtcaaagctgcaaaactgcgtgttgaggaaacattctctacccgtgaaaaggaagcggctgaaatgtcaggtcttaactgggaagaaaccgcacaaatttgtggcagagaagagaatgctcgccgtgagttggggctgattacgcctcctgtttctgaggtaaatgaacaaaatatggagacagatgatgcctaa

SEQ ID NO: 16741 - DNA, 1065 bp, Escherichia coli
atgcctaattggtgggaaataaaaaatagcacgggtgaagatgactctccggctgaacttttaatctacggatatattggcgaatttgatgaggtttcttcttctgacatagttaataaattaaaggatatatcatcaaatgctatcaacgtaaaaattaatagttatggtggttctgtttttactgctcaagctattctttcttcattaaaacgtcataaggctaatattactgtttatattgatggtattgctgcatcggctgcaaccattattgcaatggcaggtgataaagttgttatcccatctaatgctatgatgatgatccataatccgtggacatttgctgctggtgatgcggatgaactacgtgatattgctgagatgatggataagatacgagatagtattttatctgcatataaggagaaaacagggctttctgaggataaattaattgaactaatggatcaggaaacatggctaaatgcagaagaggctgtagagcttggatttgctgacgaagttgaaaaaccaatgcgcttatccgcttctataaaggaagggatgctttcgctcaatggaataacttttgaagcatcaaggttttcaaaattacctgattcgctcgcaaagttgccacaaaataaaaatgaattatctactgaattaaatgaacaaaatgaggacgatgttgtgactcttgatgaattaaaaaataaacatccagaattatacaatcaggtttttaatgctggtaaagacgagggcgttaaatcagaacgcgagcgcattgaaacaatcgagaatagcgtaattccaggtcatgacgacctggttaagaatgcaaaattcaaaacgggaatttctgcggctgaacttgctttggaaattatgaatgcagagcgagcgcgtaacaaaaactttcttaatcaacggcaagaagacgcaaatgaggtgaatgattcagttgatgttaatcaaccagaaaacaacggcgataaacaagctgaagtagtaaaaaatgttattgggtcagtattcaaaaaccgcgataaaaattaa

SEQ ID NO: 16742 - DNA, 384 bp, Escherichia coli
atgcgagagtctttttcatttgaaccagataatctgattatttctggtggtatgccagcaattacaacaagtattaaacttgccagcggtaaagtaaatcgaggtgagttgcttgcttttgtcagtattgatcagacaacaaatgttgtcactgtggcaccaataaatctctctggtgagggggtggcaaaagaaccgtattgtatcgctcaacatagtattgatgcgactgattcagcgcaagttggaacagcatggctgaccggaatgttcaatgcacatgcggttatccttcctgaatcagcaaagattgccgatgtatatctggcttgccggaaggttgggatattccttaataccgcacaacaaaatccatctgcataa

SEQ ID NO: 16743 - DNA, 1044 bp, Escherichia coli
atgtcgaatattgatatttttgaacgacgtacaatgcttgagcctgttattcagaatttcaaggctcgtcgttttcttcttcgtaccttttttcctggtgttcagacctttaatacaaagaaagttgatctggattttgttcgcggtggccgtactatggctccgtttgttggtaaaggttttggctcaaaaaccgttgagcgacgcggctttgtaacgagaactctggagccaccacttgttgcacctgatttggtaacaacagccgagctgcttttaaacaggcttccgggtgagaatatttacaacgcaaaatcgccagcagaacgagccgccgcgcaattaggtaaagatttgcttgagcttgatgaaatggttaaccgccgtgaagaatggatgtgtgcacaagtcttgtttacggggcaggttgatattgttggtgaaggagtggatgacacagtttatttttggcctgaagaggaaggagataaaccatatcttgaactgacaggtgatgatttatggagcgcagcaaaatcagatccgttggtcaatgttcgcaactggaaacgtcgggtatcactaacttcaggttttacacctcgtgttgccgtaatgggcgcaaaagttgttgatgccttcgttaaaaatgaagcagtaactaaatatcttgataatcgccgaaaagagcttgggtatattgagcctaaggagttagaagaaggcgtaactcattatggcaatcttgaaggtgtcgatttttatggttacgacgaacttattcgcaatgataaaacaggaaaaccagaaccattagtaccggaagataagatcctctttggctctcctggtcgaggaacgatgctgtatggtgctgtagagcttgtagatgacgccgaaaagactctgacgattgttgagtcgccacgagttccagacacctgggtaactcgtaagccggctggccgttatgttgccatgaagtcatctccactgcctaatcctggtgtggctgatgcctatctggtggctaaggtggtttaa

SEQ ID NO: 16744 - DNA, 393 bp, Escherichia coli
atggccagactgattaaaaacattgatacgataagccacggctcgctaaaagcgggccgtttgcttaatgggctaatggataactccagaattgccgaactgattgcgtcaggacatgctattgccaccgaagaggatggtgatttggcatcggctgggggctatgatgctgctaagttagcttttgagcatggatacgcatctgctgttaatgatgctgtggacgcggggttgattacgcgaacggaggcgggtagctgtgtattcgaggttgagtttgaggatgatggcggcaatgaggaaatggttgctgatgattcatctgaatctgtagctacttctgataccagtaatgcgaaaaaatcaacgcaaaaaaaaggtaataataagtaa

SEQ ID NO: 16745 - DNA, 345 bp, Escherichia coli
atgaactccttcaaagaggttatagcgcaagatatttctgcaatattcctcaatgaaaaagagtttgccgatacatataacatagacggcaaggatatccttgccgttattgatacagaccttattcatgagcgtaataaacgctcatatgctgagtttgcagagggaataaatcaggggcaaataatattatttgtttcaagaaaagattttcctgttctccctgtcaaagaccagtcaatgaaaatcaacggtaaaaattatattgttgatgaagtatcagataatgttggtgtattggaaataactctcactgttaatactaacagaggaatgccgatttga

SEQ ID NO: 16746 - DNA, 486 bp, Escherichia coli
ttgattaatcttttgatagatgcaataaaaaatcggttggaacatgaggttttccatgatttattagtgcaggggcctccttatgatgaaacagacagcgatattaaattgtttgttccaacaatatttaaagggtacttgcctcctaaatcacaaccatctccagataaaccgccagaatttcctcatgtgattatcagacccacggaaggaggaatgcagcctgaaacggatgaagttaaggttaagtttcttctaggtggtttttgtgaggaccatactggatatgaatgggtaatggctcttcttgaaaggatgatgtttcattttcaggagaagcctttacttgaagagaaatttctctttcagggtgatatcagatggcgaatgtttgatgatcaaccatatccatattggataacggaagcaactggaacgtggctagtattaaagcctcagaatattcagtctcaggagtttatctaa

SEQ ID NO: 16747 - DNA, 291 bp, Escherichia coli
atggctaataagaaaagtagtaaagaagatatagaaaagaaggaagatgttgctcaaacatttgtatatataggaccaacaatccctcaactctcaattttgaagcataaactatttaagaatggcttatctccagagtgtaaaaaattaatatcacatattcctggtgcaaagtgtttgtttgtggcaaccagtgattttgcagatgcagaaaaaagactttctgataaaaccagtgtcgagtatgtaatgtactctagagtttcttcttctatcatggagattaaataa

SEQ ID NO: 16748 - DNA, 1464 bp, Escherichia coli
atgggatatcgccacggtatttatatatctgagctggctacatctataactcctccagtacaagttagtgctgggttgattgtcgcatttggtacagctcctgttaatcagttagaagatccagcctcagcagtaaataaacctatcattgcttatacatacgcagaggccgtatctaaaataggatatagcacaaacttcgagaaatatactttaagcgaagtaattaaagtcgcatttggaatatatggtgttgcgccagttgtatttatcaatgtgcttgatccagcaaagcataagaaagacgtaactgatgaggtagtaaaactttctggcgggaaaggtacgctctctaacgatggtgtcttatataaatctgttgttgtgaaaaaagcagatggtgattcgccagggttaacggttgataccgattatgtgctggcgctggatgataatggctatacggtcattaccgctattagcggaggaaaaattaccgaaaaagacgctactcttaaggttagttatacgcatcttgatcccggtgccgtaactaaaaatgacattatcggtggtgtggattccaacactaaagccaatacagggcttgagttactgtctgatgtgtatccccgcttcaagttggttcctggacaagtgattgcgcctggatttagttctgatagtgaagttggtcagctaatggcggctaaagccgcgttgattagtgaattgttcaaagcagaagccataactgatgcaccgaccgataaatctactatcagtgattactcggctgttcctgaatggaaacagaacaataatcacatggccgctaaccagacagtgtgctggccgatggtgaaacttggtgacaatatttaccatcactcaacccatttagcggccgcaacatgcttgctggatagtcagtatggtgatattccatcacgttctccgtcaaatataaaactacagatggacggtgctgtacgtaaagatggcagtgaagtatggcttaacattagccaggcaaactacttaaatggtcaggggattgtaacaagccttaattttgatggttggaaatcatggggaaaccgtaatgctatttatccaacatctacagaccccaaagacgcatttcgtgtttgccgacgtatgtttaactgggtgggtaatacgttaattctttcgcattggtcaaaaatagacaatcctgcaaaccgtcgattaattgaatcgattgttacaagtgcgaatatttggcttaacggcctcacaggtaatcaggatattgcaggtggtgttgttacctttgatcagtctgaaaacacgattacgtcattgatggacgggattgttaaattccatgtaaaaatgacaccattctcacctgccagagatatagagttcgtcatggaatataatcctgattatctgctgaacttgttttctgaataa

SEQ ID NO: 16749 - DNA, 522 bp, Escherichia coli
ttgagcaatcaaattcctgagagacttattaactttacagtatacggtgagggaaaccgtattatcggtgttgctgacgcaaagctgccatcaattgagatgatgacagaaactgttagtggtgcaggtatcgctggagagcttgagagcggaacgctggggcatttcaaaccaatgactgtctctcttaaatggcgaactctgacctctgctggtacaaaattatttctatcctcatcgcatcaggtagattttcgcggtagccagcaggtttatgatgcaggaacaggaaaatataaaacggttcctattcgggcttcaatgaagctaaaccctaaaaaactggatttaggttcgctacaggtggcaaaggctactgattcagagaatgaatttgaagttctctatatcaaattatttattgatggaaaagaagtcttggaaattgataagttgaactttatttgtatctttgatggtgaagatatattaaaaagcgttcgtgatgatttaggtttataa

SEQ ID NO: 16750 - DNA, 282 bp, Escherichia coli
atggaaaccgttaaattaagtaaagaatatcgttttgaagactttgagccggtgactgaactcaaccttgatttagacaacctaaaaggcagtgatattttagaggtatcggacttactgcaatctcaagggcatgtttcagttcaaacatcacttgataataaagtccatgcagccttggctgctcgctgtattggccgtccaatagagtatctgaatggattgccagcgaaagactttgttaaagtttgtcaaaaggtacagaattttttgctctcgtag

SEQ ID NO: 16751 - DNA, 2793 bp, Escherichia coli
atggccagcaataagaactttaagctggcttttgaaattggcggcaaagttgccgcctctctccccaaaagttttactacagctaatcaggctgttgctaaattaaatgccgagcttgctggattaacgaaagaacatggggaaattcaaaagctacaatctgtaaaagtaaaggttggacagactgccctcgaatatcataaagctgccgctcgcgttgaagagttacagaagcaaataaaaaacacggccaatccaaccagagcgatgcttcgtgactttgagaaggcaaaaacacattcatcgaatttacgagcatcactacgttctcagcgtgaagaactggccgctttaaagtctgcctatcagggagctgatacatctgccagagctttggcttcaagagagaaagagcttaaagccagcattgatcgtaatcgtgaggctcaggtccgtagcgttgagcaggttaaccgctacagaacggctttggctttagccagagcaaatgttcagcaagtgaaaaaacagcaggaggaacttaaccgggcattagaaaaacaacgtattgataaaattaacagctataaaaatgcgttggctgaagcacggaaaaatgttcttgcagtaaaacgtgctcaggaggagttaaaccgcgcgttggaaaggcagcgtgaattgaagcgagagcatcttggtgaggcaaagagtcaacttgtaaggtcaggattacaaactggtgctgtagcggctggtgcatttgctgctgctaacaatgcagcaaatttcaatcgtgaaaacaaaatgattggtcttacggcagatatgaagccggaagaagttcaggcgatggggcaggcgatgcttgttaccggaacggctaccaaccagtttgcatctgatattcaggctgctcagggttttctcgtcgctgctgggcaggattataaagaggctcaggcgaatctactaactattgggcgaacagctacagctactggctctgatatcctcgatgtctcgaaagcatcatttacattaagtgactcattgaagattgatccatctcaaatgaagtctgcaatggggattctggttcaggcagggaaagagggaaattttgaatttaaagatatggccaaaaatcttcctgtgcttggtgcccagttccaggcattaaaaatgggaggtaaagaagccgccgcgacgatgggggcagctttgcagatagctcgcaaaggtgctgcaacttcggatgaggctgctaataatatgaacaactttttggcgaaaatactttcccctgaaacactaaaaaaagcaaagaaaaatttcggtgtagatttatataaaattgtcacaacagcgcagaaaaaagggaagaatccattcgaagctgcaatgcattctgtcatgaaaatgactaagaacggagatcagaagttacttggtgagctatttggcgatatgcaggttcagaactttgttcgtccgatgattcaaaactggaaggaataccagagaatcaaagcaacatctcttggtgctggaagtgctgttattgaccgcgattttgccaacataacgaaagacaatgcggagcgattgaaacaattacgtattcaggctagcaatgcatcattaagttttggtcaggccttgcaacctgctttgaatgccgcgcttagtgttttggttccgctgattacaaaaattagtgaatttgtagctaacaaccccaattttgtgtctcagattgtgatggcggcaggtgcgtttctaaccatgaaaagtgtggttatagcgtgtagggtagctatgctggctttatctgtagcgacaaagctaacacccttcgggtggattcagatggctatatctgcgctggttgccgcaggaatattgctctatcagaactgggataagatcagagattatgctgtcagagtttggccttctgttaaggaatatacagttaaatcgtttgaagctataaaaaactttatcttaaactttgatctcaatggatggattatatctatgtttggtaaagcatgggattatctttccaacataaactggagttcggcaggagtaagaatttacagtacattaattagtgcttttaaatggatgtctccgcttccgttcttaattaaagcatttaaacttacaacaaattacctttctggtattaactggagcgaaacaggaaagaaaatcatagatacactggtatctgtttttatgcgtttttcaccagttggactctttataagagcattccaatctgtaacggcttatttgtctggaataaactggagtgagtcaggcgcaaaaataattgagacgttaatcactgggataaaatcaaaagcaaatgctttaattaatgaagtgaaaggcgttttttcttctgtacgtgagtatttaccgttctctgacgcgaaaaaaggtccattctcacagctaacaaagtcaggtggtgcaataatgactactctggcatcaggcgttagcaggaataacagcttacagaatgcaatagcaaccaagttcgggcaatcaaatttatcacctcacgggatatctgccgccgggacttctggacctcgccagaacgttaatgctgtgactggtggaataacctattcacctgtaatcaatcttccggctggttcaccaaaggaaactgaggcggcagctaaaagagcattagatgcgggatattctgattttgagaagaaattgagtgctcatatgttccaacaacggagattaagttttggatga

SEQ ID NO: 16752 - DNA, 1002 bp, Escherichia coli
gtgttacgtaaaacgctttttgatgttatatatcagaatgtaaatgttaccgctcatatgtcacctgatgttttgtcaatgtcttatacagataatgaagatggtcaggtcgatgatatttctattatattaaaaaatgatgatgggaaatggtctggagactggacacctaaaaagggtgattttattgatttgagctttaagcctataaatcaaatcgtccttgagtgcgggaaattccaggtagatggcataacttgctctggaccaccttctgttgttgaggtgactgctgtttctgttcctgtttcatcaggcattagacgtgatttaaaaagtaatgcatgggaaaaaacaactcttaaagatatagcaacctctatagctaaattagctaaccttgaactgttgtttcttattgatggtgatagtaatccatattatgcgcgtgaagatcaaatggaggaaagcgatttaaaatttctccatcgactttgccaggatgaaggggtgtcgttaaaggtcactgatagccaattaataatatttgctcaagagatgtttgagcaaaaagatcctatcgctacgcttacgttaggtattgatgagataatcagatatagctttagcacacaatctacagatttgtataaaagttgcacgtgcaaatatcgcgtacctaaaaaaagaaagtcgctttcgtatacttgggtagatccatccgtagatgaagggtcgaatcttaagataagaaaactggtagctaatttagatgaagcaaaacgtaaggcaaaggctgctttgcggcttaaaaatagatatcaaaatacaggatctttagtattggttggagacactagattggtagctggtgtaactataaatctggacggattcggttcattttctggaaaatatcttatatcgaaagctgtgcattcaattggggctagtggttataccacctcgattgatgtccgaagagtaattaatgggtattaa

SEQ ID NO: 16753 - DNA, 621 bp, Escherichia coli
atgaatgatttagaaacattattacgtcagactataagagttggcgttgtttctgatattgatgatggtgatgttacagcaagagttactttcgatgatcaggataacgtcacttcggcaaagttatcagttattgtgaaaaatacggataagaatgctgattactggatgccagatattggtgagcaagttttgtgtatctttcatcccgcagggccgcaacaaggttttattcttggtagtttttatgatgaaacacagaagccgccatctaatactgttaataaacgcgtcattagatttaataacggaactcgtattgaggtagacagagaatctaatttactccttgttgatgctgtcggagatgtaaccgttaaggctacaggaaccgtaactattgatgctccagaaaccatcattaccggaaatgctacagttgaaggattactaaccttcaaaggtggaatgaaaggatcttctgctggaggtgttgcagctacaatttctggggatgttaaggttgttggtggtgatatagatgttgatggtattaaatctaaaggccaccatcacacagctcagggggaatacgctccgacaacggaggctcaggcatga

SEQ ID NO: 16754 - DNA, 468 bp, Escherichia coli
atgattgtgggtatgcttggtacaatgccttttgttgcctcatcaatagtggtgaatacgttcaacaattttaaaaggacgtcaaagcgtcgtgtagcgcgccatgatgttattgggcttaaacctgttctggaggatataggtccagatctggatgaagttagttttaatatgcggttggatacaacacttggcattgttccattggctgcgctttcattacttaggacaatgcaatcaattcaggaagtaaatcctgttgtaattggtattcagtattttggtaattttataattacagatatagaggaatcatggacttatttcggtccaactgggaatccacgagtgattatcgtcggcattaaattacaggaagtcggacagacctctctgaaagaagcattagttgatattgctggcaatatagagtcaaaaactagaagtgcgttaggtaaattattatga

SEQ ID NO: 16755 - DNA, 321 bp, Escherichia coli
atgaataatacgtttaccatatcatcaccttcttactcgattgattggtcgcccaaaacagttgtagaagaagttttgcaaaatgtctctactattattaatactcagattggcactgtaccatatgccagaaaattaggagttaattcaagtcttgttgatagccctagcccaatttttattgctacagcaacacgagaaataattcaaaaaattagtgagtttgagcctagagcgattatccattctgttacttttgaaagaacagacgtttctgatggttttattaggccaaaacttgtgataggagttagagaatga

SEQ ID NO: 16756 - DNA, 1125 bp, Escherichia coli
atgacgttgccgcgcggtggtttgccagatattactttcgcagattctaacccgactgatataacaactcgttcaatcagggcttttgagagtataacaggtgaaacattagcacctgctgatccacgtagattattcatcttgtcattgtgtgagattattatacagcaaagaaaagctatcgatttttctgcaaaacaaaaccttcttacatatggtgggggtgaatatctcgaccatataggctatctgacggatacgcctaggctggaagctcaatctgccttgactacatttgagtttaatctgtcaacaaaattatcggggatatatacaatacctgctggcactcaaatttcaactggaaatagtgttattttccaaacagatgttttgttggaaataccagctgggaaaacagttggtacagtctcaggatatgctgttatacctggcttatcggggaatggatttttacctgggcaaataaacgagttggtgactccgttgccgtatgtttccagcgtaaggaatctaacaacatctaattctggtgctgatacagagtcagatgataattatgctgaaagaataaagctgtcgccggaaaaactgtctacagcagggccggaggattcttataaatattggacaagaacagccaatcagaatataaaagatgtgactgtatatacaccatcgcccggaactgtagaaatccgttctttgttagagaacggggatataccttctggtgaactattagagcagataaatagcgttctctctgcaactaatattcgaccattcacagataaagttcttgttaagaaaccagagagcattgaatacgatataataattaaatactggattaactcatcggacaaaaacagaacaacgttaattcaaagtgaggttgagaaagctcttgatgagtataaacaatggcaacgttcggttatgggaagagatataaatccagatgaaattattcaacgtttaaaaaatgccggggctaaaagattagaaatatcaagtcctatatttactgtagttggagagacgcaggtcgccagagagagaaatataaattgccagtatgcggggttagaggatggctga

SEQ ID NO: 16757 - DNA, 516 bp, Escherichia coli
gtgatagctatgtcgaaagctattgatgatgaactacaagcaattaacaatttaatatataagacagaaatatatagcgttgttgataacctggactcagttgttctcgatcatttagcttggcaatggaatgctgatacatggagggatagttggcctgtatcgttaaagcgttctgtttttaaatcaataatacgaacaaagcgaataaagggtacaagggcagcggttgaagatgtagtaaatagcttgggtggagaggtaaacataacagaatggtttgaaacatcaccacctggcgaaccatatacagcctcaattgttgcttcgattaactcttttgatggtgccgttccttcgaaagagatgttggaagatacgttaagaagtatcaagagcgcaaagtcggcaagaacattatttacattttcgcaagcagccaatgtttctggtggtgtcggtattgttggtgcttgtcagcctgtgtcttatgtacgattaattggcgagtgctaa

SEQ ID NO: 16758 - DNA, 279 bp, Escherichia coli
atgaaagatattacgttgaaattcagagacagagcagaatacgactcttttttagagagtatatcctggcacgataatgaagaactgcaaaacaacatccttcttgatgttgtaggtattacatataccgaaataccaaacggcgagaacgaagaaccaacagagattaaaaatgatggcttctttgttaatgttcgtattttaaacgacagtttgaaacaacaaatgtttgatggttttgaagttcaattagaacaaccgctgcgggaatgggcgtaa

SEQ ID NO: 16759 - DNA, 1008 bp, Escherichia coli
gtgaaaaagcaatggattgttggcacggcgctgcttatgttgatgactggtaatgtctgggcagatggcgaatcgccaactgaaaatatcttaaaagatcaattcaaaaagcagtatcacggcattctcaagcttgatgccatcagcttaaaaaatcttgatgctaagggtaatcaggccacctggtcagcggaaggcgatgtatcttccagtgacgatctctatacctgggtcggtcagttggcagattacgaactgctcgaacagacctggacgaaagataaaccggtaaaattctcggcgatgttaaccagtaaaggaacgcccgcgtctggctggtcggtgaacttttactcttttcaggcggcagccagcgatcgtgggcgggtggtcgacgatatcaaaacgaataataaatatctgatcgtgaatagcgaagatttcaattatcgctttagtcagcttgagactgcgttgaatacccagaagaactcgattcctgcgctggaaaaggaagtgaaagcgcttgataagcaaatggtggcggcgcagaaagcagcggatgcatattggggaaaagatgcaaatggtaagcaaatgacccgcgaagacgcctttaaaaaaattcaccaacagcgtgatgagtttaataaacagaacgatagcgaggcgttcgcggttaaatatgacaaagaggtttatcaaccggcgattgcggcatgtcataaacagagtgaagagtgttatgaagtgccgattcagcagaagcgagatttcgatatcaacgaacaacggcgacagactttcctgcaatcacaaaaacttagccgtaaattgcaggatgactggataacgctcgaaaaagggcaatatccgttaacgatgaaagtttcagaaataaacagtaaaaaagtcacgattttgatgaaaattgacgatatcaaccaggctaatgaacgctggaaaaaagataccgaacaattgcggcgcaatggtgtgattaagtaa

SEQ ID NO: 16760 - DNA, 1215 bp, Escherichia coli
atgaaacagataacctttgctccccgtaatcacctgctcaccaataccaatacctggacgcccgacagccagtggctggtatttgacgtgcgtccttctggcgcgtcgtttaccggcgagaccattgagcgtgtgaatatccataccggcgaggtcgaggttatctatcgcgcgtcacagggcgcgtacgtcggcgtggtgaccgttcatccgaaatcagagaaatatgttttcatccacggcccggaaaatcctgatgaaacatggtattacgacttccatcatcggcgtggagtgattgttgaaggcggcaaggtgagcaatctcgatgcaatggatattaccgcgccatatacgccaggagcgctgcgcggcggcagtcatgtacatgtttttagcccaaacggtgaaagggtgagctttacctataatgaccatgtaatgcatgaactcgatccggtgctggatttgcgaaacgtcggtgttgctgcaccgtttggcccggtcaacgtacaaaagcagcatccgcgtgaatacagcggtagccactggtgcgtgctggtaagtaaaaccacgcccacgccacagccaggcagtgatgaaatcaatcgtgcttatgaagaaggatgggtaggaaatcacgcactggcgtttattggcgacacactttcggcaaagggcgagaaagtgccggagctatttatcgttgagttaccgcaagatgaagctggctggaaagcggcaggtgatgcgccgttaagtggaacggaaacaaccctgcctgcgccaccgcgcggcgtcgtgcagcgacgtttaacctttacccaccatcgggcttatccggggttagtcaacgtcccgcgccactgggtgcgctgtaatccgcagggtacgcaaatcgcgtttttaatgcgtgatgataacggcattgtgcaactgtggcttatctcgccacagggcggcgagccgcgccagttaacccataacaaaacggatattcagtctgcatttaactggcatccgtcaggagaatggttgggctttgtgctggataatcgaattgcttgcgcccatgcgcaaagcggcgaggttgagtatttaaccgaaaaccacgccaatccaccttctgcggacgccgtggtcttctcgccggatggtcaatggctggcgtggatggaaggcggccagctgtggatcaccgaaactgatcgctaa

SEQ ID NO: 16761 - DNA, 1581 bp, Escherichia coli
atgctgcctgatgaacttgagaaaagattagatggaattgaggatgcttcaaaaaaagggtatccagtacgtaatctatacaaaattgcgtgtgagcccggactgtggctgcaagcctacgtgaatatacgggccaatgcaggtgcactgactcaaggtgtatcaacagataccattgatggcttctctatcgaaagagcagagaagctggcaaaaacattgcggagtagagaatacgtagcgaaacctgtacgcagagttcagatcccaaaaaaggacggaaaaaccagaccgctggggattccaggtggagacgataaactggcgcaagaagtagcaagaattattctggaaagggtttatgaaccagtattctctgaacactctcatggattcagaccaaaacgttcgtgtgaaactgcgctcagatctattcgtccagtctggaacggagttaaatggatcgtggatgttgatatcaaaggtttctttgacaatatcccccacaaactattgctgaatacactggcagagaaaattaaggataagaatttcctgaaattaatcgaacagtggctgaaggcaggatatgtggacaattggaaataccatcgctcatattctggcacgccacaaggtgggataatttctcccttactggcaaatatatacctcgacaaactggaccgttttgtagaacagaacttaattcctgcatatacaagcggtacaaaacgaagagcgaatccagatatgaacaggctggcccataagattcataaactacgaaagaaagtagacggtatggcaactgattctgaatcagaaaaagaagccataaagaaagaaattgaacgactgcttgaagaaaaacgttctataccatctcaggtcatgaacgatccaaacttcaggcgtatgtactatgttcgatatgctgatgacttcgtaattggtgtcatcggctcgaagaaagatgctgaacatatatcaagacaggtcagaaactttattactacttcactgggattggaagttaatgaagcaaagaccaggatccgccatatctcagaaggagttaattttttaggctatgaaatcagacaggcagatgcaaagaaattgctgaagcagaaaatgcaagggcggcacgctctccggagatccaccacaggaattgtgcagctcttcgttcctgacaatatagccgctaaattttgtcaccaaaagaaatatggctgttatgagaatgtgaaggctgtacatcgttcaagtctacaaaatctcagtgaagctgaaattgttctgactttcaacgcggaaatgcgcggattggcgaactactacagtctggcgctggacatgaaatataaattatcaaaattatatttcatatggcaaataagcctttttaagaccctagcgaataaacgacgtagttcagtgaataaagtcgccaaatcgctacggcaaaataatggagatctggctattaccgttcaggccaaaaatggatcccgaaagattgaggttttcaaactcaaacatgtcaatcgcaaccgaacaacgattgtcgggtaa

SEQ ID NO: 16762 - DNA, 417 bp, Escherichia coli
gtgaacaagatctatatgctcgacacgaacatctgctcgttcatcatgcgcgagcaacctgaagcattgcttaagcacctggagcagtcggtgctgcgcggtcaccgtatcgtggtctcggccatcacctactccgagatgcgcttcggtgccaccggtccgaaggcctcgccacgccacgtgcaactggttgacgcgttctgtgagaggctcgatgccgtcctgccgtgggaccgcgccgcggtggatgcgaccacggagattaaggtggcactgcgtctcgccggcacgccgatcggtccgaacgacacggcgatagccggacacgccatcgctgcctgtgccattctggtgacgaataatgtgagagagtttgagcgggtaccgggtcttgtgctggaagactgggtaagataa

SEQ ID NO: 16763 - DNA, 1506 bp, Escherichia coli
gtgagacgtaatctttcacacattattgcagcagcattcaatgaaccgctgcttctggagcccgcctatgcgcgggttttcttttgcgcgctggggcgcgagatgggggcagcaagtctttcggtaccgcaacagcaggtacagcttgatgctcccgggatgctggctgaaacggacgagtacatggccggaggtaaacgaccggcccgtgtttaccgggtggtgaacggtattgcggtactgccggtgaccggcacgctggtgcaccggctgggggggatgcggccattttccggaatgactggctatgacggcattgtcgcctgtcttcagcaggcaatggcagatagccaggtgcggggcatactgctggacattgacagtccgggcgggcaggccgccggcgcgtttgactgcgctgacatgatttaccgcctccggcagcagaagccggtctgggcactgtgtaatgacacggcctgttctgcggccatgctgctggcgtcggcctgctcccgacggctggttacccagacatcccgtatcggttccattggcgtgatgatgagccatgtcagctatgccggtcatctggcgcaggccggtgtggatatcacgctgatttactcaggggcgcacaaggtggatggcaatcagtttgaagcgttgccggcagaggttcgccaggacatgcagcagcggattgatgcggcgcgccggatgtttgccgaaaaagtggcgatgtttaccggtctgtctattgatgcagtcacgggaacagaggccgctgtttttgaaggtcagtccggcattgaggccgggctggcggatgaattaatcaatgcgtcggatgccatcagtgtgatggccacggcgctgaacagtaatgtcagaggaggcactatgccgcaattaactgcaacggaagccgccgtgcaggagaaccagcgagtgatggggatcctgacatgccaggaagcgaaaggacgtgaacagcttgccacgatgctggcagggcaacagggcatgagcgttgaacaggcccgggcgattctggccgcggcggcaccgcagcagccggtggcatccgcgcagagtgaagccgatcgcattatggcgtgtgaagaagcgaacggtcgtgaacaactggcggcaacgctggcggcgatgccggagatgacggtggaaaaagcccgcccgatcctggcggctgcaccactggcggatgccgggccctcacttcgtgatcagatcatggccctggatgaggcaaaaggggcagaagcgcaggctgaaaaactggcggcctgcccgggaatgaccgtggagagcgcccgggctgtgctggctgcgggatcaggtaaggcagaaccggtctctgcatccacaaccgccctgtttgaacatttcatggcgaaccattcaccggctgcggtccaggggggcgtgtcacaggcgtcagaagacggtgatgcggacgtgaaaatgctcatggccatgccatga

SEQ ID NO: 16764 - DNA, 315 bp, Escherichia coli
atgactcaaaactataaactgattgtgaaagggatccgcaattttgagaataaagttacggtaactttagcgttacgggacaaaaaacgctttgacggtgaaatttttgacctggacatctcgctggaccgtgttgaaggtgccgcgctggagttttatgaggcagcagccagaaggagcatcagacaggtcttcctggatgttgctgccgggttatgtgaaggggacgagctgttgccagaaacgcgcccctgttcagaggcgcggtataccataaaaattaacagttctgataactcgattacgggttgttag

SEQ ID NO: 16765 - DNA, 690 bp, Escherichia coli
atgaataaccagtatttacagtttgttcgtgagcaactcatgattgccaccgccgatttgagtggatcaacaaaagggcagcttgaggcctggcaggagaatgccatgtttgatacagggcgttacaggcgtaaaaaaatccggtaccgcgatgaagtgactggaaaaatgataacgcgggataatccaccaatcccgggaaagcaatcgctggcgaagggggcgtcaattcctctcgtcagtccggttgagtttttgacatcatcgtggcggcgggctgttctgtctcttgaagaacatcataaagcctggttgttgtggtgttacagcgggagtatttgttgggaatatcagatcgcgataacgcagtgggtgtggaatgaatttaaaacccggtacggcaccagaaaaattgcagggaaaacgcaggagcgcgtgaagaagttgatctggctggcggcacaggatgtcagaggatggattaccgggtgtgaggtctaccagagacaggagcttgccagactgtgtggagttaagcctgataactggagccataattatgcgaactactggcgtgagatgtgcgatatttttaagagtctcgatagagaatctgtgatttgcaccgtgaaaataagagcgcaacaaaaagcgattttttcacgacgagatattgcaaaagtcaattaa

SEQ ID NO: 16766 - DNA, 180 bp, Escherichia coli
atgaaaaacgcattgcagtttttgtttgttgcgttctggttgttcgtatcatgtatgcccatcatcttcacagcaaggtatatggaaaaagttgatgttttgatattaatatttggatatataaatgccctttttttaggggtgttcatggcggtcatgtgcattgaatactggcggtaa

SEQ ID NO: 16767 - DNA, 1782 bp, Escherichia coli
atgtacttgaaatctgatgtaatagaagtaatcttacagaagaataaaataacagggtacgataaaatatatttatcttctgaaataggattaaagaaaaaaacaggggatttatttaagtatgtaataaatgataatggagtaaataataatgaagtattacatattggggataatatagaaggagatgttcgagtaccaagtagcatggggattaatacctatcatataccaagggctattgatattgcgaaattttataccccagagatgaaaaactgggttgatacagtttccttaaataaaacaccattacttgatgctgtggtaacaacaatatcaaatcgttattacgataatgaaagccaagagaaatcatctccttactgtgctgataaatttaaatttggatatcaagcttttggtcctgttattattgggtttacatcatggataaaaaaaatagcaatagaaaataacatcaagaaattatattttctatcgcgtgataccaaggtggcatatgattgtttcaatatcctttatccagatataaatatagaatcacattatatttactcatcacgtcgttctgtaagcattccattatttaagtcaaaaaaagatttattagtggaagtatataaaacaatatattcaacaactatatctgcatggctagaaaatcgttttggtataactaaagatcaatattctgttgaagtattacaaaaatatagtctaaaggattacgatcatcctattggcggtaagttcagtaaggacaaactttctcaattagtttgtgagctttctgatataattttggaaaatgctaagcaagaaagaataaacttaattgattatctttcttcccacggcatggatactaatgagaatattgcggtagttgatatcggttatgctgcatcaatgcaatctgcatatcaaaaaatacttaataaagaaaatattcacggtatatattatgcaacatttaatagtgcattgaaaaatgtttcagatagttctctcttgcatgggtatagtgtgcatcttgaaaatccatcatctccaaaatatggaatatgtagccatagattcttctatgaaacaattttttgtgatgcagacaatagttttattaaacctattaaaactaataatggatttgaaatcgttaaaagtaaatttgatgattccacaagacaaactgttgtaaaagaaatacattctggtgttttagctttggctcacgatctcgcagaaaattattcaagcagtgtgttaaatggatatattgatcctagtttaggaagttttcttttcgattcattcttaaaaacaccgaataaaaatgatgcagaaatgtttaagggggttctgtttgaagatgcaattggtcctaacatccgtcgatatctatttgtcccagatgaatataaaaatgataaaaaaaccattgataatatgatttggaaagaagctgcaagtctatttataaatccaacaccgtctcaagatgctaaaataaaatctgaactctcagttacagatgtaaataatacggtgagcactaagaaagataaaattgataaggtacaacctaaaccaattgaaagcaaaaaaaatagatttgctgtgattgaacgagccgtatttggattgttcttgagggatggaaaaaagaataagtatattgggaatagagaaatgttttttaaagattctaaaaataaatttattttacattattataatctatttggaagtaagttttaa

SEQ ID NO: 16768 - DNA, 1194 bp, Escherichia coli
atgaaacatatatatataacatctgatttccttatgactagcggggaagagcaggataataatattcgctgggtatatgattttatcagtcgacctatagaaatagcgacatcttacgatgcaaaatgtttttccactaaaaagtggaatgttttaaattttgacagaaaacattttttttccttgtcaaatatagagtatgttgaggataagcaattctattacaatgagagggatataaattcagaatctataaaatacatcaaaagcattataaaaaatgacattattcttgtggggtatgaattatcagagcaaacaagaaaaattctcgataaaataaaagtaacatatattgacatttggttgcatccaataagatatatggatgatgtattatttggtttgaaatcaaacaatgaagaaataaataacaaactttacactttcaatataccaagtgagacatattatttatatgcagatcgtttaaaagttcaaaactatcgaggttataggaaaaataaatcttatttaaaagataattctgcattgtttgtgggccaaacactaaacgataaagcagtcttccataatggaaaaatgctaaatttacttgatttcaaaaatgtttttgaaaaagtagttaagaaatacaatcatgtttattatagccggcatccatttgttaaagatggagatgaagaaataataaactatttgaaaaaatttaaaaacgtcactcttaatgatgacccaacttatcatctcttggcgtccaaagaaattgaatatgttttttccatttcctcatctgttgttcatgaagcaaaatactttggcaaggatgtggaatttttatacaaaccagttataacaatcggagatcataagaaagattatacgtcggtgatgcacgaaattttctatgggcatttttgggcttcaatattgtccccattaataaatgttaataatgttccggttgtcagctatttttcaggaaaagacaaaactcgagatgccttatccttttattgggggtataggagtatagataaagtggaaagtgtaaagcaaacagtttcgacgctttggaataaaactcaagaaattaatgcaccgaagagcccgcagccaaaaaacaaaaaaagtaaatctgggttgacaataaaaataataagtcaaatttaa

SEQ ID NO: 16769 - DNA, 1257 bp, Escherichia coli
atggatattgtcgaacgctttatcaattatacaaaaattaataccactacctcacgagaaaacggcgcaaaagggatcatgccttcatctcctggtcagatgaaacttgcgaaattgttggtgagtgaacttgaagcattgggtatggaggatattattctcagagagaatgctatcgtaacagcaacactccctgcaaatactgacgaaacaatccccgtcgtttccttttttggacatctggacaccagtgccgaacagacagccgatacaaaagcgcaacgattaccttataatgggggcgatctctgtctgaaccctgaactgaatatttatttgcgtgagagtgaattcccggagctcaaaaattatattggcgatgaccttatagtgacagatggtaccagccttctgggggccgatgataaagcggcgctggcggccataatgaacgcacttcaatttctgatttctcatcctgaaatcaggcatggagaagttaaagttgggtttgtgccagatgaagagcaggggttacggggggccaaagccttcgatgtttcagagtttggcgcagattttggctacactctggattgctgcggtattggagaatttgtttacgaaaactggaatgcgggtgatgcagaaattatctttaccggccagtctgcacaccctatgtcagcgaaaggcaagcttaagaactctcttttgatggctcacaaattcatttcgatgttgccaggaggagaagcgcctgaatatacagaaggacgcgaaggctattattgggtgaaacagttacagggaaacagtgccagaactgtactaaaactggatatacgagatttcagcgaggaaggatatcacgcccggaagacatttgtacgccagcttgcagaaagtgcttgtgcattatggggagaaggaagcgtgatctgccaactgagcgatcggtacgccaatgtctttaacagtctgcagggagaggggcattatcccatcgacattgccctgcgagcttaccaacgatgtggtattactccgacaccggtggcgatgcgtggaggatatgatggcgctgttctttcacaaaaaggattaccctgcccgaacatttttaccggcgcacataatttccattctatctatgaatatcttccagtccgttcacttcgggcggcaagtgatgtggttattgccatcattcaggagacattcaatgggttcaccacagggaatcgtgagtcatga

SEQ ID NO: 16770 - DNA, 1362 bp, Escherichia coli
atgattaaagttgttatcgcgcttcttgttatcgtgatagttgctcgcttaatcctgaaaggatatcgtgcagaacccgtgctttttattgccgggcttgcgctgatggtttgtacctggtttaccggttggggcacagtgttaccgaagggcgtgtccggtacaggaattagttttcttgatcctttcgaagtcatgcgcaatttattcagtacccgtgcggctgatctcggtctgatgattatgaccctgatgggatttgcgcattacatggaccatatcggtgcgaatgaagcggttgtccgtgtggtaacccggccattacggacattacgttccccctatgttctgctttttttctcttatcttttcgccagtcttcttcaactggctatcccctcagctaccggacttgctgttttactgatgggaaccatgtttcctattatgctcggactcgggctgtcagcagcgtctgccgcaggggtaattgccacctctcttggtgtggcgtacacaccgacagccattgacgccatacgaggctctgaagcggtaaatatggatgtggtggagtatgttgtctatcatcaggggcctgctgctctggcgactgttctgattgtcggtatcagccactttttctggcagaaacactgtgatcgtaaagctggaacattacctcatgaaattggtacgacaacggtcataaaagcaggcagtacgccggcttattatgctctgctacctatgctaccgatcctgatggccgttggctcatcggagatttttgtcaccggaattaatctcaatatcattacgattgttcttatctcaatggcaatttgcatgctgatcgaatgggtccgtaaatgtgatctgaaagctgtatgtgacgggtttacccatttcctgaaaggaatggggacagcatttaccggcgtggtgggcttactggtggccgcaggtgtgtttgctcatgggattaaaagcattggcgcgatagatcaattaattttgatggcagagcacgttgggttacccccttttgcgatgggcatcgtttttgctctggttacactggctgcagctgtcattatgggatcgggcaatgcgccatttctggcttttgttgaactgataccacaaatcgctgccagcatgggcgtgaatgccatatcgatgatcctgcctatgcagcaggcttcccatatggggcgtgcgatgtctcccgtatctggcgtggttatagcggtttccagtggagcaaatataactcccttcgaagtggtaaaacgcactgctttacccctgatagttggttttgtttttcactctgcgattatcggtattttttattaa

SEQ ID NO: 16771 - DNA, 447 bp, Escherichia coli
atgatgattaatgaagcacacgcgcaggcaactgcggccagcggcagaggagacggacagtatccgtcagggctgcatgatggcgctgaaatcagcacggcggcgggtgggcaaacgaaagcggaagtgccgctgacgatggaagcggtgataacgagagaaaacctgatgctggcttatcagcgcgtggtggaaaacaaaggtgtgtcggagttgaaaccgtggctgaagaagaactggcgcagcgtatggcaggtattgattgacggaaactaccagccgcgggcaatacgccggatggatatcccgaagccggatggcggcgtgagaaccttaggcatcccgacggtggtggacaggcttatccagcaggcgatagcgcagcagttaagcgccatcgtggacacagcttctgccgctacgcagacgactgcaacatctacgtaa

SEQ ID NO: 16772 - DNA, 1032 bp, Escherichia coli
atgaataaaataaaaggtataacagtaatggcagccttcgcattgtgtataggatatgctcacgctgaatctcaaacgccaatacgccttgtaattcatggtggagctggcaccataacaaaagatactattacacctgaacaagaaaaacaatacagagaaaagttaacagatgcactaaatgctgggtatgctgtgcttaatagtggaggaagtagccttgatgctgttcagcgtgcaattaatgttatggaggactctcccctcttcaatgctggaaaaggcgctgtctttactcatgatggcaaaaacgaacttgatgctgcaattatggatggaaaaaccaaaatggccggagccgttgcaggagtgacgaccataaaaaaccctataaacgctgcttatgcagttatgactaaaagccctcatgtattaatgatctctaatggtgcggaactatttgcaaaagagcaaggcttagttatggttgagccagcatatttcaaaactgatttccgttggcaacagctacagaacgctttaaaagacgaaaaaataacccttgatcataatggtaaatcagcatctcttttactccccccaaagaactacgactataaatatggaactgttggagcagtcgcgttggacaaagatggtaatctggcagctggaacatcaacaggaggtatgacaaataaacgttacggacgcgtaggtgactcgccaataattggagcaggaacctatgccgataataataccgttgctgtttctgctacaggtactggagaaatgtttattagaacttcaactgcatacaatattgctgctcaggtgaaatataaaaatacaccattgaaagaagcagctcaaaatgcgcttgatgaagttaaaaacattaatggtagtggtggtgtcattgttctagataagaatggtaattatactatgagtttcaatacagaagggatgtatcgtggaactatcggcaacgatggtaaagctatcgtatcaatttatgaacaatag

SEQ ID NO: 16773 - DNA, 279 bp, Escherichia coli
atgaaaacaattacagtcttacttactacagtattattcagtatgtcagccagtgcagcactgactccggcatgtgaagagtattataaagaaatcgataattttgtagcaaagatgaaggaaatgggaacaccagaagcacaggttaatacgctgaaacagcaatatgaacaatcccgaaaacaaattgcagctttacctgacgccagtcaggatatggcctgtaagcaaggactggatgcactgcggcagtcaatgagcgctgcaggtataaaatga

SEQ ID NO: 16774 - DNA, 279 bp, Escherichia coli
atggccgacaaacaattgcaggctctggctaacgaactggccaaaaatctcaaaactcctgaagatctcagtcagttcgatcgcctgctcaagaaaatcaaagttgaggctgctctcaacgctgaactgactcaccatctgggacatgaaaaaaatcaacccaaatcgggaaccaactcccgtaatggctattccacgaaaaccgtcccactaccgacgggccgatggaattacgtactccacgtgatcgtgatggttccttcgaaccacaactggtga

SEQ ID NO: 16775 - DNA, 714 bp, Escherichia coli
atgaatacgttatccttcttattattcagtgaagaagaatctctctttattacactgggcaaaatttgcgtcgcgtttatccttggtggcattattggccttgaaagagaatcgaaagggaagcctgttggatttaaaacgtgcgtcattatttcagtcgccagttgtgttctgacaattgtatcgattcagtctgcagaatattacgctgaaatctcgatgaatatacgtagcgatccgatgcgactggcagcacagattatcagcggtgtaggttttctcggcgcaggtgttatccttcatcgccatgacgatgctatatctggactaacaactgcagctatcgtttgggcttcggctggggtgggaattacatgtggtgctgggttttatatgcatgctttggttaccactgctttgttcatgattgcaataaaactcagctattttgtgctctttttgcaagctaagaatcaatttccgggtaaagtaaaagttcatgttactcttgacgaaagatcagggctacaagccctgatagagtgtattaatcaacaaaaaaatattattgaagcgttcactattcgcgatgttaaaaagggaagaatagaagttaaccttaaggtcgtgattagaaaaaaaatgacattaccagaactataccattcactctctaagcttgaacatgtttgcgctatcgcgctggaacactga

SEQ ID NO: 16776 - DNA, 1035 bp, Escherichia coli
gtggctgccaagggcatgaagttcaacccgagaaaaagtgaaaatgaatcgatgcgtatcattattgactgcgatccggggaacggcattcccggcgctaatatcgacgacggtctggcgctggcgctggccattgccgcaccgcaaatcgcgctggaaatgatcaccactgttgccggaaatacgccggtagacgtgggatatgcggtcgctagagatctcattacacaattggatattcctgttgcggtctaccgtggtgcctcgcgtgcgctcttggaagatccgcaaccctggcgtgaaaaactggatcatggtgtcgatcagtttggtttacggcaactctggtcgaatgttcctgctccagcattgtgccagcaggtagaaccccatgcgcctgaagcaataggtgaactcatctgtcgtaatccaggcgaaataacgttggttgctaccggccccctcactaatgtagccatcgccctgcagctttacccgcagattgttcacgcggtcaaaaatatcgtcgttatgggtggcgtgttcaatgttccaggctacctgaaagatacaaattttggtctggaccctgaggcggctcatgcggtgctcaccagcggtgcgccagtcacgctggtcccgatggatgtgacaacgcaaacccaaatgcttcacgccgatttggatcgtctagcaaaaacagaaaacgggcttagccgttatttggcacaaaccattcgaccatggattacatactctatgcaaacccgcaatctgcctgggtgttggatccacgatgtgttaaccattgcctggttactggatccctctcttgcaacaacggctgaagattatctggatgtatctctggaaggcattacacgcggaatgacttgttgctatggacgtgacacattacgcctcaatattgggatccctgaaccaaaaggtgcacaggtcacaattctgcagagcatcgataacccgcggcttatttcgctgatagagcactatatccagaactacggcgcgtag

SEQ ID NO: 16777 - DNA, 1032 bp, Escherichia coli
gtgactcaatcacattcacaacgcgtaacacgttctgacgtggcaaaagaagcagggacatccgtcgctgtcgttagttacgttattaataatggcccgcgccccgttgccgaagcgacccgacaacgtgtactacaggccattaagaaaaccggttatcgacccaatggcatcgcgcgtgcgctggcttcagggagtacgcaaacttatgggctagtcgctccggacatctcgaacccgtttatcgcctctatggctcatgccctgcaacacgaagcctttgctgatggcaaagtactcctgctgggcgacgcaggcgatagtagctgccgtgaacgtgaactcattaataatatgctacaccgccaggttgacgggctgatctacaccagtgttgatcgccatccttatatcaatttgattcaggagagcggtaccccctgcgtcatgctcgatcgtgtggatcctgggcttaacgtcagcgttatccaggttgatgaacaactggcggcgatgcaggtaacacaacatcttattgatcacggataccgcgacatcggcatcatctgcggcccgcgtgaaatgctgaatactcaggatcgtatccggggctggcagcaggcgctggaagcctcatcgttagtggtcaatccctcatggattttttcgaccaactatacccgcgccggcggttacgaggcgacaaaacgcatgcttgagcaccaactgccacgcgccctgttcgcgacaaatgaacaacaggctctcggctgtttacgcgctttggcagaacatgggctgcgcgttcctgaagatgttgcgctggtctgctttaacgcaacacaagaatcggcttataacgtcccttctttaaccgccgttcgacaacctgtcgataagatggcccgtgcggcaattgacatgctgaaaaattgggatggagaagttcgccgtgttgaatttgagttttatttacgaacaggagagtcgtgtggctgccaagggcatgaagttcaacccgagaaaaagtga

SEQ ID NO: 16778 - DNA, 1395 bp, Escherichia coli
atgaacacgcattcatccactgtttccctgacagataaccaacaggcagctcaggagcggctggaaacctccgagggacgccgcgagttttggcgagcaacagtttcctgctggttaggcaccacgatggaatatgccgattttgccctgtacggccttgccgcaggtattatctttggcgatgtcttttttccggaggcgacacccgtcatggcattactttccagctttgccgcctattctgttgggtttattgcccgccctattggtgcattactattcggctggataggcgataaacatggtcggaaaattgtcatggttatcactattggattgatgggcatgtcgaccatgctaataggattaatccccagttacgcccagataggcgtctgggcaccgatatgtctggttatccttcgattttctcaggggctgggagcaggagcggaactttcaggcggtactgtgatgcttggtgaatatgctcccgttaaacgacgtggactggtttcatctgttattggtctgggttcgaacagcggaacattactggcttcgctggtttggctcatcgtcctgcaaatggacaaggatgacttattaagctggggatggcgtattccttttctttgcagcattcttattgctgctgcagctctattaattcgtcgtcatatacgcgaaacaccagtctttgaacgtcaaaaagcccttctgcaggctgaacgagaaaaggttattcgtgaggaaaaagcacagcaacaacatgacagtcgtagcttctggaaacggacccgtgccttctggaccatggtcggattacgcataggagagaatggtccttcttatctcgctcagggatttatcattggctatgtcgcgaaagtactgatggtggataagtccgtacccacggcagctgtacttattgcatccgttctgggatttgccattattcctctggcgggttggctgtccgatagattcggtagacgtatcatctatcgttggttctgcttgttactgatcctgtatgcctttccggcatttatgttgctggattctcgtgagccgtggattgttatcccgacgatcattaccgggatggggctggcttcactgggtatttttggtgttcaggctgcgtggggcgttgagcttttcggtgtcactaatcgttataccaaaatggcatttgcaaaagagctcggttccattctgtctggcgggactgcaccacttatcgcctctgcgctactctcgtattacgggcactggtggccaatcgctatctatttcgcctttatggccgcgattggactggtgaccactttctttgcaccagagactcgcggacgggatctcaacttacccgaggatgcaatttaa

SEQ ID NO: 16779 - DNA, 222 bp, Escherichia coli
atggctaaaaatactcgtttttcccccgaagtccgtcaacggacagttcgtatggttctggaaaatcagggcgaatatgactcccaatgggcagcaatttgttccatcgtcccaaagattggctgtacaccggagactctgcgtgtctggtgtacaaccagcatgagtgggataccgggggcggtgatggtggactcaccaccgctgaacgtcagcgtctga

SEQ ID NO: 16780 - DNA, 135 bp, Escherichia coli
atgaaaattgtgcagactagtctctccgaatctgttactcagcatcttgccgagcgcatcctgtgcggcgaactgccagcaggtagcgtgctgcctggcgaaaatgaactggcaacagtttccaggggtggttga

SEQ ID NO: 16781 - DNA, 354 bp, Escherichia coli
atgacctctgacaaaatcctaaagcaagcgatatcaaatatcaccatctggcgcaaaggtgaacaacgtgcgccacataagccattattgctgctgtacgttctctcacactatcggcagggtcatggtcgcctgtttaactatgcttctgaaatctacgagcccctgttggatcacctggaacgttatgggccgcagcgccgtgaccagcgcccggacatgccgttctggcgtctgaagggcgatggcttctgggaactacattacgcggaactgtgctcaaccagtggtaacactgagcacgcagttcatccgtcaggcgtggtgcaccgtaacgctgttttgaccgggtaa

SEQ ID NO: 16782 - DNA, 699 bp, Escherichia coli
atggctggtgcattgaccacggtaaaacgccagcatcgccccgctcttgatctttctcgcctgcctgaacttttgtcgcgtattagcagttacaaggggcaacctgtcacccagcttgccgttatgctgaatttactggtttttattcgttccagtgaactcagatacgcccggtggtctgaaattgatattgacaatgccatgtggactattccagccgaacgcgaacctctgcccggcgtaaaattctcacaccggggctccaagatgcgaacaccacatcttgtgccactcagcaaacaggctgtagccatactgacagaacttcagacatgggctggtgaaaatggtctgatatttacgggtgcacatgacccgcgtaaaccaatcagtgaaaatactgtaaataaggccctgagggtgatggggtatgacacaacccaggaagtctgtggccatggattccgggcgatggcgtgcagtgcattgattgaatcaggtttgtggtcccgcgatgctgtggaacgtcagatgagccatcaggagcgtaatggtgtacgtgctgcgtatatccataaagcagaacatctggaagaacggcgactgatgttgcaatggtgggccgattttctggatgcgaaccgggagaagggtatcagtccgtttgaatatgcaaagattaacaatccattaaaatag

SEQ ID NO: 16783 - DNA, 3594 bp, Escherichia coli
gtgccggggggagaacagcgaccggccaccatcatcagtgaaccggaccgtaatgtccgctatgcccggctggccggagattttgcggccagcgtgaaagccggagaagagagcgtggcacaggtcagcggggtacgggaacaggccatactgacagaggccattcgcagtgagctgaaaacgcagggcgtgctcggacaccctgaggtgaccatgactgcactgtcaccggtctggctggacagccggagccgttatctgcgggatatgtaccgaccggggatggtgatggagcagtggaacccggagacacgcagtcatgaccgctatgtgatagaccgggtgacagcgcagagtcacagcctgaccctgcgggatgcgcagggcgaaacgcaggtggtgcgtatttcctccctggacagcagctggtcgctgttccggccggaaaaaatgccggtggcagacggcgagcgactgagggtgacagggaaaattcccggactccgcgtctccggcggtgaccgcctgcaggtggcatccgtcagtgaagatgcgatgacggttgttgtgccggggcgggctgaaccggccaccctgcctgtggctgattcaccattcacggcactgaagctggagaacggctgggtggaaacgcccgggcattccgtcagcgacagtgcgacggtttttgcctccgtcacacagatggcgatggacaacgcgaccctgaacggtctggcccgcagtggtcgtgatgtccggctgtattcctcgctggatgaaccccgtactgcggaaaaacttgcccgccatccctcctttacggtggtttctgatcagataaaggcgcgtgccggtgagacattgctggaaaccgctatcagtctgcagaaagccgggcttcacacgccggcacagcaggccattcatctggcccttcctgtgctggaaagtaaaaacctggccttcagcatggtggacctgctgacagaggcgaagtcgtttgctgcagaaggaaccggttttactgaactgggaggggaaatcaatgcgcagataaaacgcggtgacttactgtatgtggatgtggcaaaaggctatggcacaggtctgctggtttcccgtgcgtcgtatgaggcagaaaaaagtattcttcgccatattctcgaaggtaaggaggcggtcacgccgttgatggagagagtacccggcgaactcatggagacgttaacgtcgggacagcgtgccgccacccgtatgatactggaaacgtccgaccgtttcacggtggtacagggttatgccggtgtgggtaagaccacacagttccgggcggtgatgtcagccgtgaacatgctgccggcgagtgagcgtccccgagttgtggggctggggcccacgcaccgtgcggtcggtgagatgcgcagcgccggcgtggatgcacagacgctggcgtcctttctgcatgacacgcagctgcagcagcgcagcggagaaacgccggatttcagcaacacgctgttcctgctcgatgagagctcaatggtgggcaataccgatatggcacgggcatacgccctgattgcggccggtggcggtcgtgccgtggccagtggtgacacggaccagctgcaggccatcgcgcccggtcagcctttccgtctgcagcagacgcgcagtgctgccgatgtggtcatcatgaaggagattgtgcgtcagacgccggaactgcgggaggcggtatacagcctgattaaccgggatgtggaaagggcactgtccgggcttgagagtgtgaaaccgtctcaggttccccgtcaggagggcgcatgggcaccggagcactccgtgacggagttcagtcacagccaggaagcgaaactggcagaagcgcagcagaaggcgatgctgaaaggcgaggctttcccggatatccccatgacactgtatgaggccattgtccgcgactataccggcaggacaccggaagcacgggagcagacgctgattgtcacgcacctgaatgaggaccggcgcgtactgaacagcatgattcatgatgcacgggaaaaggccggtgagctgggcaaagagcaggtcatggtgcctgtcctgaacacagcgaatatacgtgacggagaactgcgtcgtctctccacctgggagaataacccggatgcccttgccctggtggatagtgtgtatcaccggattgccggtatcagcaaggatgacgggctgataaccctggaggatgcggaaggtaacacgcggctgatttcgccccgggaggcggtggctgaaggtgtcacactgtacacaccagacaaaatccgggtgggaaccggtgaccggatgcgcttcacgaagagtgaccgggagcgcggttatgtggccaacagcgtctggacggtgacagcggtttccggtgacagtgtcacgctgtcggacggacagcagacccgggtgattcgccccggtcaggagcgggcagagcaacatattgacctggcctatgccatcaccgcccacggtgcgcaggggacaagtgaaacctttgccatcgcgcttgaaggcacggaaggtaaccggaaactgatggccggctttgagtcagcctacgtggccctgtcgcgtatgaagcagcatgtgcaggtgtacaccgataaccgtcagggctggacggatgccattaacaatgccgtacagaaaggaactgcccacgatgtgctggagccgaaaccggaccgggaggtcatgaatgcgcagcggctgttcagtacggcacgggaactgcgggacgtggcggcaggccgtgccgttctccgtcaggcagggctggccgggggagacagccctgcacggtttattgcaccgggacgtaaatatccgcagccgtatgtggcactgccggcgtttgaccgtaacggcaagtccgccggtatctggctgaacccactgaccacggatgacggaaacgggctgcggggattcagcggtgaaggacgggtgaaaggcagcggggatgcgcagttcgtggccctgcagggtagccgtaacggagagagcctgctggctgataatatgcaggatggtgtccggattgcccgtgataatcctgacagcggtgtggtggtaagaattgccggtgaaggtcgtccgtggaatcccggtgccatcaccggtggtcgcgtgtggggggatatcccggacagcagcgtccagccgggagccggaaatggcgaaccggtcacggcagaggtgctggcacagcggcaggctgaagaggccatccgccgtgaaacggaacgccgtgcagatgaaattgtccgtaaaatggcagagaacaaacctgacctgccggatggcaaaacagagcaggctgtcagggaaattgccgggcaggagcgtgaccgggctgacataactgaacgggaagccgcgctgccggagagtgtgctgcgtgaatcacaacgggagcaggaagcggtccgggaggttgcccgggaaaatctgctgcaggagcgtctgcagcagatagagcgggatatggttcgtgacctgcagaaagagaaaaccctgggcggagactga

SEQ ID NO: 16784 - DNA, 966 bp, Escherichia coli
atgaaaaagaataagtactcaactcccttatggatgcttgccacgattcttgcgggtatgctctcccctatgcaatcagcggtgaatggtcaattaggtcactggttacaggacggtaatgcatgcgcagttatctcctttgccagtggtttagtcgtgatgttttttattattatggcgcgaaaagaaacccggcaacaatttgcggcaattccttctctgattaaaaaccgaaaagttcctctctggaactggtttgccggtctctgtggagcgatggtggtattttctgaaggcgcatcagccagcgcactcggggtcgcaacgtttcagaccgcactgatctccgcgctattgctgtctggtttactttgcgatcgctttggtatcggtgtcgacgagaaaaaatactttaccccttatcgcatcatcggtgcattatttgcggttattgctacgatttttgttgtgtcaccgcagtggcattctacctctttcattttacttgccattcttccgttcttagctggtttgcttgcaggatggcagcccgctggaaatgcaaaagtagctgaagctacgggatccatgctggtttcaatcacctggaatttcatcgttggattttgtgttttaggcacagcgctagctattcgtgtcgcattagggcacgtcactgttcaattaccagatgtctggtggatgtatcttggcggcccgcttggactaatgtctatcggtttaatggccattttggtcagaggtcttgggttactgatgctgggggttgcttcaacggcgggccagttactgggatcagtattgattgacgtattaattccatcgctgggcaataccgtttatctggtcacgatcatcggaacactgtttgcactggtcggtgcaattgttaccactattccggaatacagagcctcgaaaacaatgaagaaaatggaggtataa

SEQ ID NO: 16785 - DNA, 915 bp, Escherichia coli
atgagcgccgcgcttcaatacttcgacgaaaatttaccccatcgtccctatcacacggatgatctcgcttttggtcttcgcatctccggcaaagggcgtgcgcttcttgcgcggtacatacagcagaaccagcctcatgcgcagttctggctggtttttgacgttgaccgcgagggggctgcgattgactggagcgaccggaacgctcccgcgccgaacatcaccgttaaaaatcctgtgaacggacacgctcacctgctctacgcactcaacatcgccgtgagaaccgcgcctgatgcctcggttaaggcgctgaaatatgccgcagcggttgaacgttcgctgtgtgagaaactttgtgcggatgtgaactacagcggcctgatttgcaaaaatccgttccacctggaatggctggtgatggagtggcgcgaggaagcctataccctcgatgaactggctgattatctcgatttgagcgcctcagagcgtcgtagcatcgataaacattacgggatggggcgaaactgccacctgttcgaaatgacgcgcaaatgggcttacagggcgattcgtcagggctggccagcgttctcacagtggcttgaagcggtgatccagcgtgtcgaaatgtacaatgcatcgcttcccgttccgctttcactggctgaatgtcgggctattggcaagagcattgcgaaatacacgcacaggaacttcacgccggaaactttcgcacagtatgtggctgatacgcacacgccagaaattcaggctgcacgcggtcgcaagggcggttctaagtctaagcgcagcacagtagctacatctgcacgcacgctgaaaccgtgggaggcattagggatcagtcgcgcctggtattaccaactgaaaaaacgaggtctcgtagagtag

SEQ ID NO: 16786 - DNA, 720 bp, Escherichia coli
gtgaaaggtttaatcggtgtgctcggtggaatggggccggccgccactgtcgacttatttaataaatttgtcacctttacagcagcacaacgagatcaagaacatatacctttaattatttcttctatcccggatattcctgaccgtaccgatgcattaatgcataacgggctctcgcctttacccgttatgcgtgactatatgcataaactggaagatgcaggagcagaatgtattgttattccctgtaataccgcacactattggtttaaagaactaaaagatgcttgccatattgatatactaagtatcatagatactacggtcgatgaagttcgcgtctgtggtaaaactagaattggcctcctggccactgatgccacgctgtatatgggattataccagaaaggaattgaatcgttagggtttaactatatcaccccggatgcagatggccaaaaaaatgtgatgaaaagcatttattcacttaaagcgggaaatgttacacatgcgcaaaaattgatggaagagcaggctgaaaatttattttcccgcggagcagagatcttgattcttggttgtacggaaattcccattattctgtcacaagccgttaaagatcaacctttacgctatattgattcaaccgcttcactcgttcgcgcaggaataaaatggtatgaaaatcgtatcggaaaagatcaacatttaactcaataa

SEQ ID NO: 16787 - DNA, 900 bp, Escherichia coli
atgaaaaatatagagaccaaatggttatatgatttcctgacactggaagcctgtcgcaatttctgtcaggcagcaaaagatcgtaacctttcacaaccagcattcagcagacgaataaaagcgttagagtcagctataggtgttgttttgttcgatcgtacaacctctcctttacaattaactgaagagggtaggctttttcactcccagacacgcagtttagtgcaacagcttgaatgcaatctgaatgagttagggggggataattcattcaatttgcctaatattaagattgcagctgcgcactcattatccctcagcatgctacctaaacttctgcactcactcaccaccttaggcggagactttatctatcatgttgaggctattgatgtcgtccaggccgtaaatacgttacgagaagggaagagtgactttattatttcatttcgagatgaggagtttatgcaatcgccattttgttgtatgaaactgtttgaatctgagttgtatccggtatgtgctgctgatcaacagggaaaaccgattttcgatcttaccaattcacaggctcctttgctcgactatactccaacttcttatatgggcagactggttaatcgtcatttggcagaacagggagggatagccggacacacaatattggtatcttcaatgagtgaactactaaaaaatatggcactcaatggacttggtattgcctggctccctctctggtcaatcgcggatgaactgaacacaaaacgacttgtgtgtccgtggcctgctaaatgggcagtgcctattcaggcttatatttatcgtatggatactcggctgaacaaaacggctgaacacttttggacgattttacgaaataacattaaagagaatagctag

SEQ ID NO: 16788 - DNA, 504 bp, Escherichia coli
atgattcgtttatcattatttatatcgttgcttctgacatcggtcgctgtactggctgatgtgcagattaacatcaggggaaatgtttatatccccccatgcaccattaataacgggcagaatattgttgttgattttgggaatattaatcctgagcacgtggacaactcacgtggtgaagtcacaaaaaccataagcatatcctgcccgtataagagtggctctctctggataaaagttacgggaaatactatgggaggaggtcagaataatgtactggcaacaaatataactcattttggtatagcgctttatcagggaaaagggatgtcaacacctcttacattaggtaatggttcaggaaatggttacagagtgacagcaggtctggacacagcacgttcaacgttcacctttacttcagtgccctttcgtaatggcagcgggatactgaatggcggggatttccggaccacggccagtatgagcatgatttataactga

SEQ ID NO: 16789 - DNA, 423 bp, Escherichia coli
atgaaaaaatggttccctgcttttttatttttatccctgtcaggctgtaatgatgctttagctggatggcacaatgtaatgttttatgcttttaatgactattctggttatgattctggtaatatgacaatttttgacaggggacaattcactattccatggaaaacaggagcagcatccgcaatctatagctcatgtcagactccagaattcgtgagcggtgtttactttcaggaatatatagcatgggtgttagttccgagaagtgcccaacccactgatggatatactgtttttttgatggctacagtaaatatggctggaatcaggaaaatacaggtgattatgggtattattatttcctcaacggatatgaatgggatacttggacaagcgatggggggcgggtgtgtgctccggtag

SEQ ID NO: 16790 - DNA, 378 bp, Escherichia coli
atgaaggattatctctgtaaaaagttattcaaccggctttccggtaccctggtgatcagagcgcgctgcggcaataacattactggcctggcatgttgcaatattctttatccctcgccccgatacagcggtcagctgcatattaaagagctgtatgtttctcagtgcgatcgaaataagggcacgggtaaagcgataatgcgctttatagcccggcttgcgcttgaacaggaatgccttagccttagctggaacgctgaaaaatccaaccccggcgctaaccgtttttatcaggctctgggaggcagaataaatgatcatatcgtcaattattacctccacggggagagcctgagcaaactggcctcaggcatttga

SEQ ID NO: 16791 - DNA, 543 bp, Escherichia coli
gtgcctatcagggtcagcaccttcgaccagaacccggaacggcaactggaaggcgtcaaggttgatcgcgcttttagcgacaaggcatccggcaaggatgtcaagcgtccgcaactggaagcgctgataagcttcgcccgcaccggcgacaccgtggtggtgcatagcatggatcgcctggcgcgcaatctcgatgatttgcgccggatcgtgcaaacgctgacacaacgcggcgtgcatatcgaattcgtcaaggaacacctcagttttactggcgaagactctccgatggcgaacctgatgctctcggtgatgggcgcgttcgccgagttcgagcgcgccctgatccgcgagcgtcagcgcgagggtattgcgctcgccaagcaacgcggggcttaccgtggcaggaagaaatccctgtcgtctgagcgtattgccgaactgcgccaacgtgtcgaggctggcgagcaaaagaccaagcttgctcgtgaattcggaatcagtcgcgaaaccctgtatcaatacttgagaacggatcagtaa

SEQ ID NO: 16792 - DNA, 1215 bp, Escherichia coli
atgaaatttgaacgccatcatgaaatattgaaacgactcagtaaattcggttctgtaaaagtatccgatctgtccaatagcctcaatgtaacgaaagaaactattcgatcagatcttaatgaacttgccagacttggctatctgactcgatgtcatggcggtgcttttatcgtcctagactcgcttgatactattgcgaaaaatgaaatcgcttatgcgcttgaaaattatgatacagcccagggaataaaaaaaggccactcaactatgaaaagtcaagtatgcgttattggttcgtttaatgttgatatcatcagttatttgccgaggcttcccactatcggagaatcgcttctggcaagtaattttatattttcaccggggggaaaaggttgtaaccaagcgctggcagcaagctttgccgatactgatgtttatttcataacaaaagtaggtacagatcactttagtgattatgcgatcaactttatgaattcgtctaagatttataaaagtataatttatcaaacgaaagaaacgcaaaccggaactgccacgatccttgttaatgaaggtactggcgataatgttattgcgatctatcccggtgccaacatgacaatgtcgtccgatgaaataactattcagaaagaagcgattattaattctgatgtcatacttctgcagctcgaaacaaattataccgctctgcaacaagcgatcacattggcgcaaaaaaacagtatcccggtcattattaacccggcaccctataatgatatcgtcaacgaacttattcaggatgttgattatatcacccccaatgaaacagaagctggtttactgtccggcatagacgtacacgatcttgaatcagctaaacgagctgcagaagctatccacaataaaggggtaaaaaacacggttatcacgctcggtagcaagggctcactcgcatttgatggcaaaaaattcattcattcgccagcgtttccagcggtcgttaaaaatacggcaggagccggggatgcttttaacggcgctctggcatcaggacttgcgaaaggaaaatcactggaatcagcactgtgttatgccagtgcctttgcatccctggcggtggagacaagcaatgcttccgacatgcctgaacatgaatctgtgatacatcgaattcagagtatacattatcagcaaactatttttacgcattaa

SEQ ID NO: 16793 - DNA, 312 bp, Escherichia coli
atgagagttgagcagaataatttcagggacatgttctccgtttatctctccggcccgccgcagacgcagcatgtgttttgtgtatccccggcggcccgggtcgcgcacacgggtctggcaggcgaagaacggctgaaagccttcccgctgcagactttccagcacggtgatggtggggatatacgtatagcgttcactgcgggaggtatgccggtcttccccaaaaataccgggtacatagtgcatcagttcttcgtgtgtcagcggacgatcacggcgtatctggttcgcataaccaaaacgactggctag

SEQ ID NO: 16794 - DNA, 633 bp, Escherichia coli
atgaccaactactttgatagccccttcaaaggcaagctgctttctgagcaagtgaagaaccccaatatcaaagttgggcggtacagctattactctggctactatcatgggcactcattcgatgactgcgcacggtatctgtttccggaccgtgatgacgttgataagttgatcatcggtagtttctgctctatcgggagtggggcttcctttatcatggctggcaatcaggggcatcggtacgactgggcatcatctttcccgttcttttatatgcaggaagaacctgcattctcaagcgcactcgatgccttccaaaaagcaggtaatactgtcattggcaatgacgtttggatcggctctgaggcaatggtcatgcccggaatcaagatcgggcacggtgcggtgataggcagccgctcgttggtgacaaaagatgtggagccttacgctatcgttggcggcaatcccgctaagaagattaagaaacgcttcaccgatgaggaaatttcattgcttctggagatggagtggtggaattggtcactggagaagatcaaagcggcaatgcccatgctgtgctcgtctaatattgttggcctgcacaagtattggctcgagtttgccgtctaa

SEQ ID NO: 16795 - DNA, 426 bp, Escherichia coli
atggctaaaaataaacgtagtggttcagaagtacggcagagaactaaggttatcacccttagagtaaataacagagtcgcaagcgaaatcagacggcgagcgaagaacgaaggactgacaatttcagaatatatcaggacggcaagtttaaataatgaaataaaacagcgcgtaccttccaggtatttagatgaattaatccgacttggtcggatgcagaagaaattatttgataagggaaagcggccgaaggataaggagtacctcgaggtgatgcataaaataattttactttgcgatgaaatgaaaatagtaacgaagcgaatttctgatgtatataatgaaatggatttaataaaggatgaaataaaaataataaaaaggatacataaaaataaatatccaggttcggatttattcaaataa

SEQ ID NO: 16796 - DNA, 498 bp, Escherichia coli
atgaacattactgaaagaacggatagcaagaaaaaagttttaagacaaaatattactgaggttatagatagagaaactggaaacataacacaagaaataaccgatataacagttcaatttccacaagaacctgcgtatgtgaaaatttatattgataatttatgtgctgtcacaaaagcacctgattctctaaaagatgttttatttttaattcttaggaaattggattatgacggatatattgcattatcaactagataccgtaaggagatctgtaaattattgggaataaaagacggaacattacgtaacagattgtattcattatcaaaaatggggattattgctagttgtggcggtaatgaatatcaggcgaaccctaatttatttgctcgtggtgaatggaaaaaaataattgaacagcgtcgcgagtttgaaatgagaattaaatattcacctaacggtgaaactattataacaaccgaagaaataaaataa

SEQ ID NO: 16797 - DNA, 636 bp, Escherichia coli
atggcaaataaaactgaaaagccaacacaaaagaaactccaggatgcttctaaaaaagggcaaattctaaaaagtagagacttaacagtctctgtaataatgcttgtgggtactttatatctcggatatgtatttgatgtgcatcacattatgtcgattcttgaatacatccttgatcataacgctaaaccggatatttgggactattttaaagctatggggataggttggttgaaaacgatcattccttttttgctggtttgcatgtttacaacaatacttgtctcatggtttcaaagtaaaatgcaattagcaactgaagctattaagtttaagtttgattcattaaatccagtaaatggcttaaaacgtatatttggcttaaaaaccgtaaaagaatttgttaaagcaatactttatattattttttttgcattggcgatcaaagtattttggactaaccataaatcactgctttttaaaactcttgatggagatatcatttctttattatcagattggggagagatgctattccttctcatactatattgtctcggcagtatgataattgttctaatatttgattttatcgctgagtatttttttatttatgaaagatatgaaaatggataa

SEQ ID NO: 16798 - DNA, 618 bp, Escherichia coli
atgggttgccagaaagatattgcagagaagatacaaaaacagggaggtgattatttattcgctgtaaaaggaaaccaggggcggctaaataaagccttcgaggaaaaatttccgctgaaagaattaaataatccagagcatgacagttacgcaatgagtgaaaagagtcacggcagagaagaaatccgtcttcacattgtttgcgatgtccctgatgaacttattgatttcacgtttgaatggaaaggtctgaagaaattatgcgtggcagtctcctttcggtcaataatagcagaacaaaagaaagagcccgaaatgacggtcagatattatatcagttctgctgatttaaccgcagagaagttcgccacagcaatccgaaaccactggcacgtggagaataagctgcactggcgtctggacgtggtaatgaatgaagacgactgcaaaataagaagaggaaatgcagcagaattattttcagggatacggcacatcgctattaatattttgacgaatgataaggtattcaaggcagggttaagacgtaagatgcgaaaagcagccatggacagaaactatctggcgtcagtccttgcggggagcgggctttcgtaa

SEQ ID NO: 16799 - DNA, 333 bp, Escherichia coli
atgatctcactaccatccggtacccgtatctgcctcattgccggggtagctgatatgcgtaaatccttcaacggactgggaaaacagggtcaacatgtgctgaattataatcccttcttcggccacctgtttatcttccgaggccgacggggtgacactgttaaaatactctgggctgatggtctgtgtcttttcaccaagcgccaggaggaaggcaatttatctggcttgcggtacgtgacggcggggtatcctttacccgcccgcagctggcaatgctccttagtaagctgggctagcgtcagccaaaaacatcacgccttaacgcgctga

SEQ ID NO: 16800 - DNA, 522 bp, Escherichia coli
atgtcaaagccaaaatacccttttgaaaagcgccttgaagtcgtgaatcactacttcactactgatgatggttacaggatcatctcggcacgttttggtgtcccccgaacccaggtcaggacatgggttgccctctatgaaaaacatggagaaaaaggtttaattcccaaacctaaaggtgttagtgctgatcctgagttgcgtattaaggtcgtgaaagctgtgatcgagcagcacatgtctcttaatcaggctactgctcactttatgcttgctggtagtggttctgtagccaggtggctgaaggtttatgaagagcgcggagaagctggtttacgcgcgctcaagattggcaccaaaagaaacattgcaatatcagttgatccagaaaaagcggcatcagcattggagctgtcaaaagaccgacgcattgaggatcttgaaaggcaagttcgatttcttgaaacgcggcttgtgtatctaaaaaagctgaaagccttagctcatcccacgaaaaagtga

SEQ ID NO: 16801 - DNA, 261 bp, Escherichia coli
atgattaaaatggcggaacatctgaaaggttactggccgaatcaactgagtttctcagaatcatgcggaatggtgatgagaatgctgatgacattgcagggcgcttcaccgggacgtataccggagctgatgcgcgatcttgcaagtatgggacaacttgtgaaattaccgacaagaagggaaagggccttcccgagagtggtaaaggagaggccctggaaataccccacagccccgaaaaagagccagtcagttgcttaa

SEQ ID NO: 16802 - DNA, 1233 bp, Escherichia coli
atggctaataaggagttaggtacaattcctgctgatgttgcggatgctttaatctgggcttgcgaccaattaattgatggtaagtaccgggaacagtttgtgaccgactggcttcaggggggagccggaacgtcaaccaatatgaactgcaatgaagtgatttgtaatcttgctgcagaaaaacttggtagcgttaaaggggattacaaacgcgtttcgccaaacgaccatgctaattttggtcagtccaccaatgatacatatccgacagcattacatctggcattgctgctgcgaagcaatgtattgcttgaagctgttgaacacctcgtaggagcattctacaaaaaggctgacgagttcagcacagtgctcaagatgggacgtactcacctgcaggatgcagtgccaatgactctcggccaggagttccatggctggggttttacaattaatgatgaaattcgggtcatccgtaatgcacaggaacacctgcgggttgtaaaccttggtgctactgcgattggtacctgtgttaccgctcacccggattatcccgctttagccgtgaaatatctggcccagatcacaggcattaatttcaggaacagtgaagatctcatcgctgccacaagcgactgtggtgcatatgttgcactcagttcggccatgaagagcctctctgtgaagcttaccaaggtttgtaatgacattcgactgcttgcttcaggcccccgttgcggcctggctgaaattaacctgcctcaattgcaaccgggttcttccattatgcctggtaaggttaaccccgttatcccggaagtaacaaaccagtcttgcttcctggttcaggggctggacaccacagtgatgctggcggcatctgctggtcagcttgagcttaacgttatggagccggtcatcacctttgcgctgttcacctcactcaaggtgatgacgaatgcctgtaacacactccgaactaaatgcattgatggcattacagctaattccgatcgaactgcagagatggtaatgcattcctgcggtattgtgactctcctgaagccacatctgggatataaggtgtgttctgaaatggcgcacgaagcataccatacaggcaaatccctccatcagatagtggttgtcgaacgtaagctactcacacaggaagaatgggagaagacattcaatctggataatctgattgctccgaagttcgaacaataa

SEQ ID NO: 16803 - DNA, 327 bp, Escherichia coli
atggcgcagcccttctgcacccacgctgaagtccacggtctgcgtttccagcagttccgttttaatcagccacagcccggcgcggtgcgcctgcccccggctggtacagccaaaggcatccattttcgtgacgttacgaccgtaacggagaatggcctgcgtatcttcaacaagctctgtcgccgtctcccagccgttattcgggtcaatccagttcacctcaacggcattatggcggtccttcagggcgctgaagctgtagcggaacggcgcgccatcatccggcatcaccacattactgcggttataggtccacaccttatctga

SEQ ID NO: 16804 - DNA, 252 bp, Escherichia coli; identical to SEQ ID NO: 5211

SEQ ID NO: 16805 - DNA, 444 bp, Escherichia coli
atggaagagccgtgcatctggttcagcggattctgcagccagggggacggagcctgttttgaagggcgctggcactggcagccagcgacaccccggaaaatcagggaatatgcccctcaggaccgtgagcttcatcgtatcgcggataccctgcaggcggtgcagaaacgtaacttctggcagcttcaggctgaaatcagtcaccggggacgttactgccatccgtacagcatggatatcaccgtcacccggaacagtccgactggtcaggcaatgacaaccgatgcggaagccgctgtcagcgaagccctgcgcgacctggccttctggctgtaccgccagctggaaaacaagtacgactggctgacctcagacaccgctgtggatgaggcccttctcatcaacgaatataccttcaccgaagccggtctgcgcgccggctga

SEQ ID NO: 16806 - DNA, 456 bp, Escherichia coli
atggaaaataaaaatcatcaacaagaaaattttaagagtacctatcaatcactggttaactcagcacgaatattgtttgttgaaaaaggctatcaagctgtttcaatagatgagatctcgggaaaagcgttggtgaccaaaggtgccttttatcatcactttaaaaataaaaaacaattactcagtgcctgttataagcagcaattaattatgattgatgcctacatcacaacaaaaactgatttaacaaatggttggtctgccttagaaagtatatttgaacattatcttgattatattattgataataataaaaaccttatccctatccaagaagtgatgcctatcattggttggaatgaacttgaaaaaattagccttgaatacattactggtaaggtaaacgccattgtcagcaaattgatccaagagaaggtaatgactccaacttattga

SEQ ID NO: 16807 - DNA, 477 bp, Escherichia coli
atgcaacagctttcctttctgcccggagagatgacgcccggcgagcgcagcctcattcagcgggccctgaaaaccctggaccgccatcttcatgaacccggcgtggccttcacctccacccgtgcggcacgggaatggctgattctgaacatggcgggactggagcgtgaagagttccgggtgctgtatctgaacaaccagaatcagctgattgccggtgaaaccctcttcaccggcaccatcaaccgcacggaagtccatccccgggaagtgattaaacgcgccctgtatcacaatgccgctgctgtggtgctggcacacaatcacccgtccggtgaagtcacacccagcaaggcagaccgccttatcacggaacgtctggtacaggcactgggcctggtggatatccgggtgccggaccatctgatagtcggtggcagccaggttttctcctttgccgaacatggtctgctttaa

SEQ ID NO: 16808 - DNA, 309 bp, Escherichia coli
gtgatcagccgctggcgcatcgagcagtgcagcgaactgagcgcggtcagtgcctcttttgtactgtccacgccgacggaaacggacggtgctgtttttccggggcgcatcatgctggctaatacctgcacctggacctatcgcggtgacgagtgcggttatagcggtccggcggtcgcggatgaatatgaccagccaacgtccgatatcacgaaggataaatgcagcaaatgcctgagcggttgtaagttccgcaataacgtcggcaactttggcggcttcctttccattaacaaactttcgcagtaa

SEQ ID NO: 16809 - DNA, 336 bp, Escherichia coli
atgcggctcgctgaacagcggactccattcggtcaccccgttttcctgcaacatcgtgccgaggatgcttttgatgtcctcgttctggaagatacggaagttctggcgcagaccggcacgccacagcggcgggtgcaccttcatgctgtacagcatctggtttttgtcgttctcccccagttcaaaccaggtcaccacgcctttcacccggcgctgtacttcatcgccctgccatatcgtcaggtaggccattttgtccagcacctgcgcaaattcaagggagagaaactgctggctgaccagggagagatcgagggaaaagagcgaagagagtga

SEQ ID NO: 16810 - DNA, 264 bp, Escherichia coli
atgaaaacattacctgtattacccgggcaggcggccagttctcgcccgtctcctgttgaaatctggcagatactgctgtcccgactgctggaccagcactatggcctcacacagaatgacacaccttttgccgatgaacgtgtgattgagcagcatattgaggcaggcatttcactgtgtgatgcggtgaattttctcgtggaaaaatacgcgctggtgctaccgaccagccgggattcagcacttgtccccgctctcagttaa

SEQ ID NO: 16811 - DNA, 312 bp, Escherichia coli
atgaacaagaaaaccaaacgtactttcacccctgagttcaggctggaatgtgcacagctgattgttgataagggctattcgtatcgacaagccagtgaggcgatgaatgtcggttctaccacgcttgagagctgggtacgtcagctcaggcgagagcgccaaggtattgcgccctctgcaacacccattacccctgaacagcaacgtattcgcgagctggaaaagcaggttcgccgactggaggaacaaaatacgatattaaaaaaggctaccgcgctcttgatgtccgactcactgaacggtttacgatag

SEQ ID NO: 16812 - DNA, 222 bp, Escherichia coli
atgaaaattatcacccgtggcgaagccatgcgtattcaccgtcagcatccggcatcccgtcttttttcgttctgtaccggcaaataccgctggcacggcagtgctgaggtttataccggtcgtgaagtgcaggatattcccggtgtgctggccgtgtttgccgaacgccgtaaggacagttttggtccgtatgtccggctgatgagcgtcaccctgaactga

SEQ ID NO: 16813 - DNA, 339 bp, Escherichia coli
atgccggactttcatcgtgaggatgactggtggcgtaacggccagaatctctatctggataatctggaggccacagggctgtatcaggtgccgttgtcagcggcacagccgggcgatgtgctgctgtgctgttttggttcatcggtgccgaatcacgccgcaatttactgcggcgacggcgagctgctgcaccatattcctgaacaactgagcaaacgagagaggtacaccgacaaatggcagcgacgcacacactccctctggcgtcaccgggcatggcgcgcatctgcctttacggggatttgcaacgatttggccgccgcatcgaccttcgtgtga

SEQ ID NO: 16814 - DNA, 1032 bp, Escherichia coli
gtgatcgaaaccagccatgactacgccaaagtgatggacaaagagcagcttatcgatcgtaaagcggttgccacggtcatcagcaacgtcggtgaaggcgcgttctacgatggcgtactgcggattgtgcgcaccgaagatggcagcgcctggaccggtgttcctgtcagcgcatggattggcgggatctggtatcgcaaagatgtgctggcaaaagctgggctggaggagccaaaaaactggcagcaattgctggacgttgcacagaaactgaatgacccggcgaataaaaaatacggtattgcgctgcctacagcagaaagcgtgttgacggaacagtctttctcccagtttgcgttatccaatcaggctaacgtctttaacgccgaaggcaaaatcacccttgatacaccagagatgatgcaggcgctgacctattaccgcaaccttgctgccaacaccatgccaggttctaacgacatcatggaagtgaaagacgcttttatgaacggcaccgcgccgatggcgatttactccacctatatccttccggctgtgattaaagaaggcgatccgaaaaacgttggtttcgtggtgccaaccgagaaaaattctgcggtctacggcatgttgacctcgctgaccattaccgccgggcaaaagactgaagagaccgaagcggctgaaaaatttgtcacctttatggagcaggcggacaacattgccgactgggtgatgatgtcaccaggcgcggcgctgccggtgaacaaagcggttgtcactaccgccacctggaaagacaacgacgttattaaggcgctgggagaattgccgaatcagctaatcagcgaattgccaaatattcaggtctttggcgcagtaggggataaaaactttacccgcatgggtgatgtgacggggtctggtgtggtgagttcaatggtgcataacgtcaccgtgggtaaagccgacctccctggcacgctgcaagcgagccagaaaaagctggatgagttggtcgaacagcgctaa

SEQ ID NO: 16815 - DNA, 264 bp, Escherichia coli
atgacttacatgaaattaacggcggctaaacacattgttttttatatatttatttgtaatccagttttggaaaaacgccagttttcaaacgaaagtcagttaaaaatctgccgggatatgacgaaggttgagcggggaaataaacggcccatccatgaggaatgggccgtgaaaggagattacgcgactgggcgcgcaataatgctgcgggtttccatgcggacttcggcaatggtgacgtcaataacgtcagtcactttgtaa

SEQ ID NO: 16816 - DNA, 720 bp, Escherichia coli
atggataagttgctgaacaaaaagataaaagttaagcagtctaacgagcttaccgaagctgcttactacctctcgctaaaagcaaagcgcgttctctggttatgccttatgcagacgtatttcacagcttcagtaagcgaagatgatgatgagatggctgtactcggtgactctactttcaaagtaaaggtggctgactatcagcaaatttttcaggtaagccgtaaccaggctatcaaggatgttaaagaaggcgtgtttgagttaagccgttctgcggtaatcttttacccgaaagaagggcgttttgactgcgtcgcgcgcccctggctaacagaggctggcagccgatcagctcgtggtatctgggaaatcgaatttaaccataaactcctgccgtacatttacggcctgacgaaccagttcaccacctactcgctccgcgattgtggcagtcttcgaaatccccggacgatccgcctttatgaaagtcttgctcaattcaaatcttcaggcttatgggttactactcatgcttggttaaatgaccgtttccttttgccggaatcccaacagaagaatctggcagaattgaaacgatcttttcttgatcctgcattaaagcagataaacgagaaaacccccttgtttgctaagtaccgtattgatgattcagggaagtttttgttctcaatactcgataagcaaaatcccgtctga

SEQ ID NO: 16817 - DNA, 342 bp, Escherichia coli
atggctcagaaaaacagaatttcagaaacagaatggaaacagctgctgccgcaaatggcttcctttgcacacatcacaacagatattggctattccgtgcttgtcaaaggtgagaaatcatcagacgtagccacgcgagtaggccgttccaagcaaaacatttccagcaccgttaagcgaatctgggatttgtaccagaacaccactcttaaagccgagaacggcgaaccattaaaattagttcaggtctggataccagcaagccttgctgaaactgttttaaaagaagccgcgaagtacagcattaataacatcacgacctcggaaatggaaaaaaaataa

SEQ ID NO: 16818 - DNA, 792 bp, Escherichia coli
gtgaatttgcctacgcccgaaacctacgatgaacttcagagagcctacgattttttcaatgagaagctattcagcaacgagctgccgccatgcctgataacgttgcagcgtgagaagcgaacgtatggctattgttcctttaagcgtttcgtcggccgtgagagtgggtacacggtagacgagatcgctatgaatccggtgtatttctcgatcagaaccataaaggccacgctttcaacactggtgcatgagatggttcatcagtggcaattccattttggcgagcctggccgccgtggctatcacaacaaacagtgggcggcccggatggaacgggtaggactaatgccttctgataccggcgaaccgggaggcaggaaagtgggccagagcatgacccattatattattgccggtggccttttcgatatggcctgtgatgaactgctgacaggccatttccggctttcctggatggacaggtttccgccttaccagcctaagcctggcgctgtgctaagccctacaggaaaaggctatattgacgacgaggaagatgatagcgaacacgaacaggaggtggaggaagggcgcgacccggttgaactcgacgacgagatcatagaggccatgcgatttgtaaccccgccgcctgaagcgccggtgaacaaaacaaaccgggaaaagtacagctgcccggtgtgtcatatcaatctctggggtaaaccggggatagtggtttactgtggtggcgagcactgtaataaagccgcgttagtagtcttaaaataa

SEQ ID NO: 16819 - DNA, 1266 bp, Escherichia coli
atgtttgcgctgattgatgtcaatggcatgtacgccagctgtgagcaggcatttaggccagatctggcaaaccgagcagtggccgttttatccaacaatgacggcaacattgtggcccgtaattacctggcgaagaaagcgggcctgaaaatgggcgatccgtacttcaaagtcagacccataatcgagcgtcataacatcgctatttttagctctaattacactctctatgcctccatgtcggcccggttcgcggccgtagttgagtcccttgcaagccacgtcgaacagtattcaatcgacgagctttttgttgactgcaaagggataacggccgccatgagccttgacgctttcgggcgccaactgcgcgaggaagtcaggcgacacacaacgctggtatgcggggtcggtattgcccgtactaagacgctggcgaagctgtgtaaccacgctgcaaaaacatggcccgctactggcggggtggttgctctggacgatggcgccagactgaagaaattaatgagcatcctgccggttgcggaagtctggggcgtcggccatcgtacagagaaagcactcgccacaatggggatcaaaacggtgctggatttagccagggcagatacgcgcctaatccgtaaaacattcggcgttgtgcttgaaagaacggtacgggagttgcgcggcgaggcttgcttcagcctgggagaaaaccctcctgcgaagcagcagattgttgtgtcgcgctcattcggccaacgcgtagaaaccctgacggacatgcagcaggctgtcaccggatttgcagcgcgcgcagctgaaaaactgcgtaatgagaggcaatactgccgcgtcataagcgtctttatccgtaccagtccttattcagtgcgtgatacacagtatgccaatcaggcaaccgaaaaactgacggtggcaacccaggacagccgcacgataattcaggcagcacaagccgcgctggcgcggatctggcgggaagatattgcgtatgcaaaagcaggggtcatgctggcagattttagcgggaaggaggcccagcttgatttattcgactctgctacgccttcagctggcagcgaggctttaatggctgttcttgatggtataaaccggcgtggaaagagccagcttttttttgcaggccagggcatcgataactcctttgccatgcgtcgtcagatgttgtcacctgattacacgacagactggcgctcaataccaatagccaccatcaaataa

SEQ ID NO: 16820 - DNA, 441 bp, Escherichia coli
atgaaggtcgatatttttgaaagctccggcgccagccgggtacacagcatccctttttatctgcaaagaatttctgcggggttccccagcccggcccagggctatgaaaagcaggagttaaacctgcatgagtattgtgttcgtcacccttcagcaacttacttcctacgggtttctggctcgtcaatggaagatggccgcatccatgatggtgacgtactggttgtggatcgctcgctgacggccagccacggctcaatcgtagtcgcctgcatccataatgaatttaccgtgaagcggctactgctgaggcccagaccctgcctgatgccgatgaacaaagattttcctgtgtactacattgacccggataatgagagcgttgaaatctggggagtggttacgcattcccttatcgagcatccggtatgtttgcgctga

SEQ ID NO: 16821 - DNA, 426 bp, Escherichia coli
atggaaactatcgaaatcaccgcccgctacatttctgaaaacgcccgcatgaacttcatgcctgcggcatttcgtggcgctttcttcagcgcagatcacttcattcagtcctttctgaatcgttacgctaaagactaccagggagggtattgggaataccttcaggccagcaatggcgcgttttttatggaagcgccccaacctctttggctctcgttacctaactattttgaaggtgaatgcagcgcgcgcgaagtagggattattgtttgtctgtatgcctacagttacttttgcgggctggcatatgaagaaggcaaagccgaactgaacgaaacgatggctaaccggtatcacctgttgcgggagtacgttaatacgctggagaacgaaagccagaatcgtatttatcgtgccattgattaa

SEQ ID NO: 16822 - DNA, 405 bp, Escherichia coli
atgttagcgacacttcaacaccctaccgcctggcaattgccagatcggttaatgcttttggaactgttaatgttcgattaccgtaattccgatcaggagcgctacggccagcaaatctatcaccactatcgtaaacagggtaatcatcgctgggatacttctgttcatcaggatagcggcggccaatacgcgattattttccggcactccttcagcaaaaaacaggctgatggcgttaagcgaacgatgatccgcgatgaaaccgttatacgggcaggtacggcgcaggagctgacagaagcgacatttcccgacttccaggatagcgatattctgaaggcgtcggatttctttaagtcgcttatccagcgcaaagcggcagacgtaacacaaaccgatatttga

SEQ ID NO: 16823 - DNA, 240 bp, Escherichia coli
atgctgaacaaaaccgaaaacaacaccaacattagtagtatcaacccctgttctacagagagcctaatagccgtgacgggaaatgatggagagacgcatatcattcagcgtgagttaatatcccactctgttgaagggcatgaagccacaatcattcaccttgtaaccgggaagtcgataagggtttctttgtcatctgaaattctggcaaaaaaactaggcattaccgtgtctgaataa

SEQ ID NO: 16824 - DNA, 156 bp, Escherichia coli
atgaatacgattagtataacggaaatcgtgttgagtgtgcttcttgcgggcgctttggggccggttttattacgtcgaaaaaaaggtctgctgttactgttgttgattctggtctgcacgatacttttgcttcatggtgtcactacgatttactga

SEQ ID NO: 16825 - DNA, 549 bp, Escherichia coli
atgtggtcgaaaatctttaaaagcgaacccccggacgtcacccctccggggccgttctgctgtgctgcgcatcgagccgctacgcgtctcgccccgctcacgcgggcagctgccactgacgcctccggcctgcggcctccgcgctccgcttggcaaccccttcccctgctgccgctcatttccccttcagcctcctatcatgattcgtctcctgcattatccgtggattgtgcagctcagtggggcgctggccgtgacggtgcggtgtcccccgtaaccggccgcgcggcggccgctaactcgcagtacggcgccgcgacccgcaggcgggccgccgtacccgcgcgcaggcgcgcggcgcccactgcgcacccccgtgggggacgtgcggcagctgcgtggcggcgggctgggttatggcttagcagggaggggggtggcctgttgctccggtcagtcccgcagtttccggcgatttgcggccggtgtccggtggagtccggcgcggtcgccttccatgccctgacgggcataaaaacaggtaaataa

SEQ ID NO: 16826 - DNA, 297 bp, Escherichia coli
atgcactttactaacttccttcagcgttacttcgatatagagattgaacatacctttgaccctaccattcagggcagcaacgaaacgggtaaagacgtcactaaaatctggatctatgagaagggcgaggatagcgaaccgctgcttactctgacagaagcatggtggtataccgagacaaaaacggctggtaactggcttatcggcaacgtgtattcaacgcttgagcatgggcgtgaaattcatgaaagcgaatttcgtaaactggtaacagctggcaaggttatatcagcatga

SEQ ID NO: 16827 - DNA, 360 bp, Escherichia coli
atgagtaaggggaataaaatgcttattaatcggatagcggttatcgggcttgcagttgtctcagccgctacgcaggcaggtgtgccgccggttaagtttttttaccgggatacagtcccggtaagcattacgctggacgaacccgcaacggggtgcagcatggccggtgtgattgttcatccagtggatcggccagcggcaaaagtggcatggtttagcgagcggatttgcggtaaaaaacgttacccggttagctttatcagtgatgaaattagcgccccgcataacgtgatccataaaggggaaaagtttcacgttaccccggctcaggtcaatctcctggacgcgcaaaacctctaa

SEQ ID NO: 16828 - DNA, 285 bp, Escherichia coli
atgtatcactatctcgtttttgtccctctcgcattaattattagcgccgctgcgcttgccctgccctggtttatcgttcgtgcgggatacagggatctggtgcagatcacctgcgcctgcgtctctgttctgggcctgtgtgcggcgacaggggttttcagctacttcgataataagccgcttgcgtttctgtacggttgcggcgcgctggcgtgctttttgtacgcggtagactgcgcgataccgttgtatatgacgcgtaaaaagccacgtaagcagctgtaa

SEQ ID NO: 16829 - DNA, 333 bp, Escherichia coli
atggattaccagacccgcttaaattctgatataaccaaagagattgattatctggcatcactgcgtaaacaacgcatggtggcggatctgcgcacagagctggtttacggctccctggagcgtctggcagatatgatctgcaacaccgtcactgactggtcgcttccctgccctgttctgccgctttcttccgtacagcaatggcacaaagcccgcgaaatcgtcctggcagattatgaggacttcggccacgatgcctgggactttgcccgccactatatgaaaacagagcttagcttcggttatgcctgctacaaagacgatattgcctga

SEQ ID NO: 16830 - DNA, 180 bp, Escherichia coli
atgactacagttaccaccccttcccaactgaaaaaagaagtcgaatctcagaaagaattattgctgcgcgcctgcctcgaagcgttcaaccagctgcctaatcagcgcctgcaaggcgctttccaatcgacgtatgcactggcggcaaaattaagccagctgctgcaacaaactaaatag

SEQ ID NO: 16831 - DNA, 345 bp, Escherichia coli
atgaatgaccgacagcgagaactggcccgtatacgccaggcccgccgccgcgcgcggctcaaggaagaaggcacaagcgtgacagtcacgctaacaaaacaggaagaagcaatgttgcaggagctgtgccgggttcgccgtcctggacgaacgccttattcaacgaacgaatttttccagctgctgcttatccgcaactggcagcagtggcaggagcagaaggcacagctgggaaaatgccaggcttgcggaaagctgaaagcggagggggggtgcgagggtgaacggaaaggcgaaacctttaactgctggcttgccgtcgaagccaatgaactaaatttgtag

SEQ ID NO: 16832 - DNA, 369 bp, Escherichia coli
atggaaaagcagccggataaattagaagttctgatggactggtttttaggtgacgcgaaggaaatcaccgcaactcagaaagaaatgacgcagaaactttctgagctttcggaaaagctggcaaaagacaccgaaagtttaggagagacggcagactcttttaaacgggctttagtagaaaaccagcgttcaattagcctggcaattagtgatgatgctaaggcgcgcgaggaatttctaactaaattccgccgcgcgcaggcgtccagtgctgagacgtttacccgtcagatcctttttattacagctggctgcaccatcgtgggcgccgcagtaggcgccgcgatagcgatacttttactgagataa

SEQ ID NO: 16833 - DNA, 717 bp, Escherichia coli
atgaaagtagcggtaattaattacagtggcagtgttggtaaaacattaatttcatcttacctgttagccccgcgcctgactggtgcaaagttctatgcggtagagactatcaaccagtctgcttccgatctgggtattgaaaatgtgaccagttttaaaggtgacgacttctcacgtttgattgaggatattgtttttgaagatgcaggcattattgatattggcgcgtcaaacgttgaagcgttcctgatggctatgtctcgctttgacagtggcgcgaacgaatttgataaatatgtaatcccggtgacgccggataataaggcgattgatgaaagcctgaaaacggcacacacgttaagtaaagcgggcgtgagcagcaagaaaattatctttgttccaaaccgtattagtccagacagtgaagtagaagatgtgctggcgccggtgtttgagtttgtcaaagaaacgaagattggcaaaataagcaagaaggctgttatttataacagtgaggttttcgaatatctggcgtttcaccgtatctcattcgaagtattgaccgctgaagatccagaagaattcaaatcccgtgcaaaacaaacaaccgatgctgacgagcgcaaaaaactggcacgccgttatacatacatgaaacaggcgattccggtaaaagctaatctcgataaagcatatgcggctttaatgggagaataa

SEQ ID NO: 16834 - DNA, 417 bp, Escherichia coli
atgccaataataaccgcaaaagtatcagatgaacttttggcctatatagacctggtttcaggaggtaatcggtcagattatctgcggcgctgcattgaagctggcccaggtgatcgggagtccgggttgaaaatagttgccgaccggctgagcgacgtaaatcgcaaactggattatctttttgaccgtgcttcagatgcggattttggcccactgcgcgatgagctgaaggcaataaccgaaacgctatctggcgtaaaattcccaccggcaggacagatgatgttgcatgaatcactcgctattgaaacgctaatcctcctgcgctcgatagcagaaccgggcaaaaccaaagcggcaaaagcagaggttgaacgtaacggctacaaagtctgggaaccaaaaaaggagcgctga

SEQ ID NO: 16835 - DNA, 1530 bp, Escherichia coli
atggacgatagagaaagaggcttagcatttttatttgcaattactttgcctccagtgatggtatggtttctagttgcaaaatttacctacggtattgatccatccacggctaaatacctgattccgtatctggttaagaatactttttcgctatggcctttatggtcagctttaattgctggctggtttattggtgttggcggtctgatcgcttttatcatttatgataaatcacgcgtgtttaaaggcgaaagattcaaaaagatttatcgtggtacagagcttgttcgcgccagaacactcgctgataaaacacgcgaaagaggtgtcaaccagttaaccgtggctaatatccccatacctacatacgctgagaacttgcatttttcgattgccggtacaaccggtactggtaaaaccacaattttcaatgaactgttatttaagagcatcattagaggcggcaaaaatattgctttagatccaaatggggggttcttaaagaatttctatcgtcccggcgatgttattttaaacgcctatgataaacgcactgaaggctgggtgtttttcaatgaaattcgccgttcatatgattacgagcgtttagtgaactctattgttcaggaaagccctgatatggctactgaagaatggttcggctatggccgtcttatttttagtgaagtttcgaaaaaacttcacagcctatacagcacagtaactatggaagaagttattcactgggcctgtaacgttgaccagaaaaaattaaaagaatttttaatggggacgcctgccgaagctattttttccgggtctgaaaaagcagttggaagcgcgcgatttgttctcagtaagaatcttgccccacatttgaaaatgccggaaggtaatttttccctgcgtgactggcttgatgatggaaagccgggaaccctgtttatcacctggcaggaagaaatgaaaaggtcacttaatccgctaatttcctgctggctggattcgattttttctatcgtgctgggtatgggtgaaaaagaaagccgcattaatgtatttattgacgagctggaatcactccagtttctgccaaacctcaacgatgcactgaccaaagggcgtaaaagcggtctgtgtgtttatgctggctatcaaacctattctcagctggttaaggtttatggtcgggatatggctcagacaattctggctaacatgcgttctaacatcgtgctgggcggcagccgtctcggtgatgaaacgttggatcaaatgtcgcgctcactcggtgagatagaaggcgaagttgagcgtaaagaatccgatcctcagaagccctggattgtccgtaaacgccgcgacgttaaagttgttcgtgccgtaacgcctaccgaaatatcaatgttgccaaacctcaccggctatctggcgttgcctggtgatatgcccgtcgctaagttcaaggctaaacacgttaaataccatcgcaaaaaccctgttcctggcattgaactgagggagatctga

SEQ ID NO: 16836 - DNA, 3237 bp, Escherichia coli
atgcttgatataaccacgattacccgccagaacgtcactagcgttgtgggctactactctgatgcaaaggatgattactacagtaaggattcatcattcacgtcctggcagggaaccggagctgaagccctcggcttatccggggacgttgaatcagcccggtttaaagagctgcttgtcggagagatagataccttcacgcatatgcagcgacacgtgggtgatgccaaaaaagagcgtctgggctacgacctgacgttttcagcgcctaaaggggtatccatgcaggcgctgatacacggcgataaaaccattatcgaggctcatgaaaaagctgttgccgctgctgtgcgtgaagctgaaaaactcgcgcaggcccggacgactcgccaggggaaatcagtaacccagaataccaataaccttgtcgtcgctactttccgccacgaaacttccagggcgctagatcctgatttgcacacacacgcttttgtcatgaacatgacccagcgcgaggacggccagtggcgcgcgctcaaaaatgatgagctgatgcgtaacaaaatgcacctgggcgatgtttacaaacaggagctggcgttggagttgaccaaagccggttatgagctgcgttacaacagcaaaaataacacgttcgatatggcccatttttcagatgaacagattcgcgctttttcccgccggtcggagcaaattgaaaagggactcgctgcaatgggtctgacgcgggaaaccgccgatgctcagacgaaaagccgcgtctcgatggctacgcgtgaaaagaaaacagagcattcccgtgaagaaattcaccaggaatgggccagccgcgccaaaacgctcggcattgattttgataaccgtgaatggcagggacacggtaaacctctggaggctgatatagcgcgcaacatggccccggattttaccagcccggaggttaaagctgaccgggctatccagtttgcagttaagtcgctgtcagagcgcgatgccagctttgaacgccagaagctgattcaaatcgctaataagcaggtgctgggccatgccacaatagccgatgttgaaaaagcgtacctgaaggcggtacagaagggcgccatcatcgagggcgaagcccggtatcaatcaactctgaaggtcggtgcttcagttatggccgaaactctgacgcgcaaagagtggatcgactcgctgacgaatagcgggatgcgtgcggataaagcccgttttgcggtagatgatggtattaaaaacggcaggcttaaaaagaccagccaccgcgtcactaccgtggagggtattcgccttgagcgttccattctgactatcgaatcacgcggccgggggcagatgccgcgacagctgaccgcagagattgcaggccagctgcttgccgggaaaaccctcaagaaggagcagatgcgcgcggttacagaaattgtgacgagcaaagatcggtttgtggccgcacatggttacgccggtaccggtaaaagctatatgacgatggccgctaaagagctgctggagtcacaagggctgaaggtcacggcgctggccccctatgggacacagaaaaaagcgcttgaagatgatggattaccggcccgcaccgttgccgctttcctcaaagcgaaggataaaaagctggatgaaaaatcagtcgtattcattgatgaagccggggttatacccgcccgacagatgaaacagctgatggaggtgatcgagaagcataacgctcgcgcggtattcctgggggatacgtcacagacgaaagcggtagaagccggtaagccttttgagcagctgattaaagcagatatgcagaccagctacatgaaagacattcagcgacagaagaatgaagttttgcttgaggcggttaagtatgccgctgaaggtaatgccgcgcgcgccctgaaaaatatcaccggcgtgaacgaactgaaggaagaagcgccccgactcgctcaacttgccgatcgctacctgtctctgtcctcagaacaacaggatgccaccctgataatctctggtacgaacgcctcacgcaaaaccctcaatgactacatccggggcaatctggggcttgccggaaccggcgaaacgttcacgctacttgaccgcgtggattcgacacaggcggaacgccgcgacagccgttatttcagtaaagggcaaatcattatccccgaacaggattacaaaaatggtatgaagcggggcgagtcttaccaggttcttgataccgggccgggcaacaaattgacggttgaaagcagcagcggtgagcagatcgctttcagcccgcgtacacacaccaagctgtctgtataccaggcagtcagcgccgaactggcgccgggcgataaggttatggtaacgcgtaacgataaaacgctggacgttgccaacggcgaccgcttcacggtgaaaaccgtggagggtgaaaaactgacgcttgaggacaaaaaagggcgcacggttgagctggacaaaaaacaggcttcttatctttcctatgcttatgcaaccaccgtccacaaatcccaagggcttacctgtgatcgcgtgttgttcaacatagataccaaatcgcttaccacttctaaggacgttttttatgttggtatttcgcgtgcgcgtcatgaggtggaaatttttaccgacgataaaaaatctttggcatcgagcgtgagccgcgacagcccgaaaaccacggccgcagaaattgaccgtttctttgggcttgaggccaggtttaaggatattggccgcgataccagtttagaaacccgatcagctgaaaaaggtctgccagaagccacgggggaaagcatggcgtttaaccagaaacccgatgaacataacatgacaaccggcactgattatcagccggtgagcaacgcagaggacgcctttcatcttaagcagaaccctatggatgattccgttggcctgcggcgtcatgaagcacagcaaaatgatgcagagctggcccatgattatgctgctgccgacgatcagcagtggagcgcgcaggagtatgccgattacgagcattatgccgaagcatcagactacgactttgacagcagcatttacgacgattacgccatgccgcagacgtctcaggcggaacagagccataccggaaaagaacacacccatgagcatgagcatgaagaagggggccatgaaatctga

SEQ ID NO: 16837 - DNA, 696 bp, Escherichia coli
atggagcagaccgacaagcgcaagcaggataaactgaagttcgaccgggtaattaatctggcgcgcagactgccgcaaccggcgatccatgacttactacgcgcgctgatactgccaattcaggccgattacttgctggccgttggcacggagggccaggacgcgcgcccggacatgaacgagcgcgagttcttcttcacaaaaatcatctgggcgatggattacacgcacatgaaatcactcaggcttgcagctgaagattttcccctggcgcttgcgacggccaagatcctgccgtggccgtggggtgaatcaagctaccggagtgctttagccgatataggcagcgctaagggcaatccgtgggtacaggatattaaccaccgcgttactttgtggttgccctggcggataggctttgtacgaggagggaaccattctattgccagcggcgttctggccggtgagggtgaggtaatacccgatacggtttatgatatgcggtatttgctcgatattgtcagcactgacgggtattactggtacatgagcgggaagatctgcgagagagtcagtgactaccgtacagccgccttttttggggtcgtctcagaaaacggaatctatggtcactcccgtttttgcaacaccgattttgacgataagttggcttgcttgaatctatccggcgtctga

SEQ ID NO: 16838 - DNA, 291 bp, Escherichia coli
atgcgaccgtctgttgtgcttgacatgaagcgaagcgcagtgcgtgaagcggtaggccgctttcgcgccgcgaacccgcgcgtcttcggctcggtgctgcatggcaccgaccgggatggcagcgacctcgacctgttggtcgatgcgctgcccggtgccacgttgttggacttgggcgatttggaagaagaactgaaatcgctgctcggcgttgacgtcgatctgctgactcccggcgacctgccgccgaagttccgggccaaggtgctcgcggaggcgcaaccgatatga

SEQ ID NO: 16839 - DNA, 402 bp, Escherichia coli
atgagcgagaaccgcctgcccgattacctcgaccacattcagcaggccgcaaccgatgcgcgcagcttcgtggaagggatggccaaggacgacttcttggccgacaagcgcacccagcaggccgtcatcatgagcctgatcgtcatcggcgaggcggccacaaaggtgatggatggctacgtcgagttcacccaggcgcatgccgacgtgccgtggcgcagcatgcgcaatatgcgtaatcgcatggctcacggctatttcgacatcaacctcgatgtggtgtgggagacggtacaggaatggctgccggcgttgctccagcaattgcccgccgtgcgtcaggatgccgacgatgaagaccgtaacgacaactgtgaaagagggatctccgatgactgttga

SEQ ID NO: 16840 - DNA, 357 bp, Escherichia coli
atgactgttgaatcgagaatattttctgtagccgagtatgttcagccgtccgaaggcgagcctattcgttccgttgtgcttgaaacccgagactcaattatcgtggtttggcatgtccatcccgggcaggaaattgcggctcacattcatcctcacggccaagacacgtggactgttttgtcgggaatggctgattactttcagggcaatgggattgttcgtgccctcagggaaggtgagatagccgtggcaagaccgggccaagtgcacggggcgcgaaatacaggtaccgagccatttgtgttagtctcggttgtggcatcagccaatgccggtttcgtattggctgagcgatag

SEQ ID NO: 16841 - DNA, 315 bp, Escherichia coli
atgagccgcagccgccgcaaaacacccatcgtcgggcacacgacctgcggcagcgagcgcgaggacaagaagctctggcatcagcgctggcgcacccgtgagcgcacggcgctgaccagcgcgtcgcccgaagccctgagcgcccatctgcccctgctggaaaaccaggccagcagcgtctggtcgatgggcaaggatggccgctcctactggcccgtcaagcgccaggccgccacggcggatcgcatcgccaatcacaagggacgcaacccgcaagaacgcgcctccctgaaaaagcgcctgcttacactgtga

SEQ ID NO: 16842 - DNA, 534 bp, Escherichia coli
atgaaaaacttagcaacctggcttctggccgcagcatttacgacagccgccctgcccgcctttgcggtggaaccatccgttcaggttggctactcgcctgaaggaagcgcccgcgttctcgtcctgagcgccattgactccgcaaaaacctcgatacggatgatggcttattcttttaccgccccggatattatgaaagcactggtagcagccaaaaaacggggagttgatgtgaaaatcgtaattgatgaaaggggcaatacggggcgcgccagcattgcggccatgaactacatagcgaacagcggcatccctttgcgtactgacagtgatttccctatccagcatgacaaggtgatcatcgtggataatgtgaccgttgaaactggcagctttaatttcaccaaagcggccgaaacgaaaaactcggagaatgcggtggtgatctggaacatgcctaagctcgctgaatcattcctcgaacactggcaagaccgctggaatcgggggagagactaccgttccagctactga

SEQ ID NO: 16843 - DNA, 996 bp, Escherichia coli
atgactgatgcagctttctatcaacttggcccactgcgcgagtatttagaagatcctactgtttttgaaattcgcattaactgctttcaggaagttatctgtgatacgttcagcggccgcagggttgtgcagaacgcggcaattacggcagattttattaggaaccttgctaaatcgttggtgagcagcaacaagctgaccatgcaggccattaatgacgtgatcctgcctggcgggatcaggggcgttatctgtctgccccctgcggtgattgacggtacaacggccgtagcgtttcgtaaggatttggcggccgataaaaatctggagcagctgacccgcgaggggattttcagtgactgccggaagattaccggcagcaagcaaagcctaacggatgatgattttttccttaaagagctgcacagcagcgaaaaatggcccgcattcctgcaaaccgccgttgagaagaaacgcactatcgtgatctgcggtgaaaccgggtcggggaaaacggtactcacgcgcgcgctgttaaaatcgctacataaagacgagcgtgtaattattttagaggacgttcacgaagtcacggtcgatcacgttgtagaagccgtttatatgatgtacggcgatgcaggaaagatcggccgcgtcagcgccactgatgccctgcgagcctgtatgcgtctgacaccgggccgtatcatcatgactgagcttagggatgatgctgcgtgggattatcttaaagcacttaataccggccatccaggcggtgttatgtcaacgcacgctaactctgcgcgcgatgcctttaaccgtattgggctgcttatcaaggcgacccctatcggccgtatgctcgatatgagcgatattatgcgaatgctctactccaccattgacgttgtggtgcatatggaaaagcggaaaatcaaagaaatttattttgaccctgaatataaaatgcagtgtgtgaacgggagcctgtaa

SEQ ID NO: 16844 - DNA, 1161 bp, Escherichia coli
atggcccgtaaaagtgtcgatgtagatcaggaactcgatgaaaacaccggagacggtgaatttgaaagcgagcgtggcggatttaatggcagtaaccgccgttcggctcctggtatgaaagcctttgtcatactgatggcgctgcttgctttggtattcatcgggattacggtcatgggtaaaattcgcgccccggctaaagctgaagctgataaagacggtggtaaagcgcaacaggccaatacactgccaaactacagctttaacagcgatcctgatgttaataaacctgcaactgcgcagaatagcgccactgatgcccgtgctgtgcaggctgccgcacaggcagatgcagatgcgggcagcagcaataccggcgcgcgtacctctaataagcgtaaagaaccttcgcctgaagaactggctatgcagcgtcgtctgggcggcgagctggcccagactaatcaggcggctacaagcaatagtcccggagtgcagccccaggacaacgaaacaagcgaaggtagttcagcactcgctaaaaacctgactcctgcaaggctgaaggctagccgcgctggagtcatggctaatcccagcctgactgttccgaaaggcaaaatgatcccctgtggtaccggcaccgagctggataccactgttccgggtcaggtttcctgccgggtttcacaggacgtttactcagctgatggactcgttaggctgattgataaaggctcatgggttgacgggcagattaccggtggtatcaaagacggccaggcgcgcgtgtttgttctctgggagcgtatccgcaatgaccaggacggaacaatcgttaatattgacagtgccggaacgaactcactcggcagcgcggggattccgggccaggtggatacccatatgtgggagcgtctgcgtggtgcgatcatgatttcgttgttctctgacaccttaacggcgctggttaaccagacgcagagtaataacattcagtacaacagtacagaaaacagcggtgagcagctggcgtctgaagcactccgctcttacatgtctatcccccctaccctctacgatcagcagggtgatgcggtgagcatttttgttgcccgcgacctcgatttcagcggcgtttatacgctcgcagacaactaa

SEQ ID NO: 16845 - DNA, 885 bp, Escherichia coli
atgaaaaaactacttctttcagcagtcgttttgtcagtcctgggaggcgcggccactaacgttatggcgcttgaggttggccgcaattctccttatgactatcgcattaaaagcgttgtttataaccctgttaatgtggtcaaaattgacgctatcgccggtgtggctacccacattgttgtcgcgcctgacgaaacctatatcactcatgcttttggcgattctgaaagctggacgtttgcgcacaaaatgaaccatttttttgtgaagccgaaacaggccatgagtgataccaacctggtgatcgtcaccgataagcgcacctataacatcgtcctccatttcatcggtgaagaaacgaagaaaaatgcagacggtacggtatcaaaatcctttattgaaacgccgtgggctgtgcgccaggccgttcttcagctgacctatgaatatccgtttgagcagcaggaaaaagccaaaagcgcggctgataaaaaacgcattacgcagaagctgaagcagacggcttttgcgggggcgaagaactatcagtacgtaatgagcgaacagcctgaaatgcgcagcatccagccggttcacgtctgggataactaccgctttacccggtttgagtttccggccaatgcggagttaccgcaagtctacatgatctcggccagtggcaaagaaacgctgcctaactctcatgttgtgggtgagaaccgcaacatcatcgaggtggaaaccgtcgctaaagagtggcgtattcgtctgggcgataaagtcgttggcgttcgtaataataatttcgcgccgggcgccggtgcggtagcaaccggtacggcttccccggatgtgcgcagggttcaaattggggaggataactga

SEQ ID NO: 16846 - DNA, 699 bp, Escherichia coli
atgaaagctaataaaaaaacagggcttacacgtgaagccattaaagagttcaacgaaagccgtaaagggcttgaagttgatctgatggatgaagtgctgaagtcccggcgtaccgcctggatggttgccaccggttcagcggtggtaactgtttttgcactctctttagttggttacgtggtgcataagtacagccagccaatccccgcacatctgctaacgctcaacgaggccactcacgaagtacagcaggtcaagctgacccgcgaccagacctcttatggtgacgaaattgataagttctggctgacacaatatgtcattcaccgtgagagctatgacttctattcagttcaggtcgactatacggccgttggcttaatgtccacgccgaacgtggcagagtcttaccagagcaagttcaagggccgcaacggtcttgataaggttctgggcgacagtgaaacgacccgcgtgaagattaactctgtgatcctcgataaaccgcacggcgtagcaacgatacgctttactacggttcgccgcgtgcgcagcaatcccgttgatgatcagccgcagcgctggattgccattatggggtatgaatataaatcgctggcgatgaatgctgagcagcgttatgtcaacccgctgggtttccgcgtgacgagttatcgcgtcaacccggaagttaactga

SEQ ID NO: 16847 - DNA, 1041 bp, Escherichia coli
atggcattcaccctagtcgcagacattttcgcaaaagtagacggggcgattacgtcaatggtgagcgccaatgttgccaccattatctctgatgtaacgcctctgattgccacctgtctgacaatcaagctgatggttcaggggatgtactcagcgtttaatccgggggcgggcgacagcctgagttcgctgattaaagagtatctttccatagcccttatcctgagctttgcaacggcgggcggctggtatcaacaggaactggtcaacgtggcgcttcacctgccggatgattttgctgggatactgtctgcccctaataaagtcggtgcaagtggcgtaccggcgattattgatagcggtattgaaaaaggtatcaagatcgtcaacaccgcatgggaagccgcagacgtgttttcatcgagcggcctggccgcgtatgccattggcggcattatgatgattgctaccgttgtgctgggcggcctcggtgcgggctttgtgatcatggctaaaatccttctggccgttacgctttgttttggcccgattgcaatcttctgcctgctgtggggagcgacaaaaaacatctttgctcgctggctggcgtcggtcattaactatggccttgtcgtcgtcattcttgcgctcgtgtttggtttcatcatgcagatgttcgacaacctcctgtcctcgatgaactctgatgccgcttactcatcaatcactggttctatctccgccttattactgacggtcatttccgttttcgttctgttccagattccgcaaattgccgccagctggggtagcggtatcagcgccggagttgctgacgccgcacgctctacgggttcttccatgcaggcgcttggcaatatgggcagccacggcatgtttggcggtaatgcgttcagaggcggtaacagtggcggcggccagcaatcggcaggtggaggaagtggcagcaacagcggaggaagcagtggttctaatttaagtggtaaggcaaggggcagtcgagggaagaaggctgcataa

SEQ ID NO: 16848 - DNA, 228 bp, Escherichia coli
atgaaaaaactactgcttgttatccctttcctcctggtggcctgcgatgcctcgcatgacgtggagtggtacaaaaaacatgagaaagagcgcaaggcaacaattcaggaatgcaagaaagacgcggatgaacttcagaaacctgattgcaaaaacgcgcgcgaagccgatcgtcagctgtttgtgttcggcaaaaaagacggcgaaatcaattcaccgaaaatttag

SEQ ID NO: 16849 - DNA, 714 bp, Escherichia coli
atgaaaaaaacactgacggcagtattgctgaccaccggcctgattctgggaggcgcgcaaagcgcttccgcaggcatcatcgtgaccaaccctactgaactggctaaacaggtcgagcagcttcagcaaatggcgcagcagctggagcagcttaaaagccagctgcaaacgcagaaaaatatgtatgagtcgatggcaaagacaaccaacctgggcgatctgctggggacgtctaccagcacgctggcaaataatttgccggacaactggaaggagatttacagcgacgccatgaactccagttcttccgtcacgccttcagttaacagcatgatgggccagtttaatgcggaagttgacgacatgacgcccagcgaagcaattacctacatgaacaaaaagctggctgaaaaaggcgcttatgaccgcgttatggcagaaaaagcctacaacaaccagatgcaggaactaaccgatatgcaggagctgacggagcagattaaaacgactccagacctgaaatcgattgctgacttacaggcccgtatccagacgtcacagggtgctattcagggtgagcaggcgaagctgaatctgatgaacatgttgcagcagtcacaggacaagctattacgtgcgcagaaagaacgtgccacccacaattttgtttttggaaccggcggggacgttaccgcgtcaccttcaattaactga

SEQ ID NO: 16850 - DNA, 2601 bp, Escherichia coli
atgagagctgccaccgctacgaagccaaaaaaaattgatgcctaccgtaaggagccatcagtaaataaaaagtatttgccctattcttatcacctcaatgattacgtgatttcgatggaaaacggcgatctgatggcttttttcaagctggatggccgcacacatgactgcgcatcagatcgggaactggtcacctggcataaagaccttaatacgctggtcaagagcttcggaacagaccatgtagagctgtggacgcatgaatatcaccatgaggctaaagagtacccggatggtgagtatgaccattttttccctgcttatgttgatcaatataaccgtaagctgcacggtgattccaagcagctgattaatgacctttatctgaccgttatttacaaacaggtaggggataaaacacagaagtttctggcgaaatttgaaaagccgactcgtgacgaaattcagcgaatgcagaatgaggcgcttgaaggtctggaagatatttctgaacaaatcctggaagcaatgaagccgtatggcattcagcagttgggtatctattatcgtgacaaacgcggtgttgaaattcctgcgcctgataaaaaagaacgtgaagaacttgctgaagtcgatgaatcagacatttttgacgaagccattgttatcgaacgcaacgagcctgaaccttcgcaggctcacgcttattcaaaagcgctggagttcctttatttcctcgcaaatatggaatgggccatcgtgcctgtttgccgtgatcgtatccgtgagtacatcatggacaaccgccctgttagctcactgtggggggatgttgtccagatcagaacggtagatcacaacttctataccaccggcattgaatttcgtgaatacgaagaagatacagagccaggccagcttaacatgcttaaagaagccgattttgaataccttctgacgcagagtttttcttgcctctctgaatcttcagctaaaacgtttctgacgcatcaggaaaaatctttgcaggaaacgcgcgaccgtgcgcaaagccagctggcacagcttggtaccgcgctcgatatgctgacgtccagagagttcgtgatgggctaccatcatggaaccgtgcatgtctgggataatgaccaaaacgcggtacagcgcaaagcgcgtcgtgtgaaggttatgctaaccggctgtggcgtggttggcgggactctcagcctggcctctgaggctgcatattatgcgagactgcctggcaaccagaaatgggcgccgcgcccggttccgataaactcatggaacttcctgcacttcagcccgttccacaattttatgcgtggcaagcctgacaataacccgtgggggccagcgctgaccatgttccgcacgatcagcggtacgccactctattttaatttccatgtgaccccgcttgaagaactttcctacggtaaacgcccgctgggccatgcgttaataacgggtatgtcgggggaaggtaaaaccacgctgcttaacttcctgctggcgcagtcaatgaagtacaacccgcggctttttgtttatgaccgtgaccgcggtatggagccgttcattcgaagcgttggtggctactataaagttctgcaacagggtatgccgtccgggtttgccccgcttcagattgaaccgaccaaacgcaatattgccctcattaaaaacctgttccgcatttgtgtggaaaccaccaataacgggcctatcagcgcaacgatggctaccgaactggctgaaggcgttgatgcggttatgggggaaggctcacttattccacgcgaggcgcgcaccgttactatcctggacgggtacgtgaatgaagttgtggaaaatggcgtatcactgaaagggctgctgcgcgaatggacgcgcgaaggccagtatggctggctgtttgacaatgataaagacagcctggatctcagcgcgaatgatatttttggcttcgatttatccgagtttatcgcagccaaagaggaagtatccagcccggcccgtactccgctcatgatgtaccttctgtaccgggtacgtgactccatcgacggcaaacgccgcgtcattcagtgctttgacgagttccacgcctaccttgacgatccggttatcgagcgtgaagttaagcgtggtatcaaaactgaccgtaagaaagacgctatctatgtgtttgccacgcaggagccgaacgatgcgctgtccagccgtattggccgcacgatcatgtcgcagaccgtcacaaaaatctgcctgcgcgatccggaagctatccgagaggattatgccttccttactgatgctgaatacgacgcgctgatgtcgattaccgaacactccagacagttcctggttaaacaagggcaacagtctgcgattgcttctttcaatctctaccctcgcaacagcgacgatattgatgcagatattaagacaatggacaacgttcttagcgtgttgtccggtgaaccacaaaatgccgaaattgcgcatgagctggttgaacggctcggtaatgaccctgaagtatggctcaaagaatactggcgcctgacggcttaa

SEQ ID NO: 16851 - DNA, 318 bp, Escherichia coli
atgttcgttgacgggaaaagaccgcttttcaaaggtgcgactcgcttacctcgcgcgctgggtgtaccacgtaatgtagctatgatgatattcatgatttctgcctcgctttttatgattattcatatgtgggcgatcctggtgttcgtctttttgtggattccttcagctgcattaacaaaatatgacgaccgcatgtttcgaattatgggcctgtggttgaaaaccaaattcagtaattggtttgattctccgtttaagcagtggggaggatcgtcttattcctctgttgactacaaacgtaagggtttaaaataa

SEQ ID NO: 16852 - DNA, 294 bp, Escherichia coli
atgaccacgttgtttaagaagtatggccctgcggtagttatgggcgttttgtccattgccctgccgcaaattgcgctggccgctggcaccgatactggtgaatcaaccgctacatcaatccagacgtggttgagcacatggattccaattggttgtgctattgcgatcatggttagttgctttatgtggatgcttcacgtaatcccagccagctttattcctcgtatcgtaatctcgctgattggtattggttctgcatcatttctggtttccctgacgggcgtaggaagctga

SEQ ID NO: 16853 - DNA, 282 bp, Escherichia coli
atggaacgtttgtaccttgtattgcaatcacagatcctggagctatttgaaacaggaaaagtgaaggaggtaacgataaaacgggtttcattaaagacgtggtatcccgtttttcagatagacgatgaacagttgggccagatcgcatgttccattcgggttaacaaagagcatgaactacgaacctgggctgatttaaggctactggcagagtttttgaaagataagtgtggcgttgaagaatgccggttaaatctgcaatcaacagaagatagtgagtaa

SEQ ID NO: 16854 - DNA, 738 bp, Escherichia coli
atgagtaaacatccaaaacttctggttctcgctctggcctgccttgcttgtgctggccgtgccagtgctgcgcctgcctcagatgaagttgccaggcttgcgcagagatgtgcgcctgatgtttcacccttaacaatggcgtacatcgtcggccatgagtcctcaaatgggccgtacaggatcaatattaacggtggtagtacccagttaaaacagcaaccacgtactgaagctgaggccgtcagcgtttcgaaagttctgctgaaggataataaaagttttgatatgggccttgcacaaattaactcaaataatttagtgggcctgggtctttcggttgacgatattttcaagccctgcatcaacctgcgggcgagccagaccatccttaaagcctgttatgatagcgccctgaaatcctatccagccgggcaggttgcgctgagacacgcgctttcctgctacaacaccggctcactcataaacgggatttctaacgggtatgtcacgaaagttatcaacgtggcgcgtcaatcaactgatttgaaaatccctacgctgctacctgatggccagaccagtgaggacagcaccgcgactgagcctcagcaggcaaaaagtacggccacgcagtatgacggtgaacaagatgtttttggttcgggtgatggcgatgccttcagccgaaataatacggatgcctttttaaccaaacaggaaacagcgaagggggagtga

SEQ ID NO: 16855 - DNA, 306 bp, Escherichia coli
atgctggttcccctgaaatcagaaaaacgccccaaaggtgaacccatgtatcgtgacccggataacccttttaatacgtggactggtatagggaagcgcccggcctggctaactgcaaaattggacgctggcattagcctggaagccatgaaaatgcagggcgttgccaaccccagagaacatagacaagtaaaataccgcgaccccaggaacgcagaaaatacctggtccgggactggccgccgaccaacatggctcaaagagctgcttgatagtggtttatcacttgatgatctaaagatataa

SEQ ID NO: 16856 - DNA, 345 bp, Escherichia coli
atgggcgatgttattgattttgcggaaaagcaaaaagacagaaggaagaaaaaggcattttccattccgcccattttaagaaaattccgtgtccatgctatcaggttactcgccagcatcatcaaatccggctcttattcagttgcttatatcgttaagaaaattacaggaaagttaatcaagttgttcgcaatgttaacgattttcgtttttattgtcgaatatatcgcaggcgatataggttacaaatctatttataactctgcgttattattaatattacttaccgttatcaacattctggcgggtgtatatctgaacaaactgttaaggacaaaacaatga

SEQ ID NO: 16857 - DNA, 315 bp, Escherichia coli
atgaagaaactcttaatccctctgatagcagctggtagtctgctttatcttcctgccagccatgctgaagatccctgcaaagttattatgtgcatggcgggcaagctcaccggcgatagcggcggaagcgagtgtaacagtgctgaagctgctttcttcaatatcgttaaaaagaacaagcacggctttttacccaaccacacgagggatgccaggaaggcttttcttaatgaatgcccggataatggcgaaggtggaagtaaccagtcgatgataagccagatcataagtaaatacgggaaagttcgcttatag

SEQ ID NO: 16858 - DNA, 312 bp, Escherichia coli
gtgaaaaaaattatattaagtgcattagcctgtacagctctcttaactggttgcgtcagccaggataaaggtaatgcgatgcagagccagatgaataaccagcaacgccagattaacgaattatccgttcgtttgcagtctgcggagtcccggctatcaaagcaggaagaaaagctgcgcaacgaactgctgcaatccagcggctattgctatctgaatggcgcccgctactcgaccggcaccgtactttacgggcggatttgccagaatcagtcaggcagcgcttcgtggcaggtttacagccgtcgctaa

SEQ ID NO: 16859 - DNA, 642 bp, Escherichia coli
atgttccccttccccactacagaaaaccttattctatgggcttgcagcgccatcgcactgtttgccgttgtattcttccggcgttcagtacgcaaccgacgacacaaaaggaagcagcaaagtgcgcggcgggtgctggagcgcataaagacgttgccgggcttcccacaaaaaattaactacctgaggaaaattgatccttttgtgtttgaagaactgttgctggaaggatttgaagcgcatggcttcagaaccatcagaaacaaacgctataccggcgatggaggcattgacggccaggtaataataggaaaatatcgctatcttattcaggctaaacgctatcgcggccatattgctttacagcacgtacaggagttcgagaagttgcttaaacgtcataactgtcgcggtctgttttgccataccgggaaaaccggcgcaggttcaaaatctgtcagtattgccagtgaacggatggagattatcagcggccagcgcctgatagatttgctcacgcccggcagctccttcactatcgcaaccgccccgcagacgatgatgaagcgtaccgcagcaacactagaaacgagcaccattgttaaagatgccggtaaagaaaatcgataccatgagagttaa

SEQ ID NO: 16860 - DNA, 267 bp, Escherichia coli
ttggccacgctggagcgtcttctgggcctgctgtcggcctttgaggtcgtggtatggatgacggatggctggccgctgtatgaatcccgcctgaagggaaagctgcacgttatcagcaagcgttacactcagcgcattgagcgacataacctgaatctgagacaacatctggcaaggctgggacggaagtcactgtcgttctcaaaatcggtggagctgcatgacaaggtcatcgggcattatctgaacataaaacactatcagtaa

SEQ ID NO: 16861 - DNA, 570 bp, Escherichia coli
atgaaaatcggctatgcacgtaaatctacgcatcttcaggatgtggcgcaccaggttgacgaactaacaaaagctggatgtgagcaaatctatcaggatcagacctcacgtagcggccccaagcgcgacaaaaaaggtgcgccggaactggagaactgcctgaaagcattgcgcgagggagataccctagtagtttgggcactagatcggctcggcggttcattgggtcaagtcattactttactcgacgacctgaagaaacgcggaataactttcatagccatcaaggacagaatagacacaaatgcgccagttataggggaaatctatactcatctgatggcgatattctctagctttgaacgcaaccgcaatattgaaagaacgcgctcaggccttgcagctgcacgcgcaaggggccgtgtgggagggagaaaaccgtcactttctgaagaagatgttaaacaaattagaatcttacttgctgatcctgaaatgacagttggtgcagttgctaagcgcttcaacgtttctcgcatgactatttatcgctacaccacaaaatcatga

SEQ ID NO: 16862 - DNA, 276 bp, Escherichia coli
atgcccagtactcctgaagagaaaaaaaaggtcctaacccgggttcgccgtatccggggtcagattgatgctctggaaagagcacttgaaagtggcgctgaatgccgttccgttctccagcaaatcgccgccgtccggggcgccgctaacggactgatggcagaggtgctggagagccacatacgggaaacctttgaccagaatgacagctacagtcatgaagtcagtaaatcagttgacgatacgattgagctggttcgtgcctatcttaaatag

SEQ ID NO: 16863 - DNA, 399 bp, Escherichia coli
atgacaactccggtaatttctggtgacggcatcttttctcatgtgttcattggcgcagccgatgtcgagaaatcctccgcattttacgatgtcgtcctgggcacgcttggtatcaataacctcggcccgtttggcaacggctgggtactctatggccgcgaaaagccggcatttatcattgcccgtccgggcaacggtgaagcaccttccgctaacggggtgactgtcggcttcgctgctgccaccccggaagaggttgatgctttccatgctgccggccttgccgccggtggagctgatgaaggtcaacctggcccgcgtggtcaccttcccggggcctatgctgcctacctgcgggatccggcgggtaacaaaatcacggcgtatacgtttatctga

SEQ ID NO: 16864 - DNA, 837 bp, Escherichia coli
atggaactcattgagcagcatgccagctctggcggctggcaaaacgtgtaccggcattattcacaatcccttaattgtgaaatgaatttcggtgtgtatcttcctcccaaagcagtaacagaaaaactgccggtactatactggttgtcgggcctgacctgtactgagcagaatttcatcaccaaatcaggtatgcagcattatgcagcccggcataacgtcatcgttgttgtcccggataccagtccccggggtaataatgtcccggatgccgacagttacgatcttggccagggggccggtttttatctgaacgcgacggaacagccgtggaatgttcattacaggatgtatgactatattctcagagagcttccggatgtcgtcatgaatcattttcctgcaacggcaagaaaatctatatccggtcattctatgggagggctgggtgctctggtgctggctctgcgaaatcctggtgaatatgtgagcgtatcagcattttccccgatagtatcgccttctcaggtgccatgggggcaacaggcatttagcgcttacctgggtgaaaacagaaaaacgtgggaagcctacgatccagtcagcctcattttacagggtgaaaaattaccagaaatcttcattgatcaggggctgagtgacgccttttatgaagagcaactgcgcaccaaaatccttgagagagtatgcaatgagatgaacctcaatgcgtcgttccgatatcatactggatacgaccacagctattatttcatttccagctttattggtgagcacattgcttaccatgccaacaggctcaggctgtcagcatga

SEQ ID NO: 16865 - DNA, 1143 bp, Escherichia coli
gtggaacagattaattcaaataaaaaacattctgacagaagaaaatattttgctttgttagcggtagttttatttattgcgctttcaggtgcctatgcctattggtcaatggaattaaaagacatgattagtacagatgacgcctatgtcacgggaaatgcagatccaatttctgcacaagtctcaggcagtgtcactgtcgttaatcataaagatacgaactacgttcgacaaggtgacattttagtttcactggataaaactgatgccactatcgcactcaataaagctaaaaataatctggcaaatattgttcggcaaacgaataaactatacttacaggataaacaatacagtgccgaagtcgcttcagcacgtattcagtatcaacaatctttagaagattataaccgtcgtgtgcctttagcgaagcaaggggttatttcaaaagaagcgctggagcataccaaagatacgttaataagtagcaaagcggcattgaatgctgctatccaggcttataaagcgaataaagctttagtaatgaacacaccattaaaccgtcagccacaagtcattgaagctgcagatgcaaccaaagaagcctggttggcgcttaaacgtacggatattaagagtccggttaccggttatattgcccagagaagtgttcaggtcggcgaaacagtgagtcccggacaatcgttaatggctgtcgtaccggcgcgtcaaatgtgggttaatgccaactttaaagaaacacaactcacggatgtacggattggtcaatcggtcaatattatcagcgatctttatggtgaaaatgttgtgtttcatggtcgggtgacagggatcaatatgggaaccggcaatgcgttctccttattacctgcacaaaatgcgacagggaactggatcaaaatcgttcagcgtgtaccggttgaagtttctctggatccaaaagaactcatggaacaccctttgcgcattggtttatcgatgactgcaactattgatacgaagaatgaagacattgccgagatgcccgatctggcttcaaccgtgacgtccatgcctgcttataccagtaaggctttagttatcgataccagtccgggtgatgctgccaacttactgatttag

SEQ ID NO: 16866 - DNA, 456 bp, Escherichia coli; identical to SEQ ID NO: 7975

SEQ ID NO: 16867 - DNA, 819 bp, Escherichia coli; identical to SEQ ID NO: 6059

SEQ ID NO: 16868 - DNA, 405 bp, Escherichia coli; identical to SEQ ID NO: 9399

SEQ ID NO: 16869 - DNA, 303 bp, Escherichia coli
gtgcggacgccctctgacaccacgaccgaagcgctgtgccgtatcggcgagctgtatggcatcgaggcgggcatccggggcaaaagcgcggcggaacggctggccattcggcaggaaaaagcggtaccgctgctgaccgcgctggagggctggctgcgtgaaaagcagaaaacgctgtcacggcactcggagctgtcgaaggcgttcgcgtacgcgctgaaccagtgggatgcgctgaaattatacctgcgggagattactgatacagaacacgccgggaatgtgccgccattgacgcaatga

SEQ ID NO: 16870 - DNA, 2652 bp, Escherichia coli
atggcaaagaaacttttcggttatcatcccatcctgactgacgacaacaattcagttgtgattcgcggtgctcgcgagaacaaccttaaagaggtggatgtttccattccgcgcaacgcattggttgttttttcgggtgtgtcaggctcgggtaagtcttcactggcctttggcaccatttatgctgaggcgcaacggcgctactttgaatcggttgccccctacgctcgtcgcctcattgatcaggtcggggttccggatgtggatgccattgacggactgccgccagccgttgcgcttcagcaacaacgcggtgccagtaacgcgcgctcctctgtcggcagcgtgaccaccttatccagtctggtgcgaatgatgtactcacgggcgggcgcttatcctgccggacaaccgatgctgtatgccgaggatttttctcccaacacgccgcagggggcatgcccttcttgccatggtctgggccatatctatgaggtaactgaaacactgatggtgcccgatccctcacttagtatccgtgaaaaggctattgcttcctggcccccggcctggcacggacagaatctgcgggatattctggtgacgctggggtatgacatcgacactccctggaaaaatctgccagcggaagaccgtcagtggatcctttttaccgaagacacccccactgtaccggttttcccgggactgagtccggaagatacgcgcgaagccgtcaggaaaaaaatgacgccgggttatatggggaccttcaccggggcacgtcgttatgtgctacataccttcgccagcacgcaaagcgcgttgatgagaaaacgagtctcccgttttatggaaggcaagctgtgtccggtctgtcacgggaaaagactgaagtcagaatcattgtccgtcacctttgccggtgtggacattggtgaatttatgcagatgcccttagaccagctggcggaattgctccttccaatctcccggggggatttcagtgcccaccacgccggcgcagatgccgacagggatatcacccgtcgggatctgacagagcgtgctgcatccggaaaagcggtccattccgataacgccgatgtctgccggacatcggcgttatcggaagagaaacgactggcggcacaacggctgaccggtggtgtcatggcccggttgtatcagttgcagaagctggggctgggttatcttacgctggacagagcaaccccaactctatctgcaggagagcttcagcgactgcgtcttgccacgcaactcagttcgatgctgtttggtgtggtctatgttcttgatgaaccgtctgcgggtctgcacccctcagacagtaaagcgctttacgatgcgcttgagaaccttcgtgatgccggcaactcggtgtttgtcgttgaacatgatcttaacctgatgcgacgggcgcaatggcttgttgatgtgggaccgtcggctggtgaacagggaggacatgttctctacagtggtattcctgaagatctgaaagccgtcacccaatctcgtaccgcgcgttatttatttgatgaagtccggccaccacaatcttttgcccgtatcccatccgggtggctgaaactgcaggggatccatcgccacaatcttaagtggatcgatgttgatattcctctgggtgtgctgacagccgtgacgggagtctctggctccggtaaatccagtctgattgcccaggccttaccggaactggtgctttcttcacttggcggtgagccagaagacgtgctttccgaagccagcgacgctgaggggccatccgtaacggagaaaacgtacggtaccctgaccggtgataccggactggtaaagcgtctggttcaggttgaccagaaaccgataggcaggaccccccgttcaaacctggcgacatataccgggttgtttgatcctgttcgtaagctctttgccggaacgactgacgccaaactccatcattacgatgcgggtcaattctctttcaatgtggcaaaaggccgctgtgcaacctgtgaaggtgaaggattcgtcagcgtggagctgttgtttatgccgagcgtgtatgcaccgtgcccgacctgccatggcgcgcggtataaccgggatactctcaggatctgctggcaggacaaaaatatcgcggaggtcctgcatatgacggtggatgaagccagtcagttctttgcgactgaagaaccagtggctcgtcccctccgtctgctgagtgaaattggtctgggctacctgcgtctgggacaaccagcaaccgagttatccggaggggaggcgcaaaggatcaagctggcaaccgaactacaacgtagccaacgtggccacacgttgtatatcctagatgaaccgacaaccggcctgcatgcttcagacgccgaccgcctccttgtgcagctgcagcggcttgttgatgcagaaaatacggtgataatgattgaacacgatatgcgggcggttactcaggcagaccaggttatcgacatcggtcctggagcgggacatgagggaggacgcctggttgccgcaggaactcccgaacaggtatcgcaggtcaaagaaagccgtaccgcacagtatattgccagggaactctcacggaacggttaa

SEQ ID NO: 16871 - DNA, 426 bp, Escherichia coli
atgacgatgtgtcgggtactgaatgtcgcccgggccgggttctatgcgtggctgcataaccctgtctcggcgcgtgataaagataaccagcgcctgctgatgcttatccgcgactcatattccctgagcggaggcgtatacggttaccggcgggttcatggcgatctgaacgaaatcggggaaacctgtggtagaaaccgggtgggtcggatcatgcaactggaccggattaaagctgtgcgcggctataaagcgccacgtcgtatcgctggcaggccttcagtcgttgctcctaatcgcgtgcagcggcagttcaccgttgtccgggccacccaggtctgggtcaccgatattacttatagtgtgcccggagttcagggcgggcatggatgctcaaatgaaccacgagtctgtctggaatattga

SEQ ID NO: 16872 - DNA, 213 bp, Escherichia coli
atgcgaggcatctcctcaccgatgcgcgtgactcaagaagggcctgacggcttgtctcgttactgtcctgtccgggttatctgtctggagattcaactctgtttcctcacaggagctctgtcatggttgataaagttaccgaagctgccgttgtgggtgggtaagcgtcgtctcagcaccgtctggcagatcctgaaattcctgagaggataa

SEQ ID NO: 16873 - DNA, 510 bp, Escherichia coli
atgactgatattacgaccccttctgtttatgttggcacttaccataaatacaactgcggaagcattgcgggagcctggctcgatctgaccgattttgatagctcagaggagttttacgagcgctgccgcgagttacacgcaaatgaggctgatccagaatttatgttccaggattgggagggtattccgtctggtatggcgtcagagtgccatatcaactgggattttattaacggctttaaacaagcccgcgaggaaggtaacgaagcggcgtttgtggcctttgttgatctgtttaatagcactgatttcgacctgtttagagatgcctatatgggcgaagctaaggacgaagaaacttttgcagaggaatacctgaatgatagcggtctactgaatgatattcctgaatccgtagcccgatattttgacatcgtagcctatgcgcgggatctgtttattggggatttcagtttacatgacggacacgtatttaacatgacttgctga

SEQ ID NO: 16874 - DNA, 486 bp, Escherichia coli
atgaaaaccatttcacataattccaccacatcttctgtttccgtaaccgctgcatcagggaatgaccagcctcagttggttgccaccatagtccctgatgaacagcgcatcagcttctggccgcagcattttggcctcattccacagtgggtgaccctggagccccgtgtcttcggctggatggaccgtctgtgcgaagactactgcggtggtatctggaatctgtacaccctgaacaacggcggggcatttatggcccctgaaccggatgactatgatgacgaaacatgggtactgttcaatgccatgaacggtaaccgcgctgaaatgagcccggaagccgctggcattgccgcctgtctgatgacgtacagtcatcacgcctgccgtacggagtgttatgccatgacggttcattattaccgtctgcgggattacgccctgcagcatccggaatgcagcgccattatgcgcatcatcgactga

SEQ ID NO: 16875 - DNA, 432 bp, Escherichia coli; identical to SEQ ID NO: 8375

SEQ ID NO: 16876 - DNA, 294 bp, Escherichia coli; identical to SEQ ID NO: 7755

SEQ ID NO: 16877 - DNA, 213 bp, Escherichia coli; identical to SEQ ID NO: 5358

SEQ ID NO: 16878 - DNA, 348 bp, Escherichia coli
ttgatcccattaccatcagggacaaagatctggctggtcgctggcatcaccgatatgagaaacggcttcaacggcctggcggcaaaggtgcagacgacgctgaaagacgatccgatgtcaggtcacgtttttatcttccgtgggcgtaatggcagtcaggtaaagctcctctggtctaccggcgatggactgtgtctgctgaccaaacggctggagcgcggccgcttcgcctggccgtcagcccgggatggcaaagtgttcctcacaccggcacagctggcgatgctccttgaaggtatcgactggcggcagcctaaaagactgcttacgtcactgactatgttgtag

SEQ ID NO: 16879 - DNA, 945 bp, Escherichia coli
atgaagcttaagaacaccctcctggcgtcggcactgctttctgctacggcattctccgttaacgcagcaacagaactgacaccggagcaagcggcagcggttaaaccttttgaccgtgtagtgattaccggtcgttttaatgctattggcgaagcggtgaaagccgtttctcgtcgcgcagataaagaaggtgccgcctctttttatgttgtcgacacttctgattttggtaacagcggtaactggcgtgtggtcgctgacctctataaagccgatgctgaaaaagcagaagaaacaagtaatcgcgtaattaacggtgttgtcgaactgccgaaagatcaggctgttctgattgaaccgtttgacacggtcaccgtccagggcttctatcgtagccagccagaagtcaatgatgccatcaccaaagcagcaaaagcgaaaggtgcctactctttctacatcgttcgtcaaatcgatgccaaccagggcggcaaccagcgtattactgcattcatctataaaaaagatgctaagaaacgtatcgtccagagcccggatgtcatcccggcagattccgaagcaggacgtgcagctctggctgccggtggcgaagctgcgaagaaagttgagatcccgggtgttgcgactaccgcatcaccaagttctgaagtcggtcgcttctttgaaacccagtcatcaaaaggcgggcgttacaccgtcacgctcccggatggcactaaagtcgaagaactgaacaaagcgacagcagcgatgatggtcccgttcgacagcatcaaattctctggcaactacggcaacatgaccgaagtctcctatcaggttgcgaaacgtgccgcgaagaaaggtgctaagtattaccacatcacccgccagtggcaggaacgtggtaataacctgaccgtcagcgcagatctgtataaataa

SEQ ID NO: 16880 - DNA, 708 bp, Escherichia coli
atggaaaagaaactgggactgagcgcactcaccgcgctggtattaagctcaatgctgggcgcgggtgttttcagtctgccgcaaaatatggcggcagttgccagcccggcagcactgctcatcggctggggtattactggcgctggcattttattgctggcctttgccatgctgatcctcacgcgcattcgccccgaacttgacggcggtatctttacctatgcccgcgaagggtttggcgagctaatcggcttttgttccgcatggggatactggctgtgcgcggtcatcgccaacgtctcctatctggtgatcgttttttccgcgttaagcttttttacggacacgccggaattgcgcctgtttggcgatggtaatacctggcaatcgatcgtcggtgcatcggctttattgtggattgttcactttttgatcctgcgcggggtgcaaaccgctgccagcattaaccttgtggcgacactggcaaaattgttgccgttgggtctgtttgttgtgctggcgatgatgatgttcaaactggataccttcaagctcgacttcaccggacttgcacttggcgtaccctgtgggttttcattggtgtggaaggtgccgtggttgtttctgcgcgtgcgcgtaataagcgtgatgttggcaaagcgacactgctggcggttctctccgctctgggcgtttatttgctggtaa

SEQ ID NO: 16881 - DNA, 1302 bp, Escherichia coli
atgaaaaaactgtttatccagttttacctgttattgtttgtctgcttccttgtgatgtctctgctggtcgggctggtgtacaaatttaccgccgaacgcgcaggcaaacagtcgctggatgatttgatgaacagttcgctgtatctgatgcgcagcgaattgcgtgagatccccccacacgactggggtaagacgctgaaagagatggatttaaatctctctttcgatctgcgtgtcgagccactgagtaaataccatcttgatgatatttccatgcaccggctgcgtggcggcgaaattgtcgctctggacgatcagtacacttttttgcaacgtatcccgcgcagccactacgtgctggcagttggtcctgttccttatctttattacctccatcagatgcgattgctggatatcgccctgatcgcttttattgccatttccctcgcctttccggtgtttatctggatgcgtccgcactggcaggatatgttaaaactggaagcagcggcgcaacgatttggcgatgggcatctcagtgagcgtatccactttgatgaaggttcgagctttgaacgacttggcgtcgcatttaaccagatggcggacaatatcaacgccttgattgccagcaaaaaacagcttattgacggtatcgctcacgaactgcgaacaccgttagtgcgcctgcgttatcgactggagatgagcgataacctgagcgccgccgaatcccaggcgttgaatcgcgatatcagtcaacttgaagctttaatcgaagagctgctgacttatgcccgactcgaccgcccacaaaatgagcttcatcttagcgaaccagacctgccgttgtggctgtcaacgcatctggcagatattcaggcagtaacgcccgataaaacggtacggataaaaacgctcgcgcaaggccattatgcggcgttggatatgcgcttaatggagcgcgtgctggataatttgctcaataacgccctgcgctactgtcactcaacggttgaaaccagcctgctactgtcggggaatagagcgacattaattgttgaggatgatggcccagggattgccccagaaaaccgcgaacatatctttgaaccttttgttcgcctcgatcccagccgggatcgctcaaccggcggctgcgggctggggctggcaattgtccactctatagcactggcaatgggcggtacggttaattgtgacaccagcgaactgggtggtgcccgcttctcgttcagctggccgttatggcataacatcccgcaatttacctctgcctga

SEQ ID NO: 16882 - DNA, 273 bp, Escherichia coli
atggacaatagcaccatttctctacaggagttgctcgactgcatttccaagcttcgggatgatgtaaatgcccttactgtcgcattttcatatctggcattctcaattcccaaggaacaaatgcaaccaacactggcatcgctccagcttgaatcactcaaccccaaatggtcccagcaacaacaaaattctttcaagtggctggcggtattactggaagaaaaatatgctggtgaaattaccatttcggcggagtcttcagtgaaccagtaa

SEQ ID NO: 16883 - DNA, 438 bp, Escherichia coli
atggggtttagaaaaacaataatcacttcggtaggtttgatatttatttcattctcttttgtggcaaagtgctctcaactcaaaaatttgaataattactcagtgatgctttgtggaaaagtgtcaaataatatcctggatgatattggtggttataaagaaagaaatatattaatgctgcgagctataaaaaaaatcataataatgacaatcgtaaatattatatttttctattcctttcaatcgactgcggatgaaatggttttaataaaaaaatacgggtttgggcttgagagagatatcaaaggaaggccattaatttatcctatcgaaaattatgatgagtgtaagaaaaaatgcaatcatatgaattatatagcggatgtcaatgctcaattagctatgagtaaaaaaataacaggatttttgctaacataa

SEQ ID NO: 16884 - DNA, 621 bp, Escherichia coli; identical to SEQ ID NO: 10407

SEQ ID NO: 16885 - DNA, 1227 bp, Escherichia coli
atgaattacgaattactgaccactgaaaatgctccggtaaaaatgtggaccaaaggcgtgccggtagaagccgatgcgcgtcagcaacttattaataccgcgaagatgccatttattttcaaacatattgcggtaatgcctgatgtacacctgggtaaaggttccaccattggtagcgtgatcccgaccaaaggggcgattattccggcggcggtgggcgtggatattggctgtggaatgaacgcactgcgtaccgcgttaacggcggcggacctgcctgaaaacctggcagagctgcgtcaggcgattgaaacggccgtaccgcacggacgtactaccgggcgttgtaaacgtgataaaggcgcatgggaaaatccgcctgttaacgtcgatgcgaaatgggctgagctggaggccggttatcagtggttaacgcaaaaatatccgcgtttccttaacactaataactataaacacctgggaacgctgggtacgggtaaccactttattgaaatttgccttgatgagtcggatcaggtgtggattatgctgcactccggttcacgcggaattggtaacgccatcggaacttattttatcgatctggcgcaaaaagagatgcaggaaacgcttgaaacgttgccatcgcgtgacctggcgtactttatggaaggtacggaatactttgatgattacctgaaagccgtggcctgggcgcagctttttgccagccttaaccgcgatgcgatgatggaaaacgtggtaacggcgttgcagagcgttatgcagaaaacggtaaaacagccacaaacgctggcgatggaagagatcaactgtcaccacaactatgtgcaaaaagaactgcactttggcgaagagatctatgtgacgcgtaaaggcgcggtgtctgcgcgtgctggtcaatatggaattattcccggttcgatgggggcgaaaagctttatcgtccgtgggctgggaaatgaagagtcgttctgttcgtgcagccacggtgccgggcgggtaatgagccgtactaaagcgaaaaaactgttcagtgtggaagatcaaatccgtgccaccgcgcatgtggagtgccgtaaagatgccgaggtgatcgacgaaatcccgatggcgtataaagatattgatgcggtgatggcggcacaaagcgatctggtggaagttatctataccctgcgtcaggtggtgtgcgtaaaaggataa

SEQ ID NO: 16886 - DNA, 1017 bp, Escherichia coli
atgaaaaggatgattgcgctggatggcgcacagggcgaaggcggcgggcagatcctgcgctcggcgctgagcctgtcgatgataaccggccagccatttaccatcaccggcattcgtgccgggcgggcgaaaccggggctgttgcgccaacatctgaccgcggtaaaagcggctgcggaaatttgtagggcaacggtggaaggcgctgagctggggtcgcagcgtctggtcttccgacctggcaccgtgcgcggcggcgattaccgctttgctatcggtagcgccggaagttgtacgctggtgctgcaaacggtgctgcccgcgctgtggtttgccgatggaccttcgcgtgttgaagtgagcggcggcaccgataacccgtcggccccgcctgcggattttatccgtcgggtgctggagccgctgctggcgagaataggagttcatcagcaaaccacgctgttacgtcacggtttttatcctgccggaggcggcgtggtagcaacggaagtctcaccggtggcatcgtttaatagcttgcaacttggcgagcgcgggaacattgtgcagatgcgtggagaggtgctactggctggtgtgccgcgccatgttgctgagcgtgaaatcgctacactggcgggtagtttttccttgcatgaacagaatattcataacctgccgcgcgaccaggggccgggtaataccgtctcgcttgaagtcgaaagtgaaaatatcaccgaacgcttttttgtcgtcggtgaaaagcgcgtcagtgccgaggtggtcgcggcacagttggtgaaagaggtgaaacgctacctggcaagcccggcggcggtgggggaatatctcgccgaccaactggtgctaccgatggcgctggcgggggcgggagaatttacggtcgcccatccctcatgccatctgcagaccaatatcgcggtggtggagcgtttcttgccagtgcggtttagtctgatagaaacagatggcgtaacgcgggtgagcattgaatga

SEQ ID NO: 16887 - DNA, 1005 bp, Escherichia coli
atgcagaacatcacacttattggtatcgatctcggaaagcactccttccacattcattgtcaagacaagtctggtaaggctcttctgcgtaaaaaatttacccgtactaaactgatgcagtttctggcgacatgtccgccctcagttgttgtaatggaagcctgtgcgggtgcacactttatggctcgctgtatctctgattttgggcatgaaactaagctgatttctccacagttcgttcgcccgtttgtcaaaagtaataagaatgattttgttgatgcagaagccatatgcgaagcggcttcacgaccatcaatgcgttttgtccagccaagaactgagacccagcaggccatgagggcgttacaccgggtcagagaatcgctcatcagagataaggtgaaaacaaccaaccagatccacggtttcttgctggaatttggaatcagcctgccgataggtgatgctgtaataaaacggttgtctctcgtgttggctgaacacgaaatccccgaatatctgagccgccttttggtgaggttgcatacccactacttttaccttgttgagcaaatagcagagctggaatcagaattaagtcagtcaatcaacgctgatgataccgctcagcgcattatgacaattcctggtgttggtccgattactgccagcttactatcgtcgcaacttggtgacgggaaacagttctcatgcagcagggattttgcagcttccacaggacttgttccccggcagtataacactggaggaaaatcgactctgttgggtatcagtaagcgaggtgataaaaatttacgccggttactggttcagtgtgcccgctcattcataatgcgacttgaacgcaagcatggaaaacttgctgagtgggttcgggagcaactcaacaagaagcattcgaatgtggttacctgcgctctggcaaataaactggctcgaattgcctgggcaatcactactcagaaaaaagaatatcaggcctga

SEQ ID NO: 16888 - DNA, 606 bp, Escherichia coli
atggcaaaaatgagagccgttgacgcggcaatgtatgtgctggagaaagaaggtatcaccaccgccttcggtgttccgggagctgcaatcaatccgttctactcagcgatgcgtaagcacggcggtattcgtcacattctggcgcgtcatgtggaaggtgcttcgcacatggcggaaggttatacccgcgcaacggcagggaatatcggcgtatgtctggggacttccggtcctgcgggcacggacatgatcaccgcgctctattccgcttctgctgattccattcctattctgtgtattaccggccaggctccgcgcgcccgtctgcataaagaagatttccaggccgttgatattgaagcaattgctaaaccggtcagcaaaatggcggttacagttcgtgaagcggcgctggtgcctcgtgtgctgcaacaggcgtttcacctgatgcgttctggtcgcccgggtccggtactggtggatttaccgttcgacgtacaggttgcggaaatcgagtttgatcctgatatgtatgaaccgctgccggtctacaaacctgctgccagccgtatgcagatcgaaaaagctgtagaaatgttaatctag

SEQ ID NO: 16889 - DNA, 291 bp, Escherichia coli
atgattgacatagtttcccaaacggaaaaattacttccctgcttggaagaaaatctgcgagcacatataaaatggaaacagcacggcggcccttgtgaaatccccaatggcctggcgttttgcgcaattcaccataaagcctttgataaaggatcgattggtctggatgaaaatatgcgggtactggtctcggatgcggtaaacggcggagggattgttgagaggttattctggtattttgacgggaaaactattgcgttgccacaggtgcgtaaaaattaccctttttag

SEQ ID NO: 16890 - DNA, 543 bp, Escherichia coli
atgcactctcaaatctgggttgtgagcacgctgcttatcagcatcgtgttaattgtactgaccatcgtgaagttcaaattccacccgtttctggcgctgttgctggccagcttcttcgtgggaacgatgatgggcatggggccactggatatggtaaatgctattgaaagtggaattggcggaacgctggggttcctcgctgcggttatcggccttggcacgatactgggaaaaatgatggaagtatccggggccgcagaaagaattggtctgacacttcaacgctgccggtggctttcagctgatgtcattatggtgctggttggcctgatttgcggcatcacgctgtttgttgaagtgggcgtcgtgctattgattcctctggctttttcaattgccaaaaaaaccaatacctcattgttaaagctggccattccgctgtgtaccgcattgatggcagtgcactgcgtggttcccccacatccggctgctttatatgttgccaataagctgggcgcagatatcggttcggtgatcgtctaa

SEQ ID NO: 16891 - DNA, 255 bp, Escherichia coli
atgcattcggaaaatattgcggcttacgtcgggctggatgtgcataaagaaacgttggcggttgctattgctgcacctgaacggcttggcgaagttcgttattatggtacgattaacaacgaagcccaggctgtacgtcgattatttcagaaattgcagggactttacggaaacattctttcctgctatgaggctggcccctgtggttttgggctatatcatcaactcacgatatttataattaaatgcgcataa

SEQ ID NO: 16892 - DNA, 249 bp, Escherichia coli
atggcgttattgctattgacggtgatgacgtgcgcccactgtaaaaagtgggtagtaaaagtggggagtgtggggaatttaacaaaattgaaacgtgattccccactttcccacctgtatataccccaaaaagtggggaataaaaaacacattgaaaaacatcacgttagaatcacaaaaaaaagaagtggggagacgttgggtaatttcaaaaagtgggtagtaaaagtggggagcagtgaggaatga

SEQ ID NO: 16893 - DNA, 1416 bp, Escherichia coli
atgaaactggcaccgaacttaaaaaaacagccacacgacaaaatgaccgaagtcattatttttgcgggtagtgatgcctgggcgcacgcgaaacagtggcaggaacaggacgggcgacttgctggtgataacgtcccgcctgtatggctgggagacagccagcttgacgaactggcagacctgaaaattatcgacgatggtcgctattgtgtccggctgtacaaggcaggccacatcaagccgtcaaatattaatgctatcgggcaaaagctggcggcggcaggtgtacgggatgcgaattattaccctgatggaatgcacagccagaagctggagaactggcacgactacctgcaacggatccgcgaacaggcagagcgcggggaaatacttactgacgagcaatacagccagcgaaaaaccacgctaccaatgagcattggatctgcagggtacgacacacagcttgattatgtcgttaagggcgtgattccggctaattcattgtgcagcacatacggcgcgagcggttcctataaatcgttcctcgcgtgttcctgggcgtgtcatgttgccactggccgtcactggggaggccgcagggtggcgcatggttcggtgatgtatgttgtcggtgaaggtggcattggtgtcccccgccgtatcaaggcatgggaaatcgttaatgatgaacgggtggaaaatctgtacctggtaaaccgcccgatttttccggcagtcccgcttgatgttgatgaaatggtcatcgcttcccgccaggttgaacgggaaacgggtaaaccggtacgcatgattattcttgatacgctggcgcgttgctttggcggtaatgatgaaaatgacgcgcgggatatgggggcgtttatccgtggatgtgacgaactgaaacgccgcacaggggccacggtgctggtggttcaccattccggcaaggatgaaacaaagggggcgcgtggttccagtgcatttcgtgcatctctggacgctgaataccgtattcgccgtgaaggtgcagacagtgaagccctggttatctcctgcacaaaaatgaaggacgcggaggaactgaaagaggccgcatacgatttacgtgtggtggagctttttaccgacactgacggggagttaatcacgtcgctggttgttgtggataagccgcgcccacccgttgaactggagcgcatcgaggaagccgggaacaagacggagaatcatgccgcgctatggggctgtatccgttcacgcacacagcgcggagataaatgcactattccgttgttgcgcgatgatatgaaaaagctggggtatgagatgaaacacttccggcgctggctgtacaagctggaaggtgatggcgttattgctattgacggtgatgacgtgcgcccactgtaa

SEQ ID NO: 16894 - DNA, 300 bp, Escherichia coli
atgaaacagaaaaattctggctttactgccagtggtctccctcggcctgaaatccgccccggcgatattttccgggataactacggtggcacggtaacgattaaaagcgtggcggggcggtgcgttacttaccgccgtgatgggtacggctatgactgcgtgatgcctgcttatcagttccggcgtgatttttcactgatacaggccacaccacgcaaacagcccaccagcaacgcaaaggcacgggcaaatattcagaaaatgaaaaacatgattaacgcattcaggggcaaaaaatga

SEQ ID NO: 16895 - DNA, 219 bp, Escherichia coli
atgcgaaataaacatgatattgaagacctggcatttgaagccctgcactctgcgaaaaaaatcagggaagtcgtcaatatgtggatgaacagccttagcaccgatgaatccgatagcagagaggaaattcttatttctttgttgttagacctggcaaatacacaggtttctctgacatctgatattgaactcgccgctaaaaatctgcctctggagtaa

SEQ ID NO: 16896 - DNA, 213 bp, Escherichia coli
atgaataataatgaagcgcacttatctgtagtgctgaatgtgccgtcagattatacggggcgcgtactggtgtatctggaaaaaggccgggttaaatgccagtgccgtttaatggaaaacgaatttatcagcactcttgcgggattttctgaaatgctcactaaatcgggtgttagtgcagaccagttacgcgggggcgattatgcgaaataa

SEQ ID NO: 16897 - DNA, 237 bp, Escherichia coli
atgtgcaataacacccgtccggacgcagccgccgaagcaatcaaaacactgattgatgcgctgattgatatttctgttatcgcggacagggcgcataagcacgctaccagtgaaacagaatatgccggggctttcgttcctcattcactggctgtaatgcaacttagtgctgatatggcactgaatgaggccagcaaaattatcatggctgatatggaggtggtgagccatgaataa

SEQ ID NO: 16898 - DNA, 207 bp, Escherichia coli
atgagaaatcataccatacacccgcaagggcgggactcgcacaacctgaataaatacatctggcgttttatcgccctgagtacggcacaaccgcgcgtgattaccattgaggccaccagcgaacaggaagcccgtcagcaatcaccggctggctgcgtgatggtattcgccgcccgtattcgtcagggggggcaccatgtgcaataa

SEQ ID NO: 16899 - DNA, 306 bp, Escherichia coli
atggcaacggctaacaaaaacgcaaaatcacaactgacaactgtcagagtcccactagatgttatgcaagggatggaatccgttaagctggacggcgaaagcaatgccggatttatcgtaaccgccatgcgcggagaaatagcccgccgccaagcagaaggcagcggagaaaatccccttgtgtcgtcactggatgccctggctaaggtcgaacaaatcggcatcaaagcagcggaagaaatcgggcagcttgtcaccgttgcacgcgaagaactccagcgtcgcaagaccaaagaaccagagtaa

SEQ ID NO: 16900 - DNA, 192 bp, Escherichia coli
atgtacaaaaagccagtaaaacgactgaaaatcaactttttagggtgtcagtcagatgttaatcaagtttgttccagattgttcgccgttgttcgtcgtggtgtctcgttgtttcacgttgtgtcagttctaaaaaatcgcaaaaaaaattatatttctctggctattggcagtgtggttacgtttttgtga

SEQ ID NO: 16901 - DNA, 1230 bp, Escherichia coli
atgagcagagcacttaacaaactgagcgatacacagctaagaaaaatcaacggcacaccagccccaaaaaccacatttcttaatgacggtggaaacctgagcgtcaggcattccaccagcggcttattaacctggtatttcacctacagagcaggagctggacgccaggtatcaccggaacgcctgaagctgggaaattatcctgatctgagcctgaaagcagccagggaaaaagcggcacagtgtcgcgcatggctggcagaaggaaaaaatccacgccatgagcttaattactccatacaggaagcactaaagccggtaacggtgggtgatgcgatcagctactggctggaaatgcacgtaaaggaaaaccgtgtcgattacgtatgcctgaaaagccgcctgaataatcacgtcatacagcatattggcaatatgccactggataaatgcgagttacgtcactggctggcctgttttgaccggatacgcaaaaaatcccctgtaacgtctggtcacatgatgcaggcgtgtaaacaggcgcttaagttctgccgtaaacgtcgctacgcagtcagtaacgttctggatgatcttaacgtggtggacgttggcaaaaaaccaggcataagcgaacgcgtgctgagcaacaaagaacttggcgaattattacaggcgctggataaaaaaatattcccgccctactacagcgcactaatccgcctcctgattgtgttcggctgccgaaccggagaactgagattatcggagatcagggagtgggattttaaggaaatgctctggacagtaccgaaagagcacagcaaaacgaaggtcgccatattcaggccaataccggaaagcattttaccgttcgtcacgcagctggtggagcagaacagacacacagggctattactcggggaactgaaacaggaagccagtgtgtcgcaatacggcagattcatgcacaaaaaattaaaccatccgcactggtcactacacgatatacggcgcacgtttaccacgatgctgaacgatttaggcgtggatccgcatattgtcgaacaactcaccgctcaccagatgccagggatgcagcgagtctataaccactcccgttatctcgatgcgaaacgtaatgcgctggacatgtggacagagcggttagagatactggcgggtactcacaaaaacgtaaccacactgccaatagccagagaaatataa

SEQ ID NO: 16902 - DNA, 285 bp, Escherichia coli
gtggttcgggtgaaattcgtgaaatcggcacagcggctggggttcagtctggacgagattgccgagctgttgcggctcgacgatggcacccactgcgaggaggccagcagcctggccgaacacaagctcaaggacgtgcgcgagaagatggccgacttggcgcgcatggaaaccgtgctgtctgaactcgtgtgcgcctgccatgcacgaaaggggaatgtttcctgcccgttgatcgcgtcactacagggcgaagcaggcctggcaaggtcagctatgccttag

SEQ ID NO: 16903 - DNA, 327 bp, Escherichia coli
atgctccttaaggaactcgatgcgtacgccgcgctgggtgaggccctgcaccaggcggcgcaggtcgtcgaggttgcgcgccagacgatccatgctgtgcaccacgaccgtgtcgccttcgcgcacgaaggcgagcagccgttccagttcgggccgccgtgtgtccttgcccgacgccttgtcggtgaacactttatccacctggatctgttcgagctgccgttctgggttctggtcgaagctgctgacgcggacgtaaccgatgcgctgaccgtgcaaggtatcctcctgagggaaatgtgtcaggaagaaatctatgacccttga

SEQ ID NO: 16904 - DNA, 780 bp, Escherichia coli
gtgatcgccgaagtatcgactcaactatcagaggtagttggcgtcatcgagcgccatctcgaaccgacgttgctggccgtacatttgtacggctccgcagtggatggcggcctgaagccacacagtgatattgatttgctggttacggtgaccgtaaggcttgatgaaacaacgcggcgagctttgatcaacgaccttttggaaacttcggcttcccctggagagagcgagattctccgcgctgtagaagtcaccattgttgtgcacgacgacatcattccgtggcgttatccagctaagcgcgaactgcaatttggagaatggcagcgcaatgacattcttgcaggtatcttcgagccagccacgatcgacattgatctggctatcttgctgacaaaagcaagagaacatagcgttgccttggtaggtccagcggcggaggaactctttgatccggttcctgaacaggatctatttgaggcgctaaatgaaaccttaacgctatggaactcgccgcccgactgggctggcgatgagcgaaatgtagtgcttacgttgtcccgcatttggtacagcgcagtaaccggcaaaatcgcgccgaaggatgtcgctgccgactgggcaatggagcgcctgccggcccagtatcagcccgtcatacttgaagctagacaggcttatcttggacaagaagaagatcgcttggcctcgcgcgcagatcagttggaagaatttgtccactacgtgaaaggcgagatcaccaaggtagtcggcaaataa

SEQ ID NO: 16905 - DNA, 786 bp, Escherichia coli
atgatgcagcatgaaggccatgtgagaatcctcaaatccttgaaactctttggcatggcacacgccattgaggagttgggcaatcagaattcaccagcatttaatcaagccttgcccatgctggacagcttgattaaagctgaagtggcagagcgtgaagtacgttcggtgaactatcaattgcgggtggccaagttccccgtgtatcgggacttggtgggctttgacttcagtcaaagcctggttaatgaggccacggtcaaacaattgcaccggtgcgacttcatggaacaagcccagaacgtggtgctgattggtgggccaggcacaggcaagactcacctggccacagccattggtacacaagcagtgatgcacttgaaccgacgggtgcgtttcttctccaccgtggatttggtcaatgcactggagcaagagaaatcatctgggcgtcagggacaaatcgcaaaccgtctgttgtatgccgatttggtgattctggatgagctgggatatttgccttttagccaaaccggtggggcactgctgtttcacctgctctcaaagctgtacgaaaaaaccagcgtgatactgaccaccaacttgagcttctcggaatggagccgagtgtttggcgatgaaaagatgacaacagcgttgttggaccgactaacccaccactgccacatcctggaaaccggcaatgaaagttaccgcttcaaacacagttcaactcagaataagcaggaggaaaaacagacccgcaaactgaaaatcgagacataa

SEQ ID NO: 16906 - DNA, 645 bp, Escherichia coli
gtgcaagaggcctttgccgatgaacaaggcgagttgatggcgctacccaatgcctttgatgcattcgtggagcaaaccaagcgagtcacttcaacctgccttgttcaccacgagggcaatcgctacagcgttcctgccagttacgccaacagggccatcagccttcggatttatgcagacaagctggtgatggctgccgaaggccaacacattgccgagcatccaagattgtttggcagtggccacgctcggcgtggccacacacaatacgactggcaccattacttgtctgtgcttcagaagaaacctggggcgttgcgcaatggtgcgccatttgctgaattgccacccgcgttcaagaagcttcaatccatcttgctgcaacgccccggcggtgaccgtgacatggtggaaattctggcccttgtattgcaccacgatgaaggtgcggtactcagtgctgtggaattggcattggagtgtggcaagccatcgaaggagcatgtgcttaatctgttgggacgtttgaccgaagaacctccacccaaaccgattccaattcccaaggggttaaggctgacattggaaccacaggccaacgtgaaccgctatgacagtttaaggagagcccatgatgcagcatga

SEQ ID NO: 16907 - DNA, 705 bp, Escherichia coli; identical to SEQ ID NO: 8686

SEQ ID NO: 16908 - DNA, 1089 bp, Escherichia coli
atgattcagtacattcgtattcaaaattttcgctcagtaaaggatatcgcgctggagctcgggccgctgaacattgtcttcggccctaacggctgcggtaaatccaatatttataacgccatccacctgctgaccgctgccgctgagggcaggctttcggggtttatcagcgaagagggcggtctggagaatatgatgtggtccggggagcgttcgcccctcgatcgtcacccccgccggctgcaaatcgcctgccggaccgacagcttcgattatgaactgcagataggcttccctgaaaaattgccctatccgacgcaattcatgctcgatcctatcgttaaagaagagaatatctggctggccggctactcccgccggccttcctcccgcgtactgcagcgcaagaatcaggcggcgtttctcgtcgatgtcaccggggagaaaagtactttcaccgagagtatttatgaaaatgagtcggtgttcggtcagcttggcgagccgcaccgttttcccgaagtatcgcgagtgcgggagacgctgcgccgttggcggttttatcatgaattcgcgattggccgtcattcgccactgcgtcagccggccgtgggttaccgttcgccagtcctcgacagcgatggccagaatctcgccgccgcctttcagaccattgtcgagatcggcgcggaggagattttgcatgaaatccttgccgacgcctttcccggctgccagttttattgtgaaaacgagcactcgcgtttcgctctgaaaatgcgtcgcgaagggatccgccgcccgctgctggcggcggagatgtccgacggtacgctgcgctttttgtgcctcgccgtcgcgctgctcagtccgcgcccgccggcgtttctggcgatcaatgaaccggagaacagcctgcatcgcgacatgttgcccgcgctggcccggctgattatcgaggcctcgcgctacagccagatctggctgaccagccactcggcggagctggcggagcttatcgccgccggggcgccttgtcagcgctatgcgctggagaatcgcggcggtgagacgcggattgtcgagtga

SEQ ID NO: 16909 - DNA, 261 bp, Escherichia coli
gtgcacccgataattaaggtcatgctggtgggcggtaaggcggacgggctgttggtcagcgtcgccgatgacgcgaccgaagtctcggtgacgcctgcgcagtacggtgcgctatccgggcaatcgttgagctaccgaattgttagccaaaccattgacgatgaacgctatttttttggcgttttcagcgacgcccatcaggatagcgataagctgacgcgggtcgccctgacccgtggaatgaaaaaaatgttctgttaa

SEQ ID NO: 16910 - DNA, 861 bp, Escherichia coli
atgcgttatattcgcctgtgtattatctccctgttagccaccctgccgctggcggtacacgccagcccgcagccgcttgagcaaattaaactaagcgaaagccagctgtcgggccgcgtaggcatgatagaaatggatctggccagcggccgcacgctgaccgcctggcgcgccgatgaacgctttcccatgatgagcacctttaaagtagtgctctgcggcgcagtgctggcgcgggtggatgccggtgacgaacagctggagcgaaagatccactatcgccagcaggatctggtggactactcgccggtcagcgaaaaacaccttgccgacggcatgacggtcggcgaactctgcgccgccgccattaccatgagcgataacagcgccgccaatctgctactggccaccgtcggcggccccgcaggattgactgcctttttgcgccagatcggcgacaacgtcacccgccttgaccgctgggaaacggaactgaatgaggcgcttcccggcgacgcccgcgacaccactaccccggccagcatggccgcgaccctgcgcaagctgctgaccagccagcgtctgagcgcccgttcgcaacggcagctgctgcagtggatggtggacgatcgggtcgccggaccgttgatccgctccgtgctgccggcgggctggtttatcgccgataagaccggagctggcgagcggggtgcgcgcgggattgtcgccctgcttggcccgaataacaaagcagagcgcattgtggtgatttatctgcgggataccccagcgagcatggccgagcgaaatcagcaaatcgccgggatcggcgcggcgctgatcgagcactggcaacgctaa

SEQ ID NO: 16911 - DNA, 669 bp, Escherichia coli
ttgcaacagtgcctccgtcgggacgtcagtaaactggaggagcaggggctgctggtcagcgtctcgggcggcgtgcgcgccgtcagccggctggctgcggaacccagtcatctggtgaaaagcacgctgcagagtgaggagaaacaggcgatcggcgcgctggcggcgagtcatatcgctaaaaacagttgcatctatctggatgccgggactaccaccctggcgctggcgcgggcgatcctcgaccggaacgatctccaggtggtcaccaatgattttgagataacccagctgctgatcgatgccagccagtgcggcgtgatccacaccggcggcactctgtgccgggagaaccgctcctgcgtgggcgaatcggcggcgcgtacgttacgccacctggctatcgatacggcctttatctccgccagcggctgggacagtcgcgggatattcacccctgatgagaacaaggttaccgtcaaggagaccgtcagccaggtcagcgcgagaagcatcctgctgtgcgacagttcgaaatacaatcaggtggccacgtttatggcgttacctttgacccggttcaccaccatcattaccgaccggcatctttccgatgccgccgccagtcatatcgcccggcacgcctgcgaggtgctgcgggccggataa

SEQ ID NO: 16912 - DNA, 2085 bp, Escherichia coli
atgcaaacccatcatgatttacctgtttcaggcgtatccacaggggaaattgcctccgagggttacgatctggatgccctgctgaaccagcattttgctggtcgcgtggtgcgtaaagatctcaccaagcaactcaaggaaggggcaaacgtcccggtgtatgtgctggagtatctgctcggcatgtactgcgcctctgacgatgacgatgtggtcgagcaagggttgcaaaacgttaagcgtattctggctgataactatgtgcgcccggatgaagcagagaaagtgaagtcgctgatccgcgagcgtggttcgtacaaaatcatcgataaagtgtcggtgaagctaaaccagaaaaaagacgtttacgaagcccagctttctaacctcggcatcaaagacgcgctggtgccatcacagatggttaaagacaacgagaagctactgacgggcggtatctggtgcatgattaccgtcaactatttctttgaagaagggcagaagacttcgcccttctcattgatgacgcttaagcctatccagatgccgaatatggatatggaagaagtgttcgatgcgcgtaaacactttaaccgtgatcagtggatcgatgtgctgctgcgctcggtgggtatggagcccgccaatattgagcaacgcaccaaatggcaccttatcacccgtatgatcccgttcgtggagaacaactataacgtttgcgagctggggccgcgcggcaccggtaaaagccatgtgtataaagagtgttctcctaactccctgttagtttctggcgggcaaacgaccgttgccaacctgttctacaacatggccagtcgccagatcggcctggttggtatgtgggatgtggtggcgttcgacgaagtcgcggggatcactttcaaagataaagacggcgtgcaaatcatgaaagattacatggcgtcaggatctttctctcgcggcagagattcgattgaaggtaaagcgtcgatggttttcgtcggcaacatcaatcaaagcgtagagacactcgttaaaaccagccatttgctggcgccgtttccggctgcgatgattgataccgcctttttcgaccgctttcatgcctatattcccggttgggaaatccccaaaatgcgcccggaattctttaccaaccgttacgggctgattacggattatctcgctgaatatatgcgcgaaatgcgcaaacgcagtttctctgatgcgattgataaattctttaagctgggtaataacctcaaccagcgtgacgtcattgccgttcgacgtaccgtgtcggggttgttaaaactcatgcatcccgatggcgcgtacagcaaagaagatgtgcgagtctgcctgacctatgcgatggaagttcgtcgccgcgtgaaagagcaacttaaaaaactgggcggcctggagttcttcgatgtgaactttagctacatcgataacgaaacgctggaagagttttttgtgagcgtaccggaacagggcggcagcgaacttattcctgccggaatgccaaagccgggcgttgtgcatctggtcactcaggcagaaagcggcatgaccgggttgtatcgttttgaaacgcagatgactgctggtaatggtaagcatagtgtatcgggtctgggttcaaatacctccgcgaaagaagctatccgcgtcggtttcgattacttcaaaggcaatttgaatcgggtaagcgcggccgcgaaattctccgatcatgaatatcaccttcatgtcgttgaactgcataatactggcccaagcaccgcaaccagtcttgctgcgcttatcgctttatgttcgatattgctggcaaaaccagtgcaggaacagatggtggtgttgggcagtatgacgcttggtggagtaattaacccggtgcaggatcttgccgccagtttacagctcgccttcgacagcggcgcaaaacgagttctgttgccgatgtcctcggctatggatattccaacggttccggcagagttatttaccaagtttcaggtgagtttttactcagacccggttgatgctgtttataaggcgctgggtgtgaattaa

SEQ ID NO: 16913 - DNA, 2598 bp, Escherichia coli
ttgcaaaatcaggactttattgctggccttaaagctaaatttgccgaacatcgcatcgttttctggcacgatcccgataaacgttttattgaggaactggaacagctcgagcttgaaaacgtcacgctaatcaacatgacccacgcgtcacagctggcggtgaaaaaacgcatcgagattgatgagccagaacagcagttcctgctgtggttcccccatgatgcgccgcctcatgaacaagactggctgctggatatccgcctttacagcagcgaattccatgccgattttgccgccatcaccctgaacacgctgggcattccccagcttggcctgcgcgagcatattcagcggcgcaaggccttcttcagcactaaacgcacgcaggcgctgaaaaacctggtgacagaacaggaagatgaagcctcgctggataagaaaatgattacggtgatcgctggcgcaaagaccgcgaaaaccgaagacattttgttcaacctgattacccagtacgttaaccaacaaacagaagacgacagcgaactggaaaacacgcaggcgatgctgaaacgccacggtctggacccggtattgtgggaaatgctcaaccacgaaatgggctaccaggcagaggagccatcgctggaaaatctactcctgaaactgttttgtaccgatctctctgcccaggccgacccacagcaacgtgcctggctggaaaaaaatgtcctgctaacgccatccggcagagcatctgccctggcatttatggtgacctggcgtgccgatcgtcgctataaagaggcttatgactactgcgctcagcaaatgcaggccgccctgcgcccggaagatcattaccgactcagctcgccgtatgatttgcacgaatgcgaaaccaccctcagcatcgaacaaaccattattcatgcgctggtaacgcaactgctggaagagagcaccacgctcgatcgggaagcctttaaaaaactgctctctgaacgccagagcaaatactggtgccagacacaacctgagtattacgccatctatgacgcactgcgccaggcagagcggttgctgaacctgcgcaatcgccacatcgatggtttccactaccaggacagcgccaccttctggaaagcctactgcgaagaactgttccgcttcgaccaggcttatcgcctgtttaatgaatatgccctgctggttcacagcaaaggggcgatgatcctcaagagcctggatgattatatcgaggcgctctacagcaactggtatctggcagaattaagccgtaactggaacgaagtgctggaagcggaaaatcgtatgcaggcgtggcaaatccctggtgtgccgcgtcagcagaactttttcaatgaggtggtgaagccgcagttccaaaatccgcaaatcaaacgcgtgttcgtgataatttccgatgccctgcgttatgaagtggcggaggagctggggaatcaaatcaataccgagaaacgctttaccgcagaactgcgatcgcagctcggcgtgctcccaagctacacccaactgggaatggcggcgttgctgcctcatgaacaactttgttatcaaccgggtaacggtgacattgtttatgctgatgggctgtcgacctcgggtattcctaaccgcgataccattctgaagaactataagggaatggcgataaaatcgaaggaccttctggagttaaaaaatcaggaagggcgagaccttattcgcgattacgaagtggtgtatatctggcataacacgattgatgccaccggcgacacggcatccacggaagataaaaccttcgaagcgtgccgcacggcggtgactgaactgaaagatttagtcaccaaggtaatcaaccgtctccacggcacacgcatttttgttacggcggatcacggtttcctgttccagcaacaggcgctttcggttcaggataaaaccactctgcaaattaagccggaaaacactatcaagaaccacaaacgctttattatcggccatcagcttcccgccgatgatttttgctggaaaggaaaagtggcggataccgcaggcgtgagcgacaacagcgagttccttattccgaaagggatccagcgcttccatttctctggcggcgcgcgctttgttcatggcggtaccatgttgcaggaggtttgtgttccggtattgcagataaaagccctgcaaaaaaccgccgcagaaaaacagccgcagcgccgcccggtggatattgtcgcttaccatcccatgattaagctggtgaataatatcgataaagtgagcctgttgcagacgcatccggtgggcgaactttatgaaccgcgtatcctgaacatttacattgtcgacaacgccaacaatgtggtctcgggcaaagagcgcttcagctttgatagcgataacaacaccatggaaaaacgcgtgcgcgaagttaccctgaagctgattggcgctaacttcaaccgtcgcaatgagtactggttgatactggaagacgcacaaacggaaacggggtatcagaagtacccggtcattatcgatctggcgttccaggatgatttcttctaa

SEQ ID NO: 16914 - DNA, 3615 bp, Escherichia coli
atgaataccaataacatcaaaaaatatgccccacaggcccgtaacgacttccgcgatgcggtgatccagaagctaacgacgcttgggatcgctgcagataaaaaaggcaatctgcagattgccgaggccgaaaccattggcgagaccgtgcgttacggtcagtttgattacccgttatcgacccttccccgccgcgaacggctggtaaaacgcgcccgggagcagggttttgaggtgctggttgagcactgcgcctacacctggtttaaccgcttatgtgcgatacgctatatggagctgcacggttatcttgatcacggcttccgtatgttatcccacccggaaaccccggccgcgtttgaggtgctggatcatgtgccggaagtggcagaagctctgctgccggaaaataaagcgcagctggttgaaatgaagctttccggtaatcaggatgaagctctgtaccgtgaactgctgctggggcagtgccacgccctgcaccacgcgatgccgttcctgtttgaagcggtagatgacgaagcggaactgctgctgccggataacctgacccgtaccgactccattctgcgtgggctggttgatgatattccggaagaagactgggagcaggtagaggttatcggctggctgtatcagttctatatttcggaaaagaaagatgctgtgattggcaaagtggtgaagagcgaagatattcctgccgccacccagctgtttacgccaaactggattgtgcagtatctggtacagaactccgttggccgccagtggttgcagacctacccggactcaccgctgaaagacaaaatggagtactacattgagcctgcggagcaaacgccggaagtgcaggcgcagctggcggcgattaccccggccagcattgaacccgaaagtattaaagtgctcgacccggcctgcggctccggtcatattttgattgaagcctataatgtgctgaaaaatatctacgaagagcgtggttatcgcgggcgtgatattccacaactgattctggaaaataatatttttggtcttgatatcgacgaccgggcagcacagctttccggttttgcattattaatgatggcgcgtcaggatgaccgcagaatatttacccgcgatgtacgtctgaatattgtctctttgcaggaaagcctgcatctggatatcgccaaactctggcagcaactcaatttccaccagcagatacaaaccggcagtatgggggatatgtttgctgaaaataacgcgttaacacaaaccgacagcgcagaatatcagctgctgctgcgcacgctgaaacgctttgtgaatgccaaaacgctgggttcactgattcaggtaccgcaggaagaagaagcggaactgaaggtattcctggatgcgctgtatcgcctggaacaggaaggcgatttccagcagaaggccgcagcgaaagcgtttattccgtttattcagcaggcgtggattctggcgcagcgatatgatgcggtggtggcgaatccgccgtatatgggcggcaagggaatgaatggtgagctgaaagagtttgccaaaaataatttcccggatagtaaagctgatttgtttgcaatgtttatgcagcatgcattttctttacttaaagaaaatgggtttaatgcacaaataaatatgcaatcttggatgtttttatccagttttgaggtgctacgtgaatggctgatcgaaaacaaaacgtttgttaacatgattcacctcggatctcgagcatttgcggagatttcaggcgaagtcgtacaaacaactgcatgggtaatgaacaattatgagatcaataaatatcaacctatatttttcaggttaattgaaggtaacgaatctcaaaaaaataaaactttaaaaaaacgtgaaagtaactataaagacatcactgttgatgatatgaaaaacatacccggagcaccaatcacgtattggttaaagggcatacataacttcaagcgagctaagctagctcattatttcttatcgggtggaagaaataaaactcataacaacgatctttacgttagatacttctgggaagtttctttgaaagaaaaaaaatgggttacctatgcaaatggtggagagtccagaaaatattatggaaatgatcaatatgtaattaactggagtgatgaagcgaagctttactatgactcgcatggtggcctttccaattctaagttttggaataaattaggtataacatggtcccttattggcacaaaaagtatttcatttcgtattaaaccaaaacatctccaatacagttcgggatcacctgttattttttgcgaggatttaaatcaaacatatgttactctggcatttttaaactccactgttggtcaatattatctttcagcaatcagccctactattaacactacagtaaatgatgttttatcgttaccagttcctgaactagactgcatgcatagtgataaaataatttcactgactgaaagttatataaatattagctcagatgactggaattctttggagacatcacctgaattcaaaaaaaacagtttagctttcaatattgcaaaacaaaaaaaaataaaaaaatcatgtttgtatttgcaggagaaaaacaacgccaccttgataaaagctcaggaaattgaaaatgaaattaataaaatattcattagaaattataatctagatgaatactctgaaatcgtaaaagaccgtgacgatataactttatatataaatttaaaacacctttatggtagcgatatctcagataacatacgtcaaaatagatatttttccgatcagttatctgagatgatgtcatattccatcggctgcatgatgggccgctactccctcgatcgcgaaggccttgtctacgcccatgaaggcaacaaaggtttctccgaactcgtcgccgaaggtgcctacaaaaccttcccagctgacagcgacggcatcctgccgctgatggatgacgaatggtttgacgacgacgtcacctctcgcgtcaaagagtttgtccgcaccgtctggggtgaagaacacctgcaggaaaacctcgaatttatcgccgaaagtctctgtttatacgcgatcaagccgaaaaaaggcgaatctgcgctggagaccattcgccgctatctttccacccagttctggaaagatcatctgaagatgtataaaaagcgtccaatctactggctgtttagctccggtaaagagaaagccttcgagtgcctggtgtatctgcatcgctataacgatgccacgctgtcgagaatgcgtaccgaatatgttgtaccgctgctggcgcgttatcaggccaatatcgatcgcctgaacgatcaacttgatgaggcgtctggcggtgaagccacacgtctgaaacgcgaacgcgacagcctgatcaaaaaattcagcgaactgcgtagctatgacgaccgcctgcgtcactatgctgatatgagaatcagtattgatctcgacgatggcgttaaggttaactacggcaagtttggcgatctgctggcagatgtcaaagccatcaccggcaatgccccagaggtgatctaa

SEQ ID NO: 16915 - DNA, 3642 bp, Escherichia coli
atgaatattgaacagatttttgaaaaacctctaaaacgaaatataaacggggtagtcaaagcagagcaaaccgatgatgccagcgcgtacatcgagttagatgaatatgtcatcacccgcgaactggaaaaccatcttcgccatttcttcgaatcctatgttcctgccactggcccggaaaggatccttatggaaaacaagatcggcgtatgggtttcaggcttcttcggttcaggtaaatcgcactttattaagattctttcttatcttttatctaaccgcaaagttacacataacggtacggaacgtaatgcttactccttctttgaagagaaaatcaaagatgcattattccttgccgatattaacaaagcggtacattacccgactgaagtcattctgttcaatattgattcgcgtgccaacgtagatgacaaagaagatgccattcttaaagtcttcctgaaagttttcaacgaacgcattggatactgcgctgattttccgcatattgcccatcttgagcgcgagctggataaacgcggtcagtatgaaacctttaaagccgcgtttgccgatatcaatggctcgcgctgggaagacgagcgcgacgcttactacttcatcagcgatgacatggcacaagcattaagccaggccacgcagcagagtcttgaagcctcccgccaatgggtggaacaactcgacaaaaacttcccgctggatatcaataatttttgccagtgggtaaaagagtggctggatgacaatggtaagaacatcctctttatggtggatgaagtcggtcagttcattggcaaaaatacgcaaatgatgctgaagctgcagactattactgaaaaccttggggtaatttgcggtggccgcgcatgggttatcgtgacttcgcaggccgatatcaacgcggcaatcggtggtatgagcagtcgcgacggacaggacttctccaagatccaggggcgcttctctacacggctgcaactttccagctctaacacatcagaagttatccagaaacgtttgttggtaaaaactgacgaagcaaaagcggcgctggcaaaagtgtggcaagagaaaggcgatatcctgcgtaaccagctggcttttgaccctacaacaactactgcactacgtccttttaccagcgaagaagagttcgttgacaactacccgtttgtcccgtggcactatcagattctgcaaaaagtgtttgaatctattcggacgaaaggtgcagcgggtaaacagttggccatgggtgagcgttctcagctggaggcattccagactgcggcgcagcaaatctcagcgcaagggctggattctctggtgcctttctggcgtttctatgccgctattgagagcttcctggaacctgccgttagccgcaccatcactcaggcttgccagaatggcattcttgatgagttcgatggcaacctgctgaaaacgctgttcctgatccgctatgtggaaacgctgaaaagcaccctggataacctggtcacattgtctatcgataggatcgatgccgataaagttgagttgcgccgccgggtcgaaaaaagtctgaacacgcttgaacgcctgatgctcattgcgcgcgttgaagataaatatgtgttcctgaccaacgaagaaaaagagatcgaaaacgagatccgtaacgttgatgtcgatttctctgcgatcaacaaaaaactggcatcgatcatctttgatgacattctgaaaagccgtaaatatcgttatccggataacaagcaagactttgatatcagtcgcttcctgaacggacacccattagacggcgcagtgcttaacgatctggtggtgaagatcctgacccctaaagatccaacctattcgttctataacagcgatgcgacttgtcgcccttatacatcagaaggcgacggctgtattttgattcgtctgccggaagagggccgcacctggagcgatattgatttagtcgtccagactgaaaagttcctcaaagataacgccgggcaacgtccggaacaggcaaccctgctctcagaaaaagcgcgtgaaaacagcaaccgggaaaaattactccgtgttcagttggaatcactacttgcagaagcagatgtctgggcgattggcgagcgcttaccgaaaaaatcttccacaccatcgaacattgtcgatgaagcctgccgttacgtgattgaaaacaccttcggcaagctgaagatgctgcggccttttaacggcgacatctcccgtgaaattcatgcattactgacggttgagaacgacactgaactggatctcggtaacctcgaagagtccaaccccgacgccatgcgcgaggtagaaacctggatcagcatgaatatcgaatacaataaaccggtgtatttacgcgatattctgaaccatttcgcgcgtcgcccttatggctggcccgaagacgaagtgaaactgctggtagcccgtctggcctgcaaaggtaaattcagcttcagccagcaaaacaacaacgtcgagcgaaaacaggcgtgggagttatttaataacagccgccgccatagcgaattgcgtctgcataaagttcgccgtcatgatgaagcgcaggtgcgtaaagccgcgcaaaccatggctgacatcgctcagcagccgtttaacgaacgggaagagccggcgctggttgaacatattcgtcaggtatttgaagagtggaagcaagagctgaacgtattccgcgccaaggcagagggcggaaacaatccggggaaaaacgagattgaatccggtctgcgcctgcttaatgccattcttaatgagaaagaagattttgccctgatcgaaaaagtctcatcgctgaaagatgaacttctggatttcagcgaagaccgtgaagatttggtcgacttctaccgtaagcaattcgccacctggcaaaaactgggtgctgcgctgaatggcagctttaaatctaaccgcagcgcgctggaaaaagacgccgcagcggttaaagcgctgggcgagctggaaagcatctggcaaatgccggaaccttataagcatctcaatcgtatcacgccgttgattgaacaggtccagaacgtcaaccatcagttagtcgaacagcaccgccagcacgccctcgaacgcattgacgcccgcatcgaggaaagtcgtcaacgcttgctggaagcgcacgccacgtcagagctgcaaaacagcgttctgctgccgatgcaaaaagccagaaaacgcgctgaggtcagccagtcgattccggaaattttggcggaacagcaagagacgaaagcgctgcaaatggatgcagataaaaagattaacctgtggatcgacgagctgcgtaaaaagcaagaagcacaactccgggcagcaaatgaagccaaacgcgctgccgagtcagaacagacttatgttgtggtggaaaaacccgttatccaaccggtaccgaaaaaaacgcatctggtgaatgtcgccagtgagatgcgtaatgccaccggtggtgaagttctggaaacgaccgaacaggtggaaaaggcgctcgacacgttacgcacaacgctgctggccgccattaaagcaggcgatcgcattcgccttcagtaa

SEQ ID NO: 16916 - DNA, 603 bp, Escherichia coli
gtgatagatcccgttcttgaatatcgcctgtctcaaatccagagtcgcattaacgaagatcgcttcctcaaaaataacggctccggaaatgaaattggtttttggatctttgattatcccgcacagtgcgaactgcaggtacgggagcatttgaaatatctgctccggcatttggaaaaggaccataaatttgcctgtctgaatgtcttccaaatcatcatcgatatgctcaatgaacgcggccttttcgagcgcgtctgccagcaggaagtcaaagtgggtactgagacgctgaaaaagcagcttgctggtccgttaaatcagaaaaagatcgctgattttatagcgaaaaaagtcgatctggctgcccaggattttgtcattcttaccggcatgggcaacgcctggccattagtacgcggtcatgaactgatgagtgccttgcaggatgtcatggggttcaccccactgctgatgttttatcctggcacctacagcgggtacaacctttccccgctcacagacaccggttcacaaaattattatcgcgctttcagactggtaccagatacgggacccgcagcaacattgaatcctcaatga

SEQ ID NO: 16917 - DNA, 378 bp, Escherichia coli
ttgattgccgaaggtagcgagcgggaacgccagcaacttctgtttgtggctctgacgctacattcgccggtagttaaggattttctggctgaagtggtgaacgatctgcgcaggcagttcaaggaaaagttgcctggcaatagttggaacgaatttgttaatagccaggttcgtcagcatccggtactcgccagctactcagattcatctattgcaaaaatgggaaacaatctggtgaaggcgcttgctgaagcgggttatgtggatacgccccgcagacgtaacctgcaggcagtttaccttttaccggaaactcaggcagtgttacagcgcctggggcaacaggacttgatatctattctggagggaaaacggtga

SEQ ID NO: 16918 - DNA, 333 bp, Escherichia coli
atgcgttgtcgacaaagccggaaacggcatggctctcagcagttggtcggcgtcagatgcaactggtgccgtgacggtgggagttgtggcgaagggcacacatcagaactcaatggcacaggggagttttcctgtacaacccgtgaaaatgaagtttacatcggatatgactcaggtgtcacaaaccctgtcagtccgcggggaccggataaaatccggggtcccggtggtatcagtgatggtgcatgggatacggaagcagccactatcaggcaactgaacccgctgacggatgaggtgtacagtggcatcagtggacggattacagcataa

SEQ ID NO: 16919 - DNA, 153 bp, Escherichia coli
atgtctgaaatcacagtctcccgtccggaagtggtcaacgggcatacggacgttatttgctcagccagtatccgccacattctggctgtacgaaagagtacactattgccaatcgacacaattatccggcatcaagtgagcgatatcagttaa

SEQ ID NO: 16920 - DNA, 1503 bp, Escherichia coli
atgaatatcagaaaactgttttgtccgggcaatacaccccggattttattgtttttattcttttttgttgtttctgtcataaccacaattgcatgcggatacactgagaagaatgccaccgggaatgtgttgctgctgttccttcttctgctccttgcacacagaaataccctcacatccattacagcgctgttatttctgttctgttgtgcactgtatgcgcctgccggtatgacgtacggtaaaatcaacaacagttttattgtcgcgttgttgcagaccacaactgatgaggcagcggagtttaccgggatgattcctgtttatcattttctggtcagtgccgcgattcaggtattcatggtgattttctggcgaacacaccgccgtggtcaccgtaactggctggcactgctgctgttcgtattatgctcaataaacagctggccgttgcggatggttaaaggaactgttgtggggacaactgacacattgcgtgaaatgcagcgttataaacaactgaatcagcacggggctgacaactggaaaatcctgccgggtgtaccgttgtatgacacgattgttatcgtcactggtgagagtgtgcgcagggattatatgtcggtatatggctatcccgtgccaaccacgccgtggctgaatacagctcccggtttatttattgacggctatacatcggcagcagccagtaccgtaccttccctgagccggacactgatttatgactatgagcagaaccctgattccggcaacaacgtggtggcgctggcagcaaaagcaggatacagcacatggtggatatccaatcagggaaaactgggagagcatgacacacgcatctctgttattgcttctgatgcagagcataccgttttcctcaagaaaggcagcttcgcttcccgtaaaacagatgacatgcagttgttacaggaaacagaacgtgcgctggcggatacatcctctccgaaggtcattttcctgcacatgatgggttctcatccgaatccatgtgaccggcttaactcctggccgaataattaccaggagcagttcccacggaagattgcctgttacctcgccagcatcagtaaactggataactttctcggtcagcttgatggtatccttcgccggcattcccgtcatttcgtcatgctttacttttctgaccatgggctgtcggtcagcgacagtgctaatcctgttcatcatgatggtcatgtgcagggaggctacagcgttcccctgattattaccgccagtgacatcacgtctcatcagtccgtcagcagaaaaatcagtgcccgtcatttcgcaggtatttttcagtggctgaccggcattcgtactgaaaatataccgccattcaatctactgacagacgaagataatgaacccattatggtttttaacggagagaggaatgtaccggcagacagtctgaaaccgcagcctctgattcttccggtcaagggaaaataa

SEQ ID NO: 16921 - DNA, 1626 bp, Escherichia coli
atgaagagccgctttgactccgttgctgaacaaaccggaatgtttgccggtgatggtggcttcgacattacagtgggcagacatacccaactggatggtgcggtgattgcctccactgccacaccggataaaaaccacctggataccggaacgctggggttcagtgaccttcacaacgaagcggattataaagtcagtcacagtggaatcagtctgagcggtggtggcagcttcggggataaatttcagggtaacatgccgggtggcatgatatccgccggaggtcacagcggacatgcggaaggaacgactcaggccgcagtggcagaaggcactatcaccatccgggacagggacaatcagaagcagaatctggcgaacctgagccgtgaccctgcgcacgctaatgacagtatcagcccgatatttgacaaggagaaagagcagaggcgtctgcagacagtggggcttatcagtgacataggcagtcaggtggcggatattgcgcgtacacagggagaactgaatgcgttgaaggccgcgaaggaagcaaccggcgaaacacttcctgctaatgcaacagagaaacaacgtcaggaatatcttgcgaaactgcgtgacacgcaggcttacaggaatgaaatggcgaagtatggtaccggcagtgaaattcagcggggtatccaggccgcgacagcggcgcttcaggggctggcggggggtaatttagcaggtgctctggccggagcttcagcaccggaactggcacatctgctgaaatcaacagaaaaagacccggcagtaaacgccattgctcacgccattctgggcggcgcagtggcggcaatgcagggtaataatgtcgctgccggtgcagcaggcgcagcaacgggagagctggcagccagagcgattaccggaatgctgtatcctggcgtgaagcagtcagacctcagtgaagagcagaagcagacgataagtacgctggcaactgtgtcagcagggctggcctgcggtcttaccggaaacagcaccgcatcagcagcagtgggagcacagagcgggaagaatgctgttgagaataactcactcagtgatggctggaacaatatcctgccatcaggaacacaggattacggacaggccgtagcctcgtggaatcagtatgctcaggacaataatctgacaccggagcaggttcaagaagggatgaatcgtatagctattggtgaagggccttcttgggggacaacatataaagtacacccggtagttcaggctggcggtgatgttagctttatccggggttatactttaagcggaactatagatgacaatcatatttcagttaatcaaggggatatttatagtataggtgctcatggcggagcctcgatcggattatcctttggcccgtatttcccgggattaataaattcaaatgataacgattattcgataaatggtggttttggcgttggtgcagtggggctttctacgggtaaagatggtgttagtttcacttttggttttggcccaagttggggttggagtgcaactgaaattaaaggcgttgacgttaatggcacttcaacaagtgaggtttatcgatatgattttaaataa

SEQ ID NO: 16922 - DNA, 1125 bp, Escherichia coli; identical to SEQ ID NO: 9068

SEQ ID NO: 16923 - DNA, 732 bp, Escherichia coli
atgaatcaaccaatacacaatgattactggttatcccgttttgaaagtattctcaacagtgccctggtgcaacaccgtgccgtctcgttaatctgggtggatttacgtttccctgagcatatgcctgtcaccatcatggatcccgatccggattcagcggtgatttctcgttttttcgaatccctgaaagccaaaattcaggcttaccagcggaaaaaacgacgtaccaacaagcgtgtgcgtgcaaccaccctgcattatttctggtgtcgggagtttggcaaggaaaaaggcaggaaacattatcacgtgatattactgctcaacaaagatacctggtgctcgccaggggatttcaccgttccttcttcgctggcgacgctgatccaactggcatggtgtagcgctctgcatcttgagccctggcagggtaatggactggttcatttttccaggcggacgcctttccgtaaaccggtatcatctgatgctcgcccttcttccgatgatacgcctttgtcgggtggatgttctgaaaccaggaaggcttcagacaaaaagccgggtgaagccgctgttctctggatcaagcgtggtgatgtggaagcgatgcagaaagccatggagagagcccgttatctcgtgaagtatgagacgaagcagcatgacggttctggtcaacgtaattatggttgcagccgtggagcggggcgtctactggatggcaggtga

SEQ ID NO: 16924 - DNA, 150 bp, Escherichia coli
atgagcgcatataagtttattgcattggccttgtacacggtttttacaaccactgagagcaagtttgtagtttatgatgtgattggtcgcaatatgtttcttaaccttctggtcgtggtgttttatcgcgtattttgcagtatttcgtga

SEQ ID NO: 16925 - DNA, 1605 bp, Escherichia coli
atgaattccgcttatatgcaatccttgcagacatcccaccacttcccagctgatttaacctacagattatttcctagtgagcttgcatatctcattgacgacttatatgaaagtacccaacttccgctggagctcatttttaatactgtactggcaacgctctcactctcctgtcagtcactggttgacgttgttcatcctcacaccaacatgccggaaccctgctcactttatctgttggcaatcgcagagccaggcgcgggaaaaacaacgataaacagactggtgatgaacccctgttacgaatttgccgatcgactcattcaacaatacgaagagagaaacaaagattataagactgaactacagatctggaatacccggcagaaagcgcttgctgccaatttaagaaaggctgttaaccgggggtatccgggggaacaggaagaagaggcgctgcgtaatcacgaaagaaataaaccgacacgtccggttcgaccgaattttatctatgaagatgtttcgcttaaagcgcttgtggaagggctcaatgaacatcctgaggcaggggttatttctgacgaggcggtcacttttttcagaagctatctgaaaaattatccgggcctgttgaataaagcatggagtggacaaccgtttgattttggacgggctgacgagaaataccatatcacgccacgtctgacattttcgttaatgtcccagccggatgtctttacgaattatataaataaaaatgacgtactggcgtggggaagcggatttctttcccggtttctgttcagtcagaccggaagtccttcccgggtacgggattatacgagaggcgagttcagaacaaaaccaaccctggagaagtttcataaaaagattaacggatttctgttaagccataacattaattcccccggtatgagcaccgaaaggaaaacattaaaacttgcaaagaaagcgttgggggagtggcaggaaaaccagattaagattgaaagaaaagcgcttgcaggaggggagtgggaacacatcagagatattgttctgaaagcaggttctaatatactgaggatagctggaatattcacctgctattgctataaagatgctgaggaaattgaatcaattgcgctttttaaagctatgcatctcatgggctggtatctggaggaggcgagcacaatattttatcccatgtctgcacgatgccagtttgaacaggatgcctgtgaactgtatgcatggattatgacccgaataaggcagaataattggcgtgctatcaggaaaacagacattgaaagatatggtcccaatcgtctgagaagagcagaaaaacttacacctgtactcaatcagttaatcgctcagaattatttccgtatcatcaagatgcgatcgcatcaggcactttatgtttctgctcttgataataatggttacatccttcctttcggcgcaatgtcttacgaaccgtttgatattgttccaccccagtataaccataatgcgaaaacatattccgttgttattccaccggcattaattcagtcatttacacctgattcctcagcttacaccttattttaa

SEQ ID NO: 16926 - DNA, 990 bp, Escherichia coli; identical to SEQ ID NO: 5088

SEQ ID NO: 16927 - DNA, 1464 bp, Escherichia coli; identical to SEQ ID NO: 9318

SEQ ID NO: 16928 - DNA, 1059 bp, Escherichia coli
atgaaaacggggctggtgctgtccggtggcggggcggtgggcgcttatcaggcgggagtggttaaggcactggcagagtgtggtacacagatcagcatggtttcaggggccagcattggcgcattcaatggtgccattatcgcggcctctcccgatctgtcagaagctgccgtacgcctggaggcgctctgggatcatctggggaataatcaggtgctgtcggtaaacagattggtttacttttcattgctgaaaaaactgctcccggccatgaacctctgccagctccccggacgtgcgggcgcactgcttacgacgcttcttcaccatatatcgacaatcaacgggtttgacaatccgatgactcagccgttgttgtcagatgagcccctgacagtgctgatggatcattatcttgatactgatgatctggctgacgggctaccgttgtatgtgtcgctgtaccccacggaagggggaatgcaggatattatcgactgcattcgtgctgaactgggtaccggaactacaaaaaactccgtttttcagcatatccagagcctgccccacgggcagcagaaagaagccttactggcgtcagcagcactgcccctgctgttccgtccccgtgaggtacagggaaaaatgtacggtgatggtggtatgggcggatggcaaaatatgcaggggaatacccctgtgacgccactggtggatgccggatgcaatatggtgattgtgtcgcatctgagtgacggttctttatgggatcgccgggcttttccggacaccacaatccttgaaatccgtccccggaaaaagctgaaacaaacaggggaagaaggcaaaagtggcggtctgctcagttttacatcggcacatatcgacacctggcgtcagcagggctatgaagacacgatgctggcgatggagcatatccggaaaccactggaggcgcgtcaggcactgacccggtcagaggcggtgttgcagaaaagtctggagaaaacggaagaggcagatttggcactgagaaacgcgatggcccggattaaataa

SEQ ID NO: 16929 - DNA, 522 bp, Escherichia coli
gtgctgtggctgattaaagccgatgaccgggccctgtctgtggatgagtatttctggcgacacatcctgcagtgcggacatcagcaggtgctgtttgtggtgacacaggccgacaaaacggagccctgccatgaatgggatatggccggcattcagccctctcccgcacaggcacagaacattcgcgaaaaaacggaggcggtattccgtctgttccggcctgtacatccggttgtggccgtatcggcccgcaccggctgggaagtggatacgctggtcagtgcgctcatgacagcgcttcccgaccatgccgccagtcccctgatgacccgcctgcaggacgagctgcgcacggaatctgtccgcgctcaggcccgtgagcagtttaccggtgcggtggaccggatatttgacacagcggagagcgtctgtgttgcctctgttgcacgcacggttctgcgtgccgtccgtgacacagtggtctctgttgcccgcgcggtatggaactggatcttcttctga

SEQ ID NO: 16930 - DNA, 447 bp, Escherichia coli; identical to SEQ ID NO: 6886

SEQ ID NO: 16931 - DNA, 1539 bp, Escherichia coli
atgaacgacatctcttctgacgacattttcctgctgaaacagcgcctggccgaacaggaagcgctgatccacgccctgcaggaaaagctgagcaaccgggagcgcgaaatagaccatctgcaggcgcagctggataaactccgccggatgaacttcggcagtcgttccgaaaaagtctcccgccgtatcgcacaaatggaagccgatctgaaccggcttcagaaagagagcgatacgctgactggtagggtgtatgacccggcagtacagcgtccgttgcgtcagacccgcacccgtaagccgttccctgaatcactaccccgtgacgaaaagcgactgttgcctgcggcgccgtgctgcccgaactgcggcggttcactgagctatctgggcgaggatatcgccgaacagctggagttgatgcgtagcgccttccgggttatccggacggtacgggaaaaacatgcctgtactcagtgcgatgccatcgtgcaggcacctgcaccttcgcggcccatcgagcggggtatcgccggaccggggctgctggcccgcgtgctgacctcgaagtatgcagagcacaccccgctgtatcgccagtcagaaatatacggccggcaaggtgtggagctgagccgttcactgctgtcgggctgggtggatgcatgctgccggcagctgtctccgctggaagaggcgcttcatggctatgtgctgactgacggtaagctccatgctgatgacacgcctgtcccggtgctgttgccaggcaataagaaaacgaagaccgggcggttatggacctgcgttcgtgacgaccgtaacgccgggtcaacgctggcgccggcggtgtggttcgcttacagcccggacagaaaaggcatccatccgcagacccatcttgcggggttcagtggtgtactgcaggcggatgcatacgccgggttcaacgagctgtaccgggatggccggataacggaagccgcctgttgggctcacgcccgccgtaaaatccacgatgtgcacgttcgcaccccgtcagccctgacggaggaagcgctgaaacggatcggcgaactgtacgccatcgaggcagagataaggggaatgacggcggagcagcgccttgccgaacgtcagttgaaaacgaaaccgctgctgaaatccctggaaagctggctgcgtgaaaagatgaaaaccctgtcgcgacactcagaactggcgaaagcgttcgcatacgccctgaaccagtggccggcgctgacgtactatgcagatgatggctgggctgaggcggacaataacatcgctgaaaatgcgttgcggatggtcagtctgggccgcaaaaactacctgttcttcggttcggatcatggaggagagcggggagcgctgctgtacagcctgatcgggacgtgcaaactgaacggagtggagccagaaagctacctccgctatgtccttgacgtcatagccgactggccgataaaccgggtcggcgaactgctcccctggcgcgtagcactgccgactgaataa

SEQ ID NO: 16932 - DNA, 255 bp, Escherichia coli
atgccgggtgattgttgcgaaacgatgcttctgcacgcgcgcgataaagacagggatgattttcgtgaggaagaggggaaaactggcgttctgataattgcagagttgttttcggaggtggttgtggtgaatcagcctgtggctggcgggaaggcaacagatattaccggggggataagacagtctgattggtattataaatataagaagttatcagagagtaacgtaagggagttagttgccagagtaacctaa

SEQ ID NO: 16933 - DNA, 198 bp, Escherichia coli
atggtgatacgcaaaacagtgtgcagagattatgataacgccatccctcataatacggaatgtttcccggactgcgcgtcaacacctccctcaggctattaccgaaataccgatcgtctgctctgtctactgacgttactgcctgtgctgattctggctgtcgtttcaggcgtcagtttatttgtactgttgcagtag

SEQ ID NO: 16934 - DNA, 906 bp, Escherichia coli; identical to SEQ ID NO: 14388

SEQ ID NO: 16935 - DNA, 684 bp, Escherichia coli
atgacgcaaatcgaatcgaccgtgaccagcctgcaccgtgaggctgaagcacagttccggcctgagctggagaaaatcgtcagcgggattgaaacaggttttcgtggcacggccctgtacgccacagaaaacattgccggtcgcatcaatacccgcctggaggatgagggctttaccgtaaaaatcagttttccggcagtcagtcagttacaaacccggctcgcggtaaaaacaaatctgagtgcgcttatggaggaaagaacggagaccgtcacccgtcgccgtcggcagagtggtttatggggaaagatttgtggagcgtttggcaccagtgactggggctgggaaacctataaagaggatgtgagccgcagtgttatcaatatcaacaccgtcaggaaggaagttatgtcactgacccgggcatatttcggggagctgcaggcatccattgagcaggatattaaccagcccgtccgccaggaaatcgatgcctttttctgcgcattcagggagaaagttgaacaactgcgtaacacgctgattcagagctctgaagatcataaacgcgatcagcaggcacaggaacggcttaccaggcgacttcaggcattaaatgaaagggttcctgagctcattactgacagtaaggcgctgagggaagagctggagacaatgctgtga

SEQ ID NO: 16936 - DNA, 246 bp, Escherichia coli; identical to SEQ ID NO: 4533

SEQ ID NO: 16937 - DNA, 684 bp, Escherichia coli
atgacgcaaatcgaatcgaccgtgaccagcctgcaccgtgaggctgaggcacagtttcggcccgaactggaaaaaatcgtcagggggattgaaacaggttttcgtggtacggccctgtatgccacagaaaagatcgccggacgcatcaatgcccgactggaggatgagggcttcactgtaaaaatcagtttcccggcagtcagccagttacagacccggctcgcggtaaaaacaaatctgagtgcgcttatggaggaaagaacggagacagtaacccgtcgccgtcgacaggagggtgtctggggtacgctttgtcgatgggcaaacaccagtgactggggctggaaagagtacagtgtagatgtgagccgcagcgtgatcaatatgaacaaggtcaggaaggaagtgatgtcactgacccgggcatatttcggggtgttgcaggcatccattgagcagaatattaaccagcccgtccgccaggagatcgatgattttttctgtacattcagggaaaaagtcgaacagctacgtaacacactcattcagagctctgaagatcataaacgcgatcagcaggcacaggagcagcttacggagcgccttcaggcattaaatgaaagggttcccgagctgattactgacagtaaggcgttaagggaagaactggagacactgctgtga

SEQ ID NO: 16938 - DNA, 501 bp, Escherichia coli
atgaataacacagacacattagaaaaaataatcagacaccaaaaaaacaaagaccccgcatatccctttcgggaacatttgttgatgcagctctgtattcgcacaaataaaagaatgcaggataatatatctgaatttctgggggtgtatggaataaatcactcagcatatatggttctcaccacattattcgcagcggagaaccattgtctgtcaccttcagagataagccagaaacttcagtttaccagaactaatattacccgcattacagattttttagaaaaagccggatatgtaaaaaggacggatagcagggaggatcgccgtgctaaaaaaatcagtctgacatctgaaggtatgttttttattcagaggctcactcttgcacaaagcatgtatctgaaagaaatctgggattatctgacccatgatgaacaggaactgtttgaagtcattaataaaaagttactggcacatttttctgatgccagctcataa

SEQ ID NO: 16939 - DNA, 222 bp, Escherichia coli; identical to SEQ ID NO: 8150

SEQ ID NO: 16940 - DNA, 387 bp, Escherichia coli
gtggcgctgtacaatattgcaaataaagaactacatgctttagaaaaaacgacatttactctggaaggattacaggaacgttatgatttacaggaagcaatcaaaaaaaacatagatattattgctcctgattgtctggtgatttctgaagagttttcttactgggaagatagccgtcggcgaattgatttattggcaatcgataaacaggcaaatttagtggttatcgaattaaaacgtgatgaaacgggggcgcatatggagttacaggcactacgatatgcggcgatgatttccacaatgagttttgcgaaagcatgtgaatatttccagacgtatttgaaaaaaacaaaactgggatgccgatgcgaaagaaaaaatacttga

SEQ ID NO: 16941 - DNA, 624 bp, Escherichia coli
atgttccgtactgatgtattgcgtaagttcggtttctctgatcgtactaaagtcgaagaccttgatctcacctggacgttggtggcaaacggctaccgtattcggcaggcgaatcgctgcatcgtatacccacaggaatgtaacagtccgcgtgaggagtggcgccgctggcggcgttggattgtgggctacgcggtctgtatgcgcctgcataaaagacttttatttagccgcttcggtatcttcagtatatttcctatgctgttggttgtgctttatggcgttggtatttatctcactacctggtttaatgaattcatcaccaccgggccacatggtgtggtgttggcaatgttcccgcttatctgggtcggcgtagtttgtgttattggtgcatttagcgcctggtttcatcgttgctggttgttggtgcctttagcaccgctttccgttgtgtatgtattattagcttatgccatctggattatttatggacttattgccttttttactggacgcgaacctcagcgcgacaaacccacccgctattccgcactggtggaagcgtcaaccgcttattcccaaccttctgtcacaggaactgaaaaactatctgaagcttaa

SEQ ID NO: 16942 - DNA, 603 bp, Escherichia coli
atgaaaccacagtatcagacccgttacgagctactccacgaaagctaccagaaatggctgaccggcttcacccggcacgccgtatcctggggcgtgtgtcatccgaatatccactacttccagaatctgacgcccgggtgggtgtcattcaatggtgaaaaaccgaagattgccatcgtaccccggagtctgcaccggctgatttatggctctgacaaacgggccacgccgcccctggatgatgatctggtggtgaacttatgcaccagcgaacatctgctggttcatcatccgatgctggaagggattctgctgtctgaatgtgaacgtctgaggcagcgttctctggcaaataaactgatcagcctcttccgtcagtttggtggcacggagttgcgcctcaaactggtctggctttgctggcttgatttaatgaccggaaacagccttgacgactggacggagaacctgaaacggaaatcagaaaaagagctgggggaatggatcatcgaccgtcagaagcagaacgcagcactgacggatctgatggatcagtacgtgctcctggcataccgcacaacggttgacgataaccgtaactga

SEQ ID NO: 16943 - DNA, 234 bp, Escherichia coli
gtgattgagctgcatattgaggccggcatttcactgtgtgatgcggtgaactttctcgtggaaaaatacgcgctggtgcgtaccggccagccgggattcagcgcctgtacccgctctcagttaataaacagcatcgatatcctccgggctcgcagggcgaccggcctgatgacccgcgacaattacagaacggtaaataacattaccctgggtaagcatccggaggcgaaatga

SEQ ID NO: 16944 - DNA, 222 bp, Escherichia coli; identical to SEQ ID NO: 15050

SEQ ID NO: 16945 - DNA, 222 bp, Escherichia coli
atgaaaattatcacccgtggtgaagccatgcgtattcaccaacagcatcctgcatcccgtctttttccgttctgcaccggcaaataccgctggcacggcagcactgaagcgtataccggtcgtgaagtgcaggatattcccggtgtgctggccgtgtttgctgaacgccgtaaggacagttttggcccgtatgtccggttgatgagcgtcaccctgaactga

SEQ ID NO: 16946 - DNA, 405 bp, Escherichia coli
ttggaagaatatcaagttaagtttcgtgaaaaacgtgatgagcaactaattagcagtcagaaaaaagagaaggactatacgtggtatatatacaaagataaaaaacttaataaacgtaagttagcgcttgagttattacgcgattggataaaacaatttaatcctgcaagttataatgatttaataagtggattaagtgaagactttaaaaaacgtacagttatacttatcgatcagataccagagaagcaaaagagtcgctatcatatcaacgaagatgcattgattacacttccttctggtgaaattgttgctatttctaatcaatggggtattgttaatattgaacccttgattgagtttgtacagcaaaatggttttgttgttgaaaaagctgaacaataa

SEQ ID NO: 16947 - DNA, 354 bp, Escherichia coli
gtgcatcccacaaccctgcattacgtctgggcccgggagtttggggagtgcaaaggtaaaaaacactatcatctgatgctgctggtcaaccgggatacctggtgtcgtgccggtgattaccgcgctccgggatcactggccggaatgattgaacaggcctggtgcagtgccctgggggtggatgccggatgctatgccacgctggtgcattttccggtcaggccggcggtgtggctggaacgcgatgatgacaccggctttcagcaggtgctggagcgtgctgactatctggcgaaggagagtaccaaagcttacggcaccggtgagcgcaactttggctgcagtcgtggctga

SEQ ID NO: 16948 - DNA, 369 bp, Escherichia coli
gtgagcggcggcggtcacggtattgatatcaccggcgacagtgcaacggtggataacaaaggcggtatgaccgtcgcggatgcggattcgattggcattcagatcgacggcgacaaggcggtcgtgaacaacgacggtgacaatgccatcagcaacggcggcaccggcacgcaggttaacggcgacgaagccaccgtgaacaataacggcagcaccaccgttgacggcaaggattccacgggtaccgagataaacggtgacaaagccatgtcaacaacgacggtgacagcacgatccttgatggcggcaccggaacccgcattacgggtgatgatgcgacggccaacaacagtggcaataccaccgtag

SEQ ID NO: 16949 - DNA, 420 bp, Escherichia coli
gtgagcggcggcggtcacggtattgatatcaccggcgacagtgcaacggtggataacaaaggcggtatgaccgtcgcggatgcggattcgattggcattcagatcgacggcgacaaggcggtcgtgaacaacgacggtgacaatgccatcagcaacggcggcaccggcacgcaggttaacggcgacgaagccaccgtgaacaataacggcagcaccaccgttgacggcaaggattccacgggtaccgagataaacggtgacaaagccatgtcaacaacgacggtgacagcacgatccttgatggcggcaccggaacccgcattacgggtgatgatgcgacggccaacaacagcggcaataccaccgttgatggtcagggttcgaccggaactgaaatcgcgggtaacaacgcggtggtga

SEQ ID NO: 16950 - DNA, 315 bp, Escherichia coli
atgagagttgagcagaataatttcagggacatgttctccgtttatctctccgttacggcgcaggcgcagcatgtgttttgtgtatccccggcggcccgggtcgcgcacacaggtctggcaggcgaagaatggctgaaagccttcccgctgcaggctttccagtacggtgatggtggggatgtacgtatagttctggcttcgggacgtgtgtttctcttccccgaaaatccccggcacatggtgcatcagctcttcatgtgtcagtggacggtcacgacgtatctggtttgcagcataaccaaaacgacttgctaa

SEQ ID NO: 16951 - DNA, 312 bp, Escherichia coli; identical to SEQ ID NO: 6177

SEQ ID NO: 16952 - DNA, 987 bp, Escherichia coli
atgactgaaaagaaaagtggcgaagggaaagctaagggtgggatcgctcgcgcaaagtcgctgactaaagagcagcgttctgaaatagcaaagaaagcagcggcaaaacgatgggaaggtaagccactaagagcgatcagaaagggtaacttcattgatgatttcggcattgatgcagaatgttacgtacttgatgataatgataaaacggttgtagttagtaaaactggtctggctaaattactaggaatcggtgagcatggtagggatgtagaccgttttctaaatacgaattatatggctgattttgtcgatccatttttgctagaaaaattcaaaaaacctcttatttttcaatggagaagtccggtcccaaactcagccccaaatccactcgctgatgaggctcacggttacgatattgcccttatcggcgatatagccacagcaatgattaatgccgatcgagctggcgctctaccgccttcaagatcaaaatctgccagccttgcccaaagacttgttaccgcatcaatgaaagcagggcttaaaggacttggttatgctattgcaggatatcgacctgaagtacaggaggttattgattccttcaaggcctttgttcgcgaagaggcgaggcagtatgaaaaagaatttccagatgagctatatgaggagtggtatcgactgtacggcctgaacaggccagagaaaggacgtccaattcgttttgggcagctaaccaacatgcagatatacactcctctagcaaagagtaaaggtaaaatccttgaacagattcgagccagccgagacgagaacggaaaacaatctgataagttgcacctgttcctttctgaaattggtgtcaaggctttgcgtcagcatatcggtaagcttcttggtgtcgcagcgatgagcgagacaagagaagaatacgaaaaaggaatagaaaaggtttttggaagaataaaaccagaaatctaa

SEQ ID NO: 16953 - DNA, 252 bp, Escherichia coli
atgggaagagatgacccgcaatttaatctgcggctaccttacgaattaaaggaaaaactaaaacagcgagccaaatccaatggccgctctcttaattcagaattagttcagatagtgactgatgctgtatcaaggccatccaaaatttcaggctatcgagacgatgcggaacgcatcgctgatgagcaatcagagcttgttaagaagatggtgtttgatacgctgaaggatttgtacaaaaaacccacctga

SEQ ID NO: 16954 - DNA, 597 bp, Escherichia coli; identical to SEQ ID NO: 7474

SEQ ID NO: 16955 - DNA, 645 bp, Escherichia coli
atgagcactatcacaagagaatggctgcagcaggctatcaacgattatgaaagcgttcgtgatgagcttcctttcgggcttgatgattaccaggggaatatcctggatgccctgcgtatcgcactggcatcactggaacgcgaacagattcgccacgagcatgccaaatggtctgactccacatttggctgcgttggccccattggtccgctgaaacatctctcaaaagaggcactggaagccgcagccgaaccagacgatcttagcgagtgggctgatatgcagtttctgttgtgggatgcacagcgccgtgctggcatcagcgatgctgaaattaccgctgctatggaagataaattgaagatcaacatggagcgccagtggcctgagccaaaagatggtgagcctcgcttgcacattaaagaacccggcaactctccggtaactccggatggttggataagctgtagtgagcgaatgccgaacgacgcgcagtggtgcgtagtgaacacagaatacgggtattacgtgcaatgctggtctgaaggtcaagggtggcttggtgatgatatcagcatccctgaatgcgatgtaatcaattggatgccgctaccagaaccgccgcaggaggttaaacgtggctaa

SEQ ID NO: 16956 - DNA, 642 bp, Escherichia coli
gtgagcaagattgactatcaggcactgcgtgaaaaggcagagaaagcaacgtgtggggtgtggtcgctcgaatatggagaggagagatttgatgctgatgatgcgctaattcatcgtgaagttgctggatatattcccatttgcagaattgaaggagcgcatcctgaaagcggtttcgatgaagatttccaaatggaacagcaggccaatgctgaattcatcgccgcagccaatccggctaccgtgctggcgctgctggatgagctggaagccaaagacaacagaataaatcgactcgaagccattgttgctgttgcagaacagcgcaacgccctgatgcgtgagtggaaacgcgccttgaaagtaccttgttacctcgtagataaccaggtgccagttgttattcatggcatgattattcgccttgagagactcaaagagaccgaagcgaagctggaagctgcagagaagcggattgctgagttatcacaccatctccagtgcgcgcacggttttatcgagcatacagaggcgtttggccacgaagcatcaaacgggattctgtgttgtggtgacgcgcagtggaacattgatgcgtctaaattggcactggccgcagccggtaaaggagaggcatcatga

SEQ ID NO: 16957 - DNA, 372 bp, Escherichia coli
atggctctggcggtcgattctatttcgttcgatgcggtacgtgtcgcgctcaatctggtagcaaatatgcagcgcctggaaatgactgcgcgattttttattcagaggttagagcagagtggaatcagcgagcaaaggaggcaaccagtgagcggaaaaagaatgactaacagagagcttgttgatgccgccattaagcttgctggtgatttttattcaatgatggggtacacgcatcgcccaggcttcaaatattgggagtctccgcacccgcaagagcaactggtatttcaaatggcctgccgtgcttttgaggttattcgcggttctgatgtgatggacgccgttgccgacttggaggatgaagagtga

SEQ ID NO: 16958 - DNA, 477 bp, Escherichia coli
atgaaacaaatgtcactaattgagatggatggatttctgaaaggtaaatgcatcccaagtgatttaaaggttaacgaaacaaacgctgaatatctggtgcgtaagttcggtgagcttgaatcaaaactggaaacggcgttgcgggagtgtcgttctgctggaatcacgattgataaccttgaggctaaatgcgcgaagatggctgctgaaaatacctcgcttaagcaatctgagaaggaatttaatgacttttgtcgtgaggagtttagcgaatgggaagatgatgttactgaaccccaagccaccgatgctttcctggctgaagtccgggctaaggcgtttgatgacctttgcgcggcgttcgttaagcacgcgtcggtgtccgggctggacgatggcgactgcgttacggtgaaagaggcgactgacgccctgctgcattgtgcggaacagcttcacgagggagtgcattcatga

SEQ ID NO: 16959 - DNA, 468 bp, Escherichia coli
atgatcacttgcaaaaaatgtggagagaataaaccacctaatggtttttatcctagaaataaggtgtgcaaggaatgcactaaaaaacgagtaactgaatatcaaaaaggaataggaaagctaatacataataatgcttgtaaaaaatataacaaaagcgaaaagggcaaggttgcattaatcaaagcaagagagaactatctggaatctcatcgccaaagacagcaagcaagatggtcagtcaaacgagcaattaaatctggtaagttatgtagaccaacaacgtgtcagaaatgcaacagcaaatgccacccagacgctcaccactgcgattacagtaaacctcttgaagtgatgtggctatgcaaagcatgtcatgttgaatggcacaagcacaacaagccaatatatccagacgaggaaccagtaactctccccttccctcgtcacgctattcacgcaatttaa

SEQ ID NO: 16960 - DNA, 462 bp, Escherichia coli
atggcaagcagaggcgtaaataaggtgattatccttggtcgggtaggacaagacccggaagttcgatactcaccatcaggtacagcgttcgctaacctgacaatagccacgtcagaacaatggcgagataaaaatactggcgagcaaaaggaattgactgaatggcatcgtgttgctgtatccgggaaactggctgaggtcgtggggcagtatgtgaaaaaaggtgatcagatttatttcgagggaatgctgagaaccagaaagtggaaagaccagtcagggcaagaccgttacacaaccgaggttcatgtcggaattaatggcgtgatgcaaatgcttggcggcattggcgacagcaaacaacaagcagccagcaggcaatcacagaagccacagcagcaatcatcaccagcacaacacaacgaacctcctatgaacttcgacgatgagatcccattttaa

SEQ ID NO: 16961 - DNA, 324 bp, Escherichia coli
atggaagcattagtagtagagcgaagcgaggatggctactggacgcacccagaatacgccaacctgtttggggatagagaggtaatttcagctgatgagttcagatctttctgcaagcagcatggcattgaatcatcaattgttgaaatggaaaacgacaacaatcaaacggtaattgacgcgtattttgaagatgggaatcaaaacatcagtggatgggagccaagcatgccagatggagaaggatggtttgtcggttcgattcacgatacagaagacggtccgatctgcgtttggttcaggaatgtagataaggacgaatag

SEQ ID NO: 16962 - DNA, 327 bp, Escherichia coli
gtggctgactggcaaattccaatcatcattcttgccggaacttcgctggttgctggctttatcctgctgaagaagcataaagaccgtgatcaaaaagtcgaagttctctatgggtatccagcgaacagcacaacatggctgaccatttaccactaccgaaaatcaggccgctgggtattcgaatgggatgatctgttcgctgaaaagcgaccaaagtcatggggagacatcagcgaatgcatgatgtttgaagaaagaaaatccggcgcaactcgagaagagtttaacgaagcgtggaggcgattaagtgagagagggtatcaatga

SEQ ID NO: 16963 - DNA, 237 bp, Escherichia coli
atgagcagaattaaatctggttatccaggaaatggggaatacccgaagccatatttacctgtaacagtgaccactaaatctaggcatccacatcatttcaagcaaagtggtacagcttattggagtggcaaccggtggataggtattgatgggttcaaaattgggtatgcaaaggtaattaaatgggaatttaacatcacacactggagttcatcccatgaggaaactaacgtttga

SEQ ID NO: 16964 - DNA, 378 bp, Escherichia coli
atggattattcacagttaagtgattttgaaattaacgtggcagtattcgaagccattcataacggatcaccggattacaaagaaggtgagaatggcgcgatggtgtttatctcatttgagggagacattgtaaacggagacgcagttgaagtagaagttgagcgcggatcctttaacccatgcgcaaacccagcagacgcatggccgattatcactgaaaacaacatcagcataattttagacaatccctcaatgccgtgcgctacagacaacgcaagggacttgtttgatgatgccggaccgaatgttggtgtcgcatatgacaatccactccgtgccgccatgattgtctttctcatgatgcggagaatccaataa

SEQ ID NO: 16965 - DNA, 357 bp, Escherichia coli
atgaacgatcagcaaatcgaaaaagaaatcgttgagaaaggaaaaaccgctccgcgagttacgcctcaatatatcgaaagcatcattcttgaagagcatttctttactgcttatgacggcattcgtgctgccaatatgggcgttggcgattcatggacagcgcataaatctacagacctcctgactttctgcgtactggtgctgaagaatggcttcaccgtcaccggagagagtgcctgtgcaagcccggaaaactttgatgcagaaattggtcggaagattgcccggcagaatgctgtaaacaaaatctggatgctcgaaggttacttgctgaagcagaagctaagcgaacagtag

SEQ ID NO: 16966 - DNA, 495 bp, Escherichia coli
atgatttcacatgaagagttgaagcgtcatttatcatatgacccagaaaccggggtttttacccgaaaaatatcaaatacagcgagcgtcaccgttggtgatgaagcgggaaccatgtgcactggttatttaaggataatggtctgtggtaagagatacttagcgcataggcttgcttggttttatatgacaggaaaacctgcaaattgcttaatagatcatattaacggagacagaacggataacagattttcaaatttaagattggcaaatagatcccagaatgggatgaacaggaatattcaaagaaataataagtcaggatatcctggtgtctgttggcacaaaaatctctgcaagtggactgtttctttcaagaaaaataaaaaacaggttcacgttggatgcttcgatgacctggacgaagctatctcagcatcaatgatggcaagagcagaaaattttggagagtttgcaaggcagaggattgagtaa

SEQ ID NO: 16967 - DNA, 2169 bp, Escherichia coli
atggctaaagcatggaaagatgttatcgcttctccacagtatcaggcgttaactgaagaacagaaagcacaggctcaagcgcaatattttgatgaggttgttgcccctaaggctggtgacaaatgggctgaagcaagagatcagttttatgcagcataccctccgcctcagcagcagaaagaagaaccatcattgatgcaacaagctggtgattggctcacaggtggtcaaagtgcagggcaaattgcagagcaggctggtcgtggtctggtaaacataccatttgacgtattgcagggtggcgcaagtctgattaatgcaatcagtcaggggcttggtgggcccaaggttttggatgatgtctatcgtccagtcgatcgaccgacagacccttacgcgcaagccggtgaaacaattggtgggtatctcctgccaattggcacagcggcaaaagctgctggagcgccagcaaagctcgctggagatatcggttccgcaggaaacatgattgcaggttctcttgctgatgctgcaaatcaggagggcgactttgcacaaaatgctgccattaacggtggtatcaatattggtgctcaggggatactttctggtgctggaaggatcttaacctctaaatcacctcaagttcttgggggcggggcaataaattccgctgctgatgtttcgaaaatggcaaagtctggtacaggaagagagattatcgccagacagtcagctaatgtgtcagacgaaatagcaaaagcagcagatactgctggaatagatatcaacgcattaactcctggcatgagatcaggtagtcgtggtcttgctcaggcggaggggattctggcgtcaaagcccggaattacacaggatgcacacaccaaagcattcagtgaaatagagtcgaaatttaactcagcattggatgagtttggggctgaagcaggaactgcatcagaaaaaagtgcagccataaaacaaagggttttggcaagtattgataaaatgaaaaattcagaaaaggccgcatgggatagcgttcgctccacgatgcctgacgcaaaggccagaatgtcaaacctgaacgctacaattcagggtgatattttggctggcatgccgctaactcctgagatgaaacaattcgcatctgcttatgctaaaactggtaaaaaaggaatcacgtttgatgccatgaaggcatggcgaagtaaacttgctgacgcagagcagaagtatataaggtctggtgagtcaaatacggcaaggcgcatggctgagcttcgtgatgcagcaacggaagatatgcgcataatggctcaaaatggtggttttcttgatgactggcaaaaagctaatgatctgtcaaaggcaagatttacagcacaagaacaggctgaagcagcgtttggtagagaccttgcaactgatcagttggtaactaatggatctaaggcgttacagggttcagcaaaaagtggaacaggtcagttccataaaataataagcgccctacctgagtcggaacgcgcgccagcaattgcatcaatattacaagatgcaatgtcgcaaggggtacgcggaggtaagtctgaagaggctggaattaagcatatcgcgactattcttaccccacaaaacgtgaaggcaattagtcgatattctccagaacttggcaggattacaagttcatacggagaacttgcacgagcagcaacaaagccacttcgatatgttgaacagacagggcgatctatgccagccattagcactcttgagaatggccttcatccagttttagagagcgcattgtctggcgcttttagaactactggcactatcgcagggttctctggaggaggcgttattggagcaatagcgggtggcgctgcaggtggagcaattgatgcaatggcaaaaggagcgatagcgaaattatccgcaactagaagtggtcgttacgctattgaaaaggctgttcaagaggcaacaaaggccgttaaggttggggcaagtgatggtgcattagcggcggcggaacgcagatttatggcaaataaggccgccgtaaaagcaatacgcgaggcactaggaaacgaagagttccagcgtttagcaagggctggaattgtggcatcactaagcggaatggcacaggagtaa

SEQ ID NO: 16968 - DNA, 3474 bp, Escherichia coli; identical to SEQ ID NO: 7554

SEQ ID NO: 16969 - DNA, 2979 bp, Escherichia coli
atgactcatcagacacacaccattgctgaatccaataactttatcgtccttgataagtacatcaaagctgagccaacaggcgacagctaccagagcgaatcggacctggaacgagaactgattcaggacctgcggaatcagggctatgaatttatatccgtaaaatcacagtcggcgatgctggccaatgttcgggaacagcttcagaacctcaatggtgtggtgtttaatgacagcgagtggcggcgtttcacggagcagtatctggataacccgagcgatggcattctggataagacccgtaaaatccatatcgactatatttgcgactttatttttgatgacgagcgtcttgagaacatctatttgatagataaaaagaatctcatgcgcaataaggtgcagattatccagcagtttgaacagacgggttctcatgctaaccgttatgacgtcacgatcctggttaatggtttaccgctggtgcaaatcgaactaaaaaaacgcggggtggcgattcgtgaggctttcaaccagatacatcgttacagtaaagagagttttaacagcgaaaattccctgtttaagtatctgcaactgtttgtcatttctaacggcaccgatacccgttattttgccaacacgacaaagcgcgataaaaacagttttgacttcaccatgaattgggcaaaatcagacaacacgctgattaaagacctcaaagactttaccgctacctttttccagaaacatactctgctgaatgttctggtgaactacagcgtttttgacagtagccagacgctactggtgatgcgaccgtaccagattgccgccactgagcgtatcttatggaaaatcaacagctcctataaagcgaaaaactggtctacccccgaaagtggtggctttatctggcacactaccggttctggtaaaaccctgaccagctttaaagccgcgcgtctggcaacagaactggactttattgataaagtcttctttgtggtcgacaggaaagacctcgattaccagaccatgaaggaatatcagcgtttttcgccagacagtgtcaatggatcggaaaataccgcaggtcttaaacgaaatctggataaggatgataacaaaattatcgtcaccactattcagaaactcaataacctgatgaaagcagaaagcgacctgcctgtatacaatcagcaagtggtgtttatatttgatgaatgccaccgcagccagtttggagaagcgcagaaaaacctgaagaagaaattcaaacgctattatcagtttggttttaccggtacccctattttcccggaaaacgccttaggctcagaaacaaccgccagcgtatttggtcgtgaattgcattcatatgttattaccgatgcgattcgagatgaaaaagtgcttaaattcaaggtggactacaacgatgtgcggccacagtttaagtctttagagacagaaaccgacgagaaaaaactgagtgcggctgaaaatcagcaggcgtttcttcatcccatgcgtatacaggaaattacgcaatatattctgaataatttccgccagaaaactcaccgtaccttccctggctcaaaaggttttaatgctatgttggcagtgagcagcgtggatgccgcgaaagcctattatgcgacgtttaaacggttacaagaagaagccgctaataaatcggctacctataaaccgctgcgtattgcgacaatcttctcctttgccgccaatgaagaacaaaatgccattggtgagatttccgatgaaacttttgataccagcgcaatggacagcagtgctaaagagtttctggacgctgcaattcgtgaatataacagccattttaaaactaactttagcaccgacagtaacggttttcagaactactatcgtgatttagcccagcgggttaaaaatcaggatatcgatctgctaattgtcgtggggatgttcttaaccggcttcgatgctccaacattgaacacgctattcgtcgataaaaacttacgttttcacggcctgatgcaggcattttcccgcaccaaccgcatttatgacgccactaaaaccttcggtaatatcgtcactttccgggatctggaacgctcaactattgatgccataacgctgtttggtgacaaaaacaccaaaaatgtagtgttagaaaagagttatgcagagtatatggaaggctttactgatgctgctactggtgaagctaagcgcggctttatggcagtagttgcagaactggaacaacggttccctgaccctgccagtattgaaagtgaaaaagagaagaaagacttcgtaaaactgtttggtgaatacctgcgtaccgagaacatcctgcaaaactatgatgaatttgccacgctgaaagccctgcaacaaatcgatcttagcgatcctgttgcagtagaaaaattcaaagcagaacattatgtggatgatgaaaagctcgctgaattgcaaacaattcgtctccctgctgatcgcaagattcaggattatcgttctgcctataacgatattcgcgactggcagcgccgtgagaaagaagctgagaaaaaagagaaatcaaccactgactgggatgacgtggtttttgaggtcgatttgctgaagtctcaggaaataaacctggattatatccttggactgattttcgaacataacagacaaaataaaggcaagggcgaaatgatcgaagaggtcaaacgcttaattcgttcaagcctggggaaccgggcgaaagagggcctggtggtcgattttattcagcaaacgaacctggatgatttaccagacaaagccagcatcattgacgcgttctttacctttgctcaacacgaacagctacgtgaagcagaagcgttgattaaagaagaaaatctcaatgaagaggcggcgaaacgctatattcgcacgtcggtgatgctgccaacttactga

SEQ ID NO: 16970 - DNA, 774 bp, Escherichia coli
atggccgccctgaatgctgagacggacgctgttattttcaccgtttacaccggtctgatggctgcgggagcctgccagaatccggtcatagtccattgcctgtgtcagcatggaggcatacagggggacttcagcacgataagcattttcactgcgcagataccagctctcatcactgtcccggttgagggtgtagttaaaggccccggcctgaagcgggcgactcagggcaaacgcaccttcttctgtggtggcaccgttaatggcctcaaccacctgaatacccttaccggtggtcgccagccccgtaccactgttgccggcgttcaccagattcaggatggtttttccggttgccctgccaccgtcaatgaccagtctgtcagcattgttctgcgccatatccgggcgtacacgcaggctgatggtgccattctgcccgttcaggtttttcacctgcagagttgtcggaacgaacttccctgtgcgggcggaggtgaaatgaatctgtccggcatggctgaggtcatccaccaccgactgaaccgtggcgttatcggggatattccaggtggcaccggatgtcagggtgacattcgtggggtcaatggcaccgttcagcactgtgctgccggtcagcttcagggctgtaccgcgctgagcaatgacatccgtggtgacggtactgtcgttcagcgtcagcgtgccttcattcaggttgacggctttctgggtgagtgtggtgttgctgacagtgagtgtgccacttcctga

SEQ ID NO: 16971 - DNA, 678 bp, Escherichia coli
atggccttccagtacatccaggcgaccaccggactccagaacaacaccgtcagcattaccgttttccacagtgaaattgcccagacggttgctgccggtgacggttgccgccgtactggtgaccagtgcgcctccctgcttcagggtgacattcgtggctgtaccaccggcgttcacctgcagtttgcctttctggttaacggtggtgaaatccgccagaccaccttccttgacaatctgccagccgtcactgtttacaaccgtgtcagaggctgtgcctccgttgtgcacatactggtaaccgccattcagtgtggtatccagcgcatgcccgtgtaccgtctggtcgccgccggcataaaccacagtggtatttgctgttccttcagcagccacaatctgacgaccatttttattgatggtggtacgtacggcatttccgcgaacaaactgcccggtatcaccattgtctgcatctggtcccccttccgcgccggtattcacaaccgtgtcggttgccattgcgccggatttgacggcctgccagcccttctcattaatgacggtacccgttgcaatcccgccttcatgtacccactgctcaccgccgttcagagtggtattcactgcctgcccctgaaggctctgtcctcctccggcactgataaccgtgtctga

SEQ ID NO: 16972 - DNA, 729 bp, Escherichia coli
atgagaaaaaataatacggcaataatattcggcagcctgtttttttcctgcagcgtgatggccgcaaacggtacgctgtcccccaccgtggtgccaatggtgaacggtggtcaggccagtattgccatcagcaataccagcccgaatctgtttaccgttcccggtgaccggattatcgccgtgaacagtctggatggtgccctgaccaataatgagcagaccgcctccggcggtgtggtggttgccaccgtcaacaaaaagccctttacgttcattctggaaacagaacgtggtctgaatctttccattcaggccgttccccgtgaaggcgcggggcgtaccattcagctggtcagtgacctgcgcggaaccggagaagaagccggtgcgtgggaaacgtccacgccttacgaatccctgcttgtgaccatcagccaggctgtccgtggcggaaaattacctgcaggctggtatcaggttcctgtgacaaaggaaaccctgcaggccccggcggggctgtcttcagtggcagatgccgtatggacggggaatcacctgaagatggtccgctttgccgtggaaaataaaacgctgtctgccctgaatatccgggaaagtgacttctggcagccgggaacccgtgccgtgatgttcagccagcctgccagccagttactggcaggtgcgtgcatggatgtgtatgtcatccgtgacggggagggcaactga

SEQ ID NO: 16973 - DNA, 516 bp, Escherichia coli; identical to SEQ ID NO: 15237

SEQ ID NO: 16974 - DNA, 495 bp, Escherichia coli
atggcgcagggtcaggggcagattcatcccctccggcagcggaaactgtgtcgctgccgcgttcatataataggcacgggtaatggcgttaaaccgttcagcctgttcaccggaccaggagaactcacgcagcccgtattcaattctgtcaccaacaagctggctggacttcagatggatgcagaacggcactccgcgtggcagtttggtgcgcagcatgtggtcgagcgcctccacaatggactcattcgccccattgatgggaatggcttccagcataaagcccatcgtggtgtcattcatgaacagaccggactcctggttgtaatcacggtacggcagcagacggctgaactgcgggaagctcatttcgcccagaacttcattggcctttgcggattcgtcaggcagtttcagtgctgtgacgagggagttaaccgcctgagtgacggcctcaagtgggttattcacatgaattccttagttgaaaaataa

SEQ ID NO: 16975 - DNA, 1542 bp, Escherichia coli
atggcaagctaccattgcaccgttaaaaccggagcaaaaggcgcagccttaaaacatgctgattacatttccagatccggcgaatataagagctacaaatcgcgggaggatctggagttttcgtcatccggtaacatgccatcatgggcgaagaaaaatcccgcagaactgtggaaagccgcagatgaatttgaacgaaaaaacgggacggcataccgtgaaattgagatcgcattaccgcgtgaactgacacgcgaacaacggatagaacttgttgaagatttcgtgcaaaaggaacttggcgatcgccatgcctaccagtacgcgatccacaatccgccaggtgcaatcgacggaaaggaacagccacacgcgcatatcatgttttgcgagcggattaatgatggtattgaacgcgatccgcagcaattttttaaacgcgccaacagcaaatcaccggagcggggaggcgcaaaaaaggcgagtattccccagaccgccggagagcgaaaagccgcccttgttgcgctacgttcccgctgggctgatgtgcagaatgagcaccttgcgcgacacggtcacgagtcgcgcgtagatcatcgttcgctgaaagaacagggcatcaagcgcacgccggaagttcatcttggccctgttcacgccgccaatctgaacgaggggcagatcgcggcaattcaggagcacagggcggcgcgtcagcaagaacgcgcagcacgcaacccagcgccagagcgccaacaggaactggagcaaaagcaaaaaatcaggacagttgagcgttcaccggagttactggctcagtaccgcaaggttatgaaaacggtcattcagggagaggaaaggcttgctcgtttaggggatgccaaccccgatgcgctcaaagaacataagctgcttcagaatgcgaaagctaaaaaagaatctctttccgaatggagcaggcgaatatatgaaggggcacggtatttagacaaactggggcgtaatgttgtttccgcacaaagggagctacgagagttacaggaacaacgcaatgctctgaatgggattcgtggcctgtttcggggggctgacaaaagggagattgatgcgcgtattctggagcaagaaagcgtgctggaaaccgccgaacgtgaagagaatgagttcaggtacaagctacagcaagctgagtccgagtggaaagagaaatacgctgcttttcagcgtaccgagggatataagtacgttgatcctacggggctggacaagtacagagaacgtgagattctggccgcagtctctttagagaacaccaggcaaaaagttgccgaagaaatatccgttgcccgtagccagatgttatctctggagcctgaacttaatatgtctggagatgaaaaagctcaaatgcgacatgagttactggcagaaatggcgttggaacagcagcaacaggaagaaaaagcgctgcgtatacagcaaacctgggtcagagaggcatctcgtagtaacgaacgtgatcaagatatggagcgttga

SEQ ID NO: 16976 - DNA, 1020 bp, Escherichia coli
atgagcgccgcgcttcaatacttcgaagaaaatttaccccaccgcccctatcacacggatgatctcgctttcggccttcgcatctccggcaaagggcgtgcgcttcttgcgcggtacatccagcagaaccagcctcatgcgcagttctggctggtttttgacgttgaccgcgagggggctgcgattgactggagcgaccggaacgcccccgcgccgaacatcaccgttaaaaatcctgtgaacggacacgctcacctgctctacgcactcaacatcgccgtgagaaccgcgcctgatgcctcggttaaggcgctgaaatatgccgcagcggttgaacgttcgctgtgtgagaaactttgtgctgatgtgaactacagcggcctgatttgcaaaaatccgttccacctggaatggcaggtgatggagtggcgcgaggacgcctataccctcgatgaactggcagattatctcgatttgagcgcctcagagcgtcgtagcatcgataaacattacgggatggggcgaaactgccacctgttcgaaatgacgcgcaaatgggcttacagggcgattcgtcagggctggccagcgttctcacagtggcttgaagcggtgaaccagcgtgtcgaaatgtacaatgcatcgcttcccgttccgctttcactggctgaatgtcgggctattggcaagagcattgcgaaatacacgcacaggaacttcacgccggaaactttcgcacagtatgtggctgatacgcacacgccagaaattcaggcagcacgcggtcgcaagggcgggaaggccaattcgtcagaaaatcagtcggacaaagggaaaaaaagcgccgctgttcggtggactgctaacgacgacaaacgtcgtagggcgcttgatatgtatatcttgggagcgtcaacggaagatattgcagtggcggttggtgttagcagccggactattcgacgctggatggataattctggagaatggctaaccaagaaacaaataattaaatgttag

SEQ ID NO: 16977 - DNA, 123 bp, Escherichia coli
atgctccaggaaattaaacagggccagcgccacatcctgctgaacagtattggcgaggcctgtggccccctggttcataatgagatagatcgcgctgttaccaaacaccgtcatccacattag

SEQ ID NO: 16978 - DNA, 489 bp, Escherichia coli
atggcgggctggataacgtcgtccataaaacgtttcacaagagatcgcttcggcagatacgcgatattgcgtaaccttctctgccaaggaattgggttacgtgcagccgtaggagcaattgtcgccatgctcaggctttcacgcttggtcaaatcccggcgcaaagcttttaaaagtccgtatatagatattagtaagatcactgagaagggcaatgcactcgctattgtcaccgtttgcagcgcacttagccctccggcaaggagaagcgcaattgcaacaatgcccatgagcgaggcccagaatattcgctgccagacgggtgtgtttgccactccacctgatgccagagtatccacaaccattgcccccgaatcagcagacgttacaaagaagacgatgaccatcgccattgcaatgaatgacagcacagaagagaacgggaaatgctccaggaaattaaacagggccagcgccacatcctgctga

SEQ ID NO: 16979 - DNA, 279 bp, Escherichia coli; identical to SEQ ID NO: 8129

SEQ ID NO: 16980 - DNA, 477 bp, Escherichia coli
atgcagcagctttcctttctgcccggagaaatgacgcccggcgagcgcagtctcattctgcgggctctgaaaaccctggaccgccatcttcatgaacccggtgtggccttcacctccacccgtgcggcacgggaatggctgattctgaacatggcgggactggagcgtgaagagttccgggtgctgtatctgaataaccagaatcagctgattgccggtgaaaccctcttcaccggcaccatcaaccgcacggaagtccatccccgggaagtgattaaacgcgccctgtatcacaatgccgctgccgtggtgctggcgcacaatcacccgtccggtgaagtcacacccagtaaggcagaccggcttatcaccgaacgtctggtacaggcactgggcctggtggatatccgggtgccggaccatctgatagtcggtggcagccaggttttctcctttgccgaacatggtctgctttaa

SEQ ID NO: 16981 - DNA, 477 bp, Escherichia coli
atgcaacagctttcctttctgcccggagagatgacgcccggcgagcgcagcctcattcaacgggccctgaaaaccctggaccgccatcttcatgaacccggcgtggccttcacctccacccgtgcggcacgagaatggctgattctgaacatggcgggactggagcgtgaagagttccgggtgctgtatctgaacaaccagaatcagctgattgccggtgaaaccctcttcaccggcaccatcaaccgcacggaagtccatccccgggaagtgattaaacgcgccctgtatcacaatgccgctgctgtggtgctggcacacaatcacccgtccggtgaagtcacacccagcaaggcagaccgccttatcacggaacgtctggtacaggcactgggcctggtggatatccgggtgccggaccatctgatagtcggtggcagccaggttttctcctttgccgaatatggtctgctttaa

SEQ ID NO: 16982 - DNA, 279 bp, Escherichia coli
atgctgctggttaaccgggatacctggtgtcgtgccggtgattaccgtgctccgggatcactggccgggatgattaaacaggcgtggtgcagtgccctgggagtggatgccggacgttatgccacgctggcacattttccggcctggccggcggtgtggctggaacgcgatgatgacactggctttcagcaggtgctggaacgtgctgactatctggcgaaggaacataccaaagctcactgcaccggtgagcgcaattttggctgtagccggagttga

SEQ ID NO: 16983 - DNA, 279 bp, Escherichia coli; identical to SEQ ID NO: 8154

SEQ ID NO: 16984 - DNA, 1236 bp, Escherichia coli
atgaataacaacattatagatactgcaggtagattaaaattgattgctttcaattttatgatttttgtttttttggttagagttcctggatttccctttataattttatctattatcagtataacgatactatccttatttttaataaaagttaaggttgcattaaataacaagctaattcctctttattgttttgtgatatatatgatccttcgttgcgttataggttttgtatttaatgggggatatgaagaacgatattttatggttttattgttaatgctatttgttctaattgtatttactgtagaattgaaagatgtaagattagaacagtgttataatgggatatcagctgcagtaattgttaccttgctaattgtgttatacgaaataattagtggtaaccatatgagtacatcacgttattcagatataaacaatgaggcatttttatggagtgtttcaaaaccaacagccttctattataatgaaaatgatatgttgagctttgttgtttgctttttaccgtttacttttgtattaaagaacactatgttgcgtgtcgcaatatttttactggctgctgctagtgctatatatataggttcgaaagctgcaataataacgattctaatttatgggttatttacaaaaataatctctaaaaaggcgatattacttttagtggtaactggtgttgttcttgtcaatttatttgcaacatcactaattgaaaataccagttcctttatatccggctcttcagaaagattacttggtttttgggatacgatactttcgactcgtggtggagatgaaagtacctcagaacgtctttccatttacaaagctaatctggattggcttggtaaccatcctttgtcagctacatttgggaacggaaggtttggtgattatgaaagcgaattgatgaaagtttatggtttaagaatgggggaatttcataatttacatcttgaaatgataactatattcggtttgttattttatttgttattttttagctactacttttatttatggatttgtttatttcttaaaaagaacaaaaatacagcctgttatcctttgttaatatcatcagcaatgtatccactaataatctcttttgggccaagtagttctttgaagtatccatttctttttattttatgtttactaatgatattaggatttcgaaatgatgaaaagcacgctaaaaaaaatatatag

SEQ ID NO: 16985 - DNA, 1419 bp, Escherichia coli
atgactacccatctggtctggtttcgccaggatttacgtcagcacgataatctcgcgctggctgccgcctgccgcaattcgtctgcgcgcgtgctggcgttgtatatcgctacaccacgccagtgggcggcgcataatgtgtcgccgcgtcaggctgaacttatcaatacacaacttaatgcgctgcaaaacgcgctggcggaaaaaggcattcatttattgttccgcgaagtggatgactttgctgccagtgtcgaaacagttaaacaggtgtgcgcggaaaatcgcattacccatctgttttataactatcagtatgaggtgaatgagcgggcgcgggatgtgcaggctgagaggacgctgcgtaacgtggtgtgtgaaggatttgatgacagcgtgatcctgccgccgggggcggtgatgactggcaatcatgagatgtacaaagtctttacgccttttaaaaacgcatggttgaaacggctgcgggaagggatgccggagtgcgttgctgcaccaaaagttcgtagtagcggatcgatagagcccgcgccatccattacgctgaattatcctcgtcagtctttcgatactgcgcatttcccggtggaagaaaaagcggcgattgcgcaattacgccagttttgccagaacggtgccggagagtatgagcaacaacgagattttccggcagtggaaggcaccagtcgtttgtccgccagcctggcaacgggcgggttatcgcctcgccagtgtttacatcgcctgttggcggaacaaccgcaggtgctggaaggcggaccggggagcgtctggcttaatgagctgatatggcgcgagttctaccgccatttgatgacgtattatccttcgctgtgtaaacatcgtccgtttattgcctggacggatcgtgtacagtggcaaagtaatcccgcccatttaaaggcctggcaggaaggcaaaacgggatacccgattgtcgatgctgccatgcgtcagcttaacagcactggctggatgcataaccggctacggatgattacagccagttttctggtgaaagatttgttgatcgactggcgcgaaggcgagcgatatttcatgtcgcagctgattgatggtgatttggcagctaataacggtggctggcagtgggccgcttctacgggtactgatgcagcgccgtattttcgtattttcaacccgacaactcagggcgagaaatttgaccgcgaaggcgaatttatccgccagtggctaccggagctgcgcgatgtaccggggaaagcggtgcatgagccgtggaagtgggcagagaaaacaggtgtgacgttggattatccgcaaccgatagtcgatcacaaagaggcaaggctgcgaacgctggcagcgtacgaagaagcgaggaaaggagcctga

SEQ ID NO: 16986 - DNA, 849 bp, Escherichia coli
atgtataccctgaactggcagccgccgtatgactggtcgtggatgttgggatttctcgccgcccgtgcggtgagcggcgtggaaacggtcgcggacagttattatgcccgtagtctggcggtaggcgaatatcgcggcgtggtgactgctattccggatatagcccgccatactctgcacataaatttaagtgcaggtttagaacctgttgccgctgagtgtctggcgaaaatgagccgcctgtttgatctgcaatgtaacccgcagattgttaacggtgcgttgggcaagttaggcgcggcgcggccaggattgcatttacctggttgtgttgacgcttttgagcagggcgtgcgggcgattttaggccaactggtgagcgtggcgatggcggcaaaattgacctccagagtggcacagctttatggcgaacggctggatgattttccggattatgtctgcttccccacgcctcagcggctggcagtagccgacccgcaggcattaaaagcgttaggtatgccgttgaaacgggcagaggcgctgattcatctggcaaattcggcgctggagggcaccttaccaatgacaataccgggcgacgtagaacaagcgatgaaaacgctgcaaacctttccgggtatcgggcgctggacggcaaattattttgctttgcgtggctggcaggcgaaagatgtttttctgccggatgattatctgattaaacagcgatttccgggaatgacgccggcacaaatccgccgttatgccgagcgctggaaaccctggcgttcttatgcgctgttgcatatctggtatacggaaggctggcaaccagacgaagcatga

SEQ ID NO: 16987 - DNA, 1941 bp, Escherichia coli
atgaaacccactttatatactgctactggtgagtgcgttacgccaggccgtgaactgggcaaaggcggcgaaggtgcggtttatgatattgaggagtttgtcgatagcgtcgccaagatttatcacacgccgccacccgccttaaaacaggacaaacttgcctttatggctgcaacagctgacgcgcagttgttgaattatgtcgcctggccgcaggcaacgcttcacggtggacgaggcggaaaagttatcggttttatgatgccaaaagtttctggtaaagaaccgattcatatgatctatagcccggcacatcgtcgccagagttaccctcattgtgcgtgggattttctactctatgttgcgcgcaatattgcttcatcttttgctactgttcatgagcacgggcacgtcgtgggtgacgtaaaccagaacagctttatggtaggtcgcgacagcaaagtggtgttgattgatagcgactcctttcagattaatgccaatggtacactgcatttatgcgaagtcggcgtgtcgcattttacgccgccagagctgcaaaccatgccatcatttgtcggctttgaacgcacagaaaatcacgataattttggccttgcgttgctgatatttcacgtcttgtttggtgggcggcatccttattccggtgtaccgcttatctctgatgcgggtaatgcgctggagatggatattgcccatttccgttatgcctacgcgtcagataatcagcgacgtggtttaaaaccgccgccacgatcgattccgctgtcgatgttaccgggcgatgttgaagccatgtttcagcaggcattcacggaaagtggcgtggcaaccgggcgtccgacggcaaaagcgtgggtagcggcacttgatttactacgccaacagttaaagaaatgtaccgtttcggcaatgcatgtttaccccgctcatttgactgactgcccgtggtgtgcgctggataatcaaggcgttatctattttattgatctcggtgaagaggtcattaccaccggcggtgattttgtgctggcgagagtctgggcgatggtgatggcatcagtagcaccgccagcattgcaactgccattacccgatcatttccaaccgactggcaggccgcttccttcaggcctgttacggcgcgaatacatcattctgattgagatcgcactgtcagcgttatcgctgttgctttgcggccttcaggcagaaccgcgttatattattttgattcctgtgctggcggctatctggattattggcagcctgacaagcaaagcgtacaaagcagaaatccagcaacgccgtgaggcgtttaatcgcgcgaaaatggactatgaccatttagtcagccagatccagcagttgggcgggctggaaggttttatcgccaaacgggcgatgctcgaaaaaatgaaggacgaaattctcgggttaccggaagaagagaaacgcgctctggtagcacttcacgacaccgcaagggaacggcagaagcagaagtttctggagggattttttattgatgttgcctctattcccggcgttggccctgcgcgtaaagcggcgttacggtcctttggtattgaaacagcagcggatgttacccgacggagcgttaagcaagtaaaaggttttggtgatcatctgacccaggcggttatcgactggaaagcgagctgtgaacgccgttttgtgttcaggccgaacgaagcggtaacgcctgcagacagacaagcggtaatggcaaaaatagccgccaaacgacatcggctggaatcggcgctgactgtcggtgcgacagagttgcagcgattccgccttcatgcgccagcacggaccatgccgttgatggaaccgctacgtcaggcggcagaaaaactggctcaggcgcaggcagatttaagccgttgctga

SEQ ID NO: 16988 - DNA, 843 bp, Escherichia coli
atgaaaatattccgatggttgtgctgcctggtcatgctgacttgcgcagcagaaagtctggcagcgaagaaaattgcgacattggtgaccccggtggcatattcggggtatctaacacagatacgttattatcttgaaattctgacccctgaaggggttgagtatggcgtttataagcaacacagtattgtgcttcaagctgagaatttagatttagtttcctggacagggagtaccgccgcaccgacgttgaaaatggaggagctcaatgatgcttcaaaatctacctgtgttggtcttgacgcgtatgatgctcggtcgagtaaatctgattggatctgttacaacgccagcctcggagtgtactatgatggtgaggtgcacggttgcccgtggttgatctcgacatatactgacagcaatatctcttcggtagatggtgttggtctatatattggccccaaagttcacaactcatcatgccccgtctccgtcgccgcttatgatatttcgtggagtgaagattatgttgtccattcgaaagtgctgtcgctgcaatcgacgggtggaacgattgagaaaacgctgcccacctttttgatggaaagcggcaagctctgtgacggcagcgtgatggacgatcgaggcgcatactgccgctttgtggcgcagatgatcaccttctccacctccggctgtgacagttcgaaagtgacggtcacacccaaccagcatcccatcactgacaagcaactgcacgacatggtagtgcgtgtcgataccagcagccgccagccgattgattccacctgccgcttccagtacacgctcaacgagctgtag

SEQ ID NO: 16989 - DNA, 543 bp, Escherichia coli
atgaagttaaaattcatctccatggctgtattttcagctctgaccctgggtgttgcgacaagtgcgtctgccgcaatcgtcaatggcggtactgttcactttaaaggagaggttgttgaggctgcatgcgctgtgaatatgaactcagcagaccagacagttcaattggggcaagttcgagcggcaaaattagatgctgacggaaaaatgagttcacctgttggttttgatattgaattaaatgattgtagctcagccgcctcatcaggagcttcaattattttttctggcccccagggtgggcaggcagacattttatccttgcagggtagctcagcgggttcagcaacaaatgtcgggataaaagtaatggattataaaggtgcagcagtcaagttcgatggggttacagttagctcagaatataccattactgatggcacaattaaaatcccattccaggctcgctatgttgctgtaggtggtgcagctggtgctggtattgccaacgccgacgccacctttaaagttcagtaccagtaa

SEQ ID NO: 16990 - DNA, 300 bp, Escherichia coli; identical to SEQ ID NO: 9165

SEQ ID NO: 16991 - DNA, 372 bp, Escherichia coli
atgccctggagaataatcagggatgaagaaaattatgcttcccgatttattagtctgatgtgtgaaaaagaaccggggctgaaaatagcgcagcaactggcactcgagttctaccgtattctgaaaacccaaaataaatcacagctaagtagctggttcactcgagtccacgaaagcggttcagcagaatttcggcgcgtggcggcggggatggaagctgatgctgcagctatatgtgaggcaatcagtagccgctggagtaatggtgttgtcgaaggtcatgtaaatcgcctgaagatgctaaaacgccagatgtatggtagagccggatttgaactactcaggcagagggtcatgagtccactggcatga

SEQ ID NO: 16992 - DNA, 1434 bp, Escherichia coli
atgtgcttacttgcaccagaaaatccttatccgatatatgcactaccaccgctggtgagaaatgcaataattgaaactcaaaaaaatacacaggcacctttggctatggtggcaacatccgcattaacagcgacctcaattgcctgtcagaatcaggttgacgtgtgcagacctggaaatttacgtgggcctgttaatctttactctctgattctggctgattccggtgaaaggaaaacgaccgtggataaagtgtttatgaaagcattttatctcagggatgaagccctggcggaagaatacgcgaaactggttgagaattacagtacagaaaaggaaatatgggagcaaaaacaaaaagcgctggaatcaaaatttcataaagagattcgtgccggtaaagattacaaggcaacagaatcagagcttgaaacgcatctgaataagtctcctgttccgccgcagatacgtcgaacaatttttaatgagacaacgatagagggaatgttaaaatattactccgatagcaatcgttcttttgctcttgtatccagtgaagggggggggatttttgacagccgggccatgagtaaactgggaattattaacactttgtgggatggaggttctcttttcatcgacaggaaatcatctcccggaattaatttgaaggagccaagactgacgatgtcggcgatgattcagcctgatgtttaccacaaaggtttttgtacgcgaaaaaaagaacttgtgaaaacgtcaggacatcatgcaaggtttttgatgtgtcaaccaacatcaacgcaggggacaaggataataaccggagataattattcatcacagtatcaggagttatttgataagaggatcaatgaacttattgatgaaagtctggctatgagtggtgaacgacgttgccttcacttttctcctcaggctgccagaatctggacggattattacaacgatgtggaatcgaagctggggggattggggcctttaagacattgtcgggaatatgctgccaaaaatgcagagtatatggcaagactggcaggacttcttcaccatttgagcagtgaggagggggacatttccccttacactgcagaaatggggagagaattagcaatatggtacggtaatgagtatatgcggttgtctaatccgttaacttttgacaacactgctcaaaacgagactatgcgactcattccagaggagcttgaacttttcaactggataaaaagctattgcattgagaaggggagcccctgtatgaaaaaaaatgacattttacagcgtggtccgaaccgtttccggaaaaaggataaaatcaactggttactggatttactgtatgaacaaaacagagttgtaccggttattgagggaaaaacgttgtgtgtcgcacctaactttgacctctga

SEQ ID NO: 16993 - DNA, 465 bp, Escherichia coli
atgaaaattggcgtattcgtacctattggcaacaacggctggctcatttcgacccacgcgccgcagtacatgccgacctttgaactgaataaagccattgtgcaaaaagcggagcactaccatttcgatttcgccctgtcgatgatcaaactgcgtggctttggcggcaaaactgagttctgggatcacaaccttgagtcgttcaccttgatggcggggctggcagccgtcacctcacgcattcagatatacgcgacagctgccaccttaacgttacctccggcaatcgtcgcccgtatggccgcaaccatcgactccatctctggcgggcgttttggcgtcaacctcgtgactggctggcagaagcccgagtatgagcagatggggatctggcctggcgatgactatttctcccgtcgttacgactatctcaccgaatatgttcaggtgctgcgcgacctgtga

SEQ ID NO: 16994 - DNA, 1692 bp, Escherichia coli
atgagatacatcaaatcgattacacagcagaagctgagcttcttgcttgcaatctatattggcctttttatgaatggcgcggttttttaccgccgcttcggcagctatgcgcacgattttaccgtctggaaaggtatttctgctgttgttgaactggccgccaccgtactggtgaccttctttttactgcgtcttctttcgctgtttggccgccgcagctggcgtattctggcatcgctggtggtgctcttttccgcaggtgccagctattacatgaccttccttaatgtagtcattggttatggcatcatcgcatccgtcatgaccaccgatatcgacctgtcaaaagaagttgttggtctgaactttattctctggttaatcgccgtaagcgcgttgcctcttatccttatctggaataaccgctgtcgttacaccttgctccgacaactgcgaaccccagggcaacgtattcgcagcctggcggtcgtcgtactggcaggtattatggtttgggcaccgattcgtttgctggatatccagcagaagaaagtggagagggcgacaggtgttgatttgccgagttatggcggcgtcgtcgcgaactcttatctgccatcaaactggctttcggcattaggtctttatgcctgggcgcgggtcgatgaatcttccgataacaattctctccttaatcctgcgaagaagtttacgtaccaggctccacaaaacgttgatgatacatatgtcgttttcattattggtgaaaccacgcgctgggatcatatgggcattttcggctatgaacgcaataccacaccgaagctggctcaggagaaaaatctggcggcgttccgtggttactcctgtgatactgcaaccaaactctcactgcgttgcatgtttgtacgtcagggtggagcagaagataatccgcagcgcacattaaaagaacagaacattttcgcggtattgaagcagttaggattcagttctgatctctacgctatgcaaagcgaaatgtggttctacagcaatacgatggcggacaacattgcttatcgtgagcagattggtgcggagccacgtaaccgtggcaagccggtagatgatatgttgctggtagacgaaatgcagcaatcgctggggcgcaacccggatggtaagcatctgatcattctgcataccaaaggctcacactttaactacacccagcgttacccgcgcagctttgcgcagtggaagccggaatgtattggtgttgatagcggctgtaccaaagcgcagatgatcaactcatacgacaactcggtgacctatgtggatcactttatttccagcgtgattgatcaggttcgcgataagaaagcgattgtgttctatgcagctgaccacggtgagtcaattaatgaacgcgagcacctgcacggcacgccgcgtgaactggcaccgccggaacagttccgtgtgccgatgatggtctggatgtcggataaatatctggaaaatccggtcaatgcgcaggcatttgcgcagctgaaaaaagaagccgacatgaaagtgccacgccgtcatgtagagctgtacgacaccatcatgggttgtcttggctatacttcaccggatggtggaattaacgaaaacaacaactggtgtcacatcccgcaggcaaaagaggcgtcggctaactaa

SEQ ID NO: 16995 - DNA, 1053 bp, Escherichia coli
atgaaaattaaaaacttgttggcaggtatggtgcttttagggacgagcacctttaccgggaatatatgggctgcggattgggggccgtgcaggacggcaagtggtgacccctttatttttgttacatcattcaccaaaaatattcaaaatccgacggataatgttaccgggcagacctaccctgatttttaccaatgggcactgggtgataaatattctggtgtttgtgaatgtccatcaccgaacccgacagaagcacgaccaacgctatataaaactgagtcaacattggcggcggggcataactcaacctattttaaaattaccaataatcttgaggtttcaacccgggtatatattgcaaacgtggggaatgtacaggttccatttatcaataaatcaaatagccagccaggaagagagtgcgatcaaccaacttttggctggactacagggagtaaaggacagctctcactttatatcgctaaaccttttgttggggaacaaaacattccgcaaactattatagtttctgtgtttggtacaaaaaaggagaatgtttatagttcagttccaatatcacaggtgcttctttcaggaaaggtcaccgtaactcaaggctgtgaacttgccgcagggacatcattggatatcgactttggtgagtatcaggcccatgatttcaaaggtcgaaccgggcagtcgccacaaaatgtccagaaaatacaaaaagaattaacgtttaactgtactaatatttctgatggtgtccatatctatctgagtcttgaaggtacgccaaacgcggcttaccccagcgcaatcagtttgggcaacgcggatgttggtgcggtaattgaggatggtaaaggtaatattcttaagccgaatgatagtaatagcttattagaaatgaatcccggctcactgtacgaatatgtcaaacgtaaagtaacaaccaccattactgcttatccggttagtacaaccgggaaattacccgcagccggtgattatagcggtgtggcaacaatgcatgttgaattggattag

SEQ ID NO: 16996 - DNA, 687 bp, Escherichia coli; identical to SEQ ID NO: 11901

SEQ ID NO: 16997 - DNA, 1464 bp, Escherichia coli
atgaaaccttccactgaatggtggcgataccttgcgccgctggcggtcatcgccattattgctctacttccgcttcccgcagggctggagagtcatacctggctctactttgccgtttttactggcgtgatcgttggactgatcctcgaacccgtgccgggtgccgtggtggcgatggtgggtatatccatcatcgccattctttcgccgtggctgctgtttagcccggagcagctcgcccagccaggttttaagttcaccgccaaatccctctcctgggcggtttctggtttttctaattcagttatctggcttattttcgccgcctttatgtttggtacgggctatgaaaaaaccgggcttggacgtcgcatcgctctgattctggtgaaaaaaatggggcatcgcacgctgtttctcggctatgcagtgatgttctccgagctgatactcgcgcctgtaacaccgtccaactcggcgcgtggtgcggggattatctatcccatcatccgtaacctgccaccgctctatcaatcacaaccaaacgacagcagttcgcgcagcattggctcgtacatcatgtggatggggattgttgccgattgcgtgaccagcgccattttcctgacggcgatggctccaaatttgctgttaattggactgatgaaaagcgcatctaacgccacgctgagctggggcgactggttcctcgggatgttgccgctcagtattttactggttctgctggttccctggctggcttacgtgctgtacccgccgatactgaagtctggcgatcaggtgccgcgctgggcagagacggaactgcaggcaatgggcccgctctgttcgcgtgaaaaacggatgctggggctgatggtaggcgcactggtgctgtggatttttggcggtgattatatcgatgccgcgatggtcggttacagcgtggtggcgctgatgctgcttctgcgcattatctgctgggacgacattgtcagtaataaagcggcgtggaacgttttcttctggctggcctcgcttatcaccctcgctaccggactcaacaacaccggttttattagctggtttggcaaactgttagcaggcagcttaagcggttattcgccaacgatagtgatggtggcgttgattgtggtcttttatctgctgcgctacttttttgccagcgccacagcgtatacctccgctctcgcaccgatgatgattgccgccgcgctggcgatgccggaaatcccgctgccggtgttctgcctgatggttggtgcggcaattggtctggggagcattcttacaccatacgccaccggacccagtccgatttactacggcagtggttatctgccaacggcggattactggcgactgggggcgatttttgggctgatattcctcgtattgctggtgattaccggcttactgtggatgcccgtggtgttgctttaa

SEQ ID NO: 16998 - DNA, 333 bp, Escherichia coli
atgacccacggaatatgggagttggggaacggtcaggagaaaaaatcggtgaaggtaagcggacatctttcctccaatagcggcgagattgtgctgcaatgggcgctggagggcaaagggattatgctgcgttccgagtgggatgtgttgccgtttctggagagtggcaaactggtgcgagtattgccggagtatgcacaaagcgccaatatctgggctgtttaccgggagccgctctatcgcagcatgaaattacgtgtctgtgtggaatttctggcggcatggtgccagcaacggctgggcaagcccgacgaaggctatcaggtcatgtag

SEQ ID NO: 16999 - DNA, 150 bp, Escherichia coli
atgcctatcgccaccgtcggtcgcaatgtcggttttgatgatcaactctatttctcgcgagtatttaaaaaatgcaccggggccagcccgagcgagttccgtgccggttgtgaagaaaaagtgaatgatgtagccgccaagttgtcataa

SEQ ID NO: 17000 - DNA, 1968 bp, Escherichia coli
atgaaaagaataattgtaagtcatttcccatataatggctcattcagtaacggcgtaattaattatactaaagctgtaaactctgttatcgatgcaaattacaaaatcgtatataaagggcaaaatgaaacacaggaggcgtttaggaataggctcctgagaatgatgaaatttaattacagtccggaagaagttattatcgaagtcgctgagtctcaggcgtcagcactattaattcctagaggttttaatgtgcatgttagaatgcattgcccattttatctttataaaaaaataataaaagaagaacctgatgaacaacgtttttctgaagaggttagggggatatataaggcgagagcggtgtcttcaccatcacacggaatgctaaatttattaaaaaatgaattggatatagatgatatacatgtatttaagaatccgattgatcttacaaatgttgatctaagtgatatcaataaagatattgatgttgtatttttgcttagatttaacaggttgaaaggtgtggagtatttaaatccaattttacgaatgttaccagaaagttataatgtgatattgataggaaaacaagaggaaaaattttatttagatagtagagttaggtgtaaagtaacaattagagaacatgttgaaggtgatgaaaaattcgagattctcaaaagagctaaagtctctttatcgttgagtaagttcgaaaattgttctatggttattcttgaaagtattggtgttggaacatcggttgtatgttgggatgtcggtggcaatgctgaaatagcctcaccatcaattatatcagtaattgattatgaagatgtattcgcatttactgataaaataaaagaaatagtagataattacaataataatagttatcctcctaaagaggcgtttgaagaggcaatcaagaggataaatgaggattatattaatggggcaaaatttattgagacaaatatatctaataaatctggtgtttataaaggtctagattatagcactgagcatgcacaaaaaaaacatataccttacgaattgaaagggcattcgtggaacgatttagaatatcgtcctataaaattcttggccttattaaatgattctgagtctgttagtactttatatcattttttcaaaagtaatgatttcgccataacaatattgtcaagatgtgaaaacaacattgaatataatgatgtctatacatttaattgggtggctagattacaaatggtacatgaaaaaatcaaagatcttaatccggatataataattgttgaagatatagggtttacagatgatgtaaagaaaaatattttcataaagagtttaaaaaaaccggttgttttcctaagtaaaataaactctaacttaatattagatagacatggatggcatacagatagttatattgctaatagaaaaataaaaattgataatgttcctcaattaaatatatatcctcgtatttcgaccaatgttttaatcgttcccaatcaaaagcaaccatcctacatacacgccatagaaaaaataaaggagaaattaattgccgagtataacatacaaaaagcttatgtgattggagagttgccattttatgattcattttttgaaactttagataatgatgagatctctatacatgaaggagatattaccgatataatatttttagatgattttatgtgtgttgattacttagattatcatgccaatatatattattattcacaaagttgtcttttaacaaataaaaatataggtttagatttttctcggtgtggattaaataaggagattataattgagcctgaaagggaagttttaaatcagttaattaagatgaagactataagcgcccagaataaaattgaaaacatacaagatgaaattatttccgtattaaatcaatcaagttataaaaaacactattattga

SEQ ID NO: 17001 - DNA, 2346 bp, Escherichia coli
atgcgtaaaattaggaagctgttaagaaatcctaaagccttttttaatgactcaaagttaataaaaaaaataacaaaaaaagaaatagagaaaattgctatatttataggatttagcacgtggaaaaaatacataagaaattatttcaaagagtatgaggttttatttgtcgataaaaatatagacgtaaaaacgctttcatccatactaattaaatatgggaagtatgatattagtgtatttatttgggggtataaaataagtgatgaaaatgtaaggttgctaaaaaataaaaatattaaaataaattatgttgaagatggttttattcgatcagttgagttaggtgcaacaaaatgtccaccattatcattatgcattgataataaagctgcttattttgattcaacaaaaaaaactgctttagaagatttgttaaataactataattttgaaaaagatccttcacttattcctcgggcatcttctattataagtaaaataatcgagaataacattagcaaatacaatagcgctcctattaaagatgtttctaaaatatacggaaaaaaagataggtatagagtccttgttataggacaagtagaagatgacgcatcaattaaatatggatacaaaggtcacattactaataatgatctggttaaactggcggctgcagaaaacccaacagcacaaataatttataaaccacatcctgatgttctcaatggatacagaaaatattattctgacccaagagatgttgctaatatttgtttggttctgaaagaaaatatatctttagcatcagcgtttcaaacaatagatcatgtttatactataacatctctcagtggttttgaggctattttacgcggaattaaagtaactacattaggtgatgcattttattcaaattgggggttgactgatgacaggcaaaataatattcgaaaaaaaaggaagctaaccaaagagcaattatttgctttagcgtatatagtttacccaaaatattattcagctttaaatggggacttaattacaatagaggaagctattcagttattactttgtgatatttccgaaaaaagaaaaaaacaagcgcaagaaatacaaaagaaaaatatagaatgtaatgtctacgataaaataaaaagattgatgttggctggtgattttattaaagctgagggagtttgttatcagcaatggaataaaaaaccatgggatatagaacttgtgattttaatgtcgcaaatttatagaaaaaaccataggtatgatagtgcgatatatatctgtgaggctttatcatctagagttaaaaattatcgggtcttgatggagttattttatagtcttcaggagcgaggtgataaaagtgataagcttaaaaaaattttgattaatgcgatagagttaagtcctcctaatgtttataaagcaagaattgaattaattaagtacatttggggaatgtatggtgttgggccagagctattagctcattgtggtattttaaataatcagaatataaccccggttaatcggatgctattagcggcaatatattgcgaagctgggaggtatttattagcggagaggcaatatttaattgcgaaagaaagtgataaagatatactgctcaaagtccagtatttttatttgttagagcatttgtattctaagggctatatagataataaattaggcctaataatatctaaaatctctcaaaaactaaaagatgggcaaagctattttgaatatcttataagaaaatattacgacagttttgcaattgttggtaatgctccttctgaaattggtttaaataatggagatgcaattgacgaaaaaaaattaattatacgttttaatgcttatagtgctgattatcctgaatctagagattatggtgttaaaacagatatttgggttaaaactggtgcatatctcgatgttcctcgacgggattttaattcttttaagttagtaattatttcaggatataatccttctcatagaaatgccatgggggttgatttatttttggatgtgttggataccaaagctcaaatatgttgtgttccaaagagaatttatgaggaactattccttgaattaggtgcaaccccatcagcgggacttgcaattatttattggatatataaaataattggtccagtgaataaaaaacatgtttttggcttttcttttggtcagcaacaaaaacataatagcgaacactattttgtaaacaagcataaagttgaatatagttcccatctttggaagtctgaagcggttttgctaaataaatatattaaatctaattaa

SEQ ID NO: 17002 - DNA, 993 bp, Escherichia coli
atgctgaagaaggtgatttttctgattgccatgtccggttgtggttctgctgttgcagacagaagcacagtattttatacatttaatgatacattgaatagtcccaatgggcggctttattcgacagtcggtgtaccagttccaattaatataagcgggacgtcaaatgcaagcctgagttacagagagtgtaatggttttacatggtcacatgggctgttctggtcagaatatttcgcatggatggttatacccaagagtattgtatataacggggtagtgatttatctggacatacagagcaaaggaggctggtcattggatgcggaggataatgataactattactttgtgcagggttatgcatgggatgaggtgaacacttctggtaatacatgtgcattttctggcgacaacaggcctttatcatggacatttggtggtgtaactatgagcgcatatcttcctgctgatatgccattaggaatgcatacgatccccattaaatttctacgtggtatacaacgaaataacttctcttatattggtggacgttataagataccatcatccacgatgaaaacttttacattcagaagtgtgtcaaatttaaattttgaagttattggtgggtgtcgtccctcggtacagtctttagatatcgagcatggtagtctctcaattgataatgctaatggtcatatggtacataagtctctctctgtttactgtgatattcctgccagcattaatatttatttattgccaaatacacccgggaattacagttctacaggtacaaatgtcggcctcggaaatggatgggattcaatagtttctcttgatggcgtggagcgagacaaagaaaacatcagatggagcagtgctggttcaaaaacaattacagtggggagtcgtttatatggtgaggccggaaagataaaacctggaaacctgtcaggttctatgacaatggtttttagtattcgttag

SEQ ID NO: 17003 - DNA, 300 bp, Escherichia coli
atgagcaaagcatttactgctgaatttaaagtcgaagcggcaaaactggtcctggatcagaactacactcacggcgaagcggctaaggcgatgaacgtcagcctctccgccatcaaccgctgggtaaaatcgttacgtatggagcgccaggggaaaacgcccccggggctgcctctgacacctgagcagactgaactcagggaaatgagaaaacgaatacaacgccttgaaatggagaatgaaatcctaaaaaaggctaccgcgctcttgatgtcggactccctgaacagttcacgataa

SEQ ID NO: 17004 - DNA, 432 bp, Escherichia coli
atggtcagcgctaagggcgtcagactcgggcgatggctggccggtaagctgatgaaagagctggatatctccagttgccaggtaccggtgcataaatacaaacgcggcgggaacgaacacgttgaaataccgaaccatctcgaccggcagttcgcggttaccgcgccggatcaggtctggtgcggcgatgtgacctatatctggacgggaaaatgctgggcttatctggcagtagtgctggatctgttcgcccgcaaacctgtgggctgggcgatgtcgacgtcgccggactctgccctcacggtcaaagcgttgcagatggcctgggagcttcggggtaagccaacaggcgtgatgttccacagtgacagtaataatgccggtatcagtttttatcatcactctgtttgctgtttaaccagactggtgtga

SEQ ID NO: 17005 - DNA, 207 bp, Escherichia coli
atggagcggttcttccggagcctgaagaccgaatgggtgccgacgaagggctataacagcttcaacgaggctcagagcgcgataatccgctacatcacaggctattacagtgccatccggccccactggtataacggtggcttaacgccaaatgaatcagagcagctgttccacgaacagtcaggtcgtgtggccaaaattagttga

SEQ ID NO: 17006 - DNA, 702 bp, Escherichia coli
atgaaacttaacgacagtaacttattccgccagcaggcgttgattaacggggaatggctggacgccaacaatggcgaggtcatcgacgtcaccaatccggcgaacggcgacaagctgggtagcgtgccgaaaatgggcgctgatgaaacccgcgccgctatcgacgccgccaaccgcgccctgcccgcctggcgtgcgctcactgccaaagaacgcgccaacattctgcgcaactggttcaatttaatgatggagcatcaggacgatttagcgcgcctgatgaccctcgaacagggcaaaccactggctgaagcgaaaggcgaaatcagctacgccgcctcatttattgagtggtttgcagaagaaggcaaacgtatttatggcgacaccattcccggtcatcaggccgataaacgcctgattgttatcaagcagccgattggcgtcaccgcggctatcacgccgtggaacttcccggcggcgatgattacccgtaaagccggtccggcgctggcggcaggctgcacgatggtgctgaagcccgccagtcagacgccgttctctgcgctggcgctggcagaactggcgattcgcgcgggcgttccgactggcgtgtttaacgtggtcaccggttcggcgggcgcggtcggtaacgaactgaccagcaacccgctggtgcgcaagctgtcgtttaccggctag

SEQ ID NO: 17007 - DNA, 1269 bp, Escherichia coli
atgtatgattttgtgattattggcggcggcatcatcggcatgtcgaccgccatgcaactgattgatgtttatccggatgcccgcattgcgttgctggaaaaagagtccggcccggcctgtcaccagacgggccacaacagcggcgtaatccatgccggggtctattacacgcccggcagcctgaaggcgcagttttgcctggcaggaaaccgcgccaccaaagccttttgcgagcaaaacggcattcgctacgacaactgcggcaagatgctggtcgccacgtctgaactcgaaatggaacggatgcgcgccttatgggaacgcacggcggcgaacggaatcgatcgcgagtggttaaacgccgaagagctgcgcgagcgcgaaccaaatatcaccgggctgggcggtatttttgtgccgtccagcggcattgtcagctaccgcgaagtgacggcggcaatggcaaaaatttttcaggccagaggcggtgagattatctataacgccgaagtcagcgccctcagtgagcataaaaacggcgtggtgatatgtacccgtcagggcggtgaatatgaagcatcgacgctgattagctgttccgggctgatggctgaccggctggtgaaaatgctcggcctcgaaccgggctttattatctgcccgttccgcggcgagtatttccgccttgcgccggagcataaccagattgttaaccacctgatttaccccattcccgacccggcaatgccgtttttgggcgtgcatctcacccgcatgatcgacggcagcgtgaccgtcgggccaaacgcggtgctggctttcaaacgcgaaggctatcgtaagcgcgacttctcatttagcgacacgctggaaattttgggctcgtcggggattcgccgggtgctgcaaaaccatctacgctcaggactgggcgagataaaaaactcgctgtgcaaaagcggctatctgcggctggtgcaaaagtattgtccccggctttcgttaagcgatctccagccctggccccccggtgtgcgggcgcaggcagtatcgccggacggcaagctgattgacgattttctgtttgtcaccaccccgcgcacgatccacacctgtaatgcgccctccccggcagcgacatcagcaattcctattggtgcgcatattgtcagcaaggtacaaacgctgttggcaagccagagtaaccccgaacgcacgctgcgagcggcacgtagtgtggatgccttacacgccgcattttatcaataa

SEQ ID NO: 17008 - DNA, 765 bp, Escherichia coli
atgaccctgcgtcgcctgccggatgaagatccgcagaatctggcggacccggcttaccgccgccgtcgcatcatcatgcagaacatgcgtgacgaagagctggccattgcccaggtcgaagagatgcaggcagtttctgccgtgcttaagggcaaatacaccatgaccggtgaagcctttgatccggttgaggtggatatggggcgcagtgcggcaaacaacatcacacagtccggtggcacggagtggagcaagcgcgacaagtccacgtatgacccgaccgacgatatcgaagcctacgcgctgaacgccagcggcgtggtgaatatcatcgtgtttgatccgaaaggatgggcgctgttccgttccttcaaggccgtcaaggataagctggatacccgtcgcggctctcattccgagctggagacagcggtaaaagacctgggcaaagcggtgtcttataagggaatgtatggcgatgtggccatcgtcgtgtattccggacagtacgtggaaaacggcgtcaaaaagaacttcctgccggacaacacgatggtgctggggaacactcaggcacgcggtctgcgtacctatggctgtattcaggatgcggacgcacagcgcgaaggcattaacgcctctgcccgttacccgaaaaactgggtgactaccggcgatccggcgcgtgagttcaccatgattcagtcagcaccgctgatgctgctggctgaccctgatgaattcgtgtccgtacaactggcgtaa

SEQ ID NO: 17009 - DNA, 366 bp, Escherichia coli
atggttttttgctctcaaccattaataaaatacgcaaacccaatgcttattttattgagtggtctgttactgtctattatcattatccttctcagaatgatttatatttcacaagcgaatgcaccatggacaaccaaaaaacgttcacatgtactagttcattttctttctgcatgtttcatagcgtcaacattgacgttgttatatcaggcttacgataataacatcacacacaaattgtactgtaaaaatatacaacaacttattgaaaaaaggatagaaacagaaaaaaatatcagcatattcagtgggatgcaatgcaccccggcatatgattactctttattgggatttaatctcttataa

SEQ ID NO: 17010 - DNA, 1317 bp, Escherichia coli
gtgacagcagagctgcgtaatctcccgcatattgccagcatggcctttaatgagccgctgatgcttgaacccgcctatgcgcgggttttcttttgtgcgcttgcaggccagcttgggatcagccgcctgacggatgcggtgtccggcgacagcctgactgcccaggaggcactcgcgacgctggcattatccggtgatgatgacggaccacgacaggcccgcagttatcaggtcatgaacggcatcgccgtgctgccggtgtccggcacgctggtcagccggacgcgggcgctgcagccgtactcggggatgaccggttacaacggcattatcgcccgtctgcaacaggctgccagcgatccgatggtgaacggcattctgctcgatatggacacgcccggcgggatggtggcgggggcatttgactgcgctgacatcatcgcccgtgtgcgtgacataaaaccggtatgggcgctggccaacgacatgaactgcagtgcaggtcagctgcttgccagtgccgcctcccggcgtctggtcacgcagaccgcccggacaggctccatcggcgtcatgatggctcacagtaattacggtgctgcgctggagaaacagggcgtggaaatcacgctgatttacagcggcagccataaggtggatggcaacccctacagccatcttccggatgacgtccgggagacactgcagtcccggatggatgcaacccgccggatgtttgcgcagaaggtgtcggcatataccggcctgtccgtgcaggctgtgctggataccgaggctgcagtgtacagcggtcaggaggccattgatgccggactggctgatgaacttgttaacagcaccgatgcgatcaccgtcatgcgtgatgcactggatgcacgtaaatcccgtctctcaggagggcgaatgaccaaagagactcaatcaacaactgtttcagccactgcctcgcaggctgacgttactgacgtggtgccagcgacggagggcgacgccagcgcggcgcaaccggacgtgaacgcgcagatcaccgcagcggttgcggcagaaaacagccgcattatggggatcctcaactgtgaggaggctcacggacgcgaagaacaggcgcgcgttctggcagaaacccccggaatgaccgtggaaacggcccgccgcattctggccgcagcaccacagagtgcacaggcgcgcagtgatactgcgctggatcgtctgatgcagggggctccggcaccgctggctgcaggtaacctggcatctgatgccgttaacgatttgctgaacacaccagtgtaa

SEQ ID NO: 17011 - DNA, 633 bp, Escherichia coli
atgaaattctctcgaattgaacaaagcccaacaacggatgagggtaattacgtgaaaatcgatcatgactttggctattttctagatcctaataaaatggcctcgatagctaactatgaggatgagtctgccgcgctattaaaattgatgctaattcatgaggactttcttcgggttgttattgaaaacttacgacctgatggctctgaaaaatacaattcgataagaagctataagtattttgcgtcaaagctgtctgccgcagttctgttagggctgcctgtctcgcttgcagacgctatggctgagctcaacacaatacgtaacaagtacgctcataaaattgaatatgtaattacaaatgaagaggttgataaactcgcagaatcgattaaaaacataaagttagaagagattaaccatggtggctacgtgcatcaagttgttgagccaattctcaaggatggaatatacgctatagcgttgatgaaagagctacctcctgatcttgaagaaaatcgcattcgtatttgtaagttagtcactagcgcgcattgtatgtgtttgctcggggccttctggttaattaacactctgcacgtaaagggtaagctcaagctttccaaggcctga

SEQ ID NO: 17012 - DNA, 174 bp, Escherichia coli
atgtcagattggaacattgcagcaaaaccgcaagaggaacgtgacaatgttaactttgaccttgctgcgtctggtgttgcatataaagaacgctccaaaattctcgtcatagccgaagtggtgatgtgccagcaaccagagcatctttgtgattacttcatggagcgcgtctga

SEQ ID NO: 17013 - DNA, 201 bp, Escherichia coli
atgatgtattcagtaactttcgatgaaactggacgagtagaagatattgaactagagcgtgaggttagagccggagatagactctcgcttaatattgatggtcttgatggtatttatatagtcatgactgttagcggccctatctatgaaaatgtttgtgtgccaatgaatatccgggttcaaaagtattggaagcaatga

SEQ ID NO: 17014 - DNA, 267 bp, Escherichia coli
atgattactagaaatcttggcgaagaaacaatcaatagtattatcgaagaagataatctgctgtcagagcaggttcaagtcattgatggttgcatcgttataaatattgaatatgagtaccccattcccttgaatacatgctcaacttatcaacaaattttgcattgggtatggcacttggcggaaaaaacatggatgacgcaaattgtcactcgtcgtttcatcgaaattgcctgccaacatcataatttagaatataattattaa

SEQ ID NO: 17015 - DNA, 675 bp, Escherichia coli
atgatgcatgtcagaaatttttcgtattacacaccggcagagccggatgtggcgggtgcgatatacctgaaatctgaggatggtcaggactggtatgaatgccagtccaggtttgcggaagacacgctgaaggtggtgtatgacagccgtggtgtgattacgggatatggtaaggacattaagttgttgtggccggtgaaccagagtgtggctgaagtgccggacacaccggagagcctgaaaattgacctgagcggacgctgggggtttgacggggaaaaaatcaccgacctgctgacggctgacagagcccgtgaacagaagggggcagaaataaatgcctggcgaagtgccatggaaaatgcggagtatgtgtttgagtacaatggacggaagtgggactacggcaaggtgactcaggttcgtcttgagccgtcggtggcagcagcaaaagcgggaatactgccggagggatttttctggacagatgcagaaaataatgacgtgccgatgacagcggaggctttgatcgcgctcagtgctgcggcagaaaaggcgatgtttcagaaagggatggaaatccacattcgccagcgcacgatgaagaaagagctggaaaagctgaccagtgcggatgaaatactggcatatccggttggctgggagatgaaataa

SEQ ID NO: 17016 - DNA, 225 bp, Escherichia coli
atggagagttatgttttttcaccgtccgcgaatatgttttatccggtatccctgcgtgccgtttatgaggccgccgggaactggcctgtggatggtatcgtggtggactatgccgtgtataaagtttttgcagcggatgctgcaccggcgggcatgaagcggggcgtcggtacggaaaaaatgccggtctgggtgccggtatcggaagagggcacgggaaaatga

SEQ ID NO: 17017 - DNA, 1461 bp, Escherichia coli
atggcagtcagaatatctggtgtgctgaaggacggcgcggggaagtcggtaccgggatgcacgatagagctgaaagcgcgacgtaccaccgaaacggtgattgtcaccacggtggcatacgggcagccgggggagacaggcagctacagtatggatgttgaaccggggctgtaccgtgtgaccctgaacacagaagggcgtatgccgtcatacgtcggtgacattctggtgaaggcggactctgcaccgggaacactgaataaattcctgatggactttgaggatgcgccatattatccgaaagccctcgctgagctggaagcggtggcagcggaaatactgaagcgtgctgaagcctctgcagccagtgcagaggaggccaaaaaacgggcagagaatgccagagggccgaagggtgataaaggcgacccgggaccgcagggggtacagggaccgaaaggtgagacaggtgcaaccgggccaaagggggagcgtggtgaaacaggtgcacagggtgctccggggccaaaaggggataccggtgccacaggccccgagggtaaagccggtcctgtgggaccaaagggtgaccggggggatacggggctcagaggtgagcggggcgagaaaggagagaaaggagacccgggtggccctcccgggccaaagggcgatacaggcccggcggggccgcagggaccaaaaggagataccggtccacagggaccaaagggggataccggaccgcaggggcctcagggaaagtcaggcagccttgaagatattacagacagggaagccttcatccgtgagcttggtgtgcccagagcatacgggcgtgatatttcaaccggcgcaggtgagtggacgacagaagagtttgttgcctggctgaaagagcagggggcatttgaccacaccttctggatgatgaaggtggcactgcctgcggcgatgaataaggttattacagatacgggactcgggaaaattaacctgggcggatgtgctgtagaggtggcaggaacatataacgctgcgattgtccgtgtgaccatcggggaatacgccgcaacggggtttctcaacggaacggtctgcacctgtactgtttatggcgatacccggaaataccactggcgggtggattacagtaccaggaataaacccacgacggcgagtctggctgtcaatggctgggaacgtgatgaggccacaggccggatacggcaatgggggcgtattgacgtgagtcaggctgatggtaaagcactgtccctgcactccgttcgtttccctgttgcttttccgagtgctgtactgaatgttcaggtatctgcagtgggagaccagcataccattcagatgtataccctgtcagaaccgtcattacagacggtgacacttcggactattaaggggagttacgggacatttttctgggaagcgaccggatactga

SEQ ID NO: 17018 - DNA, 141 bp, Escherichia coli
atgtcgcaaaaaccgttaaaaaccaccgtgatttgtatcacggtagtgctcattatctggaccacccacagttcactgtgtgaattccggttccggatagcgggcgcggagattgcggcgttcttacagtgtaaacagtaa

SEQ ID NO: 17019 - DNA, 3477 bp, Escherichia coli
atgggtaaggggggcggcaaggggcacacaccgcgtgaggcaaaggataacctgaagtccacgcagatgatgagcgtgattgatgccattggtgaagggccggttgaaggtccggtgaagggactgcagagtattctggtgaacaaaaccccgctgacggatatggacggtaatcccgtgatacatggcgtgacagccgtctggcgtgccggggagcaggagcagacgccgccggaaggctttgagtcttccggtgcggaaaccgcactgggcgtggaggtgacgagggcgaagccggtgacgcgcaccatcacgtcagcgaacattgaccgtctgcgggtcaccttcggggttcagtcactggtggagacgacctcaaagggtgaccgtaatccctcttctgtccggttgctgattcagcttgagcgtagcgggcactgggtgacagagaaggatatcaccattaacggtaagaccacctcgcagtacctgacgtcggtgataatcggtaacctccctgagcgtccctttaatatccggatggtcagagagacggcggacagtaccacagaccagctgcagaacagaacgctctggtcgtcatacaccgaaatcatcgatgtgaaacagagctacccgaacacagccatagtggggctgcaggtggatgcggagcagttcggtgggcagcagatggcggtgaactaccatatccgcgggcgcatcatccaggtgccgtcaaactatgacccgggaaaacgtacatacagcggtatctgggacgggactctgaaaccggcatacagcaacaacccggcatggtgtctgtgggatatgctgacgcatccacgttatggtatgggaaagcgcctcggggccgcggatgtggacaagtgggcgctctatgccctcggacagtactgtgaccagccggttccggatggctttggtggtacagaaccccgtatgacctttaatgcgtacctgtcacaacagcgtaaggcgtgggacgtgctgggggatttctgctctgcaatgcgctgtatgccggtatggaacggacagacgctgacgtttgttcaggacagaccatcggatgttgtctggacttataccgccggtaatgtggtgacgggggaggatggggtaagttttcattacagcttcagtgccctcaaggacagacacacggcagttgaggtgaattacaccgatccgcagaatggctggcagacatcgactgaactggtggaggatccggatgcgatactgcgttacggacgcaatcttctgaagatggatgcgttcggctgtaccagccgtggtcaggctcaccgggcaggcctgtgggtgataaagaccgaactgctggaaacacagacagtggatttcagtgtgggggcggagggactgcgtcacacgcccggcgatatcattgaaatcagtgataatgcgtatgccggtaccgttatcggcgggcggatcctgtccgtcgacaacgccagccggaccctgacgcttgaccgtgaagtcaccctcccggaaaagggcacatccacggtgaatctgataaacggcagtggtaagccggtgagtgtggatgttaccgggcagccatcacctgacaggatacagatcagcacactgcctgacggggtggtggaacacagtatctgggggctggcattgccgggactgcgccgccgtctgttccggtgtgtggcgatccgcgaaaatgcggacggtaccttcgccatcacggcggtgcagcatgtgccggagaaggaggccatcgtggataatggtgccacctttgagccgttgtccggttcgctgaacagtgtcacacctccggcagtacagcatctcacggtggaggtaagcgcgtctgacggtcagtatctggcggtggcaaaatgggacacgccgagggtggtgaagggcgtgcgcttcagtctgcgcctgaccagcggaaccggtgaaaacagccgtctggtgaccagcgccatcaccgccgacacggagcaccgtttcagcggtctgcctctgggggagtacaccctgacggtcagggtgataaacagctatggccagcagggggagcctgccaccaccacgttccggattaacgcaccggcagcacctgccagcattgaactgacgccgggttattttgaaataatggtggtaccgaaactggctgtatatgatccgaccgttcagtttgagttctggttttcggaacagcagattacagatctgttacaggtggagaaatctgcccgttatctggggacaggcagtcagtggagtgttaccggttcccgtattaaaccgggacaggatttctggttttacgtacgcagcgttaacctggtcggtaaatccgcgtttgtggaagccagcgggcatgccagtaatgatgccgccggatatctggagatgttccgggaaaagataggaaaactgcatctggcacaggaattgtggtcgcagattgacaacggccagttgaaggatgagatggcggaaatgaagaccaccatcacggaaacccggaacgaaatcacacagacggtcaataaaaagctggaagaccagagtgccaccatacagcagatacagcgtgtgcagaaggagacggatgacagcctgagcgcactgtacatgctgaaggtgcagaaaacgaaaaacggtattccgtatgttgccggtattggtgcagggattgaggatgttgatggccagccactgagcaatattctgctgcaggcggaccgtatcgcgatgattaacccggagaacggcaacaccacgccgctgtttgtggcgcaggggaatcagttgttcatgaacgacgtgttcctgaggcgactgtttgcggtgagcatcacctcgtccggcaatcccccgacgttctccctgacgccggaaggcaggctgacggcccgtaatgcggatatcagcggaaatattaatgcgaactctggcacgctcaataatgtgaccattaaccagaactgccggattctgggaaaactgtctgcaaaccagattgaaggtgacctggtcaaaacagtggggaaagctttcccacggaataacagttatgccagtggcacgataacggtcaccgtttatgatgaccagggattcgacaggcagatcatcattccgccggtactgttccggggggcgagacatgaacaccagtccagcaaagatcacacttcaacatggtattccacgtgtcagttacaggtgcagatgaacggaagggtgatttttcatgagccggcaacggatgtcacccgggtgttttcgtccgtcattgatatgccggcaggacggggtcatgtgaccctgacgtttaatgtgtggtcgaacggggtgagccactggacgccgacaacatacatcagtgatttactggttgtggtcatgaaaaaatccacggcgggtatcagtatttcgtga

SEQ ID NO: 17020 - DNA, 1164 bp, Escherichia coli
atgaaaaaaatgacagtggcactttctgctgttgcagtggcagtgatgtttgctgcgggggctcaggcagcagaagtttataataaagatggtaataagctggatctttatggtcgtgtaactgctctccattacttctcagacgataaaggtgatgatggcgataagacctatgcacgtcttggttttaaaggtgagactcagatcaatgatcaactgacaggttttggtcactgggaatatcagttttcaggtaataaggcagagtctgaagggacggcaggcaataaaacccgtctggcatttgccggtttgaaattcgctgatttaggtagcattgattacgggcgtaattatggtatcgcttatgatgtcggttcatatacagacgttctgccagaatttggtggcgatggctggacgcagactgataacttcatgactgctcgtacttccggagtgctgacttaccgcaatacagatttcttcggactggtggatggtcttaactttgcagcccagtatcagggaaaaaatgagcgagatgacctccagaagtctaatggtgatggatatggtttctctgccagctatgagtttgatggttttggttttgtggcagcgtataccaagtcagatcgtacaggtaagcaggttaatggcctgaatggtagcaaaactattgaagtcaaagatcctttaacgggggatgtgacggaaaaagaagtgtcagttgattccggcagcgttgcaaaaggtaagtatgctgagatgtgggggactggccttaaatatgatgcaaacaatctgtatctggctgcaatttattccgaaacccagaatatgaccacttttggtgataccggggttgcggataaagcacaaaaccttgaaatggttgctcagtatcagttcgattttggcctgcgtccatctctggcttatctgcagtcccgcggacaggatgttatggttggtggtgtgaaccatggcgaccaggatctggttaaatatattgatgtcggtgcgacttattactttaacaaaaatatgtccacttatgttgattataaaattaacctgattgatgaaagcgaatttacccagaaagccggtattgcgacagataatatcgttgctgttgggatgacttatcagttctga

SEQ ID NO: 17021 - DNA, 330 bp, Escherichia coli
ttgaaaacatttcgctggaaagtgaaaccgggaatggaagtgacctctcaaccgtcggttatggaagtacgttttggggacgggtattcccagcgtgcgcctgccgggctgaatgcggatctgaaaatctacaacgtttcgctgtctgtgtcccgtgatgatgccagacggctggaagattttctggcagagcacgggggctggaaggcgtttctgtggacgccgccttatacgtacaggcagataaaggtgacgtgtgctaaatggaccaccaggataaatatgctgcgtgtggaatttagtgctgagtttaaacaggtagtaagctga

SEQ ID NO: 17022 - DNA, 2583 bp, Escherichia coli
atgtcccagccggttggtgatcttgttattgacctgagtctggatgcggtccgtttcgatgagcagatgacccgcgtaaggcgtcatttttcaggactggagactgacgccagaaaaaccgccggtgccgttgagcagagtctgaaccgtcaggcgctggccgcacaaaaagccgggatttccgtcgggcagtataaagccgccatgcgtaccctgcccgcacagttcacggatatcgccacgcagcttgccggtggtcagagtccgtggttgatcctgctgcagcagggcggacaggtgaaggactccttcggcgggctgatccccatgttccggagccttgctggtgccgtcacgctacctgctgtcgggatcacatcactcgttgcagcaaccggggcgctggcgtatgcctggtaccagggggactccacgctttcagcgtttaataaaaccctggttctttccggtaatcagtctgggctgaccgcagatcgcatgctgactctctccagagcaggacaggcagcagggctgacgtttaatcaggcgagtgagtcactggcagcactggtgaacgccggtgtgcgtggtggtgaacagtttgatgccattaatcagagtgtggcgcgttttgcttctgcatccggtgtggaagtggacaaggttgcagaggctttcggaaaactgaccaccgacccgacgtcggggctgatggcgatggcgcgccagttccgtaacgtgacggcagagcagattgcgtatgttgcgcaactgcagcgttcgggtgatgaggccggggcattgcaggccgcaaacgaggccgtcacaaaagggtttgatgagcagacccgccgcctgaaagcgaacatgggaacgctggagacctgggcggataaggtcggcagtgcgtttaaatccatgtgggatgcagtgctggatatcgggcgtcctgagtcatctgcagaaatgctgaataaggcacagcaggcattcgatgaggcggataaaaaatggcaatggtatcagagtcgcagtaaccggcgcggaaaaacgtcagcgtatctttctaatctgcgcggcgcatgggacgaccgcgaaaacgcccgcctcggtctttcagcggcgacactgcaggcagacctggaaaaagccagcgaaatggcggcacgggatcgggctgaatcagaggcctcacggctgaagtacaccgaagaggcgcagaaggcatatgaacgcctgcagacgccgctggataaatataccgcccgccagaaggaactgaataaggcactgaaagacgggaaaatcctgcaggcagattacaacacgctgatggcgtcggcgaaaaaggactatgagtcgacgctgaaaaaaccgaagtcgtcaggtgtaaaagtgtcagccggtgaacgtcaggaagaccaggcgcatgctgccctgctggcgcttgaaaccgagctccggacgctggaaaaacacagcggtgcgcatgagaaaatcagccagcagcgccgggatttatggaaggcggaaagtcagttcgcggtactggcggaggcggcacaacgtcgcctgctgtccgtacaggagaaatccctgctggcgcataaagatgagacgctggaatacaaacgccagctggctgacctgggcgacaaggttgaacaccagaaacgcctgaatgagctggcacagcaggcggtgcggtttgaacagcagcagagcgcgaagcaggcagcaatcagagcaaaagcccgcggtctcaccgatcgtcaggcgaagcgtgagtctgaagagcagcgtcttcgtgacgtgtaccgcgataatccgcaggcgctggcacaggtcaccggggcactgaaacagacatgggcggatgaagacatgctgcgcggtgactggctggccgggtttaagtctggctggggtgagtgggtggaaagtgcgacggacagtttttcgcaggttaaaagtgctgcaacgcagacctttgatggtattgcacagaatatggcggcaatgctgaccggcagtgaacagaactggcgcagtttcacccgttcggtgctgtccatgatgacggaaatcctgattaaacaggccatggtggggattgtcgggagtatcggcagcgccatcgggggagccattggtggtgctggcgcatcagcttccacggggacagccattcaggctgcggcagcgaactttcatttcgcgaccggtggattcaccggcactggcggaaaatatgagcctgcggggattgttcaccgtggtgagtttgtgttcacgaaggaggcaaccagccggattggtgtcggcaacctgtaccgcctgatgcgggggtatgcggatggcggttatgtgggtggttccggaagccaggctcagatgcggcgggcagatggcataagttttaatcagaacaacaatgtggtgattcagaatgatgccacgaacggcagtatcggtccgcaggcactggcgctggtttatgacatggcccgtaagggagcccgtgatgagattcaggcacagatgcgtgatggtggtatattctccggaggtgggcgttga

SEQ ID NO: 17023 - DNA, 414 bp, Escherichia coli
atggggaggcctgactggcgcgccatgcttgccgggatgacatccaccgaatatgccgactggcgacgtttttaccgcacgcattattttcaggatgcccaactggatatgcatttttccgggctgacgtacgccgtactcagcctgtttttttgcgttccagaaatgcatccctcggatttcagtctgcttgtcccccggcgagaggaagagcagacggagatgccggatgaggaagaaattctgatgcagaaagcggcaggacttgccggaggcgtccggtttggtggggagggtgagggcgatatttcaccttctgcggatgtggtggatgtcagcgaggatgatgttgcattaatgatggcttcagcggggatttccggaggtgtgagatatgtcccagccggttggtga

SEQ ID NO: 17024 - DNA, 429 bp, Escherichia coli
atgtttctgaaaacagaacaatttgaatataacggtgtgaccctcacgctgtcggagctgtccgcgctgcagcgtattgagcatctggctttgctgaaacagcaggaagaacaggccgccgccagtggcaacccgcaggtgagcgtggaagagctggtcagaaccggcgcttttctggtggcgatgtccctgtggcataaccatccacagaaaacgcagatgccgtccatgaatgaggccgtgatgaagattgagcaggaagtgctcaccacctggcctgccgatgccattgcccgggctgaaaatgtggtattgcgtctgtccgggatgaccgggcctgtccggatggaaagtgatttcacggaagaggcagaaaatgttgatactgacgtttcttattccgcgggaaagccttcgacggcgagctga

SEQ ID NO: 17025 - DNA, 750 bp, Escherichia coli
atggcaacaccaaatcccctggtgccggtaaaaggttccggcaccacgctctgggtttacaccggtaagggcgatgcttatgcaaacccgctgtcagatgatgagtggactcgcctggcaaaaataaaggatctgacccccggcgagatgacggcagaatcctacgacgataactatctggatgatgaggatgctgactgggtatccaccgggcaggggcagaaatctgcaggtgacaccagttttacgctggcctggaagcccggcgagaaagggcagcgtgatttgattgcctggtttgacagcagcgagacccgggcctacaaaatccgcttcccgaacggtacggtggatgtgttccgtggctgggtgagcgccattggtaaagcggtgaccgccaaagaggtgatcacccgtacggtaaaaattaccaatatcggtcgcccttcgctggcggaggatcggggggacatcacaccggtcaccggtattaccgtgacgccaccaacgggcaatgtggcaaaaggtcagaatatcaccctgaccgtggccgttcagccggaaggcgcaacggataaaacgttccgcgccacgtcagcgaatcagaatttcgcgaccattaccgtgaaagggaacacgatcacggtgaaaggtgttgcggcaggtaaagcgcagatccctgttgtcaccggcaatggtgagtttgctgcagttgctgaaattaacgtcacggatggtgccgctggctga

SEQ ID NO: 17026 - DNA, 354 bp, Escherichia coli
atgcgtgactttcagaatgcctttgatgccgctcttgccggggtggacagcacaattgttgaagtgatgggtatcagtgcgcagttcacctccggtacacagcgtggcggggaagttcatggcgtttttgacgatccggagtcgctgggttttaccggcagtggggtccgtattgaaggaagcagcccgtcattatttgtgcggacggatacggttcgtgctgtgcggcgtggtgacacgctgaccattaacggcgagatgttctgggtggatcgtgtttctccggatgacgggggcagctgttatctctggctcaaccgtgggcaaccacccgtagttaaccggcgacgataa

SEQ ID NO: 17027 - DNA, 384 bp, Escherichia coli
atggcaacaaaagaagaaaatctgaatcgtcttcgtcaactggctggcctgctggggcgcgaggcggatatgtcggggagtgctgcggatattgcgcaacgtgtgtctgagtgggaagaggagcttgctgcttcccgggagggcattatgtacggcgatgagagcggggctgagaaaaattacacagaggatgccgggcagttgaacaacactgatgatccggatgatgttaaagctgttcgtgtgcgcaagtgcctgcatgtgatggggtattgcccggagacaggccgtcctgttgagctgacgttccgggggatgcgtgttctggtgccatcaccactggcgacagccatgatacagcacggaacggctgatcatgcgtga

SEQ ID NO: 17028 - DNA, 468 bp, Escherichia coli
atgaaccgcgttctttatgtggtcattattgcattgctggtggcctgcggtgcgctgtggctggcaacagaccattaccgcgataacgccattacttataaagcgcagcgggatgatgcgaagagaaaactcagccaggcgaacgcgaccattactgacatgcagcagcgtcagcgtgatgttgctgaacttgatgcaaaatacacaaaggagttagccgatgcgagagctgaaaatgaaactctgcgcgctgatgttgccgctggtcgtaagcgcctgcgtgtcaacgccacctgtgtgtccgccacagacaaagccaccggcaccgcccgcgtgggtaatgctgcccgccccagactggcagacgccgctcaacggtattatttcaccctcagagagcggctgatgacgatgcagaagcagctggaaggggcacaggaatatatcagtactcagtgcgtgaaatag

SEQ ID NO: 17029 - DNA, 534 bp, Escherichia coli
gtgagtaaaaaactccgctacggtttatctgcggtcgttctggcgctgattgctacaggggcttctgcgcctgaaatccttgaccagtttctggatgaaaaggaaggtaaccacaccacggcataccgtgatggcgcaggtacctggactatctgccggggtgccacccgggtggatggcagacctgtagtccccggcatgaagctgacgaaggaaaaatgcgctcaggttaatgccattgaacgcgacagggcgctggcatgggtggagaaaaacatccgggtaccgctgaccgaaccgcagaaagtggggatcgcgtcattctgtccgtacaacattggtcccggtaagtgttttccgtcgacgttttataaacgaattaatgcaggtgatcgaaaaggtgcctgcgaagcgattcgctggtggataaaggacggtggcagagactgccgtatccgctcaaataactgctacggtcaggtatcccggcgtgaccaggagagtgcgctggcgtgctggggtatcgacagataa

SEQ ID NO: 17030 - DNA, 216 bp, Escherichia coli
atgtaccagatggaaaaaatcacaacaggtgtgtcatacaccacgtctgcgctggggacgggatactggtttctgcagttgctggacagggtatccccgtctcagtgggcggcaataggcgtgctggggagtctgctgtttggtctgctgacgtacctgaccaacctgtattttaaaatcagagaggaccggcgcaaggcagcgcggggagaatga

SEQ ID NO: 17031 - DNA, 306 bp, Escherichia coli
atgacagaaatgaaaaaactggtcactgctgatgcagtgaagtctgcgctgcgcactgaagaagttcgcggtacgctgaaagaatctatccgtaaaacgtttgaggctcagattgatgcggatgtggaagcgattctggatgagcttaccggacctgctgaggaggcatctgcgccacaggcaggggatggtgagaatacagcagattctccggtggaaaacagcagcgaacaaccggagacacaacccgggggtgaggaacaaccggctgatgttctgcagccggagccagcaaccatgctgtga

SEQ ID NO: 17032 - DNA, 177 bp, Escherichia coli
atgtcatttattcagcaaatacagctgtatttctgtacggctgtgtgtgcactgtatctggtgagtggtggttataaaatcatccgcaactacatccgtaaaaagattgatgccatggcggctgaaaaaatcagtgccggtcagtcagcagagccaaagtccacgcccctcccgtaa

SEQ ID NO: 17033 - DNA, 1944 bp, Escherichia coli
atgacatttaagcattatgatgtggtcagggcggcttcaccgtcagagcttgcggagcgactgtcacaaaaactgaaggaaggctggcagccgtttggcagtccggttgctattacgccttataccctgatgcaggcgattgctgcggagggtgatgtcaccacgcctgttgtggtgaagccgtcgggtgacagcggtacggtaatgagcacagtcagtgagccggaatattactttgttgttgttctggcggggcagtcaaatggcatgtcctatggtgaagggcttccgttaccggattcatttgaccgcccggacccacggattaagcaactggcacgccgcagcacggtcacgccaggcggtacgccgtgtaaatacaatgacatcattccggcagaccactgcctgcatgatgtgcaggacatgagcgggataaaccacccgaaagctgacctgaacaaggggcagtatggttgtgtgagtcaggggctgcatattgccaaaaaactgctgccttatatcccgcagaatgccgggatacttctggtgccctgttgccgtggcgggtcagcattcaccagcgggccggacggttcattcagtgaggccagcggtgcttccgctgattcttcacgctggggagtcggtaaacctctgtatcaggacctggtaagccgtaccagagcggcgctggcgaagaacccgaaaaacaaacttctggcagtggtctggatgcagggagaagcagaccttgcatcgggaagtcagcagcataatggtttattcacgaccatggttcagcagttcagaactgacctgtctccgcttgctgcgcagtgtgtgagtggaaatgctgccacggtgccgtggatttgtggtgatacgacatattactggaaaaacgctggcaccgataaatatgaggcggtatacggtggctacaaaggcaaggaagcacagaatattttctttgtggcgttcctgacggatgaaaacggcactaacacgccaacgaatgctccgacggaagacccggatattgtggctatcgggtattacggtgcggcatcccgtacccagggcagttttgtctcgacacagcgtgacagccatttcagttcatgggcacgcaggggcatcatttctgaccgtctggcctcagctattctgctccatgcaggacgcacggctgaactgatgggcggacagaccgtaacatcaccggatgagaagccatcacctgatgcaccatcaaaaccgtccacgccaccggctgacaccacgacgatgagtacgctgtttgcttaccgggcatctgagtctgaagggcagctggcaccgcagggctggactgccggaggcggtaaggctcagaccgtggatgatgccggagccagcgggggtaaggccatgaaactgaccaaggaaacaggcaaatcctcctggtaccttgagcatgatgccggtaatggtgcggacctgctgggtaaaggggggcttgtcagctgccggtttaaggttgatggtgcgcttacggctaatcagtacgcactggcgctgtactggccggtttctggtctgccacaaggggttactctggaaggtaatgccggtcataacctgctggcatcgttctacgtacagagcgatgccacagaccttaacgtgatgtatcacaaaggaaacacggcgcagaacacgaagctggggtcattcggcgcatttaataatgagtggcatacgctgggtttccgttttgccggtcacaacagtattgaggtgacgccggtcattgatggtcaggacgggacaccgttcatgctgtcgcagtctccggttggcacgtttagggcagacaagttacgcgtgactgatatcactaatggtgcgacatacccggtgctgattgacagcattgtggtggaagtgaataacgcgtaa

SEQ ID NO: 17034 - DNA, 237 bp, Escherichia coli
atggctgggtttatgatttatttctgggcattctctcttattgccggttggtacaaaccacagtttaagagggaatatcaggcgatccactatgagaatgtctggtattacattattgcgcgctatgatgatcgtctggtgttatcgaaatcatacagtagtgggggtaagaaattcgttatatgtaatagcggaaatattgatgattttgaaattaatgttgtcagggtgcgttaa

SEQ ID NO: 17035 - DNA, 258 bp, Escherichia coli
atgcgtacaacccaacaattcagcattacattaactaacgagatggctgacatggtgcgcgcccgtgtggcttccggtgcctatgcttcagaaagtgaggtcattcgtgaagggcttcgcgcactgaatgagcgcgataaagcaatcgaagcgtggttaacgcattcagccgccccctctcttgactctatccgcgaaaacccaaacaacggacgctccatttcacaggttcgcaccgcgattcgatccgggaagtaa

SEQ ID NO: 17036 - DNA, 300 bp, Escherichia coli
atgacatttgaagtcatcattacccccgaggccgaacagcagataataaacctgctcagatatatcacggagaaagcaggaagcgtcattgctgacaattatgccaatgcgcttcttgattatcttgatgggttttctacattcccgcatcggggcaataaacgcgatgatattcgccagggaatgcgggtaactcacttccgccacagaacgattattgcttttgccgttgatggcaataaagtctttatcgcgggtatttatcatggtgggcaaagctatgaagccgatttcttataa

SEQ ID NO: 17037 - DNA, 630 bp, Escherichia coli
atggctgaattaaccaaagaatggctacagaacatgattaccggaattgagtcggtaatagacgataaatcttttgtatgtgatgaaatagtattcaaaatcggtgaggttaaaaacatacttaccgcatttaaagtcacgctggcatcgctggaagcagagccggtggctgagattagagcgcactacccattagggattaacggcggtaaacaaaagttcgtccaggccattggagatcttcctgactttggcggacatctgtacgccgctccgccagcgcctgtagtgccggatgaggggcgcgaccagtttgaagcacttatcaggtttcatgtcggtgatgaaaaccatgaaacattattgctgcgggccaacgaagggatgaattaccgggacccaaatgttgattttgcatggatattctggaagtccagtcgtgagcatctgcttcggaataatgacggcagtctgccagaatcgggtcatcaggtacgcggattaacactgctggttaagcgactggccagttcattaaaaagcgtcaataaatccagcaagctgcctgataaggcgatggactacctgaagcgaaacggactgataagcgtggaggatgttttgcgatga

SEQ ID NO: 17038 - DNA, 213 bp, Escherichia coli
atgtcaaatacacagaaaaccattaacgcggaaaaatataacgagtgggtgagaaaattctctgagcagatttttaaaattactggcgacgagaatgtggcaaaaaatgaattagagccgtggacacctgaaggaaccgacccaaattattgttggtgggaggttgatccggttgatgctgcaaatgaagccatgagttactacaacgattaa

SEQ ID NO: 17039 - DNA, 357 bp, Escherichia coli
atggaaataaaaccagaagatgagttaagtaatattgttttatttccggtaaaagaggatgacccacgtaatcaggttaattttctttatgagccatcggaaagaccatattgtcatcacgcctctgtccgggttgacgaaaaagagcgtcaggtccgctgtaaaatctgcggtgcagttgtggagccatttgactggatgctctctgtggcgaaaagagaaaccagactggcagatgatgtaaggctattgcgtcaggaggaacaggaaaggcgaaaaaatatagaaaagctaattcagattgagcgtaacgcgaaagcgcggataagcagggtgacaaaatcaagaactgaataa

SEQ ID NO: 17040 - DNA, 396 bp, Escherichia coli
atggattttgcaactatcacaagtagcgttgtgttgagtgcgtgtgttgctggcgtggtttcgctggttaatggtgcctggcaacgcaaatcggaacgaaccattgaagcgcaacgccgggctgctgaagccagagcaaaaataagagaaatggctctcactctcgcattgaaagaatgggagctccaccaaaccatatcgaaggcaaaggggtatggtgtcagcggcccagaagtttacgtctttcgatactttcgtatgctcaacctgatggaggaagacaaattcacgattgaaaatctcagactgatccagtacgactccatgtgtgctgttgcagcaattcaggcagagatcgagcgatatcgggagaaaaacggcctcccgatgccataa

SEQ ID NO: 17041 - DNA, 210 bp, Escherichia coli
atgacggagggggctgtgaatctacctgatttttttactgttcttgcctgtggtattggtggggctctggccggacattttatcgtgaatctgttcacctggtatctctttggtttcagggattacttcacccgatggactttaaattgtcttcgtcggttcattgggcgcaagcctgatatgaggatttggaaagatgaaaaatgctga

SEQ ID NO: 17042 - DNA, 426 bp, Escherichia coli
atgaaaatcagccatgagcacatccgcatggcgatgaatgcctgggcgcatccggatggcgagaaagtaccaactgcgaagattaccaaagcgtattttgaactgggaatgacatttccggaactgtacggcgacagccatccggaagccctagctcgtaatacccagaaaattttccgctgggtagagaaagacacccctgatgctgttgaaaaaattcaggcgttgttaccagcgatcgaaaaggcaatgccacctttgctggtggcccgaatgcgcagccacagttcagcctattttctggagctggtggagacgcgggaacgactggtgagagacgctgatgattttgtcgcagtggcgattgccggtttcaatcagatgaaccgtggtggcccggcaggaaatgccgtggtgatgcactaa

SEQ ID NO: 17043 - DNA, 360 bp, Escherichia coli
atggaatttaaatatttaccgccttcaatccaggagattgcagcacacacacttcgtcatcgtctgaacgaacttgaattggaatcggtaacaaaaaaagacactgataatatggctcgtaatgtgcgcgatgcgtttactgggctgttttcagatacagctttaaatatccatagcacagaggatacagcaaaacaatttgcagaaaaagaagtggaagatctcagttcaaagagccagaaacagccaaacaaccatgaaattaacgaactgcttctggcaacaggcttcataaatattaacgaatatgaacgccgtaaaaaaatgttatctgatcaatccatcaagatatctttttag

SEQ ID NO: 17044 - DNA, 195 bp, Escherichia coli
atgtcagagcaggagttaaaacttggtgcatgttattgtgttctcaaggagctggtacacatgcttccatctactcagtatcaacagttagttggcaatttaaatcagcgaatcgaagctatgttaaaatctgatggttttaataacgtagaaacgctgatgctaaaaagatatcttgatggattgatcagataa

SEQ ID NO: 17045 - DNA, 189 bp, Escherichia coli
atggaaacgttattaccaaacgttaatacgtctgaaggttgttttgatattggtgttctgctcagtaataaagcgtttactgaggatgccattaatatgcggaaatatgagccttatctgctcaatgataattccattctttcccgaattgcccttattaaacttggtattttcggagaacgtcaatga

SEQ ID NO: 17046 - DNA, 189 bp, Escherichia coli
atgacttcagcatttgcactggtgatgacggtttttcttataacgggtgaatcacagaatgtgattaccggaatttatgccagtaaagaatcctgcctccaggcaagagacgagcaaaaaatttctggtgaatgcctcccggtaaaaaaagtatcgctgtacctgaataacgaaacaccggctggataa

SEQ ID NO: 17047 - DNA, 447 bp, Escherichia coli
atgatggcggggaaaatccccgcctttttcctgccggtcccggacagagcacaaaggacgtcgccgccggctccgctttacccggccatgcgggcatggccttatgggttttcagttatgtggcctcagcgccgtgtgcgggctgtgccgtgcctccatcttagccgggctggcgttgatgcaagggtacgcttcgccgctgcggtcacccggtccctccttcccgtctgccgtgattttccggtcgttcgcccgctcaggtttcgcggcctcaccctgcaactcccgccagccgtgtgcgtcaggctgcggcttcccttgcgcccctgcatccccgcctgttcgcccggcttttatggaggcacggcaccgcccggtgtcgcggaatatgtgaacaacggaggaaaacatcatgcaatatgcgaaacctgtcactctgaacgttga

SEQ ID NO: 17048 - DNA, 780 bp, Escherichia coli; identical to SEQ ID NO: 8539

SEQ ID NO: 17049 - DNA, 495 bp, Escherichia coli
atgtgtgattcagaagcggagaagattttattcatcctgaataaacatgaacgggcatacagacgcctgatccccgtatatatttttttagctatagtattatggattttacctattctcctgattgtatacttgtatttctgtatagttgacaatgagtttctcagaatcggtttctgtattgcatggacagcatactactttctttcgcttttcaagtattttgtaaaatacttctttcctctcgatcgtgaagatttgcttaaactgatggatctcgccaaagattctcctgatgcgaaacaggagcttcttgagcgtcttttgtccggaaaaagaatgaccgggcgggatgaaatggatatcaagcacattctaaaaacaaaggaagcacttgataacatcaggaattttattgataaacagcagttaacgaatagtgatactccgaagaaaagcacggtcccaaatgaagataaaaaaggcataagatga

SEQ ID NO: 17050 - DNA, 150 bp, Escherichia coli
atgtctcttattgacgcgcaatatttctggttcggtcatgaaaaagtaacatattctatgctggaacagaccaattttgcattctccgtccaagagtttgaggggaaagtagtcagtgttttacgctcagtcagggaaagtgtgcaatga

SEQ ID NO: 17051 - DNA, 855 bp, Escherichia coli
atgagcaccatcctgaaatgggcaggaaataaaaccgccataatgtccgaactgaaaaagcatcttcctgctggcccgcgactggttgaacctttcgcgggttcctgtgcagtgatgatggagacggattaccccagctatcttgttgcggatattaatcctgatttaatcaacctctataaaaaggttgctgctgattgtgaggcgtttatatctcgtgccagagctttatttgaggaagcaaacagggaggtggcttattacaacataaggcaggagtttaattactccactgaaattactgatttcatgaaagcggtatatttcctgtatctcaatcgtcacggttaccgtggtttatgtcgctataacaagagcgggcatttcaacattccctacggtaattataaaaatccgtatttccctgaaaaagaaattcgcgcatttgcagagaaagcccagcgggcaacgtttatctgcgccagctttgatgaaacgctggcgatgttgaaggtgggggatgtggtgtattgcgatccgccttatgacggtacgttttccggctatcacactgatggtttcactgaagatgatcagtattacctggcatccattcttgaacatcggtcatcagaaggacatccggtcattgtttctaacagtaacacgtctttgacccggtccctttatcgtaatttcactcaccactacatcagggcgaaacgcagcatcggcgttgcagcgggggagggaaaatttgcaacagagatgattgccactaaatctgctaattggtttagtgccgattttagtaggggacgtgactctactgttattttcggggtgcaagtgtga

SEQ ID NO: 17052 - DNA, 822 bp, Escherichia coli
atgcaccacggaattcatcatttccatgggacgcctgtctggggaagtgctggcgacgttcatcgtattgcggtgagcggagctggcgctttcgtctcctatgtacgaccagatcagattgcggcgtccattcagcacgctcaggtcgtcggcattgataacggcgcattttctgcatgggtgcgtgggctaaaaattaactggagtgatttttataaatggctcctgaactattaccaccatcctaaggtcgctttttttgtcattcctgatgttgtggacggaggtgaacgtgacaatgatgctctgataaacgaagttccgaaaatgttctacgggaaggcaactcccgtctggcatctgcacgagtcaatcgatcggcttatcgagctatgtcgtgaatggcctcgtgtctgctttggatcgtctggtgaatatgcggctatcagaactgcgcactggcatcgtcgtatgcaggacgcttttgaagcaatttattgccgacacaatttcaaaacagctgttcatggtttgcgcatgcttgacggtcgtgtgttgggaaattacccactggcgactgccgacagtacaaatcttgcctgcaatgtccccaaatttaatagcaaatatcctgagctgacgcgggctattcaggaggctgagtattcgcgcaatctgacggaaaaggagctgaaagctgtcattctgaaaaaccgttgcgcaattttaaaaggtgcaattgaagctgttcgcccaccttcagtttctgattggctgtcgaatggtttgcagccttcacagctcgaactggagattgcgtaa

SEQ ID NO: 17053 - DNA, 1743 bp, Escherichia coli
atgagtacctggaaccaagcctattctgcaagagaagatttgaaatcgtatggtgataatggactggctttgtttgcgttagcattacattttagaattgatgacattgatagtgtcgcagcagagtccattaccgatggacatgacgataagaaatgtgaccttgtgtatattaatgaagaagaagaatttgctgtacttgctcaatgctatttctcaagcaaagatagacaggaagctccagcaaataaagcgagtgatcttaatattgctttagcatggcttctgcaaagagatttgcatgatgtacccgatagaataaaatcttctgctcaacagatacggacatcaatcaaacaagggaaaattaaaactctgtacgtttggtatgttcataacttaccatcttcaacaaatgtggctcaagagctaattacggttcagcagacagcaacaactattttaaaacatgattttgaagatgctaaaatacaagtgcatgcaatggaagtaggcactgaaaagttgacggaatggtatagtgaatcactatcaccaatactggttgatgagatttttaatattaaagtcagtgatggtggctacgaaataaaaggagataattggaatgcattctgtactaccattcagggaagagatttagctagagcgtacaaaaagcataaattaaaaatattttcagcaaatgttagagactaccttggatcaaggtcatctgattcaaatatcaataatggtatccgtaacagtgcggaaaattcagcatcagaattttgggcatacaataatggcgtaactgttttggttcatgaatataaattcaatgaagcatcaaagaatcttgaaatcagagggatgtcaatagttaatggagcacagacaacaggtgctttaggaacgctgccacgattacctccagaatcagttaaagtccaagctagatttataaaagtcaaagatgcggatgctgatctaattcagaatataattcagtataataacagtcagaataaagttgaagcatctgatttcagaagcacagacaaaattcaaaaacgacttaaaaatgaatttgcttctattcctgatgctgaatatgatggaggaagacgaggaggtgctgaaagtgtcattcgtcgaaaaactaatctactgccttcttatactgttggtcaagctttgatgagtttccatggagagccgacggtagcttataatcagcgatctgcaatttggactaatgactctcattattctaagatttttaatgacagtacaaaagcttcacatattgtttgtgcgtattctctcatgcggtgtattgagaacaagaaaatagctttggcaaagaaagatactctttcaaaaaatgatagcgctcaattgggatatctcaggcatcgtggttcaatacctttattgtgctcggctattgccgaatgtttggaaaactttttgggccgtcccgttcctaatttatttagagtttcgtttggaagtacggtctctccttctcaggctgaaagtatttgggagccaattgtagatgtgtgtctggctttaagtaatcagttgctgcctgcactggttgaaggagggttgaaaagtcctacaaaagttaaagattgtatatcaaatttttcacagcttattactgcaacggcccaaatgaaccagcctgtatatgaggcatttgagaaaaaaatcaaatccgcattctaa

SEQ ID NO: 17054 - DNA, 453 bp, Escherichia coli
gtggctgaactgcagaaggtggacgactggctgagtgctttgctggcgaatctggaaccagccgcaagaagccgaatgatgcgccagctggcgcaggaactgcgccggacacagcagcagaatatcaggatgcagcgcaatccagatggcagcagttatgagccgcgcagggtaacagcacgcagcaagaaggggcgcatcaaacgtcagatgtttgcaaagctgcgcaccacaaaatacctgagaactgccgccagcgcggattctgccagcgtacagtttgaaggtaaggtacagcgtattgcccgtgttcatcactacggtctgcgcgatcgcgtcagtccaaaggggggagtcattaagtatccatcccgaaaattgctgggtttaaatgaacatactgaaaatgaagtaagagatttacttttaaagtatttattgatgaaaaattag

SEQ ID NO: 17055 - DNA, 531 bp, Escherichia coli
atgagccatccaattgattattacgctatagaagaacacgcaagaataattgagcaattatgctgttcatctgaattttatttacagcgtatatattccacacagaaagtatatgatggttctatagtaactgaatttgaaatggaggagttatcgtacaacggatggttggaatataccattagcaacaatcttattagcctttgtacaaaactacgaattctccaagacactagtgaacatgagtggaacccagattactcacctgagaaagaagcatttgaagaacatgaaaatatactttttgttatagatggtcatgttaaagattctatacgcgaatgctgcaataaaattattcacgcattaagttttgagttaacaaaaaagaccggcaaaaatggaataaaatattgggacggttctattattgcttctggggttcaaaacaaaaaaaactggaaaattaaaatagaccttttccctttttgccaaagcataaaaagttatttaagtttattaagagcgtaa

SEQ ID NO: 17056 - DNA, 642 bp, Escherichia coli
gtgtcatttaccacacaaggacgtattgatgccatagattcaaggtccgtgcaacctaaccctatgaacgcacaactaaccgaaatcatgcgccttatcaccaacctgatccgcactggtgtagtcaccgaagtggaccgggaaaactggctttgccgggtgaaaacgggcgagcttgaaaccaactggatcagctggctgacgctgcgtgccgggaatgaccgcacatggtggcgaccatcggaaggtgagcaggtggtgctgctgagtctgggcggcaatctggaaactgcctttgcgctgcccgctgtctattcgaatcagttcgcaccaccgtcgacgtcggcagacgcctgcgtgacagaacatcctgacggcggctggtttgaatacgaacccactaccgggcgctggtatgtcaggggcatcaaatcaatggtcattgaggccgctgacaacatcaccatgaaaaccagtgagtttgtactggaggctgaccgcacgcgcattaacagcgaagtggtgatcaatggtggcgttacccagggcggcggagcgatgagttctaacgggatcgtggttgatgcgcatcagcatactgacgtcctgaaaggcggcgacacaaccggaggcccggtatga

SEQ ID NO: 17057 - DNA, 240 bp, Escherichia coli
gtgaaaggcatgacgcagaaagtgatgcgtcataccctctggcattatgcctggtcttgtgactttgacggcaggcagcacagtataagcagaattacgcccgtaacagggatcaacacggcaatggtaacccaccaccctgaatatccgatatcgtgcatccttctgacggctaacgctatcgccggtacggcaaaaatcaacgttaaaataaatgacacgggcagcgcaaaaaaatga

SEQ ID NO: 17058 - DNA, 219 bp, Escherichia coli
atgattgtgtctatgaacacccttcatgaatgcgctttgaagggaatgcttctacaaggattgcctgtcttgagccacgtatacctgcgcctgaaacgcctcacgaactacaaaatcatcgctgcatcaatatgcgtctgccaactgccggtggactttatcactgggagtttgaacgcgaagggaaaccgtttcgggtcagagttgatgggcaactga

SEQ ID NO: 17059 - DNA, 234 bp, Escherichia coli
atgaatcatgaatatacggtttcagatacgctgtcagctcgccagcaggccattccgttgattgccgtatcaatggccagcagtcagatggataagctgaatgcagcgcttaatcaaggacttaaaaatgctggccatctgcatgatggcaggaggcctgggggtgcagtctgtatacgccgaaccattggtcattcaggaagtcggtttttgaaagagaaaaatctgcaatag

SEQ ID NO: 17060 - DNA, 294 bp, Escherichia coli
atggatataacacctttccttcatgcactttgtgctgtggctgcgcaggtactggttggtctttttaccggaaactgggcttacggggcgatagctggttgtacgttcttcattgcgcgtgaacatacccaggcagaatatcgctggattgaaatgttcgggcatggcaagcgtatgaatatgccgtggtggggcggttttgatccgcgtgcgtgggatgtggcaagcctgatggattttgctgtgccggtggtggcgtgtctgctggtctggctgttggttaatcgtgggtga

SEQ ID NO: 17061 - DNA, 705 bp, Escherichia coli
atggctacatcaacagtaattccgggagacatcaccacgctgaagggagatgttagtaaagcaaaggaagatatttcctctattaacggaaaagtatcaacgcttcagactgatatggccagtgcaaagcaggatatcagcaccagatacacaaaaactgaagttgataataagctgaaaaacaaagtggaagtgaacgatctggaaagtggtcgttatggcggagatttttacccgctgactggccgtgaagcgttttatttatggggattgggcacaactacagcggcggcaaatctttatcttaatcctgaccctgcaatttcgtctgtgctgcggtcaacatcgtctatccgctataaacattcagtagagacgatagattcagagcacgccgatctcattttcaggatgcgccctgtgtggtacaggtcgcaatgcgaaaatgacaggcgtgactggggattctatggattgattgccgaggaagttggagaaattgcccctcagtttgttcactggcgaccagccaacgaagatgatgcaccggaaaccatttccagcaatggccttgttgccgaaggtgtaatgtacgaacgtctggttgttccactgattcaccatatccagaagctgactgaaagagttgatgaacttgagtcagaattaaagttgttatccgtttcccgaagcgatatcggataa

SEQ ID NO: 17062 - DNA, 282 bp, Escherichia coli; identical to SEQ ID NO: 7261

SEQ ID NO: 17063 - DNA, 2406 bp, Escherichia coli
atggcagcagtaaaaatctcaggtgtgctgaaagatggtgcgggaaaaccaatacagaactgcactattcaactgaaggcaaagcgtaacagcaccacggtactggtcaacacagtggcctctgaaaatccggatgaagccgggcgttacagcatggatgttgagtatggccagtacagcgtcaccctgctggttgaaggttttccgccttcacatgccggaaccattaccgtctatgaaggttccagaccaggtacgctgaatgattttctcggtgccatgacggaagatgatgtcatgccggaggcattgcgtcgttttgaggaaatggtggaagaagcggcacgcaacgctgaagccgcctctcagagcgcagcggcggcaaagaaatccgaaactgcagcggcatcatcgaagaacgcggcgaaaacctcagaaacgaatgcagctaacagcgcacaggcggcagcggcctcgcagactgcatcggcaaactccgcaacagcagctaaaaaatcagaaaccaacgcgaaaaatagcgagacagccgcaacgacaagcgaaaccaacgcaaagtccagccagacggcagcgaagaccagcgaaacgaatgctaaagccagtgaaactgcagcaaaaaacagccaggtttcagcagcccaaagcgagagcgcggcagccggttctgcgacttcagcagctggatcagcaactgctgcggctaacagccagaaagctgcgaagacgagtgaaactaacgcaaagtccagccagacggcagcgaagaccagcgaaacgaatgccaaagccagtgaaactgcggcgaaaagcagtcaggatgcagcggcccaaagcgagagtgccgcagccagttctgcaagcgcggcggctgcttctgccactgcatcagctaacagtcaaaaagcagcaaaaaccagtgaaaccaacgcaaaggcgagcgagactgcggcggcgaactcggcgcaagcatcggcagcaagccagacagcagctaaagcaagtgaagacgcagccagagagtatgcaagccaggcagcggagccgtataaacaagttttgcagccgttgcccgatgtgtggataccgtttaatgattcactggatatgattacgggcttttcgccatcatataaaaaaattgttattggcgacgatgaaataacaatgcctggcgacaagattgtaaagtttaaacgcgcatcgaaagcaacttacattaataaatctggtgtgctgacagaggctgccattgacgagccacgatttgaacgtgatggcctgcttattgaggggcaaagaactaacctgctaatcaattcaacaaatccgactaaatggaacaagtcgtcaaatatgatcttaagtgcatcaggtgtagatgatttcggattccagtacgcaaaatttacattaaaaccagaaatggtagggcaaatttcagcgattaacatagtaaccgtttccggcagtaaaggttttgatgtaacaggcggagaaaagtatgtaaccatatcatgcagggtgcaaagtggcactccaaatttaagatgccgattacgatttgaaaactatgatggttctacctacacattcttaggtgacgcttacttaaatacgacagatttatctattgataagacgggtggtgccgctaatcgcattactgcaagagctgttaaagatgaagcaagcaaatggatcttttttgaggcgacaattaaggcacttgatacagaaaatatgataggtggaatggttcagtatgccccggcaaaaggagtgggcactggcgcggatgattatatttatattgcgacccctcaagttgaaggtggggcatgcgcttcatcgtttattataacaggcgcatcccctgtaacacgcgccagcgatattgtaacggtccccatttctctaaattggtgcaatcccgctattagttcattagcagaagttaataccaattgggatgaatcgccaaacaaagaaggtagcgcacgtattcttaatatttccactacgggagatacaactgaaattgcagatgaaagttatatgtatttggggtatacatctttgggagcacgcgcaatcattacaaatggtaaaggcactaaaatagaatataaaagcgttatagaacgaccagagagaaaaagcattatcggctttagattcacagaaagtcgagaattgtgtgttgtggttaacggtaatattggtgctaaggtagtttctccttataaaaaacacaaatatacaggaggcttcattaatattggtggtcaatcatcatccggcaaccgtcacctatttggacacgttcgaaatctgcgtatttggcacaaggcattgactgatgctcagatgggggagtcaatctaa

SEQ ID NO: 17064 - DNA, 189 bp, Escherichia coli
atgaatgtaactagatttgtaaccgcaccatctgatattaacaaggttaaagagactcattctgatgacgagttaaaccgtttgctggaagctgttaatcagaattgcccgaccagaattgtgttgggtagcgtggagaaggggaaagaaacccagagcgtatttcaattgaagaaatcgatgaaataa

SEQ ID NO: 17065 - DNA, 312 bp, Escherichia coli
gtgacagagacacgttacacaacgtctgaaagcaaaaaagccctgaataatcagagctttattactggattggaaatgacggccatcaaatccaattcaaaacacaccaaaggcatgtcctcaagtgatgaagataatagaaaactattcaatctacgtcaaccgaatgcctgcggtaacaatcccaaagccgttatcggaggtacgattatgttgccattgctcaacacgttcatgaatgcccctcttctgagtcagggggctactatcctgtttcttgggcttcttatccttgcgctcaagaaccagtga

SEQ ID NO: 17066 - DNA, 516 bp, Escherichia coli
atggcgactgagtgggtggatgtggctgataatgccgttaaaattggacttggatcagtgcttacaatattaggcgggtatttgacgctcaaattatcacagaggcacgagttaaggaaagaagcattaattcagcgacgtaaagactttgaggtgaaaactgagcgttacgtaaattttttatccagttcaagaatgatgttggataaatatatgatgacctcattcaggcctgatggtgaggattatattgaatatacaaggctacatgaaacagtatcccttacatgcgcaagtaatactatgagagagctggcccttgatgcttactatgctgtttctcatgcatgcacaatggggactgcaaatcgcgatgaaaaggctcctgtcaggaaagctgctgaagatgctgtgagtcagtttcaggctaatgccaatgatgagttgcgacgtgagaaagctgcaattgaggtaatgaacaaaaagcgattattctggttctttggacggcggtaa

SEQ ID NO: 17067 - DNA, 156 bp, Escherichia coli
atggctaagaaaaagagatatgttgtgatggttagagataaaaccaaatacagcagcaatcagcgattattagcctggttagtatggttcgctaacaggcataataaggccattgactgtgagtacgggatatggattgtcgagccgtcttactga

SEQ ID NO: 17068 - DNA, 297 bp, Escherichia coli
atgttgaaattaaatctgaataaacgttatttaacgctttctctatttatggctgcgttgatgctttgtgttgcagaacctgcttttgcggatgatgtgtctacgaagacaactggttttttacagaaaataattgatttcttaactgcgcaacgtaagccagctattacaattatgtgtcttggtattgcctatatcgcgttatttgccagacagcatatggcatggattatcccacttattattgggatgattatatttattattgctccttacgtgcctgactggttgccataa

SEQ ID NO: 17069 - DNA, 2988 bp, Escherichia coli
atggcaaggaggcagattctttctttgtcggaaagagaatcattactggcattaccggacgatgagttaacgctgacacgaatggcgtattttagtgagcatgatctggcgcttatcagtgctcaccgtaaacccgccagccgttttggttttgccgtccttctttgctatctgaaaaatgtcggctttgcaccggataaaaaaatcccaccctctgatgcgctgttgaagcatatcgccagcaggctaaaacttaccggggatctctggcctgcttacctttccggcagggaaaccacgcgacgcgaacatttaaccgaactttaccactatcttggcgtaaaagcgttcaccggcaaaatacagcaggactgtattacacacctgctgccgatggcgacgcgcaccgataaaggtattctcctggccgaagaactgctggtctggctccggaagaacaacgtgataatccccgcgattgatgtcgtggagcgtacctgtgcggaggccatggctggcggcgataaaatcgtatttcagaccctgaatgctccgttaactccggatcacagggatgccctggatcgtttacttgagtcctcagataatcagtcttccaggctgacatggcttctgcaaccgccgggtaaaatcaatggtaagaacgtgctgcaacaccttgatcggctcagtagcattgaatcgctggcattaccggaaggtatagatcgtaccattcaccagaatcggttgctgaaactggcgcgggaaggccgaaagatgagtagccgggatttgacccgattttcagcagcccggcgtcatgcgatcctggtgtgcgtgctggaagaagccagagccacactgacagatgaagtgattgagctgcatgaacgcatgctgaacagcctgttcagcaaagccaaaagaacacaggctgagcgccttcagcagaccggaaagctgatccagtccaaactgaggcagtacatcgatgttggtcaggcgctgtctgatgcccgcgactccggtggcgatccatggctcgcaatagaaaacatactcccgtggcctgaatttgtctccagtctggaggaaacacgccatctcgccagaaaaaataattttgacccgctgcatattattactgagaaatacagcacattacggaaatatgccccgcgcatgttgtccgctttacagttagtcgccaccccggcagcacaacctcttgccgatgcgctgagtgtgatcaaggatatgtaccggaagcagtcacgtaaagttccgactacggcgccgcttgagtttgtccctgaaagctggcgcaaggtggtgattacacctgcgggtattgaccggcagtattatgaattttgtgcgctcagcgagctaaagggagcgttgcgctccggggacatctgggttaaaggctcacgccgctacaaaaattttgatgattacctcattcccgaaaaggactttgacaaactcacacagtcgctgccactgcccgtctctgctgattatcatgagtacattgccagccgtatgactcagcttcagtccagacttgaagaggtcaatgctatggctgcccttggtgaactgcctgatgtggaaatatccgacaggggcgtaaaagtctctccgctggataactgcgttccggcaacggtttcaccgctggcagaactggtttacagcatgctaccgcgacctaaaatcacggaaattctcgacgaggtaaacagctggacgacgtttacccgtcatttttcgcatataaaaaatgacattacccgtcccgatacccgcctgctcctcaccaccattcttgcggatggcatcaatcttggcctgaccaaaatggcagaagcctgccccgggagcaccaaatcatcactcgaagatattcaggcatggtacatccgcgacgaaacctattcagctgcccttgcagagctggtgaatgcgcagggaaaaagaccactggcggcattctggggagacggaacaacgtcatcatcagatggacagaatttcagaactggtagctcaggccggtacgcaggacaggttaacccgaaatacgggcaggagccaggacgtcagttttatacccatatttcggatcaatacagcccgttttacacctgcataatcagtcgggtcagggattcaacccatgtgctcgatggcttgctgtaccacgaaagcgacctggaaatcagggagcattacaccgataccgcgggtttcaccgatcatgtctttgccctgatgcatctgctgggatttgcgttctgtccacgaattcgggatctccacgacaaaaagctgtttatcaaagggaaatcggaccaatacccggcgcttcagtcactgatatcaacgaccagcctgaatctgaaagagatcgagcttcactggcgtgaagtgctgcgtctggcgacctcgataaagcagggaacagtgacggcatccctgatgttgaaaaagcttgccagctaccccaagcaaaacggacttgccaaagcattgagggaaattggccgtattgaacgaacgctgtttatgctcgactggttccgcgatccggcgcttcgtcggcgggtgcaggcaggactgaataaaggagaagcccgtaacgcgctggcgcgtgcggtattcctgcaccggctaggtgagatcagggacagaaaaccggaaaatcagagctatcgcgccagtggactgacactgctgacggctgctatctcgctgtggaataccgtctatatggaaagagcggtcgatgccctgaagcgtaaagggatgaagatcaacgagcaactgctgtcgcatttgtcgccgttaggctgggagcacatcaatctgactggtgattatatctggaaaagcaacagaataccgacatccggcaagtttcgtcggctgaggccggctaaagtggagaggtcaaaaaataaccttaacgtacaataa

SEQ ID NO: 17070 - DNA, 888 bp, Escherichia coli
atgaatcatacggatttcaatcatcttgctgttttcattacggtagcgcgtgaaaaaagcttcacgcgggccgcggcgcacctgggcgtttcacaatcagcaatcagtcatagcattcgaggtctggaggaaaggctggggatacgtcttctgacccggacaacccggggggcagtgccaacagaggcgggagaacgactgcttgccaatcttgctccctactatgatgggattgagaccgagcttacctctttgggagagctgcgcgagaagccaggaggcatgatacgcatcaccgctcatgaccatgcggcaaccactatcctctggccaaagctttcaacgttattgagggagtacccggatatcacgcttgaaatcaacatcgactatggattgatcgacattgtgaccggtcgtttcgatgcgggagtccgtgttggggatcagattgccaaagatatgattgccatgcgtatctctcctgattttcgcatgatcgttgttggctctcctgattacttttccagacatcataagccagaaacgccacaagatctgacttcacacaactgcgcaaatttgcggctttccacacacggaggcctgttcgcctgggagtttgagaaagacgggcaggagttgaaagttcaggtacccggccagatgatattcaatacttcgcctcaactgttatcggcggcgcttgcagggtacgggctggcgtatgctcctgaggatgtggtgcaaaaatatatcaaagagggaaaattaatacctgtacttgaggactggtcacccacatttcctggttaccatctttattatccaagtagaaggcaggctcttcctgcattcaagttgattttaaacgctctaagggtatga

SEQ ID NO: 17071 - DNA, 981 bp, Escherichia coli
atgcaaaagcgacaattaggtaacagtggccttgaagtatcggcaattggcctgggatgtatgggactgacctttggctacgggcctgcgacagacaaagctgaagccatcaaacttatccgtgcagcttatgagcgcggcgtaacgctgttcgacactgcagaagcgtatggtcagatcaatgaagaaatggtcggggaagctgtggcaccgttccgtgaccagatcgttatcgctacaaaatttggtttcaaagagggtaatgcagcggcgggactcgacagtcgtcctgagcgtattcgtactgtcgttgaacagtcccttaagcggctgaaaacggattacatcgatctcttttaccagcatcgtgtggatccaaacgtgccaatggaagatgtcgccggagccgtacgcgacctgattcaggaaggaaaggtgaaatattttgggatgtgtgaggcgggcgtaaaagctattcgtgacgcacatgctgttcagccgctgtccgcactgcagagtgaatactctatgttcacccgtgaacctgaagacgtcattatcccgacgctggaagagctgggtatcggcttcattcctttcagcccgctgggtaaaggctttcttacaggaaagattgatggtgcaaccacctttgctgaaggagatgtccgaaataatctgccgcgttttgctgacgaagcccgtcaggccaaccataaccttgtcgccctgatcggtaaagttgctgagcgtaaacaagcaaccccggcacagattgctttagcctggttgctggctcaaaaaccatggattgctccgatccccggcaccacaaaactccaccgtctcgaagaaaatgtaggcggggctgcagttgaactcacggccgcagacctgcaggaaattgcagatgtgctggcaaaagttcccgtccagggcgagcgttataacgctgcaatgatgaagtccattaaccgctaa

SEQ ID NO: 17072 - DNA, 774 bp, Escherichia coli
atgacgacccaatctcttaaaggccgtatcgcactggtcaccggcggaacaaccggcctgggtttcggtgcagcgaagcgactgattgaacacggcgcaacagtctatatcactggccgccgacagaacgtgctggacgaggcagtaaccaaactgggcacctccgccagagctatatgtgcggatgtctcaagtaaagaagacatgctgcgtgcggctgccaccattaaagccgaacaggggcatctggatatattgttcgccaacgcgggtggtggccacgccacgccactcgaagaactgaccgaagatcagatcgacagcgaactgagcataaatgttaaaggtgttgtactcactatgcagagcatgctggacgtgcttcgcgacggttcctccgtagtgctgaatgcgtcgattactgcagatatggggttacctggatttgctgtttatgccgcgaccaaagcggcagtgcgttcactggctcgcagctggaccacggatctaaaagggcgagatatccgggtcaataccataagtcccggtgtagtcccgaccgagggttacagcaatgaacagaaaatgagtgacaacgatattgcctcatatgctgagcgagtttccgcagaaataccggccgggcgcgtgggcaccgcggcagatatcgcggatgcgttgatttttctggtatcagactcgagtacttacatccgtggcattgacctgatagtcgatggcggtatgacgcgtgtttatgccggtaagaactga

SEQ ID NO: 17073 - DNA, 312 bp, Escherichia coli
atgcagaaaataaaatcggaagaacgccacatcatctgtgaactgcgatgtgaacctgaaaatcgtgagcgcgttaaagagctggtcctgaaatttgttgagcctgcacgccttgaagccggttgcctttattacgatttttatcaaaaaatcgatgaacccgacacgttttatattattgacggctgggtaaaccaggatgcagtaaccagccatgcggaaaacccgcatgttgcagaagttatgtcatacctgcaaccgctgctgacattcggaccttctgtcagtctcattacccgtgtcagtgactga

SEQ ID NO: 17074 - DNA, 885 bp, Escherichia coli
atgaatggcataaatccttatattacgttgaataatggtgtgaaaatgcccgctctgggattgggtgtttatcaggccaaacctgaagaaactaccgaggcggtgaagaaggcactggaaaccggatatcggcttatcgataccgctgcggcctattttaatgaacgtgaagtcggcgctgggatccgtcggtcggacgtagaccgcaacgatatctttattgaaactaaattgtggatttccgactatggctacgattctgctcttcgcgcctttgatgtcagtctgaataaattaggcattgagcaactggacctctggctgcttcatcagcctctggcatcagaatttgaaaagaccattcaggcctataaggcggctgaaaagctgctggccgaggggcgcgtgcgtgccattggtgtatccaacctcacgcccactgaactcgacagattgattacagagaccagtgttgttcctgcggtgaatcagatccaggttcatccatattattcacaggcggaatggcgtgcggctaacgaccactatggcattatcacacaatgctggtcaccactgggtgggtcttatacctacaacaatgcggagaaaaatcctttcgaagataaggtaatcactgacattgccagaaaatattcgaagacgccggcacaggttattcttcgatggcatctggatcacggatattccgccattcctaaatctgtaaaaccccaccgaattgtcgaaaacttcgacgtgtttgatttcaggctcacggctaatgaaattaaagctattgatgcgcttgaaacaggcgttcgtggcggcccggatcccgactcactggatctggcaacctatggtttccagatccctgactga

SEQ ID NO: 17075 - DNA, 642 bp, Escherichia coli
atgaaagttacagagctgacgagtcgccagcaggcgatcgctccaatttctgcattcactgcgttgggcgataatcataaactgagagccgcactggaagcaggcctacatgctggcctgactattaacgacataaaagaaatactggtacagctttatgcttaccttggttttccacgtgcgcttaacgcacttggaacctttatgacccttgtgaatgaacgaaaagaacagggtataaatgatattgcaggttccgaagccagcccgctgcctgctggccgatccctccttgaactgggcacatctgtgcagacatacctgataggtgtgccacccaaagggcctgtattcgattttgctcctgctattgatacgtacctgaaagaacatctgtttggtgacatttttggacgggacaacctcagttatgaagatcgtgagattgccacccttggcgcacttgcaggcgtggaaggcgttgagccgcagctaatgtcccatttcaacatttctttaaacattggtttgactgaaacgcaattaaggggggtgatcgtcgcccttgaaaattcggcctgtccggtcgtcgctcaacgtgcaacgtcagcccttgagaaggtgctggcagccagtaagtaa

SEQ ID NO: 17076 - DNA, 288 bp, Escherichia coli
atgaaaagtatcgctactgctggccttgtcattatatctgtttttagcctttctggatgttttgaagaaacaaaatcggttgattggtggaaggagcaccatgatgaatctttaaaaaaagaaatcgaatgtaagaaaacaggaagtgatagccagaattgccgaaatgtgaaagaggccaactttcgttatcaacagttacacgcaactcccccatcttttaaagatgcatttaaaaagatggagaaagaacaaagtgaattttttaaagaagataataaaaaatga

SEQ ID NO: 17077 - DNA, 1131 bp, Escherichia coli
atggggctggttactggaattcctgctgggtcagatttttccggtaatgtaacgtctcctgctccggcaggaggcgtacctggatttgaatctgattttttccaaacaactcatcaggttatctttgatatactaaataaaactgttgctgggaaattaaatgaatattcatctattgcttatgaattgggtaaatatggtgtttctatatatgtgctgtggtatgcgtttactgttttagttcgcaaacagcaatcgcctgttcctgattttatctggaatgtatgtaagttttatgtgatattgctcttcgtaaaaaactctggaggtatgctgatatctgcaacaaatgcaatcgatggactaagagaaagtcttgcaggaggtgatccttggttgtggatagatcaactttggacaaaagtaattcaagttgcaaaggttatttgggataaagatacatctactgttccaattgccggtggtttatcctctttatttgtatatttcggtggaatagttgcattattattatgctcaatagtgtttttttctgctgaaattacgctcctgttgttatctgttacagcccctatatttgttttatgtatcgcttttggcttcctcagacaaatgtttaatagctggttgcagcttaacttcagttcgttattaatatttctctttggagcactagcgttacgggctggtacatggcaactaaatgtaattctgagtgtaactattgcgtcagataaacaggacttacttcaggctggggctacagccttggcttcgggcttgtttatgggctttgttatctggcaggcgaaaagttatgcttcacagattgcaggtgtgggtgttgaaggtgccatgcagagcgcagccgctatggggattggtgctggcgttttcggtgcatcccgtatggcgcgtggcgcacttggtatgggcagaaatgccggtattggtgcatggaaaggtctgcgtggtcaggaaggcgggtttggtcagtctccgggaataacgggtaagacagctaacctggccggacagggcgttaatcttggtgccaaaaagcttcgtcaggcagctattgagagagcaaagaaaatgtatggtgggtaa

SEQ ID NO: 17078 - DNA, 198 bp, Escherichia coli
atgcgtatttccttcaaacgtgcgactgagcagcaacgcaaagagttcctggctgatgatgttgcggccgtttatgacctcatgaaagaagttgtggaatcagggaactacacggcggcaaagatgcttaaattgcaattcttgctgggcgacctgaaatacaaatccgaagttgtcgccggacgacgcgagcattaa

SEQ ID NO: 17079 - DNA, 270 bp, Escherichia coli
atgaaagtacaagaccgtgaagtagtaaaaaacctcctgcaatacctgacctcaaaaaacctgacgggcagcgttgagttccgtgaagcgttaaaacatttcaacgtcactacggtttatcgttgggaaaacaaacattctgaaagaccgtatgtggtggatgtttttgcgcctgatattgagtgcggttttgagcgccattcattcaaaaagaaacattccgctgatgttttttgtgaggttgtatgtgcggcaggagatgatgagtga

SEQ ID NO: 17080 - DNA, 477 bp, Escherichia coli
atgagcaacatcgacacactggcgctgcgtgaggcagcagaagaagaaattatgctgcgaactgcaagcgacacgtcagataactggcaggatttagcaactccagaggctatgctggcactactggacgagcaggaaggcaaagataagcgcatcgcagctcttgaaggcgaaaacgaatatattcgtaagcgatttaaagaactcgatctgttctttggcaaaaacctcctggttatgcgtgctgccattattgaatggagagaaactggtaatgcagaaaatgcactgatgtggatttataacactttgtttggtcctggtgagttaccgagtgaagatgaaaaagatgctcaggcatattttgaccgtgaatatgagcctattgataaagagctaatggagcttcaccgatggttttatgagagccataaacgcgaaaaagctgatcgcacagtcaaagatgggaagggataa

SEQ ID NO: 17081 - DNA, 234 bp, Escherichia coli
atgagcatccgaactgaacatggatttggtccgttaacggtcgaagtcgaatggcttgatgattgccctaagtgccagcacggcaaagccaaggtaacaggatggtcggtaaccaaagattctttgtgggcgggtgatgaggccgtctgttccaaatgcggtcacaaaggtgaaatcgatgctgatggagagaatgcctgggtggaatgggacgaaatcgaggaggcacaatga

SEQ ID NO: 17082 - DNA, 1182 bp, Escherichia coli
atgaaaacgcttccgatcgttaacaccctacagcctatcctgcataaccagatccccgttatcactactgaactactggcaaagctatacggcacagacgttgataacatcaaaaaaaattactcacgtaacgcaacccgctttattgaaggaaagcattttttcaaagtggctggcgatgagttaaaaactttgcgagtgactttaagtcactcacaaaatttgcgactagttttaaacgagtcacaaaatgaagtgcaaatttcccccaaaactcgctctctcatcctctggacagaacgcggggctgcacgtcatgccaaaatgcttgaaactaaccaagcgtgggatgtattcgaacggctggaagactgctatttcagccagaacgcgcaaacggccgcgaccgtaaccgtctcgccaaacaatgctcgtgaggttgtcgatacgctcaacgccaaaccgatgttttacattaaagtgtgcaacaacgagccactcacaacctcagccgatgttgcccaggcattcagcaccacaaacaattccatcgttatggccatcgatgcgctacgcattcctcgcacggctgcggcgcgtcacttctttaaagagcaacgaccgttggaaggaagcgaccgcgaaataacaatctatcgcatgacaaaagacggatttaccttgctcatggagagcatcgacggtccaggcgtgaaagatatcaagctggcctacattgaagcctttaacgctatcagcagcgtgttaaaaacacagtacgagcgtgatctggctaaacgactgtaccaggaaaaaacgattatccgcgcggcaacagagcataatcggctattaacggaaccgaactacaggaaggaactaatcaaggagtttgacaaggcaacagggaaaaccaaagcggcgctaaatctgccagcaatgactcaggaaaatgtgatatcagccttacttcttgatctactcagaaacgccagagcacttatcagctttgacgaaaacctgaatcctcaactcaagctactaccaccgacaggcaaagtagtcgaccaggctgatcacaacagcatactcagcgtactggatgcaaacctgccaaccaggacactacaggatctgataaaaacatgtgctgataagctggcacagaaaagcagaccataa

SEQ ID NO: 17083 - DNA, 273 bp, Escherichia coli
atgacgggttatgaattgaaattatggcgtcgtgggatgaactggacgcaggagcgagccgccgaagaatttgggatatcgttggctacatataagcgatatgagaagggggagccgccgagggtcattgagatggccattcgcgttctgtcgtttgacgatatggttaaggatctttcacaccttgataaagatgcgattctgttaaggctgcaaacccttgtatgggaaaaggttaaagtgtcgtcagaattggaacaagggatcaaatga

SEQ ID NO: 17084 - DNA, 555 bp, Escherichia coli
atgcaatatggttatgcgagggtgtcaacttttgaccagaatttggaattacaactggaggcgctcaggagttcaggatgtgaccggatttttgaagataaaatatccggtgctaaatcaaaacgaccaggacttgataagctactgaaggtgttacggccgggcgatacggttattgtctggaagctggaccgaatggggcgttctctgattcatcttgttgatttacttaaccattttttatcaaacaacattgagtttatttcgattacggaagggataaaaattagcacttcaattggccgctttgcctacacgatgctgagtgcagtcgcagagatggagcgggaaaatatgattgaaagaacgcgtgcaggattggcggtggcaagggctaatggcaggataggaggacgccgctcaaaattggccccagagcaatgggaacagatcggaaggcttattgcgaatggtgtttcacgtaagcggatagcgattatcttcgatgttaccttatccacgctttaccgcaggtttccggctgggaatcattga

SEQ ID NO: 17085 - DNA, 234 bp, Escherichia coli
gtgagtacatcggctaccattctcgacatgtgctgtggcagtcgcatgctctggttcgataagaatgacgaatggtcgatatttagcgatatcaggaaagaggaacattcgctatgtgatggacgtcacccgattattaatcccgacattatcgctgattttcgtgcgctgccgtggttgtctgctttgcatcaaaagcagacattaccagatttagacatctgtttccgatag

SEQ ID NO: 17086 - DNA, 570 bp, Escherichia coli
atgacctacaaatacaaccccttctggcagcaacgtattcgtgagacggtgcggcacgcactggcggtgcatccccgcctgacggcacttcgggtggatctgcgtctgccggatgtatccgcagagactgatgctgctgtgatatcccgcttcgtcaatgccctgaaagccagaatcgacgcttaccagaagcgtaagcgccgtgaagataaacgcgtacatcccacgaccctgcattacgcctgggcccgggaattcggggagcgtaaaggcaaaaaacactatcatctgctgttgctggtcaaccgggatacctggtgtcgtgccggcgattaccgcgctccggagtctctggccgggatgattaaacaggcatggtgcagtgccctgggagtggatgccggatgccatgccacgctggcgacctttccggaacatcccgcactgtggctgacgcgtgatgatgacgccggctttcagcagctactggaacgggctgattatctggcgaaggagagtaccaaagcttacggcaccggtgagcgcaactttggctgcagtcgtggctaa

SEQ ID NO: 17087 - DNA, 174 bp, Escherichia coli
atgtacgcagaatcctttctcgcacttgatggtaacggacgtctgacggggcccgtaccgcacagactgctccttatgcccactacacctgccacttgtgtggcagtgcactcagataccacccgcaatacgacaccgaacggccctggtttgaacacactgacgacgggctga

SEQ ID NO: 17088 - DNA, 177 bp, Escherichia coli
atgaacggtataaaaacggggctggggatcacgccgggtgagcacattatcagtgccgactctgcgctcagcagaaatatccggcagtgtttctgcctttcctgtcatggccggttgattctgcagacagatgctcagggggcgtggtttgagcacgatttacatgccctgagctag

SEQ ID NO: 17089 - DNA, 396 bp, Escherichia coli
atgactggcaaattacgctttgcagtgaacgataaccagggctgtttcatatttccggaaacctggtttggctcgttgctggatgagtttgaagaactgattgatgcatacgatgcggatgaaatcagcgaaacaagttacatcaacaaactcaggcgccttgcccgacaggagaatgactttattgatgtacacgctcacttggcatacgtatttctggagcagaatgccccgcgtaaggcgctgaatgcagcccttaaagggctggcagttggcaatcgtcttatccctgaaggtttcagtggcagaatcatctggatacatcctgacaaccgaccttttcttcgtgccctctatgcggcaatcctggcaaatgcacatttacagcgtcattag

SEQ ID NO: 17090 - DNA, 579 bp, Escherichia coli
atgctgaatttactggtttttattcgctccagtgaactcagatatgcccgctgggctgaaattgatattgacaattcaatgtggactattccagccgaacgcaaacctctgccaggggtaaaattctcacaccggggctccaagatgcgaacaccacatcttgtgccactcagcaaacaggctgtagccatactgacagaacttcagacatgggctggtgaaaatggtctgatctttacgggagcacatgacccgcgtaaaccaatcagtgaaaataccgtaaataaggccctcagagtgatggggtatgacacaaccaaggaagtctgtggccatggattccgggcgatggcgtgcagtgcattgattgaatccggtttatggtcaagagatgcggttgaacgtcagatgagtcatcaggagcgcaacggagtacgtgccgcgtatattcataaagcagaacatctggaagaacgtcggcttatgctgcaatggtgggcagattttctggatgcaaacagggaggagtgtatcagtccgtttgaatatgcaaaagttaacaatccactgaaaaggtga

SEQ ID NO: 17091 - DNA, 597 bp, Escherichia coli
atgatgaaatcagacgaaaaataccaggttcccgcgtggatgcgacctctgttgccgttgctctgcaacaccggggggaacgatccggaagaactgctgaatgatacagaaaccactgccagtgcgaatgttgtccgttatgtactgatagttgctgtgcggtcgcaggttgatctgctgcagcttctgtacaggaaagggctgttgcgcacagagataccaggtggcttttcaccggaagaagcgcaggcactcctggataatctggtgcgcagccatatcagcaaggcgctgtcgggcgagcgaatggcagcccgtgacagaaatgccgatctggcctggattggacagcaactggtcgatgccgcctggtttgtccgtgccacactggaagcgcatgggatgagcgtcggaaatgagagtccccctgctccgccggagacaatgccggacatacagacacgggaactggtgatgttgatcaagcgactggcatcatcgctgaaagcggtgaaaccggacagttgtgtggtgcgtgaagcgcaggactggctgcgcgacagaaaacttgtggatatcacagatattctccggtga

SEQ ID NO: 17092 - DNA, 720 bp, Escherichia coli; identical to SEQ ID NO: 8275

SEQ ID NO: 17093 - DNA, 438 bp, Escherichia coli
atgatgaataccgaactgacactgaatgccctgcagtccatgaatgcccaggaatatgaagaaatccgtgctgcgggaagcgatatgcgccgtaatctcactcacgaggtgatgcgtaaagtggacgcaccggctaactggatgatgaacggagagtatggcagcgagttcgggggctttttccccgtccaggttcgtttcacgccagcccacgaacgtttccacctggcattatgttcgccgggagacgtctctcagctctggatgctggttctggtgaatggtggtggacagcctttcgccgtcgttcaggtgcaacatatcttcacgcctgccgcgatcagtcacacgctggcgcttgccgcgacactggatgcgcagggatacagtgttaacgacatcatccatatcctgatggcagaaggaggtcaggcatga

SEQ ID NO: 17094 - DNA, 1959 bp, Escherichia coli
atgcctgtaacgaagtgtgaaccagaaaccacccgcaaagcaagccgtaaatctgtaaaaacgcaggaaactgtcctgtctgccctgctggcgcagacggaggaagtgagcgtgccgctggcctcgctgattaaatcaccgctgaatgtgcgcacggtgccgtattctgcggagtccgtcagcgaactggcggagtccattaagggcgtcggactgctgcagaatctggtcgtgcataccctgcctggtgaccgttacggtgtcgccgcaggtggtcgccgactggctgcactcaacatgctggcagagcgtggcatcattccggctgactggcctgtacgcgtgaaggttattccgcaggagctggcgacggctgcatcaatgactgaaaacggtcatcgtcgggatatgcaccctgccgaacagattgccggattccgtgcgatggcgcaggaaggcaaaacgcctgcacaaatcggtgatttgctgggctattcgccccgccacgttcagcgaatgctgaaactggcagaccttgcgcctgtcatcctcgatgcgctggcagaagaccgcatcaccacagagcactgtcaggcgctggcgctggagaacgacaccgcgcgtcaggtgcaggtgtttgaagccgcctgccagtcgggatggggcggtaaaccggaagtacagaccattcgtcgtctggtgaccgaaagtgaagtggcggtggcaggtaacagtaaattccgcttcgtgggggctgatgctttctcacctgacgaactgcgtactgatttgttcagcgatgacggggacggttatgtcgaccgcgtggcgctcgatgctgccctgctggaaaaactccaggctgtcgctgaacaccttcgggaagccgaaggctgggaatggtgcgccggacgcatggagcctgtcggtgagtgccgtgaggatgccggaacataccgctgtctgccggagccggaagcggtgctgacggaggcagaagaagaacgcctgaacgaactgatgacgcgttacgacgcgctggaaaaccagtgtgaggaatccgacctgctggaagcagaaatgaagctgatgcgctgcatggcgaaggtcagggcgtggacgccggagatgcgtgccggaagtggcgtggtggtgtcctggcgttatggaaacgtatgtgtccagcgtggtgtgcagttgcgcagtgaagatgacgcgactgatgacgctgaccgcacggaacaggtgcaggagaaagcgtcagtggaggaaatcagtctgccgttgctgacgaaaatgtcttccgaacgcacgctggcagtccaggcagcactgatgcagcaaccggacaaatctctggcactgctggcatggacgctctgcctgaatgtgtttgacagcggagcgtacagtaaaccagcacaaatcagcctggaatgtaaacattattcgctgaccagcgatgcgccgtcagggaaggaaggtgccgcattcctggcgctgatggcagaaaaagcccgtcttgcggccctgttaccggagggatggtcacgggacatgacgacgttcctgtcactcagtcaggaggtgctgttatccctgctcagtttctgcaccgcatgcagccttaacggtgtccagacccgcgagtgtggtcgcacgtcacgcagtccgcttgactcactggagagcgccatcggttttcacatgcgcgactggtggcagccgacgaaagcaaacttcttcggacacctgaaaaagccgcagattatcgcagccctgaatgatgccggactgtccggtgccgcacgggacgcagagaagatgaagaaaggcgatgccgctgaacatgcagagttccatatgaaagacaaccgctgggtgcctggctggatgtgttcaccacgtccacagacggatgccactgaacgcgccgataacctggctgatgccgcctga

SEQ ID NO: 17095 - DNA, 528 bp, Escherichia coli; identical to SEQ ID NO: 8564

SEQ ID NO: 17096 - DNA, 192 bp, Escherichia coli
atgaatatcagcacagaaacccgcgaaattctgcgcaattacaaagccgtgattaatgcgcggcgtcgtgaaatggggcagaaaccgctcaccactgcgcagattgttgatgaaatctgcgattttgtggcgaatcagcaggcggttttcctcggtggtcactatatccttcagggcagcagaaacaggtga

SEQ ID NO: 17097 - DNA, 225 bp, Escherichia coli
atggacgcgaccacaacagtggcgcacataacacaggtggtaacattaatggcggccctacggggcttggtggaaatggcggtgcttctgacggttctggatggagttcggaaaataacccatggggtggcggttccggtagtggtgttcactggggaggtggctccggcaatggcaatagcggggggaatggtaattccggtggtggcagcaattcatccgtag

SEQ ID NO: 17098 - DNA, 135 bp, Escherichia coli
atgcacgaaagcgatgcgcgatcgatttcgactcttccgaagggcgagcaggtcaaaatgacaagttttctccccctggatgaaaagttctgcacggagactttagctctcatctcccgcatggaatttttgtga

SEQ ID NO: 17099 - DNA, 261 bp, Escherichia coli
atggaactgaaacatagtattagtgattataccgaggctgaatttctggagtttgtaaaaaaaatatgtagagctgaaggtgctactgaagaggatgacaataaattagtgagagagtttgagcgattaactgagcacccagatggttcagatctgatttattatcctcgcgatgacagggaagatagccctgaagggattgtcaaggaaattaaagaatggcgagctgctaacggtaagccaggatttaaacagggctga

SEQ ID NO: 17100 - DNA, 1005 bp, Escherichia coli
gtgtatgtgtcggtaacggacgttctgacacctgagcaggtaaaacagcgtcaggaagaggagaaactccgtcagcaggagtgggacgccactcatcctgttgaagtagctgaacgcgagtatgaaagtgcaaaagcagaactggaggcagaagacaagaaagttcagagtcttcaggcaacgcttgatgggctgaaaaatactccggaaggtcttgctctgtctgatgcagggcaacacccgttaacatccagtgaatcccggtttgtggctatccccggatacagtggcggtggtgtacattttgatgccaccgcaacggtggattcgcgtgacaggctgaacagtctgataaatctgggggcaaccgcttatgttaataacgttcttgaacttggagacgtcagcgccccaacagaggatggggtaaaagtcggtaatgcaataaaaaatgcaactattgaggtatatgacaaattacgtcagcgcctccttgaccgacagaatgaaataaataatgcccaggcttctcttaatacggctattgaaagtcgtaaaccaaaagagaaaaaagttcaggatgccaaggataaactggataaggagaatagacggaagcagccaggtaaagccacagggaaaggaaaaacagttggtgataaatggcttgatgatgcgggtaaagattcaggatctcccattccagatcgtgttgctgataaactgcgtgataaagagtttaaaagcttcgacgatttccggaagaaattctgggaagaagtgtcaaaagatcccgagcttagcaagcaatttaaagacagtaataagacgaacattcaaaagggaaaagcaccttttgcaaggaagaaagaccaagtaggtggtagggaacgctttgaattacatcatgataaaccaatcagtcaggatggtggtgtctatgatatggataatatcagagtgaccacacctaagcgacatattgatattcatcgaggtaagtaa

SEQ ID NO: 17101 - DNA, 1485 bp, Escherichia coli
atgtcattcggtcagccttgtgatgagtttcccctgagttcgctgcctccactcattcgtgatgccgttattgaagctcagcaaattacgcaggctccccttgggcttgtggcagcgtctgccctgggcgctgtttcacttgtctgccagaatctgattgatgtctgcagactgaatacactgcgggggccggtctctctttttttcctgacgcttgccgagtccggagaacgaaaaaccgcagtggacaaattattaatgaagcccctgtaccagcaggagatgcagttatattccagatacaaaagtgaactggctgtctggaaaaacaaggaagagcttttaaaggctcagaaaaaagcattgttgtcaaaactgaataaagaactccgcaaaggcgcggatgagtcagaaaccctcagacaactggaagtacttcagaaaaacagtgcggaagaacctgtgaggtataaattcatttttaatgatgccacgactgcggcaattaagaatcagctttgtggtaaatggcgttcagtgggtattatgtcagatgaagccggtattatatttgatggatataccctgtctgagttgccttttattaacaaaatgtgggatggctctgtattgtctgtggacagaaagaatgaacccgaacagatgattgaaaatgccagaatgacgttatccctcatggtgcaacccggtctttttgaccgatatatggagcgaaaaggttctgttgccagggacagtggttttcttgcccgttgtcttatcagtaaacctgcaaccacgcaggggaaacgctttattaacggagctgtgattccgggaggatcattaacggcatttcatgaacgattaatggaactggccagaggcagtattgaaaaatccagtgaggatgaacggtattgtctgcatttttcgcctgaagcgcaaaaaatatttattgagcactataatgttctggagcaggatttatccccttccggacccttaagcccgtttcggggacatgtttcaaaaaaaacagaaaacattgcaagaattgcagcgttatttcagtatttcagctatggtgaagggaaaatctctgccgatatcatgacgtctgctgtcgtaataagttcgtggtacacagatgaatataaaaatttatttgcgttacctgatgaatctgaactgcagcagaaggacgccgaggagctgttcgactggctcattgaggagtgccgcggagaatgcccgccccgtgtcaggaaaaattatattctccagtgtggcccgggccggttcagaaacaggaaaaaactgaacgcattgctgaacattcttgaatctcagttcaggctttctgtcgtgccggaaggaaaaaccatgtatgttctgcttccccagatagccagtttaaagttgtctgatgtctctggtatttttacctcgggttatcactacaataagctgagagcgaagtaa

SEQ ID NO: 17102 - DNA, 918 bp, Escherichia coli
atggttcagaaaattttgtcggataaggttatgaatgaaagaacaaatgcgtattactcttattatcttggagagcgtaatatctccgtactgccccttaatgtttatgatcccccggaacgttttatcgcttacataaaaaaaaacagagaaaatctgaacatcacactttcagattttgaacttgaacaaataatttctggtatgcgtctgaaggccctggccttcctggtccccctggaaaaaatatcctggatcgcgggcagtgaacgcgcatgcttattttcctggtatctgttgatgcagtttatccagaataacagggcaaaaataagcgcagacttgcttcaaaagaataaactgtatcttaaagaagagtatctggaagggaatgccttcccgtcggactcatcgacacagttcagacaaatactcagagttctcgatattctttctgataagaatttgcgggatgagtggataatccagaccaaagacagatggatgcgggcatttaaatcaaagagtcctttcagttacctcctcccggagaacgaacatgaatgcatatggacatggaattatttgaagggaaaaaatattgcactggaaaaactggccagttttcctggttctgctgatatttaccacgcaattcacctttcatttgacatatgggttacctgtccactcacctcacctgacgatataaaaaatttcagaaacagtttcaataaggccaaggcgcagcgcaagtacaaaaaaatgcaggaagataaaatcaatgtacagttttttcttgacgcagaaaccagggcgcagctcaaagaattatcgagggtcagaagactcagtaccggcgaaatgctgcatgacctgattgttgaagagtataaaaggtaccgacattccagataa

SEQ ID NO: 17103 - DNA, 645 bp, Escherichia coli; identical to SEQ ID NO: 13990

SEQ ID NO: 17104 - DNA, 135 bp, Escherichia coli
atgcagaaaaccctcaaggctggaagccgaattactttgcgggatcagttgcaacttatgatgcaaatcgaattgttaaatgtggtttttatgatgaatacaatttccataaagggacatttagagctgatttaa

SEQ ID NO: 17105 - DNA, 234 bp, Escherichia coli
atgacagcgcttcccgaccatgccgccagtcccctgatgacccgcctgcaggacgagctgcgcacggaatctgtccggtctcaggcccgtgaacagtttaccggtgcggtggaccggatatttgacacggcggagagcgtctgtattgcctctgttgcacgcacggttctgcgtgccgtccgtgactcggtggtctctgttgcccgcgctgtatggaactggattttcttctga

SEQ ID NO: 17106 - DNA, 570 bp, Escherichia coli
atgacctacaaatacaaccccttctggcagcaacgtattcgtgagacggtgcggcacgcactgaatgttcatccccgcctgacggcattgcgggttgacctgcgtctcccggatgtaccggcagcaacggacgcagctgtgatatcccgcttcatcaatgccctgaaagcccgaatcgacgcttaccagaaacgtaagcatcgggaaggtaaacgcgtgcattcctcgaccctgcattacgcctgggcccgggagttcggggagcttaaaggcaaaaaacactatcacctgctgctgctggtcaaccgggatacctggtgtcgtgccggcgattaccgcgctccggggtcactggccggaatgattaaacaggcgtggtgcagtgccctgggagtggatgtcgggtgccatgccacgctggtgcattttccggcctggccggcggtgtggctggaacgcgatgatgatgctggtttacgggatatgctgaagcgtgctgactatctcgcgaaagagtacaccaaagtcaacggtaccggtgagcgcaattttggctgtagccggagttga

SEQ ID NO: 17107 - DNA, 249 bp, Escherichia coli
ttgcattaccttgccgaccgcgccggtatcagagggcagttcagcgacgcggatgcataccatctggaccaggcttttccactgctgatgaaacaactggaactcatgctcaccagcggtgaactgaatccccgccatcagcataccgtcacgctgtatgcaaaaggtctgacctgcaaagctgacactctcggtagcggtggttacgtttatctggctgtttatccgacgcccgaaacgaaaaagtaa

SEQ ID NO: 17108 - DNA, 162 bp, Escherichia coli
atgaaacaactggaactcatgctcaccagcggtgaactgaatccccgccatcagcataccgtcacgctgtatgcaaaaggtctgacctgcaaagctgacactctcggtagcggtggttacgtttatctggctgtttatccgacgcccgaaacgaaaaagtaa

SEQ ID NO: 17109 - DNA, 174 bp, Escherichia coli
atggtcgacatggcatttatcactcaactgaacggcctgacagataagtggttttacaggctcatcagggatggggcctttccggctcccatcaagctgggccgcagctcccgctggctgaaaagtgaagtggaagcctggctacaggcgcgtattgcacagccccgcccgtaa

SEQ ID NO: 17110 - DNA, 174 bp, Escherichia coli
atggtcgacatggcatttatcactcaactgaccggcctgaccgataagtggttttacaaactcatcaaggatggtgactttcctgcgcccatcaaaatgggccgcagctcccgatggctgaaaagcgaagtggaagcctggctgcaggcgcgtattgcacagtcccgtccgtaa

SEQ ID NO: 17111 - DNA, 303 bp, Escherichia coli
atgaaaactttgttatttatcttcatgaccatagcaatgttgctatggtttttaagtacgctaagacgtaaaccctgtcaaaagaaaggctgtattgacgccattataccagcttataacgaaggcccgtgtctggcgcagtcactggataatctgctgcgtaacccttatttttgccgggtaatttgcgttaacgacggatccacggacaataccgaagcggtcatggcggaagtcaaacgcaaatggggcgaccgctttgttgccgtcacgcaaaaaacaccggtaaaggtggtgcgctga

SEQ ID NO: 17112 - DNA, 1596 bp, Escherichia coli
atgaaaataacgacagtcggcgtatgcataatttgcggaatttttccgttgctgattttgccccaattgcctgggacagtaacccttgcgtttctgactctcttcgcctgtgtactggcatttatccctgttaaaaccgtccgttatatcgcgctgacgttgctgtttttcgtttggggcatattagcagcaaagcaaattttgtgggcaggagaaaccttaactggcgcgacgcaggatgcaattgttgagatcattgctactgacggcatgaccactcattacggtcaaattactcatctacaaggtcgacgtatattccctgcgccaggcctcgtactgtatggcgaatatcttccgcaagcggtttgtgccggacaagtatggtcaatgaaactcaaagttcgtgcagttcatggtcaacttaatgatggcggctttgatagccagcgttatgccattgcccagcatcaaccgctcaccggccgttttctgcaggcaagtgtcattgaaccgaattgtagcctgcgtgcacagtatctggcgtcactacaaacaacgctgcaaccctatatgtggaacgcggttattcttggattaggtataggggaacggttatccgtccccaaagaaatcaaaaatatcatgcgtgatactggaacggcgcatttaatggcgatatcaggattgcacatcgcttttgcggcgttgctggctgcaggactcattcgcggtgggcaagtttttctgcctgggtgctggatccactggcaaatgccattaattggtggaatctgctgtgctgctttttatgcctggcttacgggaatgcaacctcctgcattgcgtaccgtggtggcgcttgccatttggggaatgcttaagttaagtggacgacaatggagtggctgggatgtatggatatgttgtctggcggcaattttgctgatggatcctgttgccattctctcgcaaagtttatggctatctgccgctgcggtcgcggcactgattttttggtatcagtggtttccctgtccggagtggcagctgccgccggtattgcgcgcggttgtttccctcatccatctgcaactgggaatcaccctcctgcttatgcccgtgcaaattgtcatatttcatggcattagtctgacctcgtttattgcaaatctttttgcaattcccctggtgacatttatcacggttccgttgattctcgccgcgatggttgtgcatttaagcgggccgtttattctggaacaagggttatggtttcttgccgaccggtctttggctttacttttctgggggttaaagagtttgccggaagggtggatcaacattgctgaacgttggcaatggctaacattttccccatggttcttactggtggtatggcgattaaacgcctggcgaacgttgccagcaatgtgtgtggctgtaggcttgctgatgtgcttgccgctgtggcaaaaacctcgacctgacgagtggcaagtgtacatgcttgatgtcgggcaagggctggcaatggtcattgcgcgaaacggcaaagcgattctctatgacacgggactggcccgaaggggatag

SEQ ID NO: 17113 - DNA, 150 bp, Escherichia coli
atgtccgttaatgaatcagaagagaggttgcttaactccacaaagaaaacatttctgtcaatgtggtctcacagcaatattttctataagaaaggaaaggaaaggaaaggaaaggaaaggaaaggaaaggaaaggaattttgcgatgtaa

SEQ ID NO: 17114 - DNA, 2064 bp, Escherichia coli
atgacagtaaaaatttctggcgtgcttaaagatggcacaggaaaaccagtacagaactgcaccattgtgctgaaggccagacgaaccagcagcacggtggtggtgaacacggtggcctctgaaaatccggatgaagccgggcgttacagcatggatgttgagtatggccagtacagcgtcaccctgctggttgaagattttccgccttcacatgccgggaccattaccgtctatgaaggttccagaccaggtacgctgaatgattttctcggtgccatgacggaggatgatgtcatgccggaggcactgcgccgttttgagctgatggtgaatgaagtggcacgtcatgccggagcatcatcacagagcgcagcggcagcaaagaaatccgaaactgcagcggcatcatcgaagaacgcggcgaaaacctcagaaacgaatgcagctaacagcgcacaggcggcagcggcctcgcagactgcatcggcaaactccgcgacagcagccaaaaaatcagaaaccagcgcgaaaaatagcgagacagccacaaaggccagcgaaaaaaacgcaaaatccagccagacggcagcgaaaaccagtgagacgaatgccaaagacagtgaagccaacgcaaaggtgagcgaaacagcggcggcgaactcggcgaaagcatcggcagcaagccagacggcagcaaaagcaagtgaagatgctgccagagaatacgcaaaccagacagcagagccgtacagatatgttttacagccgctgccggatgtgtggataccctttaatgattcgctggatatgattacgggctattctccgggttataaaaaagtgaagattggtgataatgtggttcaggttgccagtgataaacaggttaatttcagtcgcgcatcaacggcaacatatatcaacaaatctggcgaactgaaaacggcggaaattaatgagccacgatttgagtgtgatggcctgcttattgaggggcaaagaacgaacttcttccagaacagtacagacccttcgaagtggaataagtcaacttcactggacgttacagaaacaggcacagatagtttcgggtttaattatggccggtttgtcgtacaggattcgattgttggtacaagtaaagcgcataccattatcggactgtattcgagtaccggaggggttgatacttcaggggacgaaaagcatgtaactatatcctgtcgggtaaaaagtgaagttgataatatcgccgttcgtattttatttgaacattatgatggggaggtaaggacatcaataggagcagcaaacctgaaccttaccacccgcataattagcaagacaggtcagacaagccgtgttacagcaaggtctgttaaggatgatgcaactggctggatattttttgaggctacattaaaagcagatacaacagaaaatacggttggtggttttgtccagtattctccggatacagggcagatggttgcatcaggggattatctcgatgtaaccactccacagattgaggctggtacaggcgcatcatcttttattgttacggggacggcaccggtaacgcgggcaagcgatatggttacagttccgattaagaataatctttataatcttccttttacggttctttgtgaggtacataagaactggtataaaacgccaaatgcagcaccgcgtgtttttgacacataccggcatcaggcagatgcggggatcgtaatggggtttggttcatcaggtgggtacgacggttttccgtattgtgatataggtggttcagaccgacgaataaatgaaaatgccgggctggaaaaaatgcttattggtatgcgggtaaagtccgaacggtccacatgtgtagtcagtaacggtaagttaagcagcgaaactaaaaccaaatgggaatatatccggagtacagcaaccattcgcattggtggacaaactacagcaggattacgccatttatttgggcatgtgaggaattttcgtctctggcataaagagctaacagatgcgcagcttggggaggttgtggagtga

SEQ ID NO: 17115 - DNA, 1374 bp, Escherichia coli
atggccctgaaatgctacccgctgctccccggtggtctgttggctatcgaagcggtattcatcggcatgaccagcgcggaacatgttcgtgaagaagtggcggcaaatcttgaagtcttgctgttactgatgtttatggtggcgggtatctattttatgaaacagctgttgttgttcatatttacccgtttgctgttaagtattcgctccaaaatgctgctgtcgctctctttttgcgtggcggcggcgttcctctccgcgttcctcgatgccttaaccgtcgtggcggtggtgatcagcgttgcagtcggtttttatggtatttatcaccgcgtagcctcttcccgtactgaagataccgacctgcaagacgatagtcatatcgacaagcattacaaagtggttctggaacagttccgtggctttctgcgtagtctgatgatgcatgccggtgtcggcaccgcattaggcggcgtgatgaccatggtgggcgaaccacaaaacctgatcatcgctaaagcggctggctggcattttggcgatttcttcctgcgcatgtcgccggtgaccgtcccggttctgatttgtggcctgttaacctgcctgctggtagagaagctgcgttggtttggctacggtgaaacgctgccggagaaagtccgcgaagtgctgcaacagtttgacgatcaaagccgtctccagcgtacacgtcaggacaaaattcgtctgattgtgcaggcgattatcggcgtctggctggtcaccgcgctggcactacatctggcagaagtcggtttgattggtttgtcggtcattattctggcgacatcattgaccggtgttaccgatgaacatgctatcggtaaagccttcaccgaatctctgccattcaccgcactgttgacggtgtttttctcagtagtcgcggtgattatcgaccaacaactgttttcgccgattattcagtttgtgttgcaggcatctgaacatgctcagctgtcgttgttctatattttcaacggtctgctgtcatccatttcggataacgtcttcgtggggacgatttatatcaacgaagcgaaagcggcaatgaaaagtggcgctatcacgttgaagcaatatgagctgctggcggtcgccattaataccggtaccaatctgccctccgtcgctacgccgaacggtcaggctgcgttcctgttcctgctgacctctgcactcgcgccattgattcgtctctcttatggccgcatggtgtggatggccctgccttacaccctcgtcctgacactcgtcgggctgctctgcgtcgagtttacgcttgctcctgtaaccgaatggtttatgcaaatgggctggatagcaacgctttga

SEQ ID NO: 17116 - DNA, 198 bp, Escherichia coli; identical to SEQ ID NO: 4957

SEQ ID NO: 17117 - DNA, 495 bp, Escherichia coli
ttgacggacttcggggaaaaaagtgtttttttagtcatcctgtttacctctttctcagggaatttagtctccaggattcccggggcggttcaatccggccaagcattaaccggcaaggatgatatcctaacgccattaatcaaacagttaacagaaaccgctctggccgctgaactcgactcccatctggctcaggatgttgaagtcaatcgtaaaaatggttccggaaaaaagaccattaaagccccgactggcagctttgagctggcaactccacgtgatcgtaatggttattttgaaccccaactggtgaagaagcaccagaccacgttgtctgatgagctcgagcgcaagatcattcgcctgttcgcgctggggatgagctaccaggatatcagccgggagatcgaagatttatatgccttcagtgtttccacggctaccatcagtgcggttaccgataaagtcattcctgagttaaaacagtggcagtag

SEQ ID NO: 17118 - DNA, 216 bp, Escherichia coli; identical to SEQ ID NO: 4960

SEQ ID NO: 17119 - DNA, 732 bp, Escherichia coli; identical to SEQ ID NO: 10188

SEQ ID NO: 17120 - DNA, 351 bp, Escherichia coli; identical to SEQ ID NO: 9336

SEQ ID NO: 17121 - DNA, 216 bp, Escherichia coli
atgtaccagatggaaaaaatcacaacaggtgtgtcatacaccacgtcagcggtgggaacgggctactggttcctgcagttgctggacagggtttccccgtctcagtgggcggcaataggcgtgctggggagtctgctgtttgggctgctgacatatctgactaacctgtatttcaaaatcagagaggaccggcgtaaggcggcgcggggagagtaa

SEQ ID NO: 17122 - DNA, 654 bp, Escherichia coli
atgagtaataaatattgccaggcgctggtggagctgcggaacaaaccagcccatgaactgaaggaagtgggcgatcagtggcgcacgccggacaacattttctggggaattaacaccctgtttggcccgtttgttctggatctgttcaccgacggtggtaacgccaaatgtgccgcgtattacacggcggaagacaatgcgctggcgcatgactggtcagaacgtcttgcggagcttaaaggtgctgcctttggtaatcccccatacagccgcgccagtcagcatgaggggcaatacatcaccggcatgcgttacatcatgaagcatgccagtgccatgcgtgataaaggcgggcgctatgttttcctgatcaaagctgccaccagcgaagtgtggtggccggaagatgcagatcatattgcttttattcgcgggcgtattggttttgaactgcctgcctggtttataccgaaggacgagaagcaggtgccgacaggcgctttcttcgctggtgctattgctgttttcgacaagacctggaagggaccggcaatcagctacatcgggcgcgatgaacttgaggcatgtggtgaggcgtttctggcgcaggttcgccagcaggcggaaaaactgctcagggagatggcggcatga

SEQ ID NO: 17123 - DNA, 486 bp, Escherichia coli
atgacaacctcttcgcataattccaccacaccttctgtttccgtggccgctgcatcagggaataaccagtctcagttggttgccactcccgtccctgatgaacagcgcatcagcttctggccgcagcattttggcctcattccacagtgggtcaccctggagccccgtgtcttcggctggatggaccgtctgtatgaagactactgcggtggtatctggaatctgtacaccctgaacaacggtggcgcatttatggcacccgaaccggatgacgatgatgacgaaacatgggtactgttcaatgccatgaacggtaaccgcgctgaaatgagcccggaagccgccggcattgctgcctgtctgatgacgtacagtcatcacgcctgccgtacggagtgttatgccatgacggttcattattaccgtctgcgggattacgccctgcaacatccggaatacgacgccattatgcgcatcattgactga

SEQ ID NO: 17124 - DNA, 261 bp, Escherichia coli
atgctgatggcggggattcagttcaccgctggtgagcatgagttccagttgtttcatcagcagcggaaaggcctggtccaggtggtacgcatccgcgtcgctgaaccggcctctgataccggcacggtcggcaaggtaatgcaaccggttaccctcctgcaccagacgggccccgaaacagggcgtcacggtgcagggcagcccccaccaggggcggtcgtgattgtcgtcgggatgcgttgtcccgggcagtgtgtctga

SEQ ID NO: 17125 - DNA, 504 bp, Escherichia coli
gtgaacgcgaactccgggacgctcaacaacgtcacgattaatcagaactgtcggattctgggaaaactgtcagctaaccagattgaaggtgatattgtcaaaacggtgggaaaagcctttccgagaaatggcagttatgccagcggtacaataacggtcactgtgtacgatgaccaggcttttgaccgtcagatagtagtcccccccgttctgtttcgtgggggtaagcatgaaaacttcaacagcaacaaccaacagtcatactggtattcaacctgtaagctgcaggtactgaagaacggacaggaaatctttcagcaacccgcgacggatgtcagcagggtattttcatcagtcattgatatgcctgccggacacggccatgtcaccctgactttcaatgtttcttcatatggtgctaataactggacgccaacgaccagtatcagcgaccttcttgttgttgtgatgaagaaatctacagccggtatcagtatcagttga

SEQ ID NO: 17126 - DNA, 369 bp, Escherichia coli
gtgtcagacacactctccgggacaacgcatcccgatgacaatcacgaccatccctggtggggactaccctgcacagtgacgccctgtttcggcgcccgtctggtgcaggagggtaaccggttgcattaccttgccgaccgtgccggtatcagaggccggttcagagatgcggatgcgtaccacccggaccaggcctttccgctgctgatgaaacaactggaattaatgctcaccagcggtgaactgaatccccgccatcagcataccgtcacgctgtatgcgaaaggactgacctgcgaagccgacaccctcggcagttgtggttacgtttatctggctttttatccaacatccgaaacgaaaaagtaa

SEQ ID NO: 17127 - DNA, 600 bp, Escherichia coli
atgtcgccggaggactggctgcgggcagagatgcagggtgagattgtggcgctggtccacagccaccccggtggtctgccctggctgagtgaggccgaccggcggctgcaggtgcagagtgatttgccgtggtggctggtctgccggggtgagattcataaattccgctgtgtgccgcatcttaccgggcggcgctttgagtacggggtgacagactgttacacactgttccgggatgcttaccatctggcggggattgagatgccggattttcatcgcggggatgactggtggcgtcacggtcagaatctctatcttgataatctggaggccacagggctgtatcaggtgccgttgtcagcggcgcagccgggcgatgtgctgctgtgctgttttggttcatcggtgccgaatcacgccgccatttactgcggcgacggtgagctgctgcaccatattcctgaacaactgagcaaacgagagaggtataccgacaaatggcagcgacgcacacactccctctggcgtcaccgggaatggcacgcatctgcctttacggggatttgcaacgatttggccgccgcatcgaccttcgtgtga

SEQ ID NO: 17128 - DNA, 276 bp, Escherichia coli; identical to SEQ ID NO: 13339

SEQ ID NO: 17129 - DNA, 294 bp, Escherichia coli
atgatagttttttttacctttgcactccccaaactcccgggcccagacgtaatgcagagtggtgggatgcacgcgtttaccttcccgatgcttacgtttctggtaagcgtcgattcgggctttcagggcattgatgaagcgggatatcacagctgcgtccgttgctgccggtacatccgggaaacgcaggtcaacccgcaatgccgtcaggcggggatgaacattcagtgcgtgccgcactgtctcacgaatacgttgctgccagaaggggttgtatttgtaggtcatggttaa

SEQ ID NO: 17130 - DNA, 390 bp, Escherichia coli; identical to SEQ ID NO: 8757

SEQ ID NO: 17131 - DNA, 234 bp, Escherichia coli
atggcacctgaaccggatgacgatgatgacgagacatgggtactgttcaatgccatgaacggtaaccgcgctgaaatgagtccggaagctgccggtattgccgcctgtctgatgacgtacagccatcatgcctgtcgtacagagaattatgccatgacggtccattattaccggctgcgggattacgccctgcagcatccggaatgcagcgccattatgcgcatcattgactga

SEQ ID NO: 17132 - DNA, 225 bp, Escherichia coli
atggcacccgaaccggatgacgaaacatgggtgctgtttaacgtcatgaacggtaaccgcgctgaaatgagcccggaagccgccggcattgccgcctgtctgatggcgtacagccatcacgcctgtcgtacagagaattatgccatgacggttcattattaccggctgcgggattatgccctgcagcatccggaatgcagcgccattatgcgcatcatcgactga

SEQ ID NO: 17133 - DNA, 423 bp, Escherichia coli
atgattgtcattgaggacttaaaggtcagtaacatgtctaaatcggcaaaaggtacgacagaacggcatggacggaacgtaaaagctaaatctggtttaaaccgctcaatactggagcagggctggtatgaaatgcgccgtcagcttgagtacaagcagctctggcgaggtggtcaggtactggcaataccccctgcctacaccagtcagaagtgcgcttgctgtggtcatacagcaaaggaaaaccgccagtcacaaagtcaattcgagtgccttgaatgtggatatacagcgaatgctgatatcaacggggcacgtaacattttagcggcaggacatgccgtgcttgcctgtggagggagggtgcagtcagaccgcccgtcgaatcaggaacccgccgaggtgattcagacatcagtctga

SEQ ID NO: 17134 - DNA, 207 bp, Escherichia coli
atgcgaaagctgaaaatgatgctcttcggcgcaagcttgataatggtggtcgggtgttcgtcaaaggaaaatgccctgtgccaacctcagccgaagcctccagcgcctccggcatgggcaatgatgccaccgtcgaactctctccagttgctggacgaaacgttctcggtatccgggacggaatcatcagcgaccaaacagcactga

SEQ ID NO: 17135 - DNA, 198 bp, Escherichia coli
ttgtttcctccggataaccggatccgcgatctggacaactataacaaggcgctgtttgacgccctgacccacgcgggtgtgtgggaagacgacagtcaggtgaaaagaatgctggtggagtggggaccggttatcccggaagggaaggtcgagatcactatcagtaagtacgagaaaacggcgggtgcagctgcctga

SEQ ID NO: 17136 - DNA, 336 bp, Escherichia coli
atgttgcaacattattcagtgtcatggaaaaaaggactggctgcactctgcttactggctgttgctgggcttagcggctgcgatcaaaaagagaatgcggctgcaaaagtggaatacgacggactttcgaacagccaaccgctgcgtgtcgatgccaataaccatacggtaaccatgctggtgcaaattaatggtcgtttcctcaccgacgacactcgtcacggtattgtgtttaaagatggctccaacggacataaatcgctgtttatgggttatgcgaccccgaaagcattttatgaagccctgaaagaggcaggtggtacgccgggcgggtga

SEQ ID NO: 17137 - DNA, 396 bp, Escherichia coli
gtgcgaatgctggatcgctacatagttgagtggagggagattttggagcagaaatcgagcagtgaaaccgactatttgatcttaagtgatgaaggcgaccctctgtctcattcgtctcttacgcaacttttttctcgtctacggagtgaatattctggtttgcttccggagattcttacacctaaatctctgaggcataccttttctagccgtatggaacaggtacttagggcggcaggcatggaagaggatagaaggaagcaagccttggctatgttgcgaggagactcaagtttggagtcccaatctgtgtatatcgctcaagaggttgaagagcaggctcgtcgggcactttctgactatcaaaagaaattgattacagggttcaataaatga

SEQ ID NO: 17138 - DNA, 1599 bp, Escherichia coli
atgaatttgctcttgcataaagcgccccagatttctgactctgcgctagagttaccctctcaattttttactcgagagggtgtaaaagttgagattactggtgatagatggacatttcctcttctgtatcggcatagcaggcttgatttttctcgagttgaaaacgacacgcttaaaacttcgattaagcgctgtattattgatcaggcatcaagggtgtcaactcatgcagggtgccagtactggagtgatatatccgctgcaatagtctctcgccaaaaaaagcactccttgttgcccgacatttccgctgatgaatttcaagaacgtctgattgctgtaatggaagaggcaatcagtcaggcgcgaaataagcacaggctgtgggcgttgtaccggccaattcagtggtacatctggtgctctgaaaactattcggagctcgggttctcgatagcctatgcacaagagctcgattctctagaaattccaggcaaccctaagggtgaggcggttcgtcaggaagatccagaatgtgggccgttgcataggacgctggagcttcagcctataatcaatgcgcttaagcaggatcaaagtaaagtctacgagcatttgcagcaaaaaacagctgtggctctatctatagcttttggccgaaatcccgcgaatttaacatttttaaaagaaactgatttagttgacctgacaccgggttcatcgccaccgtgttatgtcttgaaaatgccaagaataaagaaaaggcagttggctccaagggatgacatgatcgatgagtatttagagcctgagatcgcaaagcacgttttggagcttatagatgcgtccaggcataggaagcttctaattgaggtagatggaaaggcagtagaagtcaccagacctctatttataaaccccagaaaaaatgcttatgcgattgattcaaagcgttgggatgaggcttataacatgctgtccactgggatagcgaaccttgtgaaagcttttataaaacgtcacaacattatctcgccgcttactggcgaattattgcatgtcacgccaaggcggctgcgatataccttggcaactgggctggctgctgagggaatcagtaagcgtgagctggccagaatactggaccatacagatacccagcacgtgaatgtctattttgagatggctggaaaaatagttgaacacctagacaaagcaaccgcgaaaggtttctcgaagtacctcaattttttcaaaggcaggctaatcgatagtgatgaagatgctgtcaaaggtgagcgagatgacaagcatctaacgtttgtagatgatcagaatcctgctgatcaagctgatattggcgtgtgtggtgaatctagcgtctgccaccttaatcccccctactcatgttatttgtgccccaagtttcagccatatcgtcatgctgatcatgagcatgtcttggagtgcctgctggccggtcgcgaagagcgtttgaagaagtacgagaatgcgcgattgggcatgcagctcgatgaggtaatcgcagcggtcgcacaagtagccaaactctgtgaggaaggggggcatcatgtctga

SEQ ID NO: 17139 - DNA, 2010 bp, Escherichia coli
atgtctgatggtcgctctaatcgcaaggccaaggtcgtccctttcgttgatcgtcttgagcgtgacaggaatgaaaatctcaactctttagtcagcaaagcaaagctaatgaagctggaagggtttgagtcggttgtttgggaggaccccgagtggcaagtcgatgcaggtcgcctagtcaagttaactggtaaaaatacgaaatcagcctcttttggttttttgctatctccgaagctgggttcagcgccactagacggttgctgggagctggttgccaaagcattgtttgttctcaggttccacagaaaatatcaatcagcaccgaatcagcgcagtttcattaccgctattggatatgtctcatttgcagctaaacagttagggcaggaattagttgggcttacgccagaggctctggataatgcgtctggtttaatttcaaaacactacagtgaaaccactgcctacaaccttcacaagcatgttgcagagttcgcagcgcattgtgattcgaatggtctatgtcgggttttatttcagtacaaatacgccaaaatgaagcgtcccgcgagcacgggagggataaatcacaaaaggttggatgatccagaggctctggatacgaagtcggacaaacttgtcgatcccgctgtgtttcgagtcattggcgaactctacttaaacgttcccaaagagcataagtatcgcttctatattctgatgttgacgctacttgcttgcacaggaaggcgattcagtgagatttcactattaccaaatcagcaattgtcttctgatgaagaggggattgcctatatcgaatactttccgcggaaggcaagtcgtggtgacgttttcacacctaagcgtagactttacttgccgtcagaagtgacccccatcgttggtgatgtgctcgttgagttagcggaaattacatttgaagcgcgtttaacagcggaagaaattcacaaagttggtgagcctgatctaaggtttctggatggcatacctgaagataaaaagctctacgcggctgatttaactgaattggggatcagtcatactgttttgggcacaactggctggctcaggaagcaaaacctcgcgtggccagatcatagcgcattaaccaagcagggaattaagcctgcaaatcccattttttacacttacaaaagtggattggttgaatactgtttccgtgatttctcgggagcatatttatcggctcttcatacggaccaatttggtaaagaatactacctaaaagatcttttattcattcgttctcttggactttccagcggaagctacgctcattggctggccacaagttgtagccagtccatgtttactacatttctccgctatttccctgcgctcgccgccgaatacgcctccagcagtatcgaggtggacttcaccagtcatcacttccgccatacgctcaatactctgcttgatgagggcgggttaagtgacctgctgcaaactgaatggtttggtcgaacgaacccaagagacaccaaagcctatcagcatacatcccgtgaaaaacgagcactgatgctccgtgaagacatcaaaaaaggtttggttggaggtcagttagctgagcaaatcaaagtggttccggtagaagtacaggatgccattctgaaagcacgaattcaggccgtacatgatgtcggtacaggtatctgcatccacaatttctctcaaaccccctgcgagcgccatttgcagtgttcggcggactgtaaagactacgtgtgggctaaggatgataagggtcgtctggacgagcaaaaacgccaatatgcgcttactgctctagcccgaaaaaaagctgaacagcagttggatagcactaagccaaaaaagagtgctgactggctggcacacaacgataaaaaactgaaaacactggctgcccaactggccgacaacggggtggagcactttgatcccgaacaatatttacacgaggtagagcatggttaa

SEQ ID NO: 17140 - DNA, 477 bp, Escherichia coli
atggttaagcgcttcagacgcatgtccgacagtgacatcaatacaatcgttgccgatttggatcgctgggcgttgggtgagcttggatcaaaactcacctgggctgtgctagaagagcgctttggctttagtcgccagtcgctccaagctaaatctgagatcaaggccgcctatgacaacgccaagcgagcattgtcgggcggattggtgaaaaccaaagagcaggccactaaagaggccgaagagcttcaggtagaggtagatcgcctcaaagcggagctagatgcctacaagcgaaaagaagagcaatggctgcgccgctggcagcaaatcgcctttcatgtgcggcagaaagggatacagatggctagcgttgataaggccccaccagaaggggctgagctgccctcaaacactgaaaccgcgcagatactccggccgtttgataaggaagttccaccttcagggagggtttag

SEQ ID NO: 17141 - DNA, 1143 bp, Escherichia coli
atgcaaaaaagactaaatacagataaagcacagcaggcgatcgataaggcagggttaacccaaactgccgtcgcggatgctctaggcgtaaccaaagaagccgtttcccagtggcttttgcacaagtcttttccccgacctaacaagctacttcagttaggcaagttgttaaatctctcttttgatgatttggtcatcaaggaagatccgcacgccccgaaagtggcattccgcaaaatgcgcggtaccaaaaccaaggattaccatatcgaaaaagcgcaagagattggtcgctttttgcgtcacctcgtgccctatttgccgtttgacacctttgaaatgccgccggtactcaagtcgccgagctgtgattatgactatcttcgaacggtaacagcgaaagtcagagaagatattaatcttggcccggtggagtgtgtggatttcacgcatttgattcgccgcttcagcgaactacaggccgttgtggtcccagttatgtggggagcaaagcagcgtcatgaaaatgcagtacacatacaccttcctgactcgggcagcacatgggtatacctgaatctggataccaatacccatgacttcaagttctggatggcacatgagttggggcactgtctttcgccaagccttgagggtgatgacgcggaagacttcgccgatgcttttgccgcgagcttgctttaccctcatgaattagcggagcaggcctacgaagtgttggttaaaaagccgtcgactgctgcaaagatcaatacgttaaagcagatggcagagctgcaggtaatttccccaaatactatccttcagcaagttaacaagtacgcaaagcggcttgatagagctgaaattataatgggtaattccttctttggtgcggtaaccaaatttaaccagcaattcctaaatatcagcgaagccctgttcggtgataatgagctggacgaatacggcaagccaagcgcgcgcgactacatcgaaaaagtagaaggcgctttcgaaactcctttcttcgatatgcttcgacaatatctgaaagagcacgataaagggccgggttatgttcaaactgtgctggatatgccactcctcgatgcacagagtatccacgcagagttgacctga

SEQ ID NO: 17142 - DNA, 552 bp, Escherichia coli
atgccgcaatcgaaaatcctcgttgataccaacgcctacctaaggttggccaaaaccgtacgccccttactgtttgtgccctttggtgacaacgagtattgcctgtacattctgcctgaactcaatgaagagctggcgggtaggaagctgcaaagtaagttcccttgggtagatgacgaggaattcgccgagaatcgcaaacacttcccccaaatcggcaaaaaacaaaagaagtccattcagcaaaccttcgaatacgtgtgggatcatgtgcaaaccgagttgccgggtccgtccaaggtggatacttggtatgtcgcctatgcattggagttgggtgtaccggtggtgacggacgatcaggatatgactgatttggccaaagccttcgatgcgcaggtcatgccaaccttagagctgctcaaaatcatgctggactgtggccatacagacatgaagaccatcaatggcctggttgagtactggaagtactttgcagacatgcctgccaacttcaagcccgactaccagcgcctgtttggtgatcaataa

SEQ ID NO: 17143 - DNA, 225 bp, Escherichia coli
atgagtgaccccatattgaccatcaaagacgtggccgattacctcaaggtgaatgaacggaccatataccggttggctgcaagcagcgaattaccgggctttaaagtgggtaactcctggcgattcaaacagagcgagctggagcaatacatcgccgcccagcacaaccgcgccggtgtcagcgaagcaatgaaatcaccaaacagtaaatcagaagataactag

SEQ ID NO: 17144 - DNA, 2142 bp, Escherichia coli
atggcacaactggaaaacatcgaagcaattgaaaaacgcctgtggaaatcggctgataccctacgcgccaactccgagctggccagtaacgaatactttttgccggtgatggggctgatcttcctgcgacatgcttacagccgctacttatcgctaaaagacgagataatcgcaaacctgcccagccgtggcggtaaaacccgcgagcttacaaaagaagatttctctaaaaagagcgccatctatctcaagccagaagcacagttcgactacctcattgctctgacggatgctgataatcgcgccgaagccattattcatgccatggactccatcgagaccgattacaccaacctccgtaaccagctgccgaagcaggaatacaacaacattcccaatgatgtattaggtatgttgctgcgtacgctcaacccagaagagcttaaaaaagccacgggtgatatctttggccgtatctatgaatacttcctcacccagtttgccgatcagggtgcgcacgatggtggtgaatttttcacgccggtatcgttagtgcagttgattgtgaatgtgttggagccagatcacggcaaaatttttgacccggcttgcggttccgggggcatgttcgtacaaagtgcccactttatggagcggcacgcgcaagacccgcatgaactcaccttttacggccacgaaaaaaatcgcgtgaccacacgcctggccaaaatgaacctggcggtacacggccttgaaggcaacgtggaaggtggtgaagccgccattacctactacaacgatccccacgaaggcctgttcggcactgtcgactatgtgatggccaacccgccctttaacgtggatgaagtcgacgccgataaaatcaaaggcgataagcgccgcttgccgtttggcttgccgggcgtaaataaaaacaaaaaagtcagtaacgccaactacctgtggattcagtacttttatagctatctcaacgattcgggccgagcaggttttgtcatgtcatcccaggcttccagtgctgggcgggacgaagctaaggtgcgcgagcagttggtcaaaaccggtcatgtggacatcatggtcgatattcgcggtaactttttctatacccgcaccgtgccctgccagttgtggtttctgaataaaaacaagcccgcgcacctgaaagacaaggtgttaatgctggatgcacgcaacgtctaccgcaaagttacccgcaagatttacgacttcagccccgagcagcaacagaacctgactgccgtggtctggctataccgtggcgaaggagagcgttttgttgagctggtgcagcagtatatcgacaagtcaattttcgaagctcgctcctgtgaacaatctgaagcgctagcctgcgagccaataccagactttatcactcagttgggaaaattcggccaagcctttcaaccctttatggacaaactggagcagggcggcgtgagtgttgagccttatgtcgattttctgaatgccaaaggctcggtcgaaggcggttggtccgcgtttcaaatcctgaccaacgacctgcagaaatggtggaacgaatacgactataacgatgctgccagcctgctggacttcatcgataaagatacctgcctaaaagacctggccgaacaaagccgcaacctgattaaagaaatcgacctggcttataagctggcaacccgcgtgattgaactggccgaagccaatgatgcaaaagacagcgaactctgggataacacgctgttaaatggccgcagtcgcagcaacttaaagaaaaccgccgatgacgcccgcaagctggccgtagagcaactcaagcaggtacgctacttctacaagcaagcccactggctgttaagccgcttcccggaaggcaagctctgtgatgtggaaggcctggtcaaactggtagatatcaaagcgatcgaagccgctgactggagcctgacgccgggccgctatgtgggtgtggtgccggaagaggtggatgaagacttcgattttgaagaaaccctgcatgatattcatattgaactgcaaggtttgaattctgaggccatagagctagccgaaaaaattgcccgtaactttgaggagttgggggtatga

SEQ ID NO: 17145 - DNA, 1155 bp, Escherichia coli
atgagctggcaaagcgaacctctgtcagcgttaaccctcaaaattggtagcggctcaactccaagaggtggtgattctgtctatatatctgaaggtacaacgttaatccgtagccaaaatgtatataacaatgaattttcaacggatggcttagtttatatcgatgaaaaaacagcagaaaaaatgaaaggcgttagtgttgagaaggaggatgttcttgtcaacattaccggcgattctgttgcacgatgctgtttggtccatgatgcagtactcccagcaagggtaaatcagcacgttgcgattttaagaacaaatccaaagaagcttctgccacattttcttgctttctacatggtatcacccttcatgcaggccaagatgctttcttgggctggtactggtggaaccagaaaagcactgacaaaaggcatgctagagggatttgaaataccactcccccctgttgatgttcaagataaaatcgtccaaaagattaagacttataacgacctcatcgaaaacaaccgccgccgtattcagttgctggaagaatccgctcgcctgctgtatcaggaatggtttgttcacttgcgcttccccggacataagcaagttaagattactgatggtgtgccggaagggtggtcaaaggaacctttagagaacttactggttcttcagcgtgggttcgacttgcctgtttccaaacgtatagaaggaagcgttcccatctatgcatccacaggtattaatggattccataatgtggcgaaggtaaaaggccctggtgtcgtcacgggaagatctggttcactgggaacggtaatgtatgttgctaaagactattggccactcaatacgacattgtgggtgaaggaattcaaaaaagcgtcacccatattcgcaacatatttgctaagagcaatgaagcttgaaggctataacggcggtgcggctgttcccacattaaatcgaaatgacgttcataaggtcgatgttctgtgccctgaatcgaaattaatgaatgaattcgaagttcaggtagaaaacattttcaaacagatagacaaactaaaagaatataacgagaagctagcccaagcacgtgacctgctactacccaaacttatgagcggcgagctaaccgtgtaa

SEQ ID NO: 17146 - DNA, 2133 bp, Escherichia coli
atgaaccgtgcccaagcccaacaattattacaaaccgctctagctaatcccgccgccgaattccgtgatggacagtgggaggccattgatgcactggtgaatcatcggcagaaactgttggtggtacagcgcaccggttggggtaaaagctcggtttactttatcagtaccaaaattttccgcgatcgtggtatggggccaaccattatcgtatcgcctttgctggccttgatgcgtaaccaaattgaatctgctgctcgacttggcatagtcgccgagacgatgaattcaaccaatactgatgattggcgttcggtaactcagcggattctgaataatcaaatcgactgcttgttgatttcccctgagcgcttggctaatgacagctttattgaaactgtgttgcagcccattgccgaccgcatagccctgatggtgattgatgaagcgcactgtatttccgattggggtcatgacttccgccccgactaccgtcgtattgtgaatattcttcgccagttgcctgccaatacgccggtgctgggcactacagccacggcgaataaccgcgtggttgcggatattcaaactcagcttggaaatattcaaattcaccgtggtccgttgattcgggaaagtctctccttgcagaccatggtgttaccggatcaggcatctcgtttggcttggttggcgcaggtgatacccacgttgccgggtacaggtattgtctacgtactgactcagcgtgatgccgatttggttgcaaaatggttgaatcagcaggggatatctgcactggcatattacagtggcgtaacgcatcctaattttgttaattatgcagggaaagaagatacagatctctaccgccaatttctggaaactcagttactagaaaacaaaatcaaagttcttgttgcaactactgcattagggatggggtatgacaaacctgacctaggctttgtgcttcattaccaagccccaagttcgatagttgcttactatcaacaagtaggtcgcgccggtcgtggaatcgaaaatgcgattggcgtactaatgtcaggtactgaggataacgacattcatgctttctttcgccgaacagcctttccaagtcaagatgatgttcagcgtctacttgcagcattagaagatgcagacggattgtcacttgagaagttagagaaagaagcaaacctgccgcaaaagcgaatagagcatgttttgaaatatttgcgtactgagagtccatcgcctgtcattgcgattggaaagacttggtttagagctcctgttcgctaccaaatggatctagagcatattcgtaaaattacagagattcgtgagcgcgaatggagcgagattaatgattatctcaatacttcaggttgtttaatgttggctttacgtaatgcgcttgatgacccttcacaggaaacttgtggcaaatgtgagaactgtattgcggagccagtgcttaccaaagttttcgatcaagaaattggaataagagcaactcagtttttaagacactcagaagaaattattaagccccgtaagcaaatagcagcttcgaatgatgaggcagcgagaacatttgttgaatatgaatttccgcgtaatctcggtgacttagtcgctcaagagggccgtgttttatcccgctggggcgatgccggttgggggcggacgattgccgacaacaaacatgccgggcgtttcagtgatgagttggttgaagccatggcagaaatgattcagcagcgttggcagcctaaccccgcacctcaatgggtatgttgcgtgccgtcgcgtaatcatcctgaactggtaccggattttgctcgccggctggctgcacgcttggggctgccgtttgtggatgcagttagcaaagtcaaagacaatcagccgcaaaaaggccagcagaatcgcttccaccaatgtcgcaatctggatggtgcatttgctgtgactcagctttatcaggggcaaccggttttgttagtggatgacatagtggactccggctggacgctaacggtcgtcgcggcactcctccagcaagcaggcagcggcgtggtttaccccatcgcgctggcttcatcttcggtgaaagactcatga

SEQ ID NO: 17147 - DNA, 1389 bp, Escherichia coli
atgaatgtatcccgcttttcatcagctgatggctctttaccagctaacggctctttgtcacccacggcgcaagcgaccttgctgttgaccagctatttctcaaaagccagtagcgaaagcgcaaagccgctgaccaatgccgaatggggtcgctttgccttgtggttaaaagaaaagtccaccacaccagctgatctgttggtttccgacccgaaagctttgctgcaaggctggcacgatgcgcgtatcagtgcggagcgcatcattgaattgctgagccgtggtcatagcctcgcactggccatggaaaaatggcaacgggcaggcctgtgggtggtcacccgttccgacccggaatatccaaggcgtttaaagcagcagctaaaaacagattccccgccagtgctgtttggttgtggtaacaaagccttgttgagtgccggtggcttggcggttattggctcgcgcaatgccagtgagtctgatttggcttttaccgaccaagtgggggctaaagcagcggcagagggtattgccattgtctctggtggtgctcggggtgtcgatgaaacggcaatgctgggggctatgaaacaaggcggtgtggtgatcggcgtgatggccgatagcctgctaaaagcagcgaccagcagtaagtggcgtaaaggtctgatgaatggccatgcagtgctggtatcgcctttctaccccgaggcggggtttagtgcgggtaatgccatggctcgtaataaatatatctactgtctggcagacagctctctggtgattcactccggtaaaaaaggtggcacgctcaacggagcagaagaaaatctgaaaaagggatgggtgccgctgtgggttaaacacacgacggacaaggatgccgccaatgccgatttggtcaccaaaggtggccgttggctggaggctgataatactcaagccttcaagattgcggaattaatgtgcaatgaaggtgggcgtgtgaatcaggtgaaggaacaaatgggcgatctcttttccatgcctgcacagcccgaattgttttttgagcctgaatctaatcctgagccagattctgggcctgaagaagttatagagtcagagcgcgagatagtcgttagcgaaagccagacaaagattcaggctattccagagcagactgccgaaagcgaagctgccccatcaggccctgtcgatttctatcagatgtttatctccgaacttcaacacttggctgaaaagccagtaaccgttgatgcgctgattgaaagcacacagcttcataagtctcagttaactgagtggctgaaacgtgctgttgatgacggggtggtgaaaaagctcaatcgccctgcacgttttcaagtcaagaacaagaaatag

SEQ ID NO: 17148 - DNA, 3243 bp, Escherichia coli
atggccatgacagaagaaaccctggttcaggaagtcactgcagactacttgctgaatcagttgcagtgggatgaatctgtcctgggtatgtatgaaaagctgggcaaggagggtgatttaggtcggctttcagagcaagaggtggtgttaacccgctatttgggcgagaaactgatagagctcaaccctggcttgccggatgtcgcctaccaagaggcgctgcgcgtggtttgtgagatgccagcatccaccaatattgttgctgtaaataaggagaaatactcccttcataagaatggcgtagaggtgagcttccataacgaaaaaggtgaacgggtaaagaaacggcttcgcctgtttgattttgacaactacgaaaacaatcacttcttgctggtcagagagttttggatcaaaggcgatatttatcgtcgcagagcagaccttgtgggctttgtgaatggtattccgctgctgtttatggaggtgaaaaacgttcacaaggatatccgtgctgcctatgagcaaaatcttgcggactacaaagacaccgtcccgcacctgttttatcacaacgcctttattatcttgggcaatggtattgacgccaagattggctccgtttccagtaaatttgagcatttcaatgactggaagcgtttgaatgaaagtgagcctggtgtggtggatatggaaaccttgttgaaaggtacctgctccaaagccaatctcatgaacatttttgagaacttcactctgtttgaccagagctcgggccgcctggtaaagattattgcccgcaatcaccaatatcttggtgtcagccgtgccattgatgccgtgattaatcgtggcgagcggatgggtaagttgggagttttctggcatacccagggctctggaaagtcctattcgattgtctttttcgctcagatggtgcatcgaaaactgggtgggaactatacctttgtggtgctgactgaccgagaagatctcgatacacagatttataaaacctttgcaggctgtggcttggtcgacaacgataaagacccgtgccgcgccgatagtggtaaagacctgaaagagctgatcggccagcaaaaggcgtttgtatttaccttgattcaaaaatttaacgaaaaagtcgaccctaaaaagccttattccgagcgcgacgacattatcgtcatcaccgacgaagctcaccgcacgcaatatggcacgttgtcgttaaacatgcgcaacgccttgcccaatgccagttttatcggcttcaccggaactccattatttaaagatgatgagataaccaagaaggtttttggtgattacatctctacctatgactttcagcgggctgtcgaggataaagcgacagtgcccttgtactacgatgcccgtggtgaagaattggtatttaccgatgaagatggcaacgagcatacggttgcggaccccaaaggcatcaatgagcgcatagcggaaaagctggatgagttggaaattgaggatgtagacgttcagcaaaggttggagcgagagctgaagcgtgattatcacattatcactgcaaccagccgactggatcagatagcacgtgactttgtggctcattatgccaacgcttgggaaaccggcaaggcgatgtttgtgtgcctcgacaagatcacttgtgtacggatgcacaaattgatcgatttttactggcaacaggaaattaaaaccaaagaaaaagcacttttgtcggctacggatgagcaggatctagcttggcgagagcggcaattggcgtggatgaaagaaacgctgatggcggttgtggtcagtgaagagcaaggtgaagtcgccaagtttgaaaaatgggggctggatatcaagcctcaccgccagttgcttaaagcaggacttgaactggctgatggctctcgactggacatggaagaagcctttaaatccagcgaacacccttttagagtcgccgttgtctgtgccatgtggctgaccggatttgatgtgcccacactttctaccctctatttggacaagcctttgaaggcgcataccttgatgcaagctatcgccagggctaaccgagtagcggaaggcaagaataacggtttgatcgtggattactgcgggatactgaaaaacctgcgtaaagcattggcaaccttcgccggtgctggtgacgagggtcatggcggaggtgagggcgaaaatgaacccgccaagcccaatgaagagttgttagaaagtctgaacgagtcgatcagttttgttgctgagtttttacgaaagcatgattttgaactaagccggattattacagaaacaggttttgctaaaaatgcagcgattgctcaagccaaggaaatcatcaatcaaaatgacgaaacacggaaacgtttcgaggtaatggccagagaggtgttcaacaagtttaaagcctgcattaacgtgccgggcgttaatggctatcgtgatatgcgcgatgccatcaacgtactctataagagtttgcaggcagataaagagaaagccgacatctccgatattatgaaggatctgtacgagattgttgacggtagcatcgataccacccataaagtcaaagaaccgaaaccggatggtgatcgaatttacgatatcagcaagatcgattttgaacggctccgccaggagttttctagatcagagcgaaagaatactacagtgcaatcgctcaagcatgcggttgagaagaagctagccaggctcatgatgcagaacccgttacgtaccgattatcaagagcactacgaaaaattggttaaggaatataaccaagaaaaggatcgcgttgttattgaaaaaacctttgaggcactgttaaaactgaatgaagagctttctcatgaagagaagcgcgcaatcagggaatgcttggacgaggagtctttggtattgtttgatctccttagtaagccgaatttgcagccaaaagagattgccaagatcaaacaagtcgccactacgttgttggcaacgctaaaggcagagcggctgaaagttgcaaactggcagcagaaagaatcgacgcgcgacgcggttaagcagcagatatttgattttctttatgatgaaagaacagggttacccgttgagcaatatgaagaaaatgagatttcagatatcactgaaagggtgtttcttcacatatatcgggcgtaccccgaactgccatcgcccatttatgggtga

SEQ ID NO: 17149 - DNA, 264 bp, Escherichia coli
atgaagaagcgtttttccgacgaacagatcatcagtattctccgcgaagccgaagctggggtacccgccggtgaactctgccgcaagcatgccatttccgatgccacgttttacacctggcgtaagaagtatggcggtatggaggtgcctgaagttaagcgcctgaagtcgcttgaggaagagaacaccagactcaagaagctgcttgccgaagccatgctggataaagaggcgcttcaggtggctcttgggcgaaagtactga

SEQ ID NO: 17150 - DNA, 831 bp, Escherichia coli
atgttgatgtgtgatgcgaccggtctgtcgcaacgtcgtgcctgcaggcttacaggtttatccctgtcgacctgccgctatgaggctcaccgtccggctgctgatgcgcatttatcagggcgcatcactgagctggcactggagcgcaggcgttttggctaccgtcgtatttggcagttgctgcgccgtgaagggcttcatgttaatcataagcgcgtgtaccggctttatcacctcagtggtctgggcgtaaaacgcagaagacgtcgtaaagggctggcaacagaacgtctgccgctgctccgtccggcggcgcccaatctgacctggtcgatggatttcgtcatggacgcactttccaccggtcgcaggatcaagtgtcttacctgcgtcgatgatttcacaaaggaatgcctgacggtcactgttgcctttgggatttcaggcgttcaggtcacgcgtattctggacagcattgcactgtttcgaggctatccggcgacgataagaactgaccaggggccggagttcacttgccgtgcactggatcaatgggcctttgagcatggtgttgagttgcgcttaatccagccgggcaagccaacgcagaacggatttattgagagctttaacggacgatttcgcgatgaatgtttgaatgagcactggttcagcgatatcgttcatgccaggaaaattattaatgactggcggcaggattataacgaatgccgcccgcactccacgctgaattatcagacaccgtctgaatttgcagcgggctggagaaagggtcattctgagaatgaagattccgacgttactaactga

SEQ ID NO: 17151 - DNA, 1587 bp, Escherichia coli
atgagtcatcgtgcacgacaccaattactggcgtttccgggcattatctttttagttctctttcccatcattctgtcgctatggattgccttcttttgggcaaaatcagaagtgaataatcagctccgaacttttgctcagctggcgttggataaatctgagctggtcattcgtcaggcagatttagtgagcgatgcagctgaacgctatcaggggcaagtttgcactccagcccatcaaaagcgaatgttgaatattattcgtggctatctttatattaatgaattgatttatgctcgtgataaccattttttatgctcatcgctgatagcgtctgtaaatggctatacgattgcaccggccgattataagcgtgaacctaacgtttctatctattattaccgtgatacgccttttttctcaggctataaaatgacctatatgcagcgggggaattatgtagcggtcattaaccctctcttctggagtgaagtgatgtctgatgatccgacattgcaatggggtgtgtatgatacggtgacgaaaacctttttctcgttaagcaacgaggcctcggcagcaacgttttctccgctgattcgtttgaatgatttaaccgtacaacgaaatggctatttatatgcgacagtttattcgacaaaacgcccaattgcggccattgttgcgacttcatatcaacgtcttataacccatttttataatcatcttatttttgcgttgcccgccggtattttggggagtcttgttctgctattactctggctacgtattcgacaaaactatttgtctcccaaacgcaaattgcaacgcgccctcgaaaaacatcaacttttcctttattaccagccaataatcgatatcaaaacagaaaaatgtatcggcgctgaagcgttgttacgttggcccggtgagcaggggcaagtaatgaatccggcagagtttattccgctggcagaaaaggaggggatgatcgaacaggtaactgattatgttattgataatgtcttccgcgatttgggcgcgtatctggcaacacatgccgatcgctatgtttctattaacctgtcagcctccgattttcatacctcacggttgatagcgcgaaccaatcagaaaacagagcaacatgcggtgcgcccgcagcaaattaaatttgaagtgactgaacatgcatttcttgatgtcgacaaaatgacgccgattattctggctttccgcaaggccggttacgaagtggcaattgatgattttggtattggctactctaacttgcataaccttaaatcattgaatgtcgatattttgaaaatcgataaatcgtttgttgagacgctgaccacccacaaaaccagtcatttgattgcggaacacatcatcgagctggcgcacagcctggggttaaaaacgattgctgaaggtgtcgaaactgaggcgcaggttaactggctgcgcaaacgcggcgtgcgctattgccagggatggttcttcgcgaaggcgatgccgccgcaggtgtttatgcaatggatggagcaattacccgcgcgggaattaacgcgcgggcaataa

SEQ ID NO: 17152 - DNA, 324 bp, Escherichia coli; identical to SEQ ID NO: 2117

SEQ ID NO: 17153 - DNA, 1350 bp, Escherichia coli
atgtctacgccatcagcgcgtaccggcggttcactcgacgcctggtttaaaatttcacaacgtggaagcactgtccgtcaggaagtggttgccgggttaacaacgtttctggcgatggtctactcggttatcgtcgttccaggcatgttgggtaaagcgggcttcccgcctgcggcagttttcgttgcaacctgtctggttgccggactcggttctatcgtgatgggtctgtgggctaatctgccgttggcgattggttgcgccatctctctgacggcgtttaccgcattcagtctggtgctggggcaacatattagcgtacctgtcgcgctgggtgccgtgttcctgatgggtgtgctgtttacggtaatttctgccacgggtatccgtagctggattttgcgcaacttgccgcacggtgtggcgcacggcacggggattggtatcggtctgttcctgctgctcattgccgctaatggtgtcggtctggtgattaaaaacccgcttgatggtctgcccgtcgcgctgggggattttacgacctttccggtgatgatgtcgttggtggggctggcagtgattatcggcctggaaaaactgaaagtccctggcggcattctgctgaccattatcggtatctcaattgtcggtttgatcttcgatcctaacgtccatttctccggcgttttcgccatgccttcattgagcgatgaaaacggcaattcactgataggcagcctggacattatgggcgcgctgaatcctgtagtcctgccaagtgttctggcactggtgatgacggcagtatttgatgccaccggaactatccgtgccgtcgccggtcaggcgaacctgctggataaagatgggcagatcatcgacggcgggaaagcactgaccaccgactccatgagcagcgttttttctggcctggtgggtgcagctccggcagcggtatacatcgagtctgcggcgggtacggcggcgggcggtaaaaccggtttgacggctatcaccgttggcgtgctgttcctgctgattctgttcctctctccgctctcttacctcgttccggggtacgcaacggctccggcgctgatgtacgttggcctgctgatgctgagcaacgtggcgaaaatcgactttgctgattttgttgatgcgatggcgggtctggttacggcggtattcatcgtgctgacctgtaacatcgtaacaggcatcatgattggcttcgcgactctggtgattggtcgtctggtttccggcgaatggcgcaagttgaacatcggtacggtcgttattgccgtggcgctggtgaccttctatgcgggtggctgggctatctaa

SEQ ID NO: 17154 - DNA, 153 bp, Escherichia coli
atgccacacagcaagtggaaatggatgcagatttccgcacagcatttctgcgatgtaagtgtttgtggcaaagccatggcgaaaagctgtggcggccttaacatgttccccgttcagaaaatgcaggagaccgagttcataccagtaaggtga

SEQ ID NO: 17155 - DNA, 786 bp, Escherichia coli
atgagaatcgtaactgtaagtcatagatcaggtgatttattgccaatacttttggatggtgatggtttgccgattccctctccaaatgaatttctgttgagtcgaagaaacttaagtacaaacacgctaatcaggaatcttcgagagttgtctgttttgtatcgatggctggaggacagacaaatcgatctgagagcaaggctgaaaattggcacactattcacagaggctgaattcagtggtggtctgatagagttcctaagaaaagatatggaatctgaagataaggttgtctcgcctcatacattcaataatcgattagcaacgatccgacagtacttcgtatgggagctcgatgtttatatttcatctttaccactaagtgattcccaatatgaggttcttcaggctgcaaggaagcgcctaatgggatggattgatcgagcctttataaatactccaagggctggaagtattccgaggaagtctctaaccaatgacgaagccgagttcttactccagtgtctgaatcctgaaagtccagattcgtttgcgcatttcgagcctgttaaatttagaaacttcgcggcggtgtctctgatgcttaattgcggacttcgccctggggaattgcttagtttgcgtgtagaggatattcagattggctcgatctcgtcggtgactgttaaaagaaggtccccggacccgctcgacaagagaaaaccaagacccagtgtcaagcgcaatggcagggtattgcctttagaaggtgaagtggtttactga

SEQ ID NO: 17156 - DNA, 642 bp, Escherichia coli
ttgacggacttcgggggaaaaacgagtatttttagtcatcctgtttacctctttctcagggagtttagtctccaggattcccggggcggttcaggggtgaccatctcattacatccggagcaacaccttcgtcccttccggggtatcctgcaagcagatgcgttcgcaggttacgatcggctgttcagtgccgaacgtgaaggcggcgcgttgacggaagcaggatgctgggctcatgcgcggcgcaaaatccacgatgtatatatcagtaccaaaagcgcgacggcggaagaagcactgaaactaatcggcgaactgtacgccattgagcacgaaatacgcgggttgccggtgtctgaacgcctggcggtcaggcaaatgcagagtaaaccgctactgacttccctgtataagctgatgcaggagaaagaacacacgttatcgaaaaaatgccgtctgagagatgcgttccggtatatcaggaagcactgggttgcgttgtgcaacttctgtgatgacggtctggcggaggcggacaataacacagcggaaagagcgcttcgtgcagtctgtctcggaaagaaaacgtgttcttcggtagcgatcacggcggcgagcgtggagcactgctgtacgggctga

SEQ ID NO: 17157 - DNA, 588 bp, Escherichia coli
atggcgggtaaaacgcccggtattatccttgccggatgctgggcccacgccagaaggggcttcgccgacctgtataaaatgaacaaagatctacaggcagccatcgcggtgaaaaagatcgccgggttgtacaggctggagaaaaagatcagcagccgtcccgtggagaaaatccgccagtggcgacagcgttatgcccgcccgatactggaagatctgtggtcctggcttgaggagcaggagcaaagatgccctccgggaggtgcattacacaaagcgatcgtctatgcgctggcgcggcgtgtggaactgagtctgttcctggaggatggcgcggtccccctcgacaataacccttgtgaaagagccatcaaaacggtggtcatgggcagaaaatcgtggctcttcgccggttcacggatagcgggagagcgtgcggcccggataatgagtctgctggaaacggctaagctcaatggtctggagccacatgcctggctgacggatgtactgaagagactgccgttatggcccgaagatcgtcttgaggaactgctgccactgccggggttcaccttctcagcttaa

SEQ ID NO: 17158 - DNA, 546 bp, Escherichia coli
atgaaaataaaatatacaatgaaaatggcggcagttgccagcgtcatggtcgccggaatcgcgaccgcgaatgacaacgtactcaacggggtggggggcgctgatggcatccgtctaggcaccgcaaccgcgagcgggacgatcaccaacatggaaagctgcacagtaaatctgacaatcgctacccctgacgctaagatgaaccgggcagggatgcaagaaaaccgcgaaatcactaaatttaaggtagcgagcaacgattgccctaccgacacctatgctgtatggtttaaagagatcgataacgtaggcaacgggatcgcacagggcaaagtgaatacaaacagattttacctacggatggcatcgacgaacggtacggaaagccaaaaggacataagcgtagggaacaaaacaggcaaaggcctgagcggcaagctggccaatggcgcattcgaggggaaaataactttggcccaagacacgaccggcgtacccgtcgacgtctatacatacaacctcatggccgcagtgtacagccaataa

SEQ ID NO: 17159 - DNA, 495 bp, Escherichia coli
atggcgtcgccggaggtggcaagggattttgtctcgctgcatcttccggaggaataccgtcagttgtgtgatttatcgacgctgcggctggagccctgcacgtttgtggaccaggagctgaagcagtatgcatgtgatgcactgttcagtatgaagactgtcagtggtgaggatggctatgtttactgcctcgtggagcaccagagtacggaaaacgcgtatatggcgttcagaatgctcaggtatgcggtagctgcgatgcagcgacactttgaggcgcataaggtacttccgctggtgataccggtgctgttctaccacggtgagcgcagtccgtatccgtacagcatgaactggctggatggcttttctgacccggatattgcggctaaaatctacaccagagcgttccatctggtggatgtgacggtgatggatgacgatgaaattatgcatcaccgccgtctgggggccctgacgtgtcagcgccagtga

SEQ ID NO: 17160 - DNA, 2850 bp, Escherichia coli
atgaaaatctgtctctaccataccctgaacccggaagcgatcccgggctataaaaaatttgcacaggccattgaggccgataacttcgttcaggctgatgttcgtaaaattgacactaatctttaccgcgcacggctcagtatccgggaccggttactgttttcactgtatcgctatcagggggaaacagtctgccttgtactggaatatattcgcaatcatgcctatcacacttcacgttttcttcgcaaaaacgtggtcattgatgaggaccgcttacaacaacaacctgtgccggatcctgttgatacggtaactgaagcgctgacctacatcaatccgtctcacgggcgttttcaccgtctggataaaatgttgtcctttgatgatgatcagcaggcactgtacgaacatccgctgccgctggtgattatcggctctgcggggagtggcaagacagcgctggtactggaaaaaatgaagcaggctgctggtgatatactgtacctcagcctgtcctcatttctggtggaaaaagcgcgaacgctttataacgcgtcgggtgaagggagcgaggtgcagaatattgactttctgtcgctgacggagtttctggaaaccctgcgcattccggaaggccgggaagtgaccttccgtgcgttcagcgactggctgccccgtaacaggaccacggctgcactgggatctgcccataccctgtatgaagagttccggggtgtgattggtgcggctgcgtccggcaacggaccgctgtcccgggaggcgtatctgtcgctgggggtacggcagttgctctacagtatggatgaccgccagacggtctataccctgtttgaacgttatacggcatggctgaaacagtcgcgtcagtatgacagtaatctgctcagccatcagtacctgccgctggcagatccccgttacgatgccattttcgttgatgaagttcaggatatgacgcctgttcagctgcagctggtactgaaaacgttacgtcatcccggtcagtttttactctgcggtgatgccagtcagattgtacaccccagctttttctcatggagttcgctcaaaagtctctttttccggcgacaccaggggaacgaggctgccattaatattctgcaggcgaactaccgtaacgggcaccacgtcactgcactggctaaccggctgctgagactcagacaggcccgctttagttctattgatcgggaaagtcaccatttcgtcagaagctgtggtcagacggaaggcgttgtccggttactggaagacagggaagagacaaaacaggaactgaatggcaaaacatcacgttcgaatcgggtggcggttattgtgatgcatccggaacagaaagcacaggcacggtgctggttcagtacaccgctggtgttttcagttcaggaagtgaagggactggaatacgaaacggtgatcctccacaacatggtcagcggcgcccggcaggcgtttgatgatatctgtgagggcatttctccggcagaccttgaggttgaggcccgttattcccgtccgcgggacaggcaggatcgttcagcggaaatctataagttttttatcaacgcgctctatgttgcgctcacccgtgccacacacaacgtgtatctggttgaacagcaactgacgcacccgttatgggagctgcttgcgctcacgcatcaggaagagcaactggagctgaaggaagagatttccagccgtgatgaatggcagaaaaccgcacatctgcttgagaaacaggggaagcaggagcaggcggacagcatccgcagccggatcctgcagacgtctgaggtgccatggcaggtcatcaccgcagaggacgcccggcagtggaaagaacagatcctcgcaggcacggcaggtaaagccacacaattgcaggcgctggagtacagtctgatttattcccttttcccgctgtataatgcgctgtaccgggaagattttaagcccgcagggcagcccagggcgaagagtctgcagttgctggagcagaagtatttccggacataccaggtgaataacccggttgcgctgttgcgggatattgagcgttatggtgttgatcaccgctcgccgtttaatcttactccgctgatgtcagcagcccgggcaggtaatatcgccctggttcagcaactgcttgatcgtggcgcagatccctcgctgacgggtaatgacgggctggcggcttatcattatgtactgtcagcggcggtcagtacgccccgttatgcgcaacagaaaagcgcgcagttgtataccctgctgaaaccagaaagtctctcactgcaggtggacggacgactcatcaaactggacaaccggcagatggccatgttcctggtgctcctgatgcaggcgctgttccacacgcatctgggaggtgctctggttttttcagaagccttcagtgcggcacgactggcagagtgtgtggcccatcttccggaggcgctgctgccgggacgtcgcaaacgaaggagttatatcagcagccagctttctcagcatgaagttaacagcaaacacccgtatggcaaaaagctctttctgaggctgaaccacggacagtatattcttaacccgggacttaaaatcaggcagggggaaaggtggtgtgcggtttatgcgttgcagtcaccggaagatctgggtcatgatttgcagacttatctgcaggatatgtctccggaattagtgaaaatcctgggagggaaaaaggatgtttataaatacagtgaagaggctgtcggatactgggcggagatgatccgtcgtgccgctcagaaaacgtga

SEQ ID NO: 17161 - DNA, 411 bp, Escherichia coli
atgaacggtataaaaacggggctggggatcacgccgggtgagcacattatcagtgccgactctgcgctcagcagaaatatccggcattgtttctgcctttcctgtcatggccggttgattctgcagacagatgctcagggggcgtggtttgagcacgatttacatgccctgagcgaccaacagaagtcggactgtgtggtgctgaatccggaaaagtcccacccttacattgcggatatggcgatgtttttatcgccattaccgatcgtgctggagtggcattgtgtgatgtgcgacaagttttttcccgggaagaagttctgtgaggcctgtggtacggggatttattgcagagcggtatgtacgaaatctgtttacagctaccggtcagatttgctgctggacccctga

SEQ ID NO: 17162 - DNA, 420 bp, Escherichia coli
atgtacgcaaaatcttttctcgcacttgatggcaacggacgtctgaccggtgcccgtaccgcacagaccgcaccttatgcttactacacctgccacctttgcggcagtgcactcagataccacccgcagcacgacacggaacgtccctggtttgaacacactgacgacgggctgacggaacacggtcatgagtgcccttatgtacaaccggaacacagggaagtacagctgattaaacgtctgcagcaattcgtaccggatgccttacccgtggtgcgtaaagcctgctggtactgcagacaatgtcgccacgcttattatggggaacgctattgtacacactgccagaccgggcgcttcagtgaggacggggagcagaatgaacggtataaaaacggggctggggatcacgccgggtga

SEQ ID NO: 17163 - DNA, 501 bp, Escherichia coli
atgcttccatcggaaacgatgatctggcagcctgagttcacagataaaacactctccaggaaacccggggcggttcagaacggtctaaaaacggggctggggatcacgccgggtgagcacattatcagtgccgattctgcgctcagcagaaatatcaggcattgtttctgcctttcctgtcgtggtcggttgattttgcagacagatgctcagggggcgtggtttgagcatgatttacatgccctgagcgagcaacagaaggcggcctgtgtggtgctgaatccggaaaaatcccatccttacattgatgatatggcgatgtttttatcgccattacctgtcgtgctggagtggcattgtgtgatgtgcgggcagcattttcccgggaaaaagttctgtgaagcctgtggcacggggatctattccagagcggtatgtacaaagtatgtttacagctaccagccagacttgttccaggactgtggaagtgcgaacacttaa

SEQ ID NO: 17164 - DNA, 606 bp, Escherichia coli
atgattaaaaatgacaaggcatggataggagacttgctgggcggaccgctcatgagcagggaaagccgcgtcattgccgaactgttgctaaccgatcccgatgaacagacatggcaagagcaaattgttggccacaacattttacaagcctcttctcctaacaccgcaaaacgttacgcggcaacaatcaggcttcgcctgaacacgctggataaaagcgcgtggacattgattgccgaaggtagtgaacgggaacgccaacaacttctgtttgtggctctgatgctacattcgccggtagttaaggattttctggctgaagtggtgaacgatctgcgcaggcagttcaaggaaaagttgcctggcaatagctggaacgaatttgtgaatagccaggttcgcctacatccggtactcgccagctactcagattcatctattgcaaaaatgggaaacaatctggtgaaggcgcttgctgaagcgggttatgtggatacgccccgcagacgtaacctgcaggcagtttaccttttaccggaaactcaggcagtgttacagcgcctgggacaacaggacttgatatctattctggagggaaaacggtga

SEQ ID NO: 17165 - DNA, 270 bp, Escherichia coli
gtggttatcgaattaaaacgtgatgaaacggggacgcatatggagttacaggcactacgatatgcggcaatgatttacacaatgagttttgcgaaagcatgtgagtatttccagacgtatttgaaaaaacaaaaccgcgatgccgatgcgaaagaaaaaatgcgaaagaaaaaatacttgaatttgttgagctggatgaaactgagcttgttgattttggtaaagatatcagaatcgttttggcttcatcggattttagcgaggaactga

SEQ ID NO: 17166 - DNA, 462 bp, Escherichia coli
ttggcttcatcggattttagcgaggaactgactaccactgcgatttggttaagagataaaggggtagacattcgatgtgttcgtctgacgccttatagatttaatgatgatgttctgatcaatgcagagcaaatcataccggttcctgaattggaagaatatcaagttaagtttcgtgaaaaacgtgatgagcagctaattagcagtcagaaaaaagagaaggactatacgtggtatatatgcaaagataaaaaacttaataaacgtaagttagcgattgagttattacgcgattgtataaaacaatttaaccctgcaagttataatgatttaataaatggattaagtgaagactttaaaaaacgtacggttatacttatcgatcagataccagagaagcaaaagagtcgctatcatatcaacgaagatgcattgggtaatgctgccaacttactgatttag

SEQ ID NO: 17167 - DNA, 462 bp, Escherichia coli; identical to SEQ ID NO: 5115

SEQ ID NO: 17168 - DNA, 1071 bp, Escherichia coli
atggaaaaaaaactaaagattgctgatattgccatgcgaacaggcctttcatccagcaccgtgtcacgggttttagcgggtaaagctaataccagttatcgtgcccgcgagaaagtattggcgtgtgccagagagcttggggttatggatggaatggcatccggccgtatgttgttaaacaaccttgtcatttttgctcctcaacgggcttttgatgagcgaacagacattttttatttccgcgtaatccaaagcatcagcaaggcattatcgcattatgaggttcggttgcgttactgtgcccttgatgagttcgatagtacaccttcaaaattcctggcgcgcatgaatgaggcagaaacacaggctgcaatattgcttggtattgatgatcctcatatacatgatcttgcagcagatttttctaagccgtgcgtaatgattaactgccatgatcgacgtatgcgtcttcccacagttgctccagatcacaaaaacattggtgcttttgcgtctcactttctgtttgaaatggggcatcgcagagtaatgaacattatgtgtttacgtcgatacacaatggaactgcgacttgccggaattaaagaagcatgggagagacagaatcagaactttaaagatgacagagatttactcactattaatagtttcagcgccaaagaagccgaagaaaaagtcggagcatggctggatatgacagagaaaagtatgctaccgactgcttttttggcaagtggggacttcattgctgcaggtataattaacgctttaaaaaaacgtaatatacgagtgccacaagatgtgtccgtaatgagtattgatgggtttaatctggctgcaatagaagatgtgccacttacggcagtacatgtacctcgcgatgaactgggtactgaagcggtacatatgttacaacaaagacttgtacgtcctgatgcaactgttggtgcattacttttgtatgggaaactggtaatacgagaatctgttcgccgtatacggccagggaaagagccaactccgattaaaggagatggactgtatgactga

SEQ ID NO: 17169 - DNA, 561 bp, Escherichia coli; identical to SEQ ID NO: 5114

SEQ ID NO: 17170 - DNA, 1491 bp, Escherichia coli
atgccatactttcagtatcctgatgagtttcccctgagctcgctgcctccactcattcgtgatgccgttattgaagctcagcaaatcacgcaggctcccctggggcttgtggcagcatctgccctgggcgctgtttcacttgtctgccagaatctgattgatgtctgcagactgaatacactacgggggccggtttctcttttcttactgacgcttgctgagtccggagaacgaaaaaccgcagtggacaaattattaatggagcccctgtaccagcaggagatgctgttatattccagacacaaaaatgaactgacgacatggaaaaataaggaagagcttttaaaggcgcagaaaaaagcattgttgtcaaaactgaataaagaactccgcaaaggcgcggatgagtcagaaacgctcagacaactggaagcgcttcagaaaaacagaggggaaaaacctgtaagatataaattcatttttaatgatgccacgacagcagcaattaaagatcagctttgtggtcagtggcgttcagtgggtatcatgtctgatgaagccggtataatatttgatgggtataccctgtctgagctgccttttattaacaaaatgtgggatggctccgtattgtcggtggacagaaagaatgaacccgaacagatgattgaaaatgccagaatgacattatccctcatggtacaacccggtctttttgaccgatatatggagcgaaaaggttctgttgccagggacagtggttttcttgcccgttgtctaatcagtaaacctgccaccacgcaggggaaacgctttattaacggagctgtgaccccgggaggatcattaacggcatttcatgaacgattaatggaactggccagaggcagtattgaaaaatccagtaaggatgaacgttattgtctgcatttttctcctgaagcgcaaaaaatatttattgatcactataatgttctggagcaggatttgtctccttccggacccttaagccagtttcgggggcatgtttcaaaaaaaacagaaaacattgcgagaattgctgcgttattgcagtatttcagtcagggtgaagggaaaatctctgccgatatcatgacgtctgctgtcgtaataagttcgtggtacacagatgaatataaaaaattatttgcgttacctgatgaatctgaactgcagctgcaggacgcccgggagctgctcgactggctcattgaggagtgccgcggagaatgcccgccccgtgtcaggaaaaattatattctccagtgtggcccgggccggttccggaacaggaaaaagctgaacgtcctgctgaacattcttgcatctcaactcaggctctctgtcgtgcaggaaggaaaaaccacctatgtcctgctttccgaaataaacaatatcacgctgcctgaactgaatgcgtgctacagccagaaactgataagatggcatgagcaatcctttggcttataa

SEQ ID NO: 17171 - DNA, 432 bp, Escherichia coli
gtggcagaacgtcctgaccagctgtgggtggctgattttacttacgtcagcacatggcagggcttcgtctatgtggcgttcatcattgatgtgtttgccggatacatcgtggggtggtgggtctcatcgtctatggaaacgacattcgtgctggatgcgctggagcaggcgttgtgggcccgccgtccgtccggcaccatccatcacagcgataaaggctctcagtatgtgtcactggcctatatggagcgattaaaagaagcaaaactgctggcatcaacagggagtacaggcgactcgtatgacaacgcgatggcggagagcatcaatggtctttacaaagcggaggtaatacaccgtaagagctggaaaaaccgtgcagaagtggaactggccacactcacgtgggtggactggtataacaatcgatga

SEQ ID NO: 17172 - DNA, 2148 bp, Escherichia coli
gtggtttatgccggcggcgaccagacggtacacgggcatgcgctggataccacactgaatggcggttaccagtatgtgcacaacggaggcacagcctctgacacggttgtaaacagtgacggctggcagattgtcaaggaaggtggtctggcggatttcaccaccgttaaccagaaaggcaaactgcaggtgaacgccggtggtacagccacgaatgtcaccctgaagcagggaggcgcactggtcaccagtacggcggcaaccgtcaccggcagcaaccgtctgggcaatttcactgtggaaaacggtaatgctgacggtgttgttctggagtccggtggtcgcctggatgtactggaaggccattcagcgcagaataccctggtggatgacggcggtatcctggcagtgtctgccggtggtaaggcaacagatgtcaccatgacatccggtggtgccctgatagcagacagtggtgccactgttgaggggaccaatgccagcggtaagttcagtattgatggtatctccggtcaggccagcggcctgctgctggaaaatggcggcagctttacggttaatgccggaggacaggctggcaacaccactgtcggacatcgtggaacactgacgctggctgccgggggaaatctgagtggcagaacacagctcagtaaaggtgccagcatggtactgaatggtgatgtggtcagtaccggcgatattgttaacgcaggggagattcgctttgataatcagacgacaccggatgccgcgctgagccgtgctgttgcaaaaggcgactccccggtaacgttccataaactgaccaccagtaacctcaccggtcagggtggcaccatcaatatgcgtgttcgccttgatggcagcaatacctctgaccagctggtgattaatggtggtcaggcaaccggcaaaacctggcttgcgtttacaaatgtcggaaacagtaaccttggggtggcaacctccggacagggtatccgggttgtggatgcacagaatggtgccaccacagaagaaggtgcgtttgccctgagtcgcccgcttcaggctggcgcctttaactacaccctgaaccgtgacagcgatgaagactggtacctgcgcagtgaaaatgcttatcgtgctgaagtccccctgtatacatccatgctgacacaggcaatggactatgaccggattctggcagactcccgcagccatcagaccggtgtaaacggtgaaaataacagcgtccgtctcagcattcagggcggtcatctcggtcacgataacaacggcggtattgcccgtggagccacgccggaaagcagcggcagctatggcttcgtccgtctggagggtgacctgctcagaacagaggttgccggtatgtctctgacgacaggggtgtatggtgccgcaggccattcttccgttgatgttaaggatgatgacggctcccgcgccggcacggtccgggatgatgccggcagtctgggcggatacctgaatctggtacacacatcctccggcctgtgggctgacattgtggcccagggaacccgtcacagcatgaaagcgtcatcggacaataacgacttccgcgcccggggctggggctggctgggctcactggaaaccggtctgcccttcagtatcactgacaatctgatgctggagccacaactgcagtacacctggcagggactctccctggatgacggccaggataacgccggttatgtgaagttcgggcatggcagtgcacaacatgtgcgtgccggtttccgtctgggcagccacaacgatatgagctttggtgaaggcacctcatcccgtgacaccctgcgcgacagtgcaaaacacagtgtgagtgaactgccggtgaactggtgggtacagccttctgttatccgcaccttcagctcccggggagacatgagcatgggtacagccgcagccggcagtaacatgacgttctcaccgtcccggaatggcacgtcactggacctgcaggccggactggaagcccgtatccgggaaaatatcaccctgggcgttcagggcggttatgcccacagcgtcagcggcagcagcgctgaaggttataacggtcaggccacgctgaatgtgactttctga

SEQ ID NO: 17173 - DNA, 405 bp, Escherichia coli; identical to SEQ ID NO: 12456

SEQ ID NO: 17174 - DNA, 351 bp, Escherichia coli; identical to SEQ ID NO: 6245

SEQ ID NO: 17175 - DNA, 234 bp, Escherichia coli
atgacagcacttcccgaccatgccgccagtcccctgatgacccgcctgcaggacgagctgcgcacggaatctgtccggtctcaggcccgtgaacagtttaccggtgcggtggaccggatatttgacacggcggagagcgtctgtattgcctctgttgcacgcacggttctgcgtgccgtccgtgactcggtggtctctgttgcccgcgctgtatggaactggattttcttctga

SEQ ID NO: 17176 - DNA, 312 bp, Escherichia coli
atgggagttgagcagaataatttcaggcacatgctgaccggttatctgtccggcccgtcgcagacgcagcatatgtttggtatattcccggcggctctggtcgcgcacacgggtctggcaggcgaagaacggctgaaagccttcccgctgcagattttccaggacggtgatggtgggaatgtacgcataccgttcactgcgggaggtgtgccggtcttctccaaaaatactcgggacgtggtacatcagttcttcgcgtgtcagcgggcgctcccggcggatctgatttacataaccaaaacggctggctaa

SEQ ID NO: 17177 - DNA, 210 bp, Escherichia coli; identical to SEQ ID NO: 8156

SEQ ID NO: 17178 - DNA, 429 bp, Escherichia coli
atgagccgaattatcgctgccaccggaccattcttaactgatttctgtgagaactttatcgtgtcagacacactttccgggacaacgcatcccgatgacaatgacgaccgcctctggtggggactgccctgcaccgtgacgccctgtttcggggcacgtctggtgcagaagggtaaccggttgcattaccttgccgaccgcgccggtatcagaggccggttcagcgatgcagatgcataccacctggaccaggcctttccgctgctgatgaaacaactggaactcatgctcaccagcggtgaactgaatccccgccatcagcataccgtgacactgtatgcgaaggggctgacctgtgaagccgacaccctcggctcctgtggttacgtttatctggctgtttatccgacacctgaaacgaaaaagtaa

SEQ ID NO: 17179 - DNA, 333 bp, Escherichia coli
atggcagggctccgttttgtcggcctgcgtcaccacaaacagcacctgctgatgtccgcactgcaggatgtgtcgccagaaatactcatccacagacagggcgcggtcatcggctttaatcagccacagtaccaggtccagttcaggcagaatgtcacggtacagggcctcatactctgcatccctgtcccggctctcgcccaccccgggcaggtcagtgataaccatgctgtgaccgtgaccactcagacggaagcgctgtacttcccgggtgccggcgagaacatcactgaccggtgtgacctccccctgaaacagtgcattacagagtga

SEQ ID NO: 17180 - DNA, 174 bp, Escherichia coli
atgtttgaaggtgcaagtaaaaataaaattttgaatgacttgatcgaaattgctttagatcaggtctatgaaaaaatgactgatgaacaaaaagccgtatatgaagaaattcagtctttgactttggctgacacaattaaaagcgttgaatcgggtgatgaaaaagatgattaa

SEQ ID NO: 17181 - DNA, 693 bp, Escherichia coli
atgcttaaacgttgtctctctccgctcaccctggttaatcaggttgcgcttattgtgttgctttctactgctattggactggcagggatggcggtttctggctggctggtgcaaggcgttcagggcagcgcccatgcgatcaacaaagcgggatcgctgcgcatgcaaagttaccgtctgttggcagcagtgccattaagcgagaaagacaagcccttaattaaagagatggaacaaacagcatttagcgccgagttgactcgagcagcagaacgagacgggcaactggcgcaattacagggtttacaagattactggcgtaatgaactgatccctgcactgatacgtgcacaaaaccgcgaaacggtgtcagcggatgtcagccagtttgttgccgggcttgatcagctggtatctggttttgatcgcaccacggaaatgcgcattgagacagtggtgctggtccatcgggtaatggcggtatttatggcacttttactggtattcactattatctggttgcgggcgagattgctacaaccgtggcggcaactgctggcaatggcgagtgccgtcagccatcgcgattttacccaacgcgcaaacatcagcgggcgcaacgaaatggcgatgcttggaactgcgttgaacaatatgtctgcagaactggcggaaagttatgccgtactttag

SEQ ID NO: 17182 - DNA, 486 bp, Escherichia coli
gtgactggacatgcagcaatcctagacatgtgctgtggcagtcgcatgttctggttcgataagaatgacgaccgggcgatatttagcgatatcagaaaggaagagcacacattgtgtgatggacgacgcctgattatcagtcctgacctgatagctgattttcgtgcactaccatttgcagacgcatccttttcgatggttgtattcgaccctccgcatcttgagcgtgttggtgataacgcttggatgggaaagaaatatggacggctgaataaagatacctggcgtgatgatttacggcagggattcaaagaagcctttcgtgtgttgtggccatacggcgttctgatttttaaatggaatgaaacgcaaatacctgttcgccagatattggcactgaccgacagaaagcctgttatcggtcaacgaacaggaaagggtgacaagacccactggattatttttatgaaggagggcaaccagtga

SEQ ID NO: 17183 - DNA, 2622 bp, Escherichia coli
atgccagtcgtaccaacagtatccggacgtcaggttgagagtcgtggagttcagtcagcaggcttgcagacgttttctcagccaggtattggtgatgcttttgttcgggcagggacagaggcaattgatgttttggggcaggcaaaacagcgtgccaatatcgctctggctcaggaggcatcccttaaactcagtcagacaggcagtgatctgctgaataatcctgaaacaggattgcttaacctgaaagggaaaaatgctattggaaaaggtcaggagtatacgcagcagtttgatgcccaggtcgagcaactggctatgtcgctgccggatgaacaggctcgtaatgctttcatgcagcaggcgcagcagcagcgcattcagttcactacgcaggccgggaggtacgaaataggacaggttcgccagtatgaggcggatatgcaggatgcgacactaaaaaacctatcgatgcagttccgtaacccgacaatggcaaaccaggcaggattgaaggcatatcatagcatcatcgcttacggcgaagcccacggccagagtcaggaagagattgaacagaactgggtttcgtggcgcgagaatgccgcgaacggtgcggcggaggcgtggtatgtgccgatgtatcaacagatgatgggtccgaacggcaagattgaggtaaccgatacaccgagtgaggcgcagttattctctgcaataatctggcaggagagtggcggaaatcagtacggaaaggacggaacacctctggtgtcgccaaaaggcgctgttggcgtagcgcaggtgacggaagatactggccccgaagctgcccgccttgctggcgtgccgtgggaccgagataaatggttgaatgacccgcgctataatgcccgcttggggcaagcttatttcggcgcgcagatgaagaaatacgacaataacccggttctggcagtagctgcctataacgctggcccaggaaaggttgacggctggattaaacagattggcgatccgcgcacaggcgaagtcagtaacgcccagtttgccgcagctatcccatacgacgagacgcgcaattatgtggcaaaagtaactggcagtgctggagctattcctggatctgcgacgatggaaaacctcatcgcacagccattctggaacgccatgagtccggacaaaaagtcgcagatgatgagcaaggttgctggcatgtacgacatgcaggcttcagccggtcgcgttgcgctacagagtcgaatgcaggacgacctatccaaaattgaggccggtaagcaggtgacgcctatttcagcgcacgaatgggccgccgttatgccgcttcaggcagcgcctgccgagcgcctgcagatggaaaaaaccttccagcaataccagcaggcaatgacgctacaacctgtttatcagaccattatgcagggcaacgtccagcagggtaccgccgccgtgcaggcaatggcaccgcaggaaaacgaccctgactttaaatacaaagcagagctttatgcatcggcaaaggtcaagcttgggcaggtactgaaggcgcgggaagcggatccgggggcatggctgcaacaaaactctccggttgtgcaggctgcattccagcagtacctgaatgacccttcatctggtgaatacctagtttcccgcatacagtctgaaaaagaccgcctggggataatgagcaaaaaagttttaccggagtccatggtcaacgacgtactgcagcgtattgacaacacgcaggaatctagcgtaaaggccattcagtcggtggcgcagtcgttcggcaaatactcggatcaggtgatgcagcaggttcagaagagcgcttatcctgcgttgcaggttgtcatggctaccgagaacccgcgcgcggcaaatgcgctctggcaaaaccgtagcgttaaaactgctgacttacgcggcagtcttgagaaaaccgacgcggatagcgccgactcgtcatggaatgaccaatcgaaagattttgctggcacgatggttgttcagcctggtggcactgccgtgtggaataacttcaacgagcagggaaaacgacttacttacatcaacatgcagcgcggaatgtcggcgtctgatgcagcaaaacaggcgtatcaggacatcctcggcgagcagtaccagaccaatggcacttggcggctacctaagcgtgcagggatagatattcgtgacgttaacgatggtgccaatgcgtatctgaaaaacctgtcagcagatcagattatgccgcttattggtgacccaaggctacctgatgaggtcaaccgtgagcagagtatctcccgcattcgtgataatgcgcagtgggttaccaacagcgacgaaacaggacttaccctgatgctcaacgggctgatcgtcaacggtgctgacggcaacccgattacggtgccgttcaacgatctggcgaaactgggaacaaccaaccgatcagtatggaacagcattaccaagttcattgatactccggtgaaatatactcccggacagtctaaggaatacagcgcagaaagtcagcgcgacaacctgattaacattttccagaacggccagcaatcaggacgataa

SEQ ID NO: 17184 - DNA, 1698 bp, Escherichia coli
atgccaatttacacagatgatccgggacagggaattaaccagccaattggcaacgcgccagcagggcttggcgaatcgctgctttcttcccttaagcagggatttgaagaggggccggtcatgtccggctaccgctttgcgcaggccgactcgctggcgaatgacccaaactctacagttatcagtaagcaggaagcggatgagctcctgaagcagtacggcgtaaagagcataaacgtgccagattctggcgttacgcaggcttttctcgatcatgttattgccgaacgcaaagattctctggcacgccagcagatcgcgatgtcggcaccgagcgggtgggtagccacgccgcttaatttcgcagccagcctagctggttcaatggcagatcctggtaacgtggcgctggcgctggttccgttcgctggagaagcaaaggcggcttctgtgcttggccgatttggcgagcgatttgttgctggtgcacgcatgggggcagcgcaggcgttggtgaccgtgccgcttaccgggctggcagcggcggcggaaggtgacgacttcacctatagcaacgcgttggaaagtactttctttaacacgatggctggcggtctaatgcatgccggcggcggccttatcgccgatatcgtgcgaccgcgtcgcgttcccgatgctgcaacgggagagtccccggcgttttctggcgatgcgcagccaaccccggtgataacgcctgacaacattccggcgggcgtgaatatccctgaggttggcgctaacgcagatctggcggcggccatttccagtgaagcggagagctacgcatacagccgggcttatgacgacgtggttcctgactatatggcgcgccagcaggagttacagagcgggcagatcggtaacgttgccgacctgcgtgccgagcttgcggctaatcaacgtcatgctgactcgcttgatgcgacgctgcagcagcgcaccaaaaagtatcaggggcagcggatgaagtttaaggatgcgcgctctagggcactgaaagagattcaggccgagaaagacgccatcgctgcacgcaatcaggagatcaacacatcgctggaacagaacgcgacagcagagcaggcgcgctggcgccagtctcagatttcccgcggcgagatccccgacgacctgaaagtcaccatttccgagcgtgcgcagcagatcctggacggcatgcagatgtcgccggtcgctggcgcagttcgcactgccgcaagcgccatcagggatgctgactggaacgtgaaccagcaggcgtatcgcgctgcgctggcacacatgatggaaggacgtagcccagatgttgagcccttctatgaactgcacaaaccagcactgcgtgaacgcgccatccatcgcatacagaacccggcacggcaggttgatgaaacggctcgcccagcaagcgaaacagccgatcgggtttatcaagaaacgcaaaaggcagatcatgaaattaccgctgccgctgcagaccttgataacgagctcaacctgagtaacgccctgcttgacgatatcgctgtcgataaccctgatcttgcgaccacgttgcgccagaaactcaatgatattcgtgccgacgccagcgacaatagcatgagcaacgctttccgggcatttgccgcctgtatgattaaccgggggatgtga

SEQ ID NO: 17185 - DNA, 2550 bp, Escherichia coli
atggcagcaaacgaatttttgacgcagtgcgagcgcagtgtaaatgctgccgctggtcgcgagctttcttccgatgagatggagtcgctggtgcgtgacatgaacgacaccactaggcgaattctggcgaccaatgaggcgctgtctctggaagaggccgcgatgcgcgcagcggaagaactgagcaatgccgatatgctggcaaaacagattgaggctcgcaataaggcaatcaacgcccgtattgccgcacaacgacttagagagcttcgtactatctggaaagaccgcccggatatcgggcttgaagcaatgctggttggccgcaacgatgcgcgtaccggcgcccgccggtcggtatcttcggaggtggcgcaactgcgcggcaagtatcattccggtatcaactacgattttgaccgtgccgggctggtgcaattcatcgccagcggcagcaatgaccgggaaattgccgatgcaatgtggcgcatagggcgcgggcagtcaactgacggtatgacaaagcaatccgtaagcgctgcacaaatcatcatgaaatggcaggaaactgcgcgtattgatgagaaccgcgccggggcatggatacgcaaagagccgggctatatagtgcgccagtcacacgacatcatgaagatccgcgccgcaggttatgaagcatggcgaaatgctattctcccgcgccttgatgagcgcacttttgacggcgtggctgaccgcgagcagttcatgcgtaacatttataacgggctggcttccggcgtgcatcttacatctgaaaagcccgattggatgaatggctttaagggatcggcgaacgcagctaaacgcgccagccaagagcgaattttgcacttcaaagatggtatctcgtggcacgagtacaaccagcaattcggcaccggcagcctgcgagaagcgctgtttggtggcttaaacagcgctgcccgcacaacgggcatgatgcgcgtactgggcactaacccacagaacatgtttaagtacctgacggacgccattgctgaagatatcagcaaatccggaagaccggcagcgttggctgactacatgacgaaggtgcgtcgcattaaccgtaccgtaatgccgcaggttgacggctcgctaaatattcctggcagcgtaggctgggccaatgcgtcggcggctgtacgcggctggttgcgtatgagccaacttggtggcgcggtaatctcatcgtttaacgacgtgcctatcgccgctaccgagatgcgctaccaagggcagaattttatgcaggcgttgcttggtgctatgagaggccgcttcacgcgttacaacagcgcgaagcagaaagagatcctttcctctatcggagtttattccgactccatgacgcaggaaatcatccggcgcatatctggtgatgacacgctgaatggaaagcttggtcgcgcgcagcagcttttctttaagtacaacctcatgaacttctggaccgagagcggtcgcaacagcaacgccatgatgataaccaactggcttgcaaagaatgctgaccagtctcatgcgcggctaccggaagacctgcgacgcgtgctggatctgcacggtattggcgaacgtgagtgggaaatttttcgcaacatggacatggccgatagcgaaggtcgtaagttcatgacgaccagcggcatccgcggcgtgcctgacgaagtgattgccggttatgtagagagtaaggggatcaaaccaacgcagcgcgctatcgctgacgcacgcgatcaattggaagggcagttgcgcggctacatccttgaccgtctgaatatcgccatgtcagagcctggcgatcgcacgcaggcgtttatgaagatgggcacggtgccaggaacggtggctggggaagcaatacgattcgctggtcagtacaaatcgttcactgcaagcttcatgcagaacgtactaggacgcgaagtattcgggcgtggttatattcctgctgggcttggtgagtcgaaaaccggatcgctgacgaatgcgctgctacgtaacgggaagggggctttccttggtgctgcaaacctctttgtctgggcgactatgtttggttatatctccatgcagtcaaaactcatgctgaaagggcaaacaccacgcccggcagatgccaagacgtttctcgcagccgcatctcaggggggcggtcttggcatcttgggtgacttcatgtttggtgaggtcaaccgcatgggggccgggccggttacgtcgctaatggggccagcagcatcgaacgctgacagcattatcacgctgctccagcagaccacgagaggggatgcagatttgggtgactggtatcgcacggcacttgacaatacgccattcctcaacgtgttctggcttcgtacggcgatgaatggtttaatattgaaccggatacaagatgcccttgacccaggctctcttgagcgttatcagcgccgtgttgagcgtgagcagggtaacgactttctgatcccaccatcgcagttcatgctaggtaaataa

SEQ ID NO: 17186 - DNA, 561 bp, Escherichia coli
atgaaggcaattatattttttgtttcaatattgatgtctgcattttcttttgcagggcaaaatgttaaatgcgaacttcaatactttggagatagcgataaatttaaggtaactcagttttcttttatggggattccatctgattcatacctttatacctgtgccgactgtggaggcatccagataaacgtgttcccatctattcagactgttgcttcctactcatttgaaaacaacattgatttcgaaaggaaaatcaatgctgaatacaacagaaaagacatagctaaacttgagatggaaaacgttactcaaggcgggagaataaaatattcaatcaccgatactggtttggcagagttttacccagagggcaaaaagataagctacctctactttttagccaagcaacaaaatggtaaagaacaagtaggttattcaggatttgttacctctaacggggataagtcatgctcaattattgcgacatatccaggaaaagaaatttcttttctgggaagtaaatctttaagctactttatgaatcatatatcaatgtag

SEQ ID NO: 17187 - DNA, 834 bp, Escherichia coli
atgtatcaggctcagttttctcataacccactgtattgcgtagatattatcaagacttataaacctgatttcacgccacgagtggcctttattttaggttccgggctgggcgcgctggccgatcagattgagaacgcggtcgcaatttcctacgaaaagctgcctgggttcccggtaagtaccgtacacggtcatgcgggtgagctggtgctgggttatctccagggggtgccagtggcgtgtatgaaaggtcgcggacatttctacgaaggtcgtgggatgaccatcatgacggatgcaatccgtacctttaagttgctgggctgcgagttgctgttctgcaccaatgcggctggctcactgcgccctgaagtgggggccggcagtctggtcgcattgaaagatcacatcaacaccatgccgggaacgccgatggtgggtcttaatgatgaacgttttggtgagcgcttcttctcgctggcgaatgcctacgatgcggaataccgcgcactgttacaaaaagtggcgaaagaagaggggttccctctgacggagggcgtgttcgtctcgtatccggggccgaatttcgagactgcggcggaaattcgcatgatgcaaattattggtggggatgttgttggtatgtctgtggtgcctgaggttatttcagctcgccattgcgaacttaaagtcgttgcggtctctgcgattaccaacatggcggaaggtctgagtgacgtgaagctttctcatgcccaaacgctggcagcagcggaactctcaaagcaaaactttattaatcttatttgcggctttctgcgcaaaattgcctga

SEQ ID NO: 17188 - DNA, 420 bp, Escherichia coli
atgaaaatgaaatggtccccatctgttcagggatttttctctgaaaacaacagcgatattcccgatgatgctttcgatattgaagatgctctttattatgaacttatgaatggtcagagtatggggaaaattattatcaatagcccggataactaccctgtacttactgaatatccagcgaagacacaggaacaggaaatagctgaagcggagggaatgaaaaatatacttattgaacaggccaacgattatatgaacagtaaacaatggcctggtaaagcggctattggccggctgaaaggtgaggaactggcgcaatataatttgtggctggattacctggacgcactggaactggtcgatacttccggtgcgccagatattgaatggcctacacctccggtaactcaggccagctaa

SEQ ID NO: 17189 - DNA, 975 bp, Escherichia coli
atggggttaggattaaaagacgctattgtgcataccgctgcgtttcatcaaaaggaaactaatgaattgcaattgccaaacaatcattggcatcctggttttatcactgtcttagcagcttacgtgaatcatcacaaaattaccgaagataactgtgttttgtcatgcccgggctatatgcgagctatcaatttacatggtgctttatggggagaggatcagtatcaacaggaacgtgtaaatgttggaagaaattacagtttggttacagcattaaccaatgttgaagctgttgacgttgccactggtagtattaacagttgtgtaaggcagttaacattccctgatcgtgatccgagagattgtcccaagggacttacagatctaacccatgttataggtgagcttcacgataacgtttggtcgcatggaaaatcaacgggtttttcttttgcacaacgttcggctgtaccccacactcaaaaaaaagagcactatttagaattttctttggcggactgtgggttaggatttctccgagaattgcggcgagctggtatacccggaattgagactcaccaggatgcgatcgcatggtgtattcaagagggacattcatctaagcatgctgatttgcaggatgattgggcacagcagcttccccaggactttattgggggtagtgtgtttggccacggggtttcggtcaaagaaaaagataataatcatcaagggcttgggttgtatcacttgatgaaattgataaaaacatataatggggaattgcaactggcttcaggaaatgtatgcttagaagcaataggtgatgaagtgagctatactgaattacgtactgaatggccgggtgtagcaatttcttgccgttttaagattcatgaactggcagtcgataaagatagcgaagaaaatgaccctcagcttatggaaataatgcgggcgttaggaggagagtaa

SEQ ID NO: 17190 - DNA, 339 bp, Escherichia coli
atgaacaaaatcgcatacaagttacccgagggtgacctggcttcgcgcaatcaggctatcccccaacgacacaagattgaagggttcattaaagaagggtataccgtagatttagatctgagcggtgtttattcaatttcagaatcatactctgatgaaatctttggtgttttggtagtgaaattcggtgtaaccaaagttttgagtcaagttaaggttcgcaatgcacccccttcaattttaaaaagtattgcaaaagtgatccaacgccgtagtaatgaagtagcatcaaaaaaggttcattccgttggatttgatggtttatacgccgtttgttaa

SEQ ID NO: 17191 - DNA, 1290 bp, Escherichia coli
atgaagaaacaaacacacgaagtttttggtatttcaccaacgattcttgctgattcatatgtagacagaggaaatcttgataaggaaatcagtagaaaattacgccgaccaatacatctcgccttaagaggggaatccaaatgtggtaagtcatggttaagacaaaagaacatacctaatgctattgttgtacaatgcagattaaagacaaccgttttagatatatatatagatattctatctcaattaggtataagccttgtgctagagagaaccgaaaaagatacaattaaaggcgtaatggagggctctgctgcaggaggcattggtcttatagcaaaactaaaggttaaatttggacttgagacttctgaagaggaggtaataaaaaaaggaaatgttggtcaagatattaatgatttgagatttattgcagaaataattaacgaagcaggaagaaaagtagttattgaagattttcactacttaaacactcgtgaacgacaaatatttgcttatgacttaaaggcgctttgggattatggttgttttttcgtaatcattggtgtttggacaaaaacaaacctactaatttatttaaattctgaccttggttctcgcatagaagaaattcccatatcatggtctagagccgatcttgaacaagtaataataagtggatcagaaactttaaaagttaagttctcagatcatataaagagatgcatccttgatgattgctatggtaatgttgggattttacaacaactagccttaaacattcttgacgagacaggaattgatgaggaatgtacaacattaacgatgttagatgatcaagaaaaattcgttgatgcagccatgaaatatgctgaacaattaaattctcgatatcaaaaatttgctaaagatatatcatcaggaatacgtaaaagaacagaaaccactggcatttatgctcatgccatggctgtaataatggactcatccgataaagaactcattcaaggattagagttagataccatttttaaaattgcgtcaagaagacaaagtcgaatattaaaagggaatctgcgaactgtacttcaaaaaattgaagagttacaggttgatagtgacgatagagggttagttctttcctacaatgatgcaactgatgaggtcactgctatcgacagaaccattttaatttatcgaaaatatgtaaccataaaatggccatgggaggatctgattaacgaagcaaaggacagctatggtgagcagagtagaatttttaccaattga

SEQ ID NO: 17192 - DNA, 354 bp, Escherichia coli
atgaaatatcaggtcaaagagtttattaacgaaaaatatgctaaggctgttaatattttaaaggataacctcaaagaacactaccatgttttttatggtttgagattaagtgagattcttttccctgccagcgaatacggctctgatatgttttttcaggagttcgaggcgattaatagtgtaatattgcctttggtaatttttgatttaatagaccgaaagccgattatggttatcggcttcggtgaagtacctggtgttgattcacttgtcgattctggtatagaagttgtttctttagatggtctaagcgacctgctactggttgaaaaactgacaccattatttgattaa

SEQ ID NO: 17193 - DNA, 495 bp, Escherichia coli
atgaataaattaagtgataaatactcaaaccctgtttttacagtaattgctatcgtgatttttttcttcttccttcctgcaatcggcgcggtgctggggactatgggagaaatttacattgatggtctgcgtgaattaccgtcttttggtatgaaagcgataattgtttcaatctggatgcttgtagttgcatatcttatgtgcagtttaatgaaagctaagaaagatttcattcgcataccagcgatactgacgcttattggtgcagttctcctgcctctgacaagcagttttcagaatgtgatgactatatcagatccagacgtttccaccagaacagacttttatgcaacgtctatagaagggctggaaacacttaaaaatggaattatgtttatagcaccagtgttattgtgtgtaatttctgtaattatactggcaattgggatgactcaaattttacgtaaccgttatacgcttagtagaaaacattga

SEQ ID NO: 17194 - DNA, 663 bp, Escherichia coli
atgactcaaacagtaccgaaaggctttgtcagagcttacttacgcgcatccacgactgaacaggatgcaacacgcgccctggacacgataaataccttcgccatcgagcgcggcctgagtatctgtaactactacattgaaaatgagtcaggttctaagcttgaacgccctgaattgttccggctcctgaaggactgccagcaaaacgatattttgctggtagaggatgtggacaggctttcacgcctggtgggggaggactggaacacgctgaagaaaatgatccggcagaaagatattcgggttgtggccgtcaacgttcccacaacctggctcgcatcgggtcacaatgattttgacagccgaatgttttcggccataaacgatatgttgctggatatgctggccgccgtcgccaggcgagactatgaacagcgccgggaacggcagcagcaggggatcgccagggctaaaagggaagggaagtataaaggccgccaggttaatcagtctcgctatgacgccataaacaggctgattgcgagcggcagctcctggagccagattcaaaaagtgctgggttgcagccgggcgacaatcagcaaagctgttaagcaaagaactgccgggaagatatcaaccgagcaagaagaatatgagtag

SEQ ID NO: 17195 - DNA, 261 bp, Escherichia coli
atggggcattacacaatcagaacgaatgacgccgaagatcaggccattaaaaaggcgcaggaagcgaccggacaggcatcagccagcaaaacctttatgacggctatccttgagcttcagcgtaacagagatgagatagcgcagctacggcgtgaactggcgcaggaacaagccaaaaataaagagctggttggatcagtgcagcaattcaggaactgcatgaatgttatgtttgaactggctggcaacaataaaagttaa

SEQ ID NO: 17196 - DNA, 825 bp, Escherichia coli
atgatgacgagagccactgaacgcgcttacagcgagctacaacaggcgtttgatttctataaccagcgcctttttgacggcgaactccccgactgtctgattacgttccagcgcggcaagaacacaatgggctatttcagttacaggcgctttgtcgctgctgacggcagcggcaggatgattgatgaaatcgccctcaatcctgaatacttcccggtatacccgcttattgaagtcatgcaaacgctggttcatgagcagtgccacatgtggcagtaccactacggcaacccgtcgcgtaagacgtaccacaatgcgcagtgggcggccaaaatggaaagcatcggacttatgccctcctccaccgggagacctggtggcgcgaaagtcggccagaagattaatgactatccgatccctggtggccgcttccagcgcgtcacactggaactgttccaggggcaatttgctttgagctggtttgatcgcttccctgtccaggtcgaacaacaaaaagacatgaccgccgtcatcgagcagtggcgagagacgctggctcaggcacatcaaaatgctgaatccgggattgatattgaagcggtgctgtcaatggcgctgctgccgtcagtgtcaccgcagaacgggaaccattcagatgatatggccgggagcaatgacaatgatttgtcagttgcagcgtttgaggacaagccaaaacgaaataaagctaaatatcagtgtcgcgggtgtggtgctgccgtgtggggcaaagccggactgaatattgaatgcggcgattgcgaactggctttcatcgaaaattaa

SEQ ID NO: 17197 - DNA, 234 bp, Escherichia coli
atgaattatgttgatattgccagggtatggcgtcagcacaaccaggaacacgctgattcgggcgtggttctgatttgggacgggaaggtgtattgctggaaaaatattctccgcgaccctcagcatgagcgccccggagtgatagcggtagatactgaagataatgtgtttattgctgaaggtggcaatgaatatgacggcgcgaaatgctgggttgtctttcaggagtcctga

SEQ ID NO: 17198 - DNA, 456 bp, Escherichia coli
atgagtgaaaatgaaacatttgatgcaacacgaaagctactcctgaatattcgctctgttcgtgtttttgcgcgagaaaccagctttgagcaactgctggaaatgcaggaaaagcttaatgccgtgatcgaagaacgccgtgaagaagcagagcgtgaggcagaagaacgcgcagaacgcgaaagaaagcgtcaggaactgctccagctgatcgccggagaaggtttttcaccggaagagctgcttggtctgtccgaagatgcgccaaaaacacgcaaaaagacgttgccaaaagcgccgcctaaatatcagtttgacgaaaacggcgaaacgaaatactggtctggccgtggccggacaccaaaaccaatcgacgaagcattaaaagctggccgttctcttgatgagtttctcatcaaaaaagacgcttccagctctgctggtgacgaacagtaa

SEQ ID NO: 17199 - DNA, 2328 bp, Escherichia coli
atgagactctttattgcagaaaaaccctctttagcaaaagcaatatttgaagggctgggtggaaatccaaattctgagaagaaaaacggctattttgaacatggctctgatgtcgttacctggtgttatggtcatatgctggagctttacgacccggaggattatgacgaaaaatattccaggtggagctttggtgatttacccattaaatcggtttatccgccaaaatataaaattaagtctgaatctgaagcacagacccgcatcattctgtctcttatcgataaagcagacagtatcgttcattctggcgaccccgatgatgaaggatgtttgctggtagatgagattttaggttatgccggaaacaagaaacccgtccagcggctgctggttgccgacctcaaccttgctcctgtgcaaaaatcgctggcgaatttacaacctaacgataaatttcgcggtatgacgttaagcgccctggcgcgttccctgtgcgatcagggttttgggtataacatgacgcggggatgtacattaaaaggccgtgagaaggggtatgacggcgttctgaacgttggccgggtacaaagtgccgttcttggcctggtgaacatgcgcacgctggcgaaccagaaccacacagaaagtttttattacgatgtattcgccagtctgtcgatgaacgggcatcagattaaggcgaaatatcagacaacagacgacgatcagacagacgagaaaaaacgcctgatctccgaagctcaggccgcgcatattgccggacgggttacgggtaaggatgctattgttactatcgcgacgacaaagccggaaaatagcaagcctccgcttccgcttaacctttccacgcttcagcagctatgcgcaaagcgatttggttattctgcaaaagatacactcgatgtgatgcaggggctgtatgaaactcacaaacttctgacctatccacgttccgacaatcgctatctttcagatgagcattattaccaggccggagatattgctgccgcgatagcggccaccgtacccgaactggcgtctgcgatcgcagatatggataaaggccagaaacacaaagcctttaatgccagtaagattgaggcgcaccacgccatcatcccgacgacaaaaagcggagccggtattcagcttaatgagaaagaacggaacgtttataacctggtgtccgtctactttatcgggctgttctacccggatgcgatccgcaacaagacgaaaatccactttgatattaagggggatacctttacggccacacagagcgttctggtacaaaagggctgggaagcgctgggtaaggatagtgatgatgaggacgaaaccgaagatgccggaacggacggttttgacctttcattgctgaaatttaatgacagcggcctgtgtgaatcggcagacgtggacaagaaaaaggctacaccacctcgctatttcacagagtcaaccttactggccgccatgacgagtgcggcaaaattcattgatgatccggctctcagaaaggcgctggaagcgaaagacgagggcggtagtgatcgcggcagtatcggaacggaagccacccgcgcgggcattcttgagaaactggcggcaaataccgggctgatctccattgaaaaagaaaaggggtattcggagctggtatggaaaaccacaaaacaaggccaggagttttgcgctgcactgcctcctgaaattactaaaccggatatctccgctctgtgggctgaaaagcagtctcagatcaaaaccggagagctgacggttgaggagtttattaaggaaaatgatgagtatgtccaggggttaatcgacgagctggacaggaacggaatttcgatttcttcaaatgccacgccctgcccggtctgtaacaacggtttcctgcgtaaacgtaaggggcaaaatggctttttctggggatgctcctgctaccctgaatgcaagacaacattcccggacaaagacggcaagccggatatggaagcaaaatccagatcagaaggttccatgtcccggctcgaagccccctgcccttcatgcagtaaagaaattattatccggcctaaaggctttttctgttccgggtgcgagtttaaaatctggtctgaagtatcaggaaaaaaactgacacaaaatcaggttgaaacattaatcaaaaaaggtaaaaccggagagattaaaggctttaccagtaataaaaccgggaaaaagtttgacgctgcaattgttttgcaggataaagctacgggtaaacttgggtttcagttcagtaaaaaataa

SEQ ID NO: 17200 - DNA, 597 bp, Escherichia coli
atgtatctacatattgttccacgattgtttcatctgatggctaataaatgccatcttgaatcaataaccattcctgaacttgatttcataatcgaaggtgacgcactgtccacgggcagaccctacccaaataaaaatatctgggtggggatgaggaaaggcagaaaagccataaatggacttttactaaagactgataagcatcttaagtggtttaccactgattaccagtggaatatagaaaacatgggtatgatcaatcatcgtgtgacaacctatatcgaagatagcgattttgatatggtctcacacgatataatgttaaacggcggttttgattcatgggagcatcgggttcattcagcttatgaaaatcttgctccagtgaaaattcagccaaagatggagtcctttctgaataaaccaggagaaaatacccatgatgtgtggattgagtatgaatggggtgattttcttaagagcagagaggaaagtttgttactgcatactattcagtcagagagactaaatacgcaacattctctttttgagcgacttccctctttggaaagtaccattgatttgactaaggaataa

SEQ ID NO: 17201 - DNA, 774 bp, Escherichia coli
atgatgacagaatctgataaagaacgttttaataagcgtatatgtgttggtcatgtgcttgtcagtgctgacatttatgtaacgcctgttatgactgaaagcgcggctgaggtggagttaactgtccctaacgacgattatcaaaaggcaatggatctgtatgatcgtatttgccagtttgcattgcttcatggtgaagatttacaaggactattccagactagcagatattactacatgtcatgtttcgtgcgtgatattgaagcatttaagaaagaatttgaaaaagaggaagagctaaaacctttatttaatcatgataagggcgatacggctgagtttcttatcagcttccccgaaaaggctaactatgatgataaggaaccagttaaaaaatcctttctggaaatcacacaaaaacatgtcgattcattagatgaacttacatggggggattttgaacacagagcatttactggcggaacggtaggttttggtatcaatcctcatacaatgaaacgtattaactttgatgatgaacgtgacaaaataacaaaactatctcgtaaggatttcgtagcctctaatctcactgattctttcgaagatgatttttatgtcaatcctttgttcaacgatgcaaaaaaaattggtgagattgacggttatcccgtctttttcaatcccaaggggttttatttttactggaacaaagaaaccgaatatctgcttgaaagttggttgacgttccctgcatatccgtatggctggtaa

SEQ ID NO: 17202 - DNA, 474 bp, Escherichia coli
atgaagtatttccttcatattatttatctttttgctgtgattcttccagctacattgtgtgctgcgcagcttcagggcgtggttattcgtgtacttgatggtgacaccattgaagtattgcaggagcgacaacctgtcagggttcgactcctgaatatcgatgccccggaaaagaaacaaccctttgggcgctggtcaaccaatcaacttaaagccctgctggcagggcaatccgttaccgtctcttatacgcaaacagatcgctacgggcgagtcctgggacgagtggtgactgcgaacggcactgaggctaaccgccagcaagtgctaaaaggggctgcatgggtttatgacaggtacaacaccgataactcattaccggctctgcaacgggaagcacagacacagaagcgcggcctgtgggctgataatcaacctgttcccccgtgggaatggcggcacaaaaacaactga

SEQ ID NO: 17203 - DNA, 417 bp, Escherichia coli
atgttaaaagaattaagtggtgtaggttataccttctggagagcagctttttttagtctggtcaaagcacctgcaatagcattgtttattggttttgtctttctgtctttcaataactccattgcggatacgttcctgacttctgccagagaacttaccgggaatgttccatcagataaggttcagatctgcgtattaaaaaaaaataaacaggaacagtcaccttatgtacaaaaagagccatgtgtgaatacgctggctgatgcgaaggactggactcagtcgtttgaccgaaccattcgtagaatttactggactattgccctgctgggtttttttacctggtttttctttgatggtatggctgctcagttgatgctgaaaattggtgatatgtgggagagaaggaaaaaatga

SEQ ID NO: 17204 - DNA, 324 bp, Escherichia coli
atgaaagtaattaatgaacctgatacaagcgttgtaagaatcgcagggattgaaattattaatagtgtcaagacggtcgcttcagcttttactgaaatcctgatgtttatggtctggtttccggctgttgtgtatggggggtatcgtgttgtcatcgttttatgggatgattcattaaaaccgcagtcactcatgggatttattgatttcataatggagttatacagttttgtaattccttcgctggcgattatagcagtagctttaatcgttgttttgttttcttttaaagcgttttctaaggtctggagaaaatcatgttaa

SEQ ID NO: 17205 - DNA, 315 bp, Escherichia coli
atgaagaagaccgtaatcacggcagtgctgctttgtgcgttcgctgccggaactgctcatgctgaagaaaaagccgacccgaacgatccatgtgcaatggtgctatgccttgccggaaaactcgacggaagcagtccggcggagtgtgacccgatgtataaaagttttatgtcaatcaggaaaaagaataagcatggttttttacccaatcacacggcagatgccagaaagaaaaaactaaatgaatgtcctgcggctgatgcaggtacagtaaataaaattatttcaagctttggtcgtctgaaaaacttttaa

SEQ ID NO: 17206 - DNA, 393 bp, Escherichia coli
atgaaaaaaatgttaatggtcagtgtcctttttctctctgcctgttcctctcccccggaaccgccacaggttgactggaaacagaatcccgaaacggtaaatacacaattaatggactggcagccgacatattcagtaattaaatcagatgaggttaattcatcatgggttaaagctattcatgatttcagacctgaaaaccgtctttatgatgatgctgttttttattccgttgctcattctgattcagtgattgttgaaaccagtaacggaacagactttttcacagctaaaaactggttgagggcgaacggtgcaaacggtgtcatacagtatcgttataaaacgaactgtctttcttgccggactaccagtgtttacttatcccgataa

SEQ ID NO: 17207 - DNA, 1029 bp, Escherichia coli
atgaaagaaaatcgccatttagcttatgagatagtaaatgattactttcataagccacttaatgaagttgaaggactgacagaaatcgccgttaacagaccaaatgagctgtttttaaaggtcagaggtaaatggcagcagcatgagttaaaaatggattttcgtgattgtctgtcatttgcaggggcgatatctgattatcatgatggtggttcggttacaccagaatatcccttacgttctgttacgctccccggaggggagcgtgtacaaatagttattccccctgcaacggaacgggaaacggtatctattacaatacgtaagccgtccagtgtgtttatcgaccatgatacatttgttaaacaagggttttactcaaggctaaatcagggtgttgaattcagggataaagaagatgaattatctttgatgtttaaagataattgttttgagcgatttgtccctgaatgtctggttaagggtaaaacgatggtgttttgtgccggaacgggggctggtaaaacaacctttgcaaatgcctgtcttcagtacataccccatcatttacgatgtatttcaattgaagatacagatgaagcaaagttcaggtttcacaaaaatcatgtgaaattgtattacccgtcagaaggtgaaagtagcactgtcagctctgctactcttttacgttctggttttcgtatgaacccggacagaatcctcatgactgaggttcgcggcgcggaagcctgggattttctcaaaggctcaagttccggccatgcagggaaccttacaaccgttcatgagagcacccctgaagatgctgtgcttggactggttcaacggtgttatatgaaccctgaatgtcagaatttgccctacaacattatattgcggagggtgttaagcaacgttgatgtgattatgagtattaagtacatcgatgaggaagataaccgatttgcatcgggcatttattatcgtgatgttcattttcaggaatactttgaaaaactgaaggagtga

SEQ ID NO: 17208 - DNA, 1212 bp, Escherichia coli
gtgagcgaacaggaaaataaaatcccgaccgctgtagaaattgaacaggcactacgggaacggcatcagaaagaaattgagcaaaacgataaaacggataaggccgatgaagatgacggtaaatcagtaaaacgcctgggtatcgagaagcttaaaaaatcgcgtaaggggctggtgattattatcgctgcttttctcctgctggcagccggggtgtctgtctactatatcccgtcgattatccgcgctatgtccagcggtgacgaaaaacctgccagtaatgcggtctctactggttcagtaaaacgtgcgactggtctcagtgatgacgttgatccgttcaacactatgcagacagaaccggctaagacggaagaacggaaggaaagcggcggtaaagcagaaacgccaccggaaaaagtacaacaaaacttcagtcgtgcgctggatgtggcttatggggggagcagctctgcttcctcaagttccggtggtagctcgtcaacggccagcaacaccaggagtgaggacaacggcagcagcaaagaggcagaggttcagcctgttaacgcagggcaaccccaacccgcgcagctttctaaaatcacgcgcgttccttatgaccctaaccttttcattcctgaagataccgcaattaagtgctcgctggacaggcgatttatctctgatctggctggcaagctggtctgtacgattaacgaggatgtttacagcgcaaacaggaatgtaaagctaattgaaaagggaacagccgcacatctggtgtataaaacgggcacgttcaatcatggtcagggtgccgtgtttatcgctgctacgaagctgagaacacgcaaagaacctttcattgatattccgctgatagatacacaggcagcgggggcgctgggtgaggccggggcttcaggctggattgacacacattttgatgagcgttttttgggttccatgatggttggcatgatccccgatgtggcacaggccgcaagcggcgcagccaaaagcaacaaggacaaccagacggactatacggcgaacagtcgccaggcttttgctgatatagcacgcgaagcatttgcaaatagtgtgaatatcccgccaacgctttataaaaatcagggtgaaatcataactctgattgtcggtcaggatttggatttctcttctgtttataaactgaaaatgaaataa

SEQ ID NO: 17209 - DNA, 930 bp, Escherichia coli
atgaaaatgaataaaggagcgctaattgtggcgcttctgttggtgtcgcacgtctgccatgcagccgttacgccagcagccagccgtttcgatccccgtaatcagattgtcagttataacccgcaaaacacgactgttataaacagtgcggtcggctatacaaccacactggtatttgacgaggatgaaacggtaatcagtgccagaaccggctttccccagggctgggaagtgaacaaagaagataacctggtgtatctcgaagtaaagcccgtcaaacagaccgtacagaagaacagtaccgatgacagtggcaaccagtcttcagaggtggtcagtgtagcccttgatcctgaaaacgacctggaacgctggcgaacaaacctgtttgttcgcacaaccaaacgtaattacagcatggagctgaacgcccgaacgttccggcagccggataagatcgcgtttgttgttaattaccagtacccgcaggaacgccggaaggaacaggccgaaatcgagaagaaacggattgaggctctcaacaagcggcaggaagaacaggcaatcaaccgttctcttgaaaatgcgaagtccccccggaactgggattactggaagcgggtagctgacggcagccagtcaatcagccctgattatgcgtatgacgatggtcgctatacctggtttggcttcagcccactgaagaaaatccccagcgtctttgttatgagcggcgaacaggaaacgctgactaatccggtagtcaaaaacagcggcagtttcaccgttgttggtgttcctgtagaccagcgctttgttttgcgtatgggaaatcaggttgttggggttgaaaaccggggctttggcaaagtccgtcttccggcaggagataccgtttccccgaacgttgagaaagaggtgatccagtga

SEQ ID NO: 17210 - DNA, 729 bp, Escherichia coli
atggggtttaaactctcagaattaaaactgcccggttttaacaagaaaaaagaagtaacggactcttcaactacttttgaagagaaaaatgtattgatgcaggagaaaatgaaccgtatttataaattcggtggtatttcagggatggctgtaggtgtgttgtctctgctggcactgaatggggcgctaccgttaaagagtacggttgtcgaagcttatctaattaatggtgtcactggcgttgctgaaagactgacttctgttaaaaaagaaaacctctctgaaaatgaagcgctggcgaaatacttcattactcagtatgtgaagcgtcgtgaagggtataattatttcagtctccagcatgattatgattatgttctgttatacagtgctgagaatgtggcgacggattacaacgctttaatcaacagcaaccagtcaccaaaggttatttataacaaagcggaaaaaaccgcatctgttcaggataatccgtccgtgattatcagtccgtcatcccggcgcgatgataaggatatgggagcatatatccggtttaaattaaccatccgaaatgtcgcgacaggccagaatgattatgaatactggaacgtccggctgacctaccgaattgaaccacaggtcgaaatggcatcgggtgaccgaaataataacccgcttaaattcgttgtaaccagctatgtacgcgataaagaagtgaaggggtga

SEQ ID NO: 17211 - DNA, 1056 bp, Escherichia coli
atggctaattctgacttctttgaatcagcccgtgatgtgattattgatgtccttgaccagtctttggctggtcagcttgattctttctcttcaatagcatatcaattgggtaaatatgggatttctatctatatattatggtatgcatataccacaatggttgggaagcaaaagtcggcagttcaggatttcatatggaacttgtgtagattctggctgattctcgtttttgttagaaatatgggagggtggttagatagtgcaactcaggcgatagacggtctaaaggaaacatttgcaggtggtgacccgtggaaatggttagaccaactatgggcaaaaataatacaggttgcaaagttccttatgtcaaaagacacatcaacttatgtgaaaactgatggtgctattgctgccttattaacttatgcaggtggtatattagcgatgttggtcacttcgattgtgtatcttgcagcagaggtgacgttaaagatacttactgttacagcaccactgtttattattagcttgtcttttggttttctccggcaaatgtttaatagctggcttcagctaatatttagctcatgcttcatattcctatttggtgggttggctatcaaagcggggatgacattcctgaatggtgtcctatctgtttcactatcaaacattgatatcgtgaatttgatatcagcaggtgctcaagccggagtcgcaggagtattcatggcctggattatctggcaagccaaaacctatgcttcccagctcgcaggggttggtgttgaaggagctatgcagggtgcagccgcaatggggattggtgctggcgtgttcggcgcttcccgtatggggcgcaatatgcttggtatgggtaaaaacgcaggtattggcgcatggaaaggcgttcgccgtcaggataatggttttagccagtcgccaggtgttgctggcaagctggggaatctgaccgggcagggcgttaatattggtgctaagaggcttcgccaggctgcgatagatgcggctaaaaagaaatatggaggttaa

SEQ ID NO: 17212 - DNA, 255 bp, Escherichia coli
atgaaaatagtgaaatttactgttattgctggagctatattactcttatcggggtgtgaggatgttaaatctgctgattggtggcaggaacatcatgcagaggctgaaaaaaaagtcgcagagtgtaaagcttccggcagtgatagtgataattgtagaaatgctaaagagggattgtttagatataaacagctacatgctgttgaaccttcctttaaagatgcgtttaaggggattgttaaggataaaaaatag

SEQ ID NO: 17213 - DNA, 756 bp, Escherichia coli
atgaaaaagcatatcgttgcggcacttatcgcttctgttacggttatttctggtgctcaggctggtgttcccgttgccattgatgcaaaccctgaatgggctgtcgaagcgcagcgctggacagaacgcctcaagcagtggcaggacaccgtgaaccactaccagaaacagattaatgcctataagcaggagctgctgactaaaacgggcattcgtgatgttcagggactggtgcagtctgcgcaatctgtcagtaaggagctggagaagatttacgaccaggggaactccttcattgatgattacattaagaacccggaagccaccctgtctgagcaagccagatcactactggccgattataaggtgacaaacacctgtaaggggctgggatatacgggcgacctggtgcggggctgtgaagcctcgttcctgtcccaactggcggggattgagtacggcaataagctggaaagtaaactgcgtgaagacaatcaggagatggccgaccttatcgaccaggtgaagaacgcccaggacacgaaagccacgcaggacgcgacaaacgcagtatcgctggcaagcctgaaatttaacaagctcaaatttcagtatgaaatgtatcgcgataagcagcgcgatcttgcagaatacaaggagaaaatgttacaggccgcatatcaggagaaacagcttaatgcggaagaaccttcatttaaggaagcattttctatgaatgactatcggatgaattga

SEQ ID NO: 17214 - DNA, 645 bp, Escherichia coli
atgttatctactactgcttttgcggcgcttgctttgcaatgcgcggccagtgttcatcccgatactgcgcatgaagttgcaagggttgaatctggttttaacccatatgctattgccgagataataccgaaggttgaacgtaagcccggtgacaaaggcgtagtgtcctactttcccaaaactaaggaggctgcactccagatcgtaaatcaaattgaatctcgaaatcatcgttactcagtcggtcttatgcaaataacgagtaccaattttgcaactttcaatacaaccgctgagaaaatgtttgacccctgcgaaaacctcaaagtttcagagcaaatcctggtggattgttataaacgtggtggcgacattttacgtggtctgagttgctattattccggcaatccagaaacgggaactaaacctgaatcagattttaataacaccagttatatacaacgtatagggtttaatctgcctgataacaaaaaaaactgggttgttccttcagttaaggatgaaataagaaaggagaatataacgcagagtatcaaacctaaagaaattaccgtttatccccaatatgccatgcgtggcactgttttagatgataaggaaacaaacgatgttaaaactcaataa

SEQ ID NO: 17215 - DNA, 510 bp, Escherichia coli
atggaatggtatgttttgcaattcaccactacgagatttgcagcagtctttgcgcatctcgaacgcctgaacttttcttacttctgtcctatggagacagaaagatatcgtcgcccggataagataatttcatatcgagaaagacgtttgccgctttttcccggttatctatttatccaggcagattttgaggaggttcattccactacaataactgctatcccttacgtacaacgctttatctcatttggcggtgagcctttacctgtaccagaagatgtgatggcggagcttttgtgcagacaatcgcatacaacagctcaggcaaatattttaaggaaatcaattccacacgaatttgctgaaattctcctcatggataatccacagcaaagaagtatggctttcatccactacatcacagagagaagcttaaaccacaaaatgaaacggaagaaaaatgactgctacccggaaaaaaaacgtaacgagacgcaagccccaacgtaa

SEQ ID NO: 17216 - DNA, 1161 bp, Escherichia coli
atgggcgtttatgttgacaaggaattcagggttaagcgcaaatcctctgaagctggccgcaagtctgctttcgcccataaagttaaaaatggaggtaagaactatcaacgcaacgttcaggaacgtatcaaccgcaaaggtgccagtaaggaggttgtagtcaaaatatcaggaggtgcgattacccggcagggggttcgaaacagtattgactatatgagccgtgagtcagagctgccagtgatgagtgaaagcggtcaggtatggaaaggtgacgagattaaggaggctaaagagcacatgatagatcgtgctaatgaccctcaaaatgtttttgatgataagggtaaggaaaataaaaaagttacccaaaatatagttttttcaccgcctgtttcagcaaaggtaaaacctgaagatctgcttgagtcggtcagaaaaacgatgcacaacaagtacccaaaccatcgctttgtgctgggctatcataacgacaaaaaagagcatcctcacgttcatgtcgtttttcgtattcgcgataatgacggtaaacgagctgatatcaggaaaaaagatttacgggaaattcgtacaggtttttgtgaagagttgaagctaaagggctatgacgttaaagccactcataagcagcaacatggacttaaccagtctattaaagatgctcacaaaacagcgccaaaaagacagaaaggcgtttatgaggttgttgatgttggctacgaccattatcagaacgataaaaccaaacccaagcagcatttcattaaacttaaaacactgaacaagggtgtggagaaaacatattggggtgctgattttggggagctaaccactcgtgagaatgttacaaagggcgatcttgttaagctgaagaagttaggacaaaaggaggtaaaaatccctgcacttgataagaacggggtacagcatggctggaagactgcacacaggaatgagtggcagttagagaacctgggggttaaaggcatagacagaacgtcttcagccagtaaagagctggtactgaacagcgcggaaatgattaagaaacagcagctccagatgagaaatttctccaaaataaaacagtcaatgattcaaagcgaacagaaagtgaaaattggtattcgcctgggataa

SEQ ID NO: 17217 - DNA, 546 bp, Escherichia coli
atgaaaaaagttcaattcaggattaaagaaagtcaatatgatgatctactagattgtcttaaaacactttatccagatgaaccgggtttaaccgtagcaaaaggaatgaagctgcttgccagtgctttactgaaaagcaaggttaaaaatgaagatgttaatgtgtcaaaagacaatgatgattttatcaaaaccacaatgtatttgacagggaaacagagatctttaatcgaaaaagcggctcatcgtcatggctggaatttatctagagaatgtcgttaccgaatccagacgacacttgaaaatgaacttgatttcttcgatcaggaacttctggtgatgaatcgttgccgtaatgcaatagataaaatagggcgcaactttcattatattatcgttaacgataacgcgagggtacttgataaagatgggttctatcaggacgctgaacggttaagtacagagataatgagtctcaaaaacgagtttgaaaactacatcatgttatgcaaagggcgaactgtttctaacaaggttgaggtgtaa

SEQ ID NO: 17218 - DNA, 258 bp, Escherichia coli
atgaaaaaacaggaatttttagattttatcagtgcagaacagaggcagggagctgtccggttttcgctgggatttaacagcaaaggggaaattgtattgtactggactaacgaggccgggttaagagtctggagtatactaagcggtaacaggggtaaaagtcccagccgggcaaaccgggaaagaatgagtaacctccgccgctggctccatgatgcccgtcagggcatggaaggcgacacaccagaggcagaataa

SEQ ID NO: 17219 - DNA, 165 bp, Escherichia coli
atgtcggaacgcatgttatcagcaatacagactgttgaaaagggtgggcgtccggtttttcccttgatgccattctctgcttttcctgagtacatggcattactcagaaaagccctggaaaacaaagaaaaaaaagcactgataaaaaaacaggaggtgatatga

SEQ ID NO: 17220 - DNA, 339 bp, Escherichia coli
atgaacacttatgttattacttttcaggctttaaacaccaagaaagaaaaaatcacctgctccgcttttgtccattcagaaactctcttccttgccgttcattctttcgaagataaaaatcgcggtcgtggttatgtcatcacgtctgtaagtgaattgttgtccgaggaattgacggcgaaaaatgccctcaaaaaaaatattaacttctggtttaatgagtgtggtttaagtaaatctgaggttataaacgaagtaattaactggaagaatttcgcatatacccttaaagaactggaggaagctaaaaatgaagcgataagagaattgcggagttaa

SEQ ID NO: 17221 - DNA, 243 bp, Escherichia coli
atgagttttaagccaacgcctgaagaagtgaaacaagcacgtatcaaagctggctttacgcagcaggaagccgctgaacggtttggttttacgttatcagcctggcaagccaaagaaacatccggtaaaacgtctcgcggtttggccgctggtacgtatgaattacttttgctcctggctgatgaacatccagattatcagctcgttaagcgagaagaaaatcaggataaagtgactaaataa

SEQ ID NO: 17222 - DNA, 270 bp, Escherichia coli
atgaatgaaatcctgagcgacagaaaaaacaaaggtaatgtaacatacagaattgttgtgtctgaagatgcaacacgtttttttattgagcttgaaaaactgatgaaggtacgctcaaaagaagtagataaaaaaacaactaaaaaggttgtttttcagaaatctttttattatgaagaattcgatagtgttaaagatgaaattgatgatccaatcttattgcaattctatacagatactattttgaaggtacaaaatcatgagttttaa

SEQ ID NO: 17223 - DNA, 549 bp, Escherichia coli
atgcaaaacgaaaatttttttgaaaggtataaaccgacttttgaaatcgtttgtcgaatcctggggagcggctggcgtgtaaatctgctcgatgattgcctgtacaggataaagctaacctcgcctcagtataaaaattactctatacatattcgaatggagaagggaaggttagttatcattggaagcgtagacagtcgaagctggcgaagtccttaccatacttgcactgtatcgccagaacgtaaccctgtagaaattgccgccgatattgaaaagaaaatcctgacggatgctttagataatgtagatatggcgcgagaatatgaacaagagttgcagcaaaagcgcgagcaaaaacagatcctgaaaggaatgctgtctcgtttagtgcgtcttgaaagctggcatgggacattaaccgggtttaaagttgagaatgggttagatggtaacgtatcagaacgaggccacggctatgaaatggtaattcgtggtctgagtgtggatcagctcataaaagtagcggggtttatcaaacagctatga

SEQ ID NO: 17224 - DNA, 171 bp, Escherichia coli
atgggtatggtaagtaatttttttagtgagtacgggatcatattattagcactagtgaatagttttgtgctctggaagttccttaatggttctaagatgattctaggattatcagtaataataaacatagcaattattatcatagttttaatggatgtattcaccaggtaa

SEQ ID NO: 17225 - DNA, 516 bp, Escherichia coli
atgaatattcaggaagcattaaacgtttttgggttatccggtgatcttactgaaaaagatatcaaggctgcctacagaaaagcggctttaaagtatcatccagatcgtaatccattaggtgcggagctgatgaaagcaattaacgcagcgtttgattttctcatgactaacattgataaaatcaatcagtttcaaagcaccgatgaaaacgcgcgttaccactacggcgaagatctggaaaaagtgttgcacacgctttccggcctgactgggattgtttatgaggtcattggtaattgggtctggattagcggagaaaccaaagagcacaaagacgtattaaaagaaatgggctgtaaatgggcgtcaaagaaaaaacaatggttttaccgccctgaagaacacaaaagccagtggaaccgtaaagagcacagcattgaggaaatccgtgaaatgtacggtacagctggcaaacgaaaagcttcaggctggaagcgtgtagaagctagcgcataa

SEQ ID NO: 17226 - DNA, 873 bp, Escherichia coli
atgaggcttatcgtgaagacagtaacgggattaacgaaagttagacatagaaatgaagttggggtaactcttgcatccctttccctttcagcaaaaagagtgctttttctggctctttgccagattgatacaaaggaaatgttagatgatgatattttggaggttgatgctgactttttttcaaaagctacttctttagataaatatgcctcttatgcagctctgaaagagggagctaaagttctttcttcaactacgttagttttaaacagagatgatttaaaaaatttggctgatgaacttgggatactatcatctaagaataaaatacctgatcgcttggatttaaatttaacagaattctgtgcctattacgatcatcttgcaactgtacggataaaattcacaaatacagctaagcgatatttttctaagttgattggttctgaaaatagatacaccactcaagtattgaaatcagttgtgctgttgaacagtgtaaactcaacaaacctttatcaagtcattaggaaatattacagtcagaatagttcaaaaaaatcttttgatatatcagtggatgatttaaaagaggaaatgggactttatactattgaggaaggggggaagaaatataagtatcctaaatactcattttttgttcgtgatgttatcaataaaagcattaatgaaataattgagaaaacggaaataaataagttatctttctctgttgttgggaaaaaagggaggatggctcacatgcttagatttgagtttagtataaatgaaaaatcctcatccttttcggaagatgatatggcatttttagaggagtttgacaaagtcgttccaccaaaaaagaataagtga

SEQ ID NO: 17227 - DNA, 444 bp, Escherichia coli
atggctaaaatctatgagtttccgcagggagccgaacgaagtaagctgaaaaaagaaatcgttcgggaacgtaaaaaacgattgcgagaaaagaacggtaacccggttatccggcacgctaaatggttctggttttatctacgtcttgctacggctggcgcactgcatttagtctctgttattactctggcagtcctgggggctttcagtaaagctattttctggattggtggcctgctctgtgttgttacatggttccaccttgagcgccagttctggacgccgcaaaatttcacgattccagtaatcgtaacgctgtggggattaagtttgtttgccactcccctgatggagctgcttaataaaaaaatgccgtggtatcgtcttctggttcctgatgcaaagcacaccagcactgaggcaaccaatgatgatcagctgtga

SEQ ID NO: 17228 - DNA, 570 bp, Escherichia coli
atggcctgctgtgccggcgtgtgcagcccggttttctgcagactgatagcggtttccagcgatgtctcaccggcccgcgcctttatctgctcagaaaccaccgtaaaggagggatggcgggcaagtttttccgcagtacgggtttcatccagtgaggaatacagccggacatcacgaccgctgcgggccagaccgttcagggtggcgttgtccattgccatctgtgtgacggaggcaaacaccgtcgcactgtcactgacggaatgcccgggcgtttccacccagccgttctccagcttcagtgccgtgaacggtgaatcagccacaggcagggtggccggttcagcccgccccggcacaacaaccgtcatcgcatcttcactgacggatgccacctgcaggcggtcaccgccggagacgcggagtccgggaattttccctgtcaccctcagtcgctcgccgtctgccaccggcattttttccggccggaacagcgaccagctgctgtccagggaggaaatacgcaccacctgcgtttcgccctgcgcatcccgcagggtcaggctgtga

SEQ ID NO: 17229 - DNA, 336 bp, Escherichia coli
atgaacagaaaatattattttaataatatgtggtggggatgggtgacggggggatatatgctgtatatgtcatgggattatgattttaaatacagattactgttctggtgtatttctctctgcggaatggttttgtatccggttgcaaaatggtatattgaagatacagctctgaaatttacccggcctgatttctggaacagcggtttttttactgatacacctggaaaaatgggattgcttgctgtttatacgggtactgttttcatattatctcttccgttaagtatgatatatattctttctgttattataaaaaggctgtctgtaagatag

SEQ ID NO: 17230 - DNA, 249 bp, Escherichia coli
atgtatgaagatatgttgttttcgctcagctatgagcagatgacgcagatggcagaagaggaaataaagcaatgcgattttcgcagggatggcacccattatgtctgggaagtgaacaaggctcatgacatcctccgcttctggtatctcctggcgctgcgtggacacactggcctggccacaacacgggtcgaagcagactataaacggcttaaaacgctcatttcccagaggaatgagggacaatga

SEQ ID NO: 17231 - DNA, 459 bp, Escherichia coli
atgcggctttttttaggcggcaggtgctacacggctgaaaaacttgaaaaggattatctggctgaagtggctaattacagtaacgaccgctgggaagcaccgcaacgtgccgcacgcctggctgccagcgtaaagcgttacaagacatcagaaatgctgcgctttatttttgctaccattgcctatgatcccgatccagatttaaccccgctgactgtgagacgtttgtgcaaggcattgttcggcagaaccggaagccagtggctggttgttgaagtttttggggagaaggggcgtcagcaccgcagcgcggacagcaatccggagatggtggaaaaaatggctgccagatatcgtcatgccgccgaactacactggtccgcaacgctggcagaaattgaacgggtaaagcggctttatcagacgaaaattaagaaatccaaaaaagaagtgggttga

SEQ ID NO: 17232 - DNA, 849 bp, Escherichia coli
atgaataatgatgagctggtcaccagacgtgcgcaggcgattgccgaagacaggtgtttctcgaaaggacgtctgcgcgatgaattcagaatgaagccagcccccggtgctgagccggttaagtggtataaaaatacttatggtggcaggttcgctgtataccgaattgcagactgtgttccgatgcgtgagaaacgccctctgacgagtaaacaacagctggctggccagcggctttccgttttatcccgactaaacagcaccagtggccggatggcacggcaggcatatgactggctgagtctggcaccactctttctggatactgaaacgacaggactggataataccgcggaagccctggaaatcggcctgaccgatgcggccggtcaggtggtatttgaaaccaggctgaagcccacggtcgccatcggggcgcaggccgccgccgtgcatggtatcagtgagcaggctctttgcggcgcaccatcatggacagatgtggcgcggcaactgcggcatgcaatcggagatcgaccagtaattatctttaatgcccggttcgacatccgcattctgaaacagactgcggccgcacatagcgatccggctgactggctggaagaactgacggtatattgtgcgatggagctggctgcaggatattatggggccaccaaccgctatggcacgatttcactggccagtgctgccagccaggccggactgacctgggaagggctggcacactcagcgatcgccgacgcacggatggcggcaggggtggtaaacgctattgctgcatatcatctggaactgctgcaggaacaggcacggctgaaaatctga

SEQ ID NO: 17233 - DNA, 282 bp, Escherichia coli
atgatggagatattctggaccatgctggccagccaggacaggaagcgcattcgtgagtacattgcggagcagaacctgatggccgccattgaactggacgaacggattggttattcagccagcagcctggccgggcagccgtataaaggccgcaacggtcgtgtggaaggtacccgggaactggttattcacccgcattttgttctggtttatgaggtcgacagccagtggggaaaagtatatatcctgcgtgtattgcatactgcacagaagtggccatag

SEQ ID NO: 17234 - DNA, 531 bp, Escherichia coli; identical to SEQ ID NO: 12243

SEQ ID NO: 17235 - DNA, 1521 bp, Escherichia coli
atggcgatttttcatctggattttaaaattgtgaaacgaagcgaaggcatgacttccgttgcgaaagctgcctaccatgcccgtacacgtattacagatgatcgcattggcgaaacatttgatttcagccacagaacagatcttcatggtcatattttattagcccctgtttcagcacctgctcacattgttgaaagttcctcagcactctggaatgaagttgaaagagtggaacgccagaacaacggtcaaacagcccgttattttgatgttgctatacctgtagaactcaacaacgatgataagaaaaaattggttgccgaatactgtcagaagaactttgttgataaaggaatgattgctgatatcgcatttcatgacttggatagtaagaatccccatgctcacgtcatgttaaccctgaaaaccattggtccagacggcttcggtaaaaaagacagaagctggaatgataagaagataatgatccaatggcgtgaatcatgggccaccatgtcaaacagctaccttgaagccgcaggcagtgaagaacgtatcgatcaccgttctctcaggacacaatgtgctgatgcccttgctcaagcagaggaagcattcagcgctgaagagaaagcattctggcttgccaaagcaacagaaacaaaccgcccggcaatgcaacgtgttcatcgtgctaaatggaatgacaccgagtcacaggaacaacgagctgccgaacaagctcaacgtgatcagcaaatagaggaagcgaagaaggtctatacgacattcagtgagctaccactggagatcgtggttgatgtcagaagctttacgattacacatcttgctgaacccgaagagatcattatccctgactacccggcaacagtagaaccgcaaccggctatggcgacacctaccacaagcagaagaccagcagcaaaatcttaccgtaatcccaataaggtcagtaaagtaaatgtttcagggaagaaatcccctgttctggttgttcctgaaccaaaagcatccactaaattgaaaaccccatctcttcaaaacaccagagcggtgaaccgtgctcccctacatatcagaaaacagaccaagccacgacaaaatggtttgtttaaacgtttcacactactcatcgtagacttcctgaaagagagatttgtatgggcgagaaggaaaactgataccactgatgctgaccatgataagcgtatcgctgaaaattatgtgtttgatgaagtgctgggtgtcaatgttccacgctcggagtttgaaagacgcgctaagtttaacaatgaccagacatcaccagaagcaggaatctatggcagagtatcagataatgacgaaacagttcgtttcccaagccgtcctacacatgaacaaccaaattttgatagaaacatggatctcacaccatcaagcccctcagagtattcaggaaagtcccatgtttcaaagttgagaccactggcatatcgtaataataattataatgaatag

SEQ ID NO: 17236 - DNA, 594 bp, Escherichia coli
atggcactgcccgctgtccggatacatattcaccatctgataacgccagcgttctttaggcaggattggggacggatattcattacagacggcgttatttttcccgatggtttccataatcatgccctgacggtgcagcttgaatgccatgcgttcactgaccagcagggaggactgcaacggactggactcattactcacccagccattgaacgggtacatactgccctgcgaaccggcacaccagaacagaacatcgagaggcatattaaaggcactggcaatggcatctgctgcgcaggccccctgtgctatcggattggcaaagatgacagcttccggattgagaatggtggtcaggctgctgtccgtccaggtggggtcaatttcagaaagataagcgatatccaggtcaccaccttccagacagcccagcgatgtgatgatgttaagccagtacgtcagcgggtatttgtaccagtgaacgtgatagaacgccccgttcacctgcttctcatcctttttcgccgttccctgtgccgttttaccaaaagccggcaggctgaagcccaggttcaccatgcatcccggtga

SEQ ID NO: 17237 - DNA, 1044 bp, Escherichia coli
atgaaaattaacaagatattatcatctgcaacactattgtatggtatgtcaatggccatgtcggtcgggagttgtgcaacacctgtccagactaatcttcctggttacaccccgggtgcagatatcattagtgtttcaccgaccagaaaccaggtcgatctcattggtgatgttgtttattcccagataaaaggaactcgttctgtcagacagcttcacatgtcagttcttgtcccgcgaacaaatgatttaaaaccagccattatttattatcccggcggcggattcatgtcttctgaacatgacaaatttattgaaatgagaatggctctggcagaagctggttttgttgtggccgctgtagaatacagaacaattcctgatacatttccagcaccagttgaggatggaaaagctgcaatacgttacctgagagagcatgccagcaattatgggattgatcctcaaagaatcggagttctgggtgactctgccggtggatggcttgcccagatgatgggaactacaaatggtgacaaaacctttgataaaggtgactttcttcagcaatcctcagatgttcaggcagttgccacactttatgggatttctgacttgttgaatattggcgaggggttccctgaatcagtgcaggaggttcatcgctctcctgccgtaaccgaagccttaatgatcaatggccctgcattcagaaattttgcgggagcccccatcacagcgtcaaaagaaaaagcgctaaacgccagtccaatcggacatatgaaaggagtaaaacccccatttcttattatgcatggtagcaaagacactctggtttcacctgagcaaagcgccaaactattcaggatgttgaagaagaacggtgataacgctgagtacgtgctggtagaaggggccgagcatggcgataatacatggtatcagccaattattataaacagagttgttgagtggtttactaaaaacctgggaacccccataaaaaacgctacccaacaacaaaaaacaaacgctgacctgtaa

SEQ ID NO: 17238 - DNA, 213 bp, Escherichia coli; identical to SEQ ID NO: 6096

SEQ ID NO: 17239 - DNA, 639 bp, Escherichia coli
atgaacaaaaaaatatacattttattcgccctgacagcaggactgtttatctctgttcatgcttcagaaaatgtgaacacaactgaaaaccgccagttcctgaagcagcaggaaacactgagtcagcagttacgtgaaaagccggacacacagttgcaggcatgggcagagcagcaagtcagggcgaatccccttcagcattccgataatcagtttctcgatgaactagtccgtaaacagcaggcttcgcaggacggaaaaccccggcagggtgccctgtattttgtgtcgttttccattcccgaagaggggctgaaacgaatgctgggcgaaacccggcactacggtattcccgccacgctgcggggcatggtgaacaacgacctgaaggccacggctgacgccgtgttgtccctggtgaaagacggcgcaactgatggtgttcagatcgacccgacgctgttttcacagtacggcattcgcagcgttccggccctggtggtgttctgcagccaggggcacgacatcatccggggaaatctgcgcgtcaggcaggcgctggagaaagtggccgccacaggagactgccggcaggtggctcagggactgctggacggcaccggggataagtcgcaatga

SEQ ID NO: 17240 - DNA, 510 bp, Escherichia coli
atgaataaaaatgtatatgcagattttaacatgccatctgatgaacagctgaatatgtgggaaaaacaggttcagcatataaggaagggaattacccttatttctcttgagagagaaaaacgacagaagtcgtggctcctgaaaaagcatccctcttctccccgtcactcgctcgccattggggttgcctcaattgtggctgtgctctggttgtctgcggggaaaggtatccctgcagcaccgcttttcgctgccggaagtgcactctttgcttattttattgtcctgcaaatttcaagtcttcccgtgaaggatgaagagcgtcttcagaaaatgctggcaggctgtcgcttcccggaagaaagccacctctccgcactccgtctccggactgacagtactgcagaggatatcaccagtgctgttaacgaggctgttactgctgacctgcagttaattgaggagataaagcaccgtcgtcaggacaagcaggagaaacatgatgaatag

SEQ ID NO: 17241 - DNA, 222 bp, Escherichia coli; identical to SEQ ID NO: 5758

SEQ ID NO: 17242 - DNA, 516 bp, Escherichia coli; identical to SEQ ID NO: 5775

SEQ ID NO: 17243 - DNA, 126 bp, Escherichia coli
atgcgtttattttcttctcctgggcatattgtggttgccggacaattcggtggcggaaaatctgcttcggtgaaagaactaatcgacagaattattcagaaatataaggaacccttcgatgaataa

SEQ ID NO: 17244 - DNA, 639 bp, Escherichia coli; identical to SEQ ID NO: 12428

SEQ ID NO: 17245 - DNA, 279 bp, Escherichia coli
atgcttcgcctggttcgtgcagtgatcccggttgctgttctgatgatgttgttccctgagttagctatggctgctggtaaaggcgacctgatggctaaaggtaacgatacggttaaggcgaccttcggtaaggactccagtatcgttaaatgggttgttctggctgaggtgctggtcggtgcggtcatgtacatgatgaccaaaaacgtcaagttcctggtcggctttgccatactctctgtatttattgcagtaggtatgtctgttgccggattctga

SEQ ID NO: 17246 - DNA, 357 bp, Escherichia coli
gtggtgctgttcggcaagctcgcggaagtggcaggtgaatatctgcgtaagggcgcgcaggtctacatcgaggggcaactccgtacccgtagctgggaagataacggtattacccgttacgtcactgaaatccttgtgaaaaccacgggcaccatgcagatgctggggagtgcaccacagcagaacgctcaggtgcaaccgcagcctcagcagaacggccagccacagagtgctgacgcaacgaaaaaagggagcgcgaaaacgaaaggccgtggacgtaaggctgcgcagccggagcctcagccgcaaccgccggagggtgaggattactggttttcagacgatatcccgttctga

SEQ ID NO: 17247 - DNA, 234 bp, Escherichia coli; identical to SEQ ID NO: 10186

SEQ ID NO: 17248 - DNA, 261 bp, Escherichia coli
atggatcaggaaatgacgttttcactcagctatgaacaactgacccggtttgcggaaaaacgcatccgggaatgcaatctggacagccacggcgtaacttatctctgcgagtcagccaaagccggagccgtgctgatcttctggcatgaactggccataaatggctatacctcaatgaatgccataaagagacaggagatcattgacgccgaccatcagcgcctcagaaagctcatctggccggaggatgactggaaatga

SEQ ID NO: 17249 - DNA, 327 bp, Escherichia coli; identical to SEQ ID NO: 5975

SEQ ID NO: 17250 - DNA, 510 bp, Escherichia coli; identical to SEQ ID NO: 5769

SEQ ID NO: 17251 - DNA, 471 bp, Escherichia coli
gtgctgattgtgctggctgcccttgatgaaaaacggccaggacccgtgctgacgcgggacatagaacgggtgctggagcaaagcggggaagccccggtctacgggccaaacctgcgcgcctcctgccgtcgtctggaggatgccggctggctgcgtaccctgcgcgctccgaacctgcagctggcagtggagctgacggacgccggccgggccgtggcacagcctctgctgcccgcaggcggcacttctgccactgatctggcggtggagctgaacggcataacgtatcaggcctgccgtggggattttgtggtgcgtctcgacggcagcacctgtctgcagttatggaataaagaaggcagggtggtacgccgggagggcgatccgctggaagtggcgcagtggctgcaggcctgtcacgatgcaggaatggaggttcgcgtacagataaatgaaagcgtcaccccgtaa

SEQ ID NO: 17252 - DNA, 171 bp, Escherichia coli; identical to SEQ ID NO: 3483

SEQ ID NO: 17253 - DNA, 3345 bp, Escherichia coli
atgcatgtactatattatatggatgtattcatcgatttagcacaaggcgctgatgatagaagtttttcagcaatatgtgatcttaatgctgatttccttggtcggtacgccaaaaaagaaaaggatttaaaagtcacttatctggcgttagattcaatcttagaaaaaagagaaataaaacagaaactaataaaaagtaatgtcgaagtaattaatttacctgacgcagaagtaaaaagcatactggcgcattatgatgcaacagttgagatggtagctaacggtaacatttcagcaaagctaaaggaacatcttgtagaatttttcagaaaaaaaataggcaatctaaatcctgatattgttgtttattgggagtattgctctgatattttcttcgatgtgctgaataatagtatttttctcgagggacatcatactggtttttggaggctggaaaataaaaatcctgatatattgtttaacatatctacaaaagataaaaagtatgaagatactttctttaaatcgttaagtgaaatggaggtatcttctaaagacatagaagatatacaaaacataaaaaaatatttccaggaaaacattgcatttgatacacaattaaatagaagcatacttgatcctgagaataaatttaaatacttaatattctatccaagtaatgttccgtcattacgatttaaaaaacattcaggttttgcgtctaactcagcatttttacaatttcttttggaaaaaattccagaggattgcgcaatagtttattctaaacaccctttagataaaacagacagcgaatattttgttgatcagaatgaaagaataattaatcttaattcaatatcatctgctgatcatgatgtttctattagagtattaccttatgttgatgctgtagtaaatgtttattcaaatttttttatgccagcgatgctattagggaaaccaatttttagctatggcaactctcctaagaaccattttgcagttgatgacatagaacatatatacgattttctatcatctaatacatcacttccatctgattatatcgatattagcaacagaataataaaatatgtattaacacataaagttgatattcgttttttacgtaatgaaaaaaatagttatttatatttaaaacgtatagttaacaacataaaaactaaagaaaatgactatataagttatttgccgcaattgggaacattacgtggatataaagcaagagtttcacagcaactacttttgcagaacaatatattcataaattatgaacaaactggatttgagagaatacttgggcacttaattaatgataacatagagaatataggttttgatatttttgatactttattatgtcgccccttagtaaaaccaaccgatttatttcatctaatagaagaagatgtatataacattacaggattgaggagctttaatttttcacgcgctagaatccatgctgaaagtttcgcgagacacggcaaagttgaggtatcattagatgatatatacagtaccttgaaagaaaatacaggtttttctaaagatataatagacaaattaaaaaagctagaatgtgacatggagcgtcagttactctcgccaagagaaacgatgttagagtatttttcactagctaagatacataataagaatgtgtttattgcttctgatatgtatttgccagagacattcttaaaagatattttggttatgaatggatataacattgacaatacgccagtgtatatatcatgtgaatacaataaagtaaaacataatggttcattgtttaaatttattttatggaaagaaggttattctccctctaagactctttttattggagacaatttgaagtctgatgttcagcgagcgattgataatggtttacttgcagaacactatcctaaagcaattgaaaaactacagaaaacaaatttatttaggcttgatgtattaggtttcatttataaagagaacttttcattctatcttggcatgattgctaataaagttttcgataatccatttattccatttgattataaaacatctatcaataattctagtgcgcttctcggttattatatttttggtcctttggttttaagtttaactcattggcttgttcaaaatacaaataatagtgatttgaaaaaaatacttttttcatcgagagattcaagggttatatatgatgtatataatgatataaatgagaaaatatacaataataacttaccaaaaggtgtttatttttatatctctagaacagctaccttgtcagcatatactaataaagctttaagaggaactcttatatccctttatggttcaaaactagatgtcaaaaaatacctagagtatgtatttaaaatagatgtttcaaataacgatgtggctaaaaaattagcatctgagttaaagcttaacttatcggcagatatcagcaaaaataaggagaaagtagctcggtttatagattcttattatgtggccacagaatgtgaaaatatccttgagcaaaaaaataaatgtttgatcgaatacatttctaatattacagataatgagagatttgctatttttgacttgggagctagagggacaagtcgagatatattatctgaccttcttggagttgatattcctttatatatgtttagatcaaaaccgtacaagtgtatgaataactattttagctatctagttgatacttgcaaccctttcagaagaggtgttcgagtaattcacccttcattctatgaagtgttactatcggatgctttaacttctacttgttatggttatgaaaaattagggggtattgttgagccaatcgtgaaaacgtctgagcttacaaccacttcatttttaacgctaaaggctcaagtatatatgaaggagttctgtagggattatatttcattatttaaagataaatgggtatatatcaatgctcaaactcaggactcatttgtatcgccagtagcttacctttgtagtaacacaactgatacacatttattaaatcaatatgttggagatgatccattatttactgataaacattttcctgtaatttaccccccgcttaataaaacggtaaataaaccagtaaataaggcaatatccccaaaagaacagagtgaatcgatatccggttatacatctaaagttaacaaaacaaacaataatataaagagagatgtttttatttattttaaacgaaagttttatagaaatgaaatcactaaaagtatttgggataaaggcagagagttgtatgtaacatacgtaacaaagcattaa

SEQ ID NO: 17254 - DNA, 1704 bp, Escherichia coli
atgaaaataaaattacgtattactattatattaatttcagccttatgcatttttaatggattattgactcctggtgcatatgccgcaacagcgaatggatacgtagcaaataaagaaaatctacgtagtttttttgaaacggtttcatcatatgcgggtaagcctacaatagtaagtaagcttgccatgaagaaacagatcagcggaaattttgatttaaccgaaccctatgccttgattgaacgcctgtcggcgcagatggggcttatttggtatgatgatggcaaagctatttatatctatgactcatcagagatgcgtaatgcactgattaatttgagaaaggtatcgacgaatgagtttaataattttttaaaaaaatcaggtctgtataactctcgttatgaaattaaagggggcggcaatggtactttctatgtatcggggccaccagtttatgttgacctggtcgttaatgttgcaaaattaatggagcaaaacagtgatggcatcgagatcggacgcaataaagtagggattattcacctggtcaacacattcgttaatgatcgaacttatgaattacgtggcgaaaagatagttattcctggcatggcaaaagtactatcgacgttgttaaataataacattaagcaaagcactggggttaacgtactttctgaaatttcaagtcgtcaacaactaaaaaacgtatcacgtatgcctccttttcctggtgctgaagaagatgatgacctacaagtagagaaaataatatcgacaactggagcgccagagactgacgatatacaaattattgcatatcctgataccaacagtttacttgttaaaggaacagtatctcaggttgattttatcgagaagttagtagctacgctcgatattccaaagcgacatattgaattatctttatggataatagatattgataagactgatctagaacagttaggagctgactggtcgggcacgataaaaattggatccagcctaagtgcatcatttaataattcaggttcaattagtaccctggatgggacacagtttattgcaacaatacaggcacttgcgcaaaaaagaagagccgccgttgttgcacgtccagtcgttttaacacaagagaatattcctgctatatttgataataaccgcactttctatactaaattagtcggcgaacgtactgcggaattggatgaagtaacctatggtacgatgattagcgtgctaccacgatttgctgcgcgaaatcaaattgaattactcttgaatattgaagatggcaatgaaatcaattccgacaaaaccaatgttgatgatctgcctcaggttggtagaacgcttataagtactattgcacgcgtaccccaagggaaaagtcttttgattgggggatatacacgagatacgaatacctatgaaagtcgcaagatcccaatattaggcagtattccatttattggtaaattatttggatatgaaggaacaaatgcgaataacatcgttcgtgtctttcttattgagccaagagagatcgatgagcgcatgatgaataatgcgaatgaggctgcggttgacgccagagcaataacacagcaaatggcaaaaaataaagaaatcaacgatgaattactgcagaaatggataaaaacttacctgaatcgtgaagtcgtcggaggatag

SEQ ID NO: 17255 - DNA, 981 bp, Escherichia coli
atggaacatgaacctcattatatcggtatcgacaccgctaaagagaaactggatgtcgatgtgttgcgtcctgatggtcgtcatcgcaccaaaaaattcgctaacaccactaaagggcacgatgagctggtgagctggctgaaaggtcacaagattgaccatgcgcatatctgcatcgaggcgaccggcacctatatggaacctgtcgcagagtgcctttacgatgctggctacatagtgtcagtcattaatcctgcactgggtaaagctttcgctcagagtgaaggactgcgtaacaagaccgataccgtggatgcgcgcatgctggcagagttctgtcgtcagaagcgccctgctgcctgggaagcgcctcacccgcttgaacgcgcgttgcgtgccctggtagtacgccaccaggcgctgacagatatgcacacgcaggaactgaatcgcactgaaacggcgcgggaagtccagagaccgagcattgatgctcaccttctgtggcttgaagcagagctgaagcgtcttgagaagcagataaaagacctgacagacgatgatccggatatgaaacaccgcagaaaactgctggaaagtatcccgggtatcggagagaaaacatctgcggtattactggcttatatcggtctgaaggaccgcttcgcccgtgccagacagttcgccgcttttgcgggtctgacaccacgacgttatgaatcaggcagtagtgtgagaggggcaagccggttgagtaaagccggacatgtgtcgcttcgcagggcgttgtatatgcctgcaatggtagccaccagtaagactgagtggggacgggcgttccgcgaccgtctggcggctaatggcaagaaaggaaaggtgattctcggcgcgatgatgcgcaagctggcacaggtggcgtatggagtgctgaagtcaggcgtgccgttcgatgcgtcacggcataatccggtagctgcgtaa

SEQ ID NO: 17256 - DNA, 165 bp, Escherichia coli
atggtagcagggtatttattttttatttctggtgagcttatagtgacacagccatcaccgttcggatacaatgaccagttcctggtcaggtatatcatttttgtacagcagttggtaaatctctcttatctcctgaccattccagttttatttctctgttcttga

SEQ ID NO: 17257 - DNA, 855 bp, Escherichia coli
atggatgctcttagccgtttgttgatgcttaacgctccacaaggaacgatcgataagaattgcgtgttaggaagtgactggcaacttccacatggtgccggggaattgtcggttattcgttggcatgcgttaacgcaaggagcggcgaagctggaaatgccgacgggagagatttttacattacgcccgggaaatgtggtcctgctaccacaaaattcagctcatcgcctgagtcatgtcgataatgaatcgacctgtattgtctgtggcactcttcggctgcaacattcggcgcgttattttttaacgtctttgccggaaacgctgtttgtagcaccagtgaaccatagcgtggaatataactggctgagggaggcgatcccgtttttacaacaggaatccagatcggcaatgccgggagtggatgctctgtgtagccagatctgcgctacattctttaccctcgcggtgcgtgagtggattgcacaggttaatactgagaaaaacattctcagtttgcttctgcatccacgtcttggtgcggtaatacagcaaatgctggaaatgccaggacacgcctggaccgtcgaatcgctggccagcatcgcccacatgtcccgggcaagttttgcccagcttttccgtgatgtttccggaaccacgccgctagctgtattaacaaagttgcgtctacaaatagcggcccagatgttttcccgggaaatgctccctgttgtggtgatcgctgtgtcagtaggctatgccagtgaatcatcttttcacaaggcgtttgtccgcgagtttggttgtaccccgggagaatatcgggaaagggtcagacagcttgcaccctga

SEQ ID NO: 17258 - DNA, 1326 bp, Escherichia coli
atgaataaatatcaggcagttattattggttttggcaaggctggaaaaacattagccgtcacgctggcaaaagcaggttggcgtgtggctctcatcgaacaatcaaatgcaatgtatggcgggacctgtattaatatcggctgcatcccaaccaaaacattggttcatgacgcacagcagcacacagattttgtccgtgccatacagcgtaaaaatgaagtggttaattttttacgtaataagaattttcataatcttgcggatatgcccaatatcgacgtgatcgacggccaggcggagtttatcaataatcatagcctgcgtgttcatcggcctgagggaaatctggaaattcatggcgagaaaatttttattaataccggtgcacaaaccgtggttccgccaattcctggaattaccaccacgccaggagtatatgacagcaccggattacttaatctaaaagaattgcctgggcatttaggtattttgggcggcggatatattggcgttgagttcgcctctatgttcgctaattttggcagcaaggtaaccattttagaagcagcttcgctgtttttgcctcgggaagatcgggatattgctgataatatcgcgacgattttacgcgatcagggcgtcgatattatcctcaatgcccatgtggagcgaatcagtcaccatgaaaatcaagtgcaagtgcatagcgagcacgcccaactggcggtggatgcactgttaatagcttccggtcgtcaaccggctaccgcttcgttacatccagaaaatgccggtatcgcagtaaacgagcgcggggcaattgtcgttgacaagcgattacataccaccgcagacaatatttgggcgatgggagatgttaccggcgggctgcaatttacttatatttcactggatgattaccgcattgtacgtgatgagttactgggtgaaggcaaacgtagtactgatgatcggaaaaatgtgccttattccgtatttatgacaccgcccctgtccagggttggtatgacagaagaacaggccagagagagtggtgctgatattcaggtggtgacattgcctgtagctgcaattccgcgcgccagagtgatgaacgatacccgtggggtattaaaagcgattgttgataataaaacccaacgtatattaggggcatcactgctgtgtgttgactcccacgagatgatcaatatagtgaaaatggtgatggatgccgggctgccttatagcatattacgcgatcagatatttactcatccgtcgatgagcgaatcactcaatgatctattttcattagtcaaataa

SEQ ID NO: 17259 - DNA, 189 bp, Escherichia coli
atgaacattatctattctttaattgttgtggttatactgtctttaatatccttcagtagcgtcgccaaaacgattactgccgtcggttcaaccatcgacagcactgaaaaagaaatttctttacaggcagcaaaacaaggaaaatcatataaaattctgggcgcgtttttaagaacagagtttatatga

SEQ ID NO: 17260 - DNA, 528 bp, Escherichia coli
atggcagatttcgtgcaagcagcgctggatagctgggggcgagttgatgttcttatcaataatgcgggcgttatgccgctttcaccgcttgcagcaggaaaacaagatgaatgggaactcactattgacgtgaatatcaaaggcgtactttggggaattggcgctgtacttccggtgatggaagcacagggttccggtcagataatcaatcttggttctattggtgccctttctgttgtgcccacaggcgcagtctattgtgcatcaaaatttgcagtacgggctatttcggatggcttacggcaggaaagctcgaaaatccgtgtgacctgcgtaaatcctggggttgtagaaagtgaactggcttcaaccattacccatgtggaaaccatgaagtcaatggacgcctaccgttctgttgcacttcaacccgcggatattgcccgtgctgtaaggcatattattgagtctcccgaaagcgttgatacaaccgaaattaccatcagacctactgcatctgcaaactga

SEQ ID NO: 17261 - DNA, 1074 bp, Escherichia coli
atggcgactatacgcaaacgtggtaactaccaatgggaagctcagatccgtaaacgtggttttccctcccaaaccaaaacctttaacaccaaagtggaagcagaggcatgggccaaaatgatcgagtcagaaatggcgagaggtgtttggctcagccggagcgaagcggaatctacaacactgtatgaaaccctaacgcgctatgaaaaagagattgttcccggcaaaaaaggagcagtgcaagatcactccctagtgcggatactaaaaggtactcagctggcgaaaaactatatggccagcatcaggagcgctgatgtcgccaaactcagagatgaatggttgaaaatctatgctcctgcaaccgttttaaggcgtttggcgttactttctcacgtattcaacgtttcgcgtaaagaatggggcatggaaagcctgcttaaccctgtagaagccattcgcaaaccccaacccaagaacgccagaactaggcgcctggaaacgcagcgtgtactttcagagaaaaccagtgttacgccagggaaagaaatagccaccgagatagaacatatcatcgctgcaacacattcagcagtattaccagcaatcattcttctggcgttagagacagccatgcgccgtagcgagatcgcagaactacgatggcgctttatcgaccttgagaagcgagttgcacatttgccagatactaagaatgggaatgcccgtgatgtccccttatcaacgaaggctgtcacgctactatcccatctaaaggaatgttctaaacaaactgatgataaggttttcgatatgcgtgccgatgcaattacgcgtgcttttgatcgagcagtaaaacgggccagagaaaggtatgaacaagctaactcccaatgtgatgacacctttctcagagatttgagatttcatgatctccggcatgaagcaacttcacgcctggctgaaatcttccctatgcacgagctgacaaaaatcacagggcataaagacccgagaatgttaatgcgttattatcatcctaaagctgaggatttagcactgaaattgaaatga

SEQ ID NO: 17262 - DNA, 930 bp, Escherichia coli
atgattaatattaaaagatatttcccaaatttaaaattcaacatagcatcttctctttatttagttggtgcaatcatagtaataatgaaattcccatcactgacccaaaataggttgtttttaatccttagccttttattatcaataacattccttatttgcgcgtatcaaaacaaaaaaacacatgttgataaaatcattgaaaatagcatagtaaaatggatttcaacagtattgatattttcagttagcttatggtattcaaaacataaacttaattgggactacgagatcgaatctgagtatttaaattattcatcctatggctatgcatttgctttaacaatttctctatgtttattcatttatggcctctgtatattcatacacacatatttaagaagtataaccgcttatcaggctttttatgcagccattatagcaatgcctctctgctatatattgaaagacttcattggacatcagaagggtattaattatattctaacaatgggtttgattatatttatgccgtacggctttatgctatttccttggcaagtgaagaatggaaataaaataaataaaaacatgtttatattctttaaactcaagacggtaaatattgataaaataagactagtattaaaaatatggtttaaaaaaattctaatagctttaaatagctacctaaaagtttcagatctattatctattgctgcagcattgttatttcttggctcattttcaatatcaataataccagagcatcaaggctcctttcttttgcttgacgcctttgccacaacagattgtaatactaaaagggattcatatttgtatcttagaaaatcaaattctgaatgttacaaaataacacataaaggaattgaaattgtggagatgaaatcatttccgtcttcaatctga

SEQ ID NO: 17263 - DNA, 228 bp, Escherichia coli
atggttgattataatagctttgttttagaaggaataaaaattctttttaccgataaagaaaatgagtttatgaagagaggtttttttaatgatctttatgacccattaattaatattctgtgcattgaaaactattatcacgcaacaggtgtttatgatcttgatgatgctaatgagcaagccaggttattaaaagacgccatttctaagtatcgattgactcactaa

SEQ ID NO: 17264 - DNA, 1386 bp, Escherichia coli
atgaaaataatcaaacaattgatatttttatctccaacgcttcttttttctctaaatgcctatgcaaatcagataaatagtagcggactgcttgataacttgttatataagtatcaacaagttgctagtacatggactacagtgcttggtgattatgctaattggctattttggggattagttctaataagtatggtatggacttttggcatgatcgctatgaaaggcggaggatttcaggatttacttgcagaagtggtaaggttcttcgctatcaatggtttcttcttctttattttaaaaaatggtccggctatatcaaaatccataattgactcattgagagagcttgctggtaatgctttaggtacagggaatggaatctctccatcaagtatagtagacatggcttttgtcatattaacaaaggttagttcggctgcttctatctggtcccctatgatttccactattatgattactgttgcaataatagttttagtggtaatgtcacttatagcagttaatatgctgataatgttagtgtctgcatgggtgatgtgttatgcaggtataatattacttgggttcggcgggtcaaaattgacttccgatataactgtaaattatctgaggacagtattgtctgttggcatccagctatttgtgatgacattaattattggtattgggcaatcatttatagatcagtatttttctgttattaaagatgatgtgccggaccttaacagccttatagttctgcttctggcgtcaattgttctactagtgctaactaatagattaccacagctcttatcaggaattgttggtggtgcatccttacacgggatggggggatttggtgcaggtatgattgccggagctgctactactgcaatcagtagtgctggctcgatagcattgagtgctacggctcaagccagtggaggggcttctgcattaaaagctgcatttgaatctgcacaagcggctatggctgaggaatccggttccggaaacggggcaggaagcagtggtgcttcggaagacactggcaacgttgatgctttcggctctggtgcaggtgctagcagtgattcagcagcaggcggcggctccaatggtagcaccagtggtggcagtaaaggatttgctcagtcattttccaaagctggtcgcatggctagccatatggggagtagtttgattaacggagctatggattatcaaacgactaaccaaaaaatcaattcaactcgtgcacggcagactattggggaagaggtcgcggatcacatacgtaaacgatcatctgctcaagcgggtaaccgtgaacatactgagtttgaaggtgatagcttatctggcagtaaaaactcttga

SEQ ID NO: 17265 - DNA, 171 bp, Escherichia coli
atgttaaataaaatttttgtccctttcattataactagcacattgattttatgttcttgtgataaaaacgataaagattgtttttcgccagataagagaggtgacgtcgtgaaatatgatgactgtactttgcgcagtcataatactcccagtcccaagaaagagtggtaa

SEQ ID NO: 17266 - DNA, 795 bp, Escherichia coli
atgaaggaatcactgcaggttggcacaccattaagagcaattttagccgctaaaaaaaatctaactattttcctatccgcatctttgattgcgatagctgcgaaagccggtattcccgtcattgatgggacaaacgtggttcaaaccactatcagcgccgtcaataacgttcaggctgttgccaagcaaatccagcagtatcagacgcagttgcagcagtatgagaacatgctacagaatactgtagcacctgcggcatatatctgggatcaggctaattcaacaattaataagcttctgcaggctcaggacacattgaattactacaagaaccaggcgggaagcctggattcatatcttagccgttatcaggacgtaaactactacaaatcatcgccctgttttaacagcaatatcagctgtactgcagatgaaataagtgctcttaacaacgcacaacagaacagctctgaagcgcgtaagaaagcgaatgatgctgtttttaaagttatagaccagcaacagggaaccttacagcaggacgctgataacctggctgacctccagactcaggccagcggagcaacaggacagatgaaggctattcaggcggcaaatcaacttgccagcgcccaggcgaaccagttattgcaaatccgttcattgcttgttgcacagcaaaacgccgctgcaacattggcacaagtgcaagcagataaagaagcccagcaaacagttgctgatcagagagctttatctggtgttaacaccccaagtcctaaaaaaaattggtaa

SEQ ID NO: 17267 - DNA, 360 bp, Escherichia coli
atgaatgaaatgccgaaaagtaccaggaagcatggaaagcatattagagtgccagttcttcctgatgaagaagcaattataaaagctaatgcagaagcatcgggattaagtgctgctagttttattcgaaaagttgcaatgggttatgaggtggaatccatagtggatataaagcaggtcttagagcttagccgagtatatggagatcttggccgattaggagggttgctgaaattatggctagcaaatgatccaaggactgctaattttccaccttcactgataaaaacattgttaagtaaaatagaatcaactcagcaagagttgagaaatattatggagaaaatacttgataggtga

SEQ ID NO: 17268 - DNA, 777 bp, Escherichia coli
ttgaaaaggatcaataaaactgctgaagatcaattcttaattaattttaaagctcaaaatccaaatgggacttgggatgaatttaggaatcatgaacaaggtattttatataagaggttaaagcaacacatttgcaatgatcaaatgtacctttgtgcgtattgtgagatagatttagatcgagaaaatgaacatgaaataaaagtagagcatttcaaatctaaatctggttcgctccctggtggaagtaactggcatttagagtggtctaatctcttagctgtatgcctaggaggtacaaatacaggtgatgatttcgaattaccagctaatctaagttgtgattcatataagtcacattatgaagacaaaaataaaatcaatgataaagactggacaggcaaaatcctgttacctttaacgcttccggatgcacacaatttttttactttcgagaaagttacaggtaagttgctacctaatgaatcatactgtaatactattagcatagatggtaaacctgctgcagaaacactaagtattgtaactaaaacaatagaagttctaaatttaaactgcagcaggctaaataatgccagaagaaaactgctgtttcactttaataattgcgcacgtgaaagaaacttgagaaagctccataatctattattacaatggaatcaaggtgagcctaaatttttccaaacgacacgagatataataattcgtgatgatagaatctgccaagggttactgaacggaacgataagatattaa

SEQ ID NO: 17269 - DNA, 1629 bp, Escherichia coli
atggaacagaacttaccgagtagaataactaaattaattaaaaaatcggaaagcggcgattttgcttcttcgtatcagctttataaagtatttggctcgaaagagtacggagttgagccagatgaaaaaatgtctgattacttcaaagaattatcagctaaacagttagaaggtggtcaactgagagttgctgatattcatttggaaaactacaaagggtttgagtccctaataatggatttttccatgaaaaaaaactctacaattttagtaggaaataatggctgtgggaagtcgacgattctcgatgcaatccagaaggggttaacacatctatcctcgagattatctactcgctcgcataatggcgatggtatcgaaaaacatgagttaagaaaaggacaaaactatgcatcaatcgctataaattacgactatatgggaatacgttttcctatgatcatagctacaactgaaccaggttatgaggatagagcaaaaagtaactatagcggtattaatgagttaggaagcattttcaaaacagcccattcaatcaatccaaatgtttcatttcctttaattgcaatgtatacagttgaaagggctaatgacgtttctactagagatattgagaattcagaagaaattaaagaagctcaaatctgggataaattcaaagcatataataagagcctgacaggaaaggctgatttcaaattattcttcagatggtttaaagaactaatagaaatcgaaaactctgacaacgctgatataacagcattaagagcagagattcgtgctaaagaaaaagacttagacaatccattgctaaaagctcttctggcagaaaataaaaattctgagactactaaaaaattgttagaagatcatcaaaactctctgaaagttttaaaagagaaattaaatagctattattcagtcaatagtaaaacattacacactgttgaagatgcaatatattctttccttcctggttttagcaaccttaaacttcaaagggcgcctcttgatctgatagtggataagaataatgtttccttaagtgttctgcaattatctcaaggtgaaaaaaccattttagcattaattgcagatattgctcgtagattgacattgttaaaccctaatagtgttaaccctttggacggtactggaattgtattaatcgatgaaatagacctccatttacatccatcatggcagcaaaatattattcctcgtcttgagaaaacgtttaagaatattcaatttatagtcacgactcatagtccacaagtttgtcatactattgatagtcagaatatatggttgttaaagaatggccaaaagtttaaagcaccgaaaggagttagaggagcaatatcttcttgggtactggagaacttgttcgaagttgctcaaaggccgccagaggataagtacacaaagctcttacaggaatataaaaatttagtattttcagaaaaatatgctagtgaagatgcaagaaagctaggtgctactttatcccaacatttcggaccggatgatgaaaccttagttgagttaaagcttgaaattgaaaaaagaatttgggaggatgattttgaaaaggatcaataa

SEQ ID NO: 17270 - DNA, 939 bp, Escherichia coli
atgagcatcgacattgaaacgacacttcaaaaagcttaccccgattttgacgtacttttaaaatcaagaccagcgacacactacaaagtatacaaaattccaaagcgtacaattggctatcgtatcatagctcaacctacgccacgagtaaaagcaatacaaagggatataattgaaatactcaaacagcatactcatatccacgatgcagccacagcgtatgttgatgggaagaatatattagataacgccaagatacatcaaagctcagtttatttattaaagctagatttggtcaatttttttaataaaataacaccggaacttttatttaaggcattagctagacaaaaagtagatatttcagataccaacaaaaatttattaaaacaattttgtttttggaatagaacaaaaagaaaaaatggtgcgttagttttaagtgtaggagcaccaagctctccttttatatcgaatattgttatgagcagcttcgatgaagagataagttctttttgcaaggaaaataaaatatcttactcaagatatgctgacgacttaactttttcaacaaatgaaagagatgttttagggttagctcatcaaaaagtaaaaacaacattaattcgtttttttggcacgcggattattattaataataacaagatagtatattcttctaaagcacataatcgccatgtcacaggagtgacgttaactaataataataaattatcactaggaagagaaaggaaaagatatattacttctttagtgtttaaatttaaagaaggcaagctttcgaatttagatattaatcatcttagaggcttgatcggttttgcttataatattgagccagcttttattgaaagacttgagaaaaaatatggagaatcaaccattaagtctatcaagaaatactctgaaggaggataa

SEQ ID NO: 17271 - DNA, 636 bp, Escherichia coli
atgaacactctcgcaaatattcaggaactcgcgcgcgcactgcgcaatatgattcgcaccggcattatcgtcgaaaccgaccttaacgccggtcgctgccgtgtgcagaccggcggcatgtgcaccgactggcttcagtggctgacccatcgcgccggtcgttcgcgcacatggtgggcaccttccgtgggggaacaggtgctgattctggccgtgggcggtgaactcgacacggcgttcgttctgccggggatttattccggcgataaccccgcgccgtctgcgtcggcggatgccctgcatatccgtttccctgacggggcggtgattgagtatgaacctgaaaccagcgcactcacggtaagcggaattaaaacagccagcgtgacggcttctgattctgttactgccacggtgccggtggtcatggtgaaagcatcaacccgcgtcaccctggacacaccggaggtggtctgcaccaacaggctgattaccggcacgctggaagtgcagaagggcggggcgatgcgcggcaacattgaacacaccggcggtgaactctcatcaaacggtaaggtactgcacacccataaacaccccggcgacagcggcggcacaaccgggagtcctctatga

SEQ ID NO: 17272 - DNA, 756 bp, Escherichia coli
atgagacgggtgtttgtggataaaaagttttccattttgagaaaaagagtaaagcattctcaaaagaaagttatggattgtattattgctgaccataatgctgatatatgtgtgttatgcgggagttctgacgatattactcgtgagcacattattcctcagtgggcctttgagtcaaatgctgaaaaatctttaattaataaaaagaataatcagtcaactcattacattaaagccactgtaccagcatgcagagtgtgcaattctgatttgctgggagtgtttgagtataacctgaagaaatctcttacggaaaagaggggggaggagttaacagattatgagtatgattgcatcatatggtggttgcaatacatgggttttaagttgcaattaatggatttgcggaaccgctttctcaggtataaaggtggtgattatatctcgttccttgcaaacttcccggttgcaatgttttgggggaatgtcgatgcgacgccgggggatgtcttcaggattatacgaaaatcgcgacgcaatctgatgtcgaaatggaaggataaaaaacataattctttgatggtttttgaaacatcaaacaagagttttcatttctttcataaggttgatgaatttatttttattgaaatgcctcaggttaagaaggcgtttttcttcttttttaataaagaatttgacagccatgatttagctcatgaggagtgtatgaagattatagagaagtgctacaactaa

SEQ ID NO: 17273 - DNA, 459 bp, Escherichia coli
atgaatgagtttaagcgttttgaagaccggctgaccggactgattgagtcgctgtcaccgtcagggcgtcggcgactggcggtagatattgcgaagaagctgcgccagcgccagcagcagcgaattaaattacaaaaagccccggatggtacgccgtatgtaccgagaaaaaaccaaccagtacgaaataagaaaggccggataaagcgggaaatgtttgtgaaattacgcactaaccggtttatgaaagcaacaggtagcgagagtgcggcggtggtggcgtttgccagcggagtacaacgaattgcgcgagtacatcaattagggcttagggataagccggggcgtaatagtgctgtggtggaatatcctgttcgtgagttatttggttttgacaaggaatctatacaattgatagaaagggagttattagtgattctatcgaaagatgttatatga

SEQ ID NO: 17274 - DNA, 426 bp, Escherichia coli
atgaagaaattatccctttcactgatgctgaatgtgtcgctggcgctgatgctggcactgtccctgatttacccgcagagcgtggccgtcaattttgtcgccgcctgggcgattctggcgacggttatctgtgtggttgccggtggtgtcggcgtgtatgccactgagtatgtgctggaacgctacgggcgggagctgccaccggaatcgctggccgtgaagattgtcacgtcgctgtttttgcagccggtgccgtggcgcagacgggcggcggctctggtggtgatggtggcgacgtttatctcgctggttgctgccgggtggatttttaccgcgctgatttatcttgtggcgtcgctgtttttccggctgatacgtaaagtctgtcgtcagcgtcttgaggggcgggaaccatgtcaaagctga

SEQ ID NO: 17275 - DNA, 1419 bp, Escherichia coli
atggcaaacgatatcatcgaagcttttcctgcaaaacgtttctttgtagaaatgttaaccagggatatcgaactccaagatgctattcttgacttattagacaactgtcttgatggcgctcttcgttccatttcatcatcgaatgaagaaataaacgaagaaaataaataccacggtttttactcaaaaataaattttaatgaagatggttttacaattgaagataattgtggcggaatttcgggaagcttagcaacaagctatgctttccgaatgggaagaccaaatgaaagagacatagataatatcccaaccattggtgtttatgggataggtatgaagcgagctatttttaagttgggcacttcatcgcaagtattaagtaaaacaaaagacgaggaatttaaagttacaatttctccagaatggttatccaatgataaaaactggaaactagatctcgaacgtggtaatgtcgatttaaaaacaacgggcgtaaaaattatagttaacgatctcagagacgatgtaaaaaaccatttcaaagttgatcgtgattttcaacaaaaattaatcaattctgtttcaaaccattatagcctaattcttaataaaggtttcaaggtctatattaatgatatagaagtcaagccaaatctgacatcattaattatcgataccgaagctcttgtgtcagcgaaaaaaggtggtatcacgccttatttttacagaggtgaaactaatggagtttcaataaagatcgcagttggattctatagagattttgtgacagaagatgaggaaaattcattccttactggacgtaacacttccgagaaagccggatggactattatctgcaatgatcgtgttgttgttcatgcggacaagacacgtcttaccggatggggtgaagcaggagttccacaatatcatacacaatttgttggaattgcaggcgtagctatttttacatctaatgaagctgaaaaattacctattactactaccaagagaggcattgatggtaattctgatatctatttggctactaaagatttcatgcgtgaaggcttgaaaatatttacagattttactaacagatggaaaagtaactctccagaacgccagcaaatgtttagttccacatctaaaacaattcctcttacaaacgacaaactagatagcatagtacctgaagataaatggtctcgggtgcatagatccattggtgggaatagtttcaaaccaacattgccaatacctaaagaaacagaccctttaaagcaaataaaatttagtagaagattgagtgagataaaaactgttgccactttcattttcgatgatgattctgttcctccgacagaaattggtaattattgctttgaagattttttagagagggcaaaaaaatga

SEQ ID NO: 17276 - DNA, 993 bp, Escherichia coli
atgagtactgggggaagtattccttatcatcttcgacaacacaaagctgtcgaaagaaatctattcattgagttgctcagaaaactcaacaactatgtaaacatatccgattatgtttatatcgggtttggtggcccttttctagaagacttcaaacaactgcataatgctttaaaaatcaataacatgatctctctagaggtagatgctaacgttcataaacgacaaaaatttaacaaacctatatcatgtattgatttaggagaagaacctttaagtagcagtgaatttattactcaaagcgacttcgctgcaccttctctaatttggcttgactatgccataccaagccaaatatatgagcaaatgaatgacattgctcaattggtaagtaagttaaagccaaaagatatatttaaaataactttaaatgcaactcctgaaactttaggaagagattttcaagaaagagaccctaggcgttttcgattaaaaaaaatacaatctttacttactcaagattattgcccagtgaatctaactgttgatgatgtcacttttaaaaggtacccacaccttttaataaaagcagctcaacgtgccataagtattggattaacaggtagactagatataatgatccatcctttatgtaattttatttacaaagatggtcagcaaatgcttacctttactgccattgttctcgaaaacagtgatatgcaattagatagcttccttcaaaattctcgaattaatttttggcccttttattctggagactggggcaccgtcaaaaacattagtgttcccacgatgtctttacgtgagagaatctttattgaggaacgacttcctacaaaagaccatgaagaaattaccaacgacctcggcttttacattggagatgatgaagccgaggctaatagtaaccttaaaaactttattgagtattacaaagtaattccgtggtattcgaaagttcttctttag

SEQ ID NO: 17277 - DNA, 1152 bp, Escherichia coli
atgaatgtggttgatttatactcaggggtaggtggtttaagcttgggagcatcacgggcaggctttaacttggttggtgccgttgagttggataagcatgcaatattttcccatgctcttaatttcccaaattcaacacatttacataaagatgttagcaaactttctgctcatgatattctaacagcttgtaatgttagtaatattgattgtgtcatcggtggaccaccttgtcagggatttagtacaattggtaaagggatggctaatgacgtcagaaatgaattgtatattcatttttttaggttggtgagcgagttatcacctgtttgtttcttggcagagaatgttcctgggataatgaatgaaaaatatgatgcagttagagaaaaagcattctcattagtaaaagaccgatatgtaatattgagcccaataaaagtgaatgcgtctaattatggagctcctacaactagaactaggattttttttatcggattcaaaaaggaattagctaattgtttaaaagaatctgatttctttcctgtgcaagatattgagcaaaccttagttaaagatgctttatacggtattcctcgtgttataagaaaagaatggcagcaagaggaacaaggctggcgtgaagttaagatggataggcaaggatatttttttgatagactttggagtaatgttccgaataatgttggtgatccggaatctttagaaaaattaaaaaaagggttggtctccggtttcttgggaacaatacatacagatgaggttattaatagatataaaaaactctcttttggcgaaactgataaaatttcacgatctcagaggttaaatccaaatggtttctgtccgacgctaagggctggaactggcagcgataagggcagttatcaagcagttaggccgatccatccaacgcaggctagagttattactccacgtgaggctgctcgattacaaggttttcctgattggtttaggtttcaccctactaagtggcatagtttcaggcaaatcggtaatagcgttagcccattagtagctgaagctatgctattaccgttatataaattatgtcagttttctaaagaagaactttcgaataccacggaattactttgtaatactcaataa

SEQ ID NO: 17278 - DNA, 531 bp, Escherichia coli
atgaaccgattctcaaaaactcaaatttatttacattggataacgctgctttttgttgcaataacctatgccgcgatggaactccgtggctggtttcctaaaggtagtagtacttatctgctgatgcgagaaacacattacaatgcgggtatattcgtttgggtgttaatgttttcacgcctgattataaaacaccgttatagtgatccttctattgtgccaccgccacctgcctggcaaatgaaagcggcttcgctaatgcacatcatgctttatataaccttccttgcacttcctctgctggggattgctttgatggcttacagtggaaaatcgtggagtttccttggtttcaatgtgtctccctttgttaccccaaacagcgaaattaaagcactgataaaaaatattcacgaaacctgggcaaatataggttactttttaatcgcagctcacgctggcgcagcactctttcatcactacattcagaaagataatactctgttacgaatgatgcctcgccgcaaataa

SEQ ID NO: 17279 - DNA, 957 bp, Escherichia coli
atgtcaggtataatttcaagtgcaacagaattcttcaataatacactctattcaaatcaatacgaaattaaagatgcgagcaaagaaaaaataaaggatatgtataataaatcggttgattatgcaactgcgaataatcgcgatgtgattattgcaaaaatagatttatttattcaaaaaatcacccttaatttatggacagcaagtatcaaaaatgtgtcgttaatcagcagaataaatgaactcaaactgtgggtcgataagtgtattgatgactgctctcaagagcaattaggcgatcgtgattatatcgctttatatgtagacagggcgatttttcattatgcgattagttttgtctgtaataaagtagaacatcagacagtaagtctcatagacagatgtacttttgatgtagcaagcccgaatggactcccatcaactattcaactattttatgaaaaatctattgatgatgaatctatagcttcgttacatctacaaactttaggtgatggttttataaatttagaaaatgcatatcatcaatatgacgatattcgcttaaaacccttggcttcccttttaatttcatgttcatatggtagtgcattagcagatctgatagctgcagtggatattgatgagtattgcgaaaaatacataacagatcaggtgaaaacgttatctcaacaagagatgaaaaaaaatctgaaggagatgaaaaatctggcagtcgcagggaaactggatttcaatgacattgtaactgatatgaaacgtcaggaagacgaaggaaaacgagtcctaaaagacgttacaaaaatgcatggtgcggcgcagaaattaaatgacttcgtacaatcgtgtgacccagattcaacggaattgattcaaattccaaacgatatctctaattcaatttatgatctatttggtattgaactagtaaaataa

SEQ ID NO: 17280 - DNA, 1470 bp, Escherichia coli
gtgaatataaaatcagcacattttttgccagggacgaataaacgccttggtgacaaatacctgttacttgaatgccttggtgatggcagccatggctgggtatggcgggcggaacgcctgaaagatggaaaaattgtcgcagtaaaaatccctaaggatattactcgggaagaccgtcagcttgccgaaggtaaagagcttttaaacgtcgagccgcacgaaaatattgtgcaaatttttgatatgggccgtatagataatgaatggttctatattgaaatggagtattttcccagccaaaccctggcgcaaaagctcgatgacaggcagcgtaattttggccagacctatgaacggttgttcagaatatatcgtcaagtgctctgtgctgtgcattatttggccgaattaccagtaccaatatctcatggagatattaagccacataacattttggttggagagcgggacctggtgaagttgacggactttggcagctcagctttaccagaagaaatttacgttcgtacccgtgaaaatggcgggactgtgctgtattcggccccagagttctccaacgtcgatagccgtagaggcagcctggaagagctactattgggcgacatctatagcttaggtgttttgctataccagctgctgacaggaaagctgcctcatgatacgccagcacaagttcagcgccacgcacctttcaagcttccgacagagattaatagctctattcatacggacctggaacaagtggttcttacttgtttacaaaaacgagcggaggatcgcttttccactatttccgacttaattcatgcatttgattctgctgccactaagcaattaaaagttggtgctattgctcccgtttttcaaactaaacctgctcaggactggtcaagtgcggtacttgaagcaatgtccgatcaatcttaccaaaaagctgctcaattagcgtcgcaggagtatagccgcagtaaagatctacaagctttacatcagcaacttattgccttgtatcgcgccaatcgcttattcgactttgaaaaagttgtagaagataataaagcgatcttaattgagggtaaattgactcaaccagcagctttgttcgagttgatagttaaggcaaacctacagttacgcaatatcagtcaagcaaatttctggctgttgcaacgaaagcaagctgaagcagaaaacgcgaccaccatgtatttagaatcatctatccttggccttgaagcgaaatattctgaagcaagagtactattggagaaagtaaaccaaacaactccaatgaagttccatgtgttaagccaactcattttagtttgcgagcaaatgcgtgattactctggtgcagcggcttatttgaaagcggcattgcgagtagcaccattggataacagcatgaaagagaaaaaagaattgtatgcaaagcttggagttatttga

SEQ ID NO: 17281 - DNA, 543 bp, Escherichia coli
atgcctgaagttgcctgggtaaatgagacatttccacttttagcaagcggtaagctattggaccaggatgtattggtccacagcctgggctgtagcgtttggaatacattcgggcatgaacagtcatttatggcggtagtggaatgcccggctccagggacatttggtgctgatattcgctctgactcgggctggtttcataaatcttctgcatcgcctgtgtgtttaatcgaatttgaacgctttgatggttcagcgaaggggcagcaaaagctggaagaaaaattaaaaaatttactggaagcagcacagcgctggaataattcccccaaaactctggtcctcagtgcctggagccagggcttagtaggtgcacctgatactcaaaaactgaaagacatatgccgtatgggttttacttcgtccacgggtacccaagtaatcgccgctcctgatgttgaggtggtatttagtcgctttttatttatcaaaaacctgaacatgattgttttggacagaattcactatgaggtgttgatgtga

SEQ ID NO: 17282 - DNA, 1686 bp, Escherichia coli
atggcttataaagttttaggtaaattagtcggtaatactggtgatgccagccagttaactatggttgtgcaagactcgttttcagtacgccgtggtgagtttgtacgcattatgcaccaggaacgcaaagatgaggggcaagtcgccgtgctggggcgagtgaccaagatcagtcgaaccaatatgctctacaacgccggctttggcgatggtgtaactgagcttgagcttttgcccggtgcgaatgtaactggtgagaatatgtttgctcaggtcgagctggttggttaccgcgatcctgttactcgtcaaatcaaaattccacgtcgcccgcttaacccgggtaccgctgttgaaaccgtcgattttcagtttttgagtgatttttacgaatttaatgaacactccagtttgcacttgggtaacttagtaggctacgacaaaggtgagaatacagttcctgtttttattgacgtgaacaagttggtcactgagcatttggctgttctggcaatgacgggttcaggtaagtcttatacagttggccgcattattgagcgtttagttgcggttaataacggtacggtagtagtatttgacccacatggtgaatacggtaaagccctcgctggcggtaatctgcaattctcaagcttcttagaagccactgacgataagcgtgatcaagaagcactgccactgataaaacagacctttgaaaagctgcagaccgccggtgcaggtattcaggtttactcgccgcagcacgaatcttttaaacataaatacgccagtaagaatacgccattagcgcttcagtttgaccattttgaaatggacgatattgctgaaatattacctggcttaacggaaccgcagcaacgagtactcgatgttgcaattcgttattggcgctctgcagataagactgagccacgagatattaaccgcctacgcttcttattaggtgatggtattgaagagttaaaagagtgggacgacctttctgaagctgaggcgaaggcgttatcaggccgtagtgccgccgtcgcctcgatgaagctttcacgcgtgcttaatgaagctaaaagtttttacagcgcaacaatggctgagccaactgatatttacaaaatggtgggccgcccgagcaatcaacaggggcgtttagtcgttgttgacttacaaggtttgagtgataccgctaagcaagtcatttgtgctctgttatctagtgaaatattaaaagcagcctcgagcaaaacggacccgctgcgcccatgctttatcatttatgaagagggtcataattttgccccggccggcggcaacgcagtcagtcaccgcattattaaaaagatcgctggtgaaggtcgtaaatttggtgttggatttggcattgtgagccagcgtccatcgaaattagattcagatgtgacctctcagtgcaatacgctaattacgatgcgcttaaagaaccctgacgatcaacgatttatagctaaagcatcagatatggtgagcaaagctgatctggaagaactcccgagtttatcaaccggtgaagctttggtgtgtggtcgttcaatccctgcaccactgcttgttaaagttggtagtaaggcattaattcacggtggtgaatcaccagaggtactgcgtgtttggggctctttcagtggctaa

SEQ ID NO: 17283 - DNA, 1158 bp, Escherichia coli
atgaatgagaacaaaacgatgaatttagcgcaatcgctcgccatcgatagccagcttcgcttaccgggaagtgcaggacgcttgcttaaacaggtccgtgatattgagcaagtagcgccgctgttccgtgatgctggcttagtgaaagcggtccccaagcccacaattgttaatttacgcgtagccggtattgcgactaaatcgtgcttagacaaggtattgggtggttttatttatgccagtgcagcagtgcgcacagatttgttaatagatgacaataaagtcagcacggtgggtagcgactcggtatcagaactggatgatattgattttgaagctcagcgtaaacggcttgacttaattgaaattcgtcaggcttatcagttagttgagaaaaaacttttaagttatgagcctggcgatttaattttgctggatacgccgttgtttttagcacgggatatggctccgctggagagaaatgtccgtcataaacaagagtacgaaaaaaccagacaagtgatagaaactttttggcaaaaccatcgctccagaatttttccctggaatcaaaatggtgtagtacttgcgagcattttggctgagcgctttagtgccattgtaagtatcgccaaacaagatttacgtaccgaacaaggccgcaaacaaattttagcatctgatgggttttctaaagagttgatgcaaaatctggaaggactggatgaaagtttggttggtgtgggggatttgcgatttatcaatggcattttaggcaactattcgcgcaccatcgcatttcgtttatctgaacaagaaaagcgcattgaacccaacattgaagctaaacaaggtctaattggttttcacttccgtagtgcccgaggcggacagataaaaatggtgcaattagcgggtgacgaaccagaatggaaaagtgctgatctcgatttagttgcctctcgcctgatggtgctggatatgcaaaacaaaggtaatgcaatgccgttgccacaattacttggctatcaacagcttggtattttacctaaatttgctacgttttatcgccagggtttacaccaggcactaaagaataatgatattgaggcagggtggttggcaggcctcgatgagggattgaataatggcttataa

SEQ ID NO: 17284 - DNA, 849 bp, Escherichia coli
atgagtcgttatttatctgcggcactggccagtaatcgtaaaggccgttttttgcaaactgttgcgggggctacccccttaatgaaggattggattagctcgccgccagccagcggtttgttaatagtgcaagcagaagagttgactgacgctaatactatgcagcacctgtatcactgggctatgcaggcaggttgtgccgctttggtaataaacctgaaagcagaacaatttaccttattagcgcaattgccctatccactggattggcagttagtaccagcgagcttgagggggcaggaaccggggctaaccgctttgctagccagtgaaacagaccaggctattgctggctttactggcagcgcagatcgctaccagcaccaggccggtgatgtagtgcatacccgctacatacgaaaacacagcaacagtgggctattagcctttaccacgttacctttgtggtcgctgactttactcgatcatagtgagctcctggtgagctggttgaattggtttgtggaccatgcaggcattgctgaacgaataatcgaacctaaagcgccatcaactgactacacgccagataagcacgatctggttgtattgctattactctacgctggcggtggcatgagcttacaagcgttgtctaagcataatgcggttaagctgatgtttgatgttaatagccttgatattgtcaagcgaggtgagatgttgcggcagcacgattttatcgacgacacgggcataacagctaccggtaaaacatgcctaaaagcctcgcaatattgggcttatgcccaattacttagcgagcagctacacacaggaacgctataa

SEQ ID NO: 17285 - DNA, 4287 bp, Escherichia coli
atgagttttgaattaaacgaacagatggttgatagcctggcaaaacaacatcgctgggcggcgacgggcgtatcagattatccacctcgcgacccgttagtgggccagagccgcttttttaaacgctttcaaacctttttgcatacggtggatcacgacgatgatcgctttgcccatgtgtttgccgtcgaagccgaatggggtcggggtaaatcacgtttaggccatgaattggtcgcacaaattaacgactgctccaggggctggtttgtccgcgacgaacaaggccaactgcacgataagcagctgtttaatcgcgacacgcaagacaaatacctggcgctctacattcgctactcgcaagtggcatcagattatcaaaactcggataactggtttgcttttggtttatatcaggcgctattaccactggccacccaaacctttgatggatcgattcaaagtgaaattgccaaacaagcctatgaacgcttaatgccatttggctttaaatctgaactgttagcagatgccttacagctgaacgccaaccacagcgaagaagacctctatactgaccaaacgctggtagtcagtttggtgcaagccgcctataaagtattaaagagttttggcgtgcagtatatgttggtggtgctggatgagctggaaaccgttgcagaagccgccacctttggcctggaagatgaacaagataaacgcctcgatggccaggccattcgcctgattggtaaagcaattaaagaggaagaccctcgtcgtaaacttccatggttgcgctatgtggcgctgtgttcaccactgcttggccagcaattgcgtgaaattcaatcggtcgcccgccgctttgagttagtggaacttgagcataatgcctttgccgatgtatcagactatgtggcaagcctcttaaaagacggcaagctgagttttaattaccctgctggtttagtggaagctgcatacgccatgagtggtgccaacttcggttggtttaacgtggtcatggctaatgtggatgcagtgctgagccaataccaacaagcaggccgcagtatcaaggatgtgggcgatttatttgaagctgtgctggcaggctctggccgcgtagccaggcatgtgctggataaaggcgcgatagaaggcattcaaactcgcgaccaggcactattgaccgaatgtcgtagtttgctctacggccaattacccgtgcgcttagctgaaatgggctatgccacagaattgctggcgctgaaaaacgaagatctggaacccatagccgctcattaccgcaaactgagcattgaccgcctacagtgccgacaagccctggagcaagccaaattccgccgcgataaagatgaatggtactaccctgcagtagatcaagcgctgaacttagatactttgctggataacctgcgtactttttcaattaaagaacaagccgcaagcggcgataaaggcgcggtattactacctctgtcaaaaggtgagtttaaatacttactcagcttgctgtatgaccacccagcgattgaattcgctgccgatgccttatggcacaagctagtgggtgaaactaccgaactggacgccagcgaagcaacgcatattggccccagtgtggcgatgttactgcgcctggatttgcgctatcgcagtgcccagcaaaactcactgatttttaaagatcccgccatgggcgacgctcatgaacaggcaatgagtgaacttagcaaacaaagtagccagaagccgctcatcaaggcattagcccgtgtaacgggctttgtgagattacttgataacaactggacctatgatgaaaacttgctgagtaataaagcgggcagcgacgatgcacctttggccattttaaccgagccccgtggccgccagggtggtttacttaccctggatggatttaagcttcacccagaaggtaaagccttgtttgcctgggtcagcaacctaattgagctgaacaatcttcacacctttgcggcaaaccacagccaccaaaatggtcgcacgccagtattagcgttaactgcttctgcacatctcatggagcaatacagccgactggatgaaagaaatgagttgcgtgatgcgatactgctgcattatgtcaacccaagcgaagcagaccagttagagcgtattggcttaagtttggcagcatgtcagttgcacggcgtgaatttaactgccgacagctttaccgcgaaattcaaaaacaagctgcatgccctgacaacctttgccacggatgccattcacaagtggcgccagcgtttgcagcagcgcggtttaattgcctggccgttaaaggtagatggtaaattatcaccgaatgaccgagacctgttgtttaaaggctggtatcagctggccattgctcaccctgagttaaatggcattctcgatttacagcagcaacacggcgtgccagtgaatgagctgagcagcttgttggataaacttaaggtgccgggcagctatattgccaaaggttacactgccgatgaacatgccgggctatttactgaacttaataatgtgcagcgaagccaggcgcagatcccattatttttagcccgtattgctcaccctaataaaaagcacaagtggcaattcgaaggctttaagcaacagttttatttcgcctatgtggctgaaacgagtgttaccgccaaaggcgtgtttaatgactggatgtggtggtgtggagagctgaacttactcactttaaccaatccaacagaaaaacaggcaatttgggagcactacccgcgctcccgcttagaaaatgccattagagaagcgcaaaactggttccgcggtaacgatatgggcagctatgcagccaatgtggaagtcatgagccgcgtgtatggttatgcacgcattaatgaaatgttcgcgccactgggtaaaaataagctgggtttcgtcaccgtggaagctaaagagcagctggaaaaagcacaatcgctatttaacgtgctcaaacagcaagaagaacaattggctgatatggtcgaggccaacgacacgaaagtattggcagggcttatccacaaacgcgctgaagtgctggagctggtagcaaaggttaaaccgcttaatagttccaggcctatgctaaaagatgcccatattctcagcttagaagacaaaacgacctcgctttatcaacggattgaacaggcctgtttatttgccgagtttgttgagtgcagcgctgagcgtatcaacaaccgactcgttgatttaatcatagatgttgaaacagagtgtgccccgctgacgaattttccgaaacgtctgtacaccaacacgctgcgcaccataggtcatattttagatggagcgttaaaagacgataccagcagtgccactggccgaaaagagcagcaagcagatagcgataccttactgcattacctgcgtaaactcgatttaggtagagcgcatgacaagctttcagccttagcgcaagaagtgggtttaaacctgcacaatgatcaacagttgccgatagcggagattcaggggcatattttgtccagctaccgcaactgcaaagaacgatttagtaagctggttaataacctcacagagcaaaaactacgtgcacagcaactgcaagaatggcttagtagcgccacggctgagtatcagttcgccgatgacattgcagagctaccaaaactggtaatgaaattacagctcattgaagatgctattgccgatctccccaacgatgccgagagcaagcgtcaaagtatgcaaaacagtttgcgcaatgggcagttttcatcgttacgggatttaccagaagagcttttaaaaccggcacgcggtcaacttacaccgattcaaggccagctacttaaaattgaagagcgtctaaaccaagtaagacgcaactccatcgcacaggtaaacagctggctgccgttattaaaaccgctattggcttctcaaaagcaagcggaaccagcagcgttgactctggaggatgtgagcaatttgggtgtcagagaacttcaacaggtgtgtgaaagcacccaggccaaatggcagagtcaaggtgagcaaatattaaatgatacaggcttaacactggcggattggcaaccgatttataaggctttgagccaaaatcaggaacccgtgttaacacctgagcaacagaaaggacttgtagacaaaggcattgtaaaaatgcgccttacctttgccactggtttgtag

SEQ ID NO: 17286 - DNA, 1287 bp, Escherichia coli
atggacagcattacaaccaggcaaaataacgaccccgtaaatagcgaagtggcacttgacctctgcctgcagctttggcagcaaggcggtttaatcgccagtaaagcagcgttgttactggcgactgtgcctgccctcaggtcactgctacaaccaataatactgccaaaaaagaacgacactgaaacggatatcgttagcgcctttagcctcactgcaccattgcttgacgcctttaacgatttaagccagtcaggtgaatggcaattagcgttgttgggcttaaacccagatgttcgccaacattggataaatttagccgccgctcgctgccaggaagcaggcacgatgggtgacacaatggtattggttaaactcattcagcaactgggcaatgccagtgaatgggtcttagcccagctggaaagcactgccaccacgccgcaaatcattgccggccctctggcacaaaccgaacgcgatttgctcggtcatagcctaaacgacaatgctgccattcccgcgctatgtcgtattttgcgcaccagctataccttgtttaccgtgagcgaacaaaatgaaccaccggcacctatacaagcggtggatgtcaccgcaaaacaactgacaaataactggtgtagtgggcggttgttagcactccctaataccttgcttgatgaacatgaccttaaacccaatgccgattggttattggtgtcccgctctggtcatgacaacgtgccgcttaccgagctattcgcccaacagccctggttatttttactcagtctcattatctttgtgcaagatgcctgggctgccgagcaacgtggcggtttgttgctcaccttacctgccgggcaaaatgcctttgcccccgatcaaataaatgtggcggtacagggcattgaaggtgatgaggtgagtctgggtagtttggccgagtttcttgtgcttctgctcggtgagctcaatatacccctctacccggcactcgatgcgaacatggaaagcatcaaccgcctaaaccgcgtcctgagctcattcattgccgaattgttggcaaaaaaaatctggcaatttaccgaggcgggtcgtggagaggccggccaatatcgaattcatacaagcttcagcgatgcctgttatagcctgccgttagcaccactatttggctacaaaagccaaacgttacaacggaccattaagcaactggcgcaaaactgctatgccaataaaaaacgcgccgccaatagaataaaccttcaaggatcgtcgttatga

SEQ ID NO: 17287 - DNA, 1560 bp, Escherichia coli
atgtacaaagtccgagttttacaagaaatcaatgaccgactcgatgctgaatactataacccggcagcattgagcacgttgaagaagatggaaaccaaaggtacggttactacttttggggacctggttgatgaaggctatcgagttgtttaccacggtgcagattctatttacggattaaaagattccgagacactcccgtttttatccccaacacaaattgatgccaatggttcaatcagtttcgaagatgctgaaaaacttccgctgtactacaaagataaatatccaaaaggattaggtaaagctggcgaagttttagtcgaagttaaaggcaacgtatcaaaagtgggtattatcccttcgacgttcccaaaaaatttgatgataagtggatctttgtataaagctactttggaccctaaaagagtcgactcacactacgtactcgcattcttaaaatcgaaacacgggcagatcctaaagaaccgcctaaccagcaacacaattattaactacattgctaaagaagcattgtattcaattcctgttattgagcttaaagaaaaggcccaaaaatacatcggggataaagttcgtcaagccgagcagttgcgcgcttgggcgaagcgttcagaaaagcgagcactggaactatttaataaacaagttgattggtcattcgaagtacttaaagcaggcaaaatcaataaagtattagtatccgaattgaatggccgcttagatttaaaatacaactcaccggcacgtttggctttgctccgtcacatcaagaataaaaaaattactaccactgaacttgttaggttggtcaacatttctgcaatgatcggctggaaagggcttacaaccgagtattacaccgacttcggtccatggttactacgaggtgtagagttccgcgatggtgttattgaatttgaaaaactagtaagcgttgaccgagacaaatacttagaacagccacagattcatttgaaagaaggcgatatagccttctcgaaagacggtacgataggtaaagctattgttatacctgaactagcaaacgatatggctgccgggtcaactatcgcacgtttaagactaaagaaggtgaacgaaataaacccttattatcttgagcttgtattaaatcatgactttgttcaagttcaagttgagagttttgctacgggaattgctcaacctcacattactcaagagtggattgctcaattaattatacctagaataaaatacgaacaagttatcggcgaatatttaagcattcatcacctagcaaattataattccaaaatactcatacaagcagctaaaactctagttgagtcattaatcgaaggccaactgactgagcaacaattaatccaggcccaacaagccctggaagatggcgacaacagcttagatcaggcgattttaagtaaactgagcgctgagggatatgccatagaaggcgccacaccgctatttagcgatgtggatgagttatacagtttgctggaagaggcggcgcaagcggaggctgaagagtaa

SEQ ID NO: 17288 - DNA, 2148 bp, Escherichia coli
atggcaaaagaagcaaaaaaacaagacccgcaacagcagctagaagtactgttcaataaactggtcaaacagcactccgagtttactcagccattggtcgaattacccgagcatgaattcgccaaggctggtctcattcaaggcctggttgaaggcaacttaacgccaccagtcatgttgattgcgctgacagaaggccattgggaatacgccgctgacactgcaaagtttgatgatttagcctatcagctgttaagtgatatcgaaggtgactggccagtatatgccgttgtggacgatggcttgaaccaacgtattttggccttgttcggtgccgatggttctgacggtacccacggtgcagataccctgccaggtctggaagaattacgtagctttgatcgcatggagcgtgatccaacctttcgctggtcgatgcgtgtttatacacgcttaatgcagcgatttgatgccttccatgaaaatgtttatcgcgttaccaaagacaaggtaaacgacaagaacgacattattgaggaagtggctaagcttctgtttttagaaactttccgcctgcatcacgatgaagaccttacctttaaagatgatgagggaaataccctgcgttttcgtgatgtctttgattggcaatatgtggagagccacggcgataaagccgttgcccaaatcaaagccgcctttgaggaatttaaaaatcacgaaaactacgttgtgatctcagatgatggctcacgtaaccccatctttagtaaagaaacacacctgcgactgtctgttgcgaaaaactatcaggatttgctggaagcaatacaaaacctgggtccggtaaaaaccaacgacggtaaaatcgctaaagaacacggcacgttggctgatgtgtcaggagatttactcggcagagtgtttgatgtattcctacgcgctaactttgaatccaaaggtggccttggcgtttatttaacaccaaacccagtaaaacaggccatgcttgaaattgctatgcacgacatcgacgatgacgatgaaatgcgatcgcgcttagccaatggcgattttcgtttctgcgaccccacctgtggctcctttggttttggctcggtggcgttaagccagattgataaatggatcgattttaagctggtgctggccgacgataaaaaagaatcattgaaacaaaaattacgcgactgtgcatttaccggtgccgatgctgcaccacgcatggtaatgctggcccgcgtgaatatggcattgcaaggtgcccccaaagcgcagattttttataccgacaactcactcactactaacgctctgaagccgaatagctttgacctgatttgcaccaacccgccgttcggtacgcctaaatttgataaaggcaaaaatggtcaaaactcaaaagccaattacgaagccaatatggagcaagtgctcggtggttttcgtccgaccaaaaaagtcgttgatagctacaacgcctggtatgaccacgtaaaaatgaagtgggaggatatcggtgatttagagctggatgaaaacggcgagcctaaatgggcgggctatcgtaccgatttgcgcagaacgggcgggactgataaaaagccgttttacagcctgcagcctacaaccgcagggctcgcgctgggcagcaagcccgatagcaagggcaactggcaaccggtaggtgccactattgacccagcagtactttttatcgaccgctgcctgcaactgcttaaacccggtggccgcctgttaatagtgctgcctgatggtattttatgtaactccggcgaccgttatgtccgcgagtacatcatggggaaaaaagacgaaaaaaccggcgagtttgttggcggtaaagccattgtaaaagcagtaatttcattgccgagcgactgctttaagctctctggcacgggcgccaaaacctcgattttgtatttacaaaaacgccatgctaaccccaaccagccagagcaatttttgcccgagccacaaaccgacgtgtttatggcagtggctgaaaccttgggttatgtggtgaaaaacaatatcgaagactataacgccggtgtcgctaacgatctggataagattgtctcggcttataagcggggtgaatag

SEQ ID NO: 17289 - DNA, 387 bp, Escherichia coli
atgacccatgaataccagcgacaaagcctggaacaactaataactcagcaaacagcaactcccagaagcgccgccgttgtatttaatgagaaccaaaccctctggcaaacacttggctttagccagtctcaagtttcgctatggcttgcctcattgcctcaaagtaatcatctaaaagggcccacaacggcaacgtaccaggttatacctgatatcgcggcacatttggtatcattgttgcatcaagctggtgggcgcatgccccttgcacaagtactgaaaaagctccctgctggtattacgaccagtgaacagcagatacgcaaactggcacagaagcacgcgcagatagagattaaaggccccttgctggtactgataaattag

SEQ ID NO: 17290 - DNA, 1398 bp, Escherichia coli
atggggaataagtggaaaacatcttttttaacagatcattacatcattagttctggcctttccaaacccgctaaagattttggtacagggtatccattcttatcttttaaagatattttttataattactttctacctgattcactgacgcagttagtacaaagcacagaaaaagaaagagtgacttgctcagtaaaacgcggagatgtttttcttacccgtacaagcgaaactatgcatgaattaggcatgagttctgtagctttaaaagattatgcaaatgctactttcaatggtttttgcaaaagattgcgcccaaaagaaaaatctgaattagaaccagaatatgtcggatattatttacgcagccctttatttagacagaatatgcttgcgttttcaacaatgtcaacaagagctagtcttaacaatgaaatgataagtcggctggaaataagttatcctgatcgtaatatacaaaaaaagatagcaaacattttgctatctctggataaaaaaacagcaatattaaaaaccattaaccaaaccctggaagaaatgtcacaaaccctgttcaaatcctggtttgtggattttgatccggtgattgataacgctctggatgcaggaaatccaatcccggaggctctgcaatctcgtgccgagttgcgtcaaaaagtacgtaatagtacagatttcaaaccacttccgacggaaatccgctcgcttttcccaagtgaatttgaagaaacggagttaggttgggtaccgaaggactggctaccccaatcaatgcacgaactcgtcgagagcgtctcaataacatatccattaaaaaaatcagataaagttgtttttctaaacactggtgacatcgaaaaaggggtgttcttacacaatagttactcctgtacaaaagggttgccgggacaagctaaaaaatcgattaaaaaaggtgatatactatttagtgaaattagacccgaaaataaaaggtatgctttcgtttattttgagtctgaagattatgtagtttctacgaaactaatggtattacgagccaaaaatggagtaaatcctttactaccatattttattctcacactcgaaaataacatcaaaaaattacagcgcattgccgaattgaggtctggtacttttccgcaaatcacattcagagaactagaattcattactttcactatgccaaacaaccatctaattatggacttgtttattaaaaactgtctttcgccaaattataataagatggttggaataagagagatgaataaaaatctaaccgccctccgcgacaccctgctcccgaaactcatctccggcgagctatccctggaagatcttccggatctcaccaccaatacagaagctgcataa

SEQ ID NO: 17291 - DNA, 282 bp, Escherichia coli
atgaatgatattgttaaactgattgatatgatagaaaaaagaccagctttatatttaagcaggcataccatatcggcgttaaaagctttcctggatggatggcaaatgagagagccaaaagaaatcgtcaatattgagatattaataaggcttcaatcttatattgaagactattatggagtaacaggacattcatgggataaaattattttattgttctcacaagatgaacatgatgcactaaatactttttttatcagatataatgaaataaaaaaataa

SEQ ID NO: 17292 - DNA, 654 bp, Escherichia coli
atgaactcaagtagcatttgcgcagcaattagaaaaatcacatctcatctgatatcagtgggtatcagtgacgcacaaaactatcctgtaataacacgggataaagaatattattatgtcagctatagcggattcgctgatacttcaattgcattaagaaatattgagtatgttgatatctataacttcttggacgaaaaaaggcaatataatatcaaattattagatggtgggttactccatcttttatttcagtttgatcgtcgaatgaaacttgtaaaagaaagactatgttatttccccgcgcctaattacgaatcattccagaatgaccctgagttatatttagacgaaagcaacttttatgctgacattgtccaaaaatcaattttacccgttcctatacgagtggattatgcccctgatgacgctaatgatgttattcatccagcagcacacctaaccctaggtcagtttaaaaattgccggataccattgtcgtcaccattatgtccggtaacgtttgtgaaatttattttaagctctttttataatactgcttatcatgattttggttttgaaatggaacggttagttcatcccaacaccattacaccgagagagagaggaatgttacatttttcaattgagtaa

SEQ ID NO: 17293 - DNA, 2097 bp, Escherichia coli
atgattgaaatattgggaatgaaacctcagaatcatactgtttctgatattctagaaaattcaataagaaagataaatgatataactggatattattatcgcggttttcctgttatttttctgagcgaaaacaatgttactcttgatggtctaatttgctcatcaaagcatggtgttgtcattttccatttcaatgaggaaagagagttaacccaagatgatattgatatcattgacgaaatgcacatgaaattcgtcgcaaaactttctgaagtaaaagcactgactaaaaacagaatattaaacgtacctgtgaacagtattgttttcgcaccaaactgtataaatattgatgattttgattgtgacagtggtttaagcattagttccaatgttgatgaaatattatctattctcaatgacattacctgggatgatggttcccttcttgaaactttactatcccatgttcaatcactttcaaaattgaagcccaagagaaaaagaagctatgtcagacagattgactcaaagggtagcgtactaaaaaaattggagaattcacttgccactcttgattctagtcaaacgactgccgtcttggtcaatattgataatgtccaaaggattcgtgggcttgctggctcaggtaagactattgttctcgctcgaaaaattgcacatatacactcacaaaatcctcactggaaaatagcagttactttcaatagtcgctctctcaaagagcaactaaaacatttagtctcagcattcgcagatgataatggaattgattgggataacgtagacattattcatgcctggggcggctctaaaacagaaggtttatattacaacgcatgtgtggcacataatataccttattacgattataacggcgcacgtcgtcttgcagaatttaatgaaacaccttttcaggctgcctgtaagaacttcctcgataataaaaaagaagataagaaattatatgatttcatccttattgatgaggctcaagatttttcaattgagtttctccgcatatgttattctttgctaggggaaaagaaacgattagtttacgcttatgatgaattacaaaatcttggggattcatccatgccttctcctgaacaaatttggggagtagacgagcatggaaaaccaattgttagtttcaccagtgaagaacaagatataactttagacatttgttatcgaaatccaggcccaatcttaaccacggctcatgctttagggtttggtatttatcataaaccaataattcagatgtttgattttgaaggattatggacagagattggttatgaaaaaatagatggtgaattagttgagggaaaggaggttatattatcaaggacaacgaaatctagcccatccctattgagtgcacataactcaattgatgagatgatccagtttgttaaatttgaagacaagcattctcaatctaattggattgcgcaggaaatatttaaaaatattcatgaggaagagatattacctagcgacattgttgtaattcacccagatacaatacgtatgagaaatgaagtaggttatctgcgtgaccttttattccaaaacggaattaatacatctatagctggaattacaagctctcctgatgagtttttctcagacaatagtgtaacatttacatccatattcagagcaaagggaaacgaagcagctatggtatacatcatggatgctcattattgcaacgtggattatgaactggcaaagcgtagaaatatcctttttactgcaatgacaagaactaaagcatggcttcgtgtatgtggtgtgggttcttcctttgatggcctgattaacgaatacaatgaggtgaaacaaagaggatttaaactggaatttacatacccaacagaagcagagcgtaaaaaaatgcgactggtgaacagggatatgacttctcaagagagaaaaagagtacaccaagctaaattgaacgcccataatctcatggttctattggatggacaagttagagttgaagatataccagaagaattacgccttgctttaattaagcaactgaagggtgaatga

SEQ ID NO: 17294 - DNA, 1191 bp, Escherichia coli
atggctctaaccgatatacaaatcaaacgcgcaaaaccacaagacaaaccatatacaatgaatgatgggcacggtttgtcactactcatcaagccagacggttcaaagggctggcgcttccgctttcgtttcgccggtaaagcacggctaatgtcatttggtagttacgaacttgttagcctcgcagaagcacgagagaaacgtgatactgcacgtaagcaggtagcaaacggcatagacccagtagaagaacggaaggctcagaaacttgctcaaaaattatcaactgaaaattcttttgagtcagttagcagagaatggcatgcagcaaaagcagatcgctggactatcgcttatcgggaggaaattattaaaacattcgaacaggatgtttttcctttcattggtaaacgcccaatatctgaaattaagccattagaactgcttgaagtacttaagcgcatcgaaaaacgtggagcgttggagaaaaccagaaaagttcgccaacgatgtggagaagtgtttcgctacgcgatcatcactggccgtgctgaatacaatccggcgcctgatttagcaatcgctttggctattcccaagcaaaagcatcatccgtttttatccgcggaagagctacctcattttgttagagatctagagtcatatactggaagtattattaccaaaaacgcaaccaagatcctaatgatgacaggagtcaggacgcaggaaatgcgttttgcaacttggagtgaaattgatttgataaaaggtatctgggaaatacctgctgaacggatgaaaatgcgtcggccacatatagtacctttatcatctcaggtaattgaactgtttaaacaactacaaccgataacatcggactatccctatgtttttattggcagaaatgatcgtagaaaaccgataagcaaagaaagtgtaaaccaagttattgaatcattaggttataagggaagaactactggtcatggttttaggcatacactatcgacaattcttcatgaaatgggatttgagagcgcatggattgagattcagctcgcacatgttgataagaatactatccgaggcacatataatcatgctttgtatcttgataaaagaaaatatatgatgcaaaaatactcggattttttgatgaatttatctaccggagttcaaaatgattga

SEQ ID NO: 17295 - DNA, 933 bp, Escherichia coli
atgcactatctggggttggatattggtgggaccaaaatcgccgccgtcgtcatggatgcgcatggctgggagattcgccgttaccgctgcccgacgcaaaagtcgacatatcaacaatttgtctcatgcgttgtggcgcttatcgagcagattaggcgggacgttcaacgaccgatgctgacaggggtcgccttacccggcagtatctcgccactcactggcctgattaaaaacgcgaatattcaggtgattaacggtcatgcgttacaggctgatttgcagcaattgcttgggcaaccggtggtgatagccaatgatggtaactgtttcgcgctatcagaagcttgcgacggtgccgggcaagattatgacgtagtatttggtattacgcttggtacaggctgcggcggtggcattgccatcaagcaacgaccgtttataggggcctggggaaatgctgccaaatgcggtcatatcacgttgccaggctatatggagcaggaagatggtccatcagtcagttgctattgcggcaaacacaactgcgtggagtcgtttgtttccggcagcggttttagtgaacgctatcaacagatgactggtaacttgctcactcctgcggcgattgtcaccctggcacaacgtggtgatgtttgtgccatgcagcaggtggcacgttttcgccaacagcttgcccgcacgctggcaaccatcgttaacgttgttgaccctggcgtgattgtcatcggcggcgggctttcgaatgtggaactgcttatcaccgatctgaacgcagaagtcgctccactggttttcaccgatcaattcaccactcccattgtaaaagcacagcacggcgacagtagcggaatgcgtggcgctgcctggcttgctatgcgcaacggagaagccaatgaaacgttcacaaattaa

SEQ ID NO: 17296 - DNA, 867 bp, Escherichia coli
atgaaaaagcgtcggaaggaaccggaaacgctacgtgaacactgtcgccatatttttggtgacgagccgccagtgctctgtgtatgggaaacggaatttgattacgcagatgccgaactcaaggcgctggcggctaaagagtggcaacagataggcgaatgggatttgagtgcttactatgtactcaatctcgtttataacgaaccgatgcaaatagagctgtttcgctatctgtttccgctatgcctggcgcaatggcatgaaaccgttttagctggcggttatggtgatcacttcgaagaatccttaatgaaggcattgcgtcggccctatctctggcaggagatgatgaatgcttcccaacgccagcaggtacggcaatttttactggaaaccgcgttgcagcgtatggataacgagcgtggtttcaataatgttctttgctggctggcggtgttcaatactctgggcggggccgcgccgttaattcattctctctggtcacgctggtgggtgctggatacgccgggaaaagcggtgtgtgctattcagtatgccgcgcatctaatttatcccatagaagccaatccgttatggtcgcaagaatggttaggctgggggcatccattaggtcataaagatggctggtcctctgagaatcgcgcttttcttcgccaaatgttaacacctgaaatgattgtggctggcgtacaggcagcggctgaaattctgcgtggtgaaccggaaggcgcaatggcggcgcgaattgcgcaggatgcgtatgaggcagtggatatcatcactatccagattgaagatttactgcgtgacttgtcttgtgatgagtctggtcatgcgttggagtag

SEQ ID NO: 17297 - DNA, 1119 bp, Escherichia coli
atgagcctgccttttttacgcacgctgcaaggcgatcgtttttttcagttattaattcttgttggtatcggattaagctttttcgtgccttttgcaccgaaatcctggcctgctgctatcgactggcacaccatcatcaccttaagcggcctgatgctgctgaccaaaggtgtggagttaagcggttattttgatgtgctggggcgcaaaatggtgcgtcgctttgctacggagcgtcggctggcgatgtttatggtgctggcggcggcgctgctttctacctttctgaccaacgatgtcgcgctgtttattgttgttccgctgactatcacgctaaaaagactgtgtgagatcccggttaatcggctgattatttttgaagcgctggcagtcaacgctggttcgctactgacgccaattggcaacccgcaaaatattcttatctggggacgttctggtctttcgtttgccggatttattgcccaaatggcaccgctggctggcgcaatgatgctgacactcctgctgttgtgctggtgttgtttccctggaaaggcgctgcaataccatacgggggcgcaaacgccggagtggaaaccgcggctggtgtggagttgtctggggctgtatatcgtttttctgacggcgctggagttaaaacaagagctgtggggactggtgattgtggcggtgggctttgtgctgctggcacgtcgcgtggtgctcagtgtggactggacgctgctgctggtgtttatggcgatgtttatcgacgtccatttactgacccagcttccagcgttgcaaggtgtgttgggtaacgtgagtcatttatctgaacccgggttatggttaacggcaatcggtttatcgcaggtgatcagtaacgtgccgagtaccattttgctgctcaattatgtaccgccgtctttattaatggcatgggcggtaaacgtggggggctttggtttattacccggatcgctggcaaatttgattgcgttacggatggcgaacgatcgccgtatctggtggcgtttccatctctattcaataccgatgctgttgtgggcggcgctggtgggatacgttttgttggttatgatcccggcctggtag

SEQ ID NO: 17298 - DNA, 2229 bp, Escherichia coli
atgacggtttctgtaattccgcagtacaaacctttaatcgcagaatttaaagacatcgataaactttcctctgcggactttgaaattttcgttcgcgatttgtttgtcgcatcgggatggaccgatgccgaaattacccaaacaggcaaagaattcaaacacggtgatggtggggtcgatattttcgcctggaaagggaggcgaaagtttgctattgaggtgaaacagcgccaactgggtacgacagtagatgtgaaggctcttaatcaactagttaccggcgccacgctggcaaatgttacctataaaattttagttaccaactcttggtttacctctgaagttaaggcgcgggcgttacgacttggcgttgagttgatagaccgggatgagttgcaaaatctgtgggtcattaagcattccgagattggccgtgacattaagccgcgaacttatcagcaggacgtgattaacgaagcccttgcacttcatgcggcaggaaagtcaaaacttctgattgaaatggcgacgggattaggcaaaacctataccgttgcccacttaattaagcgcttaatccaacaaaatagccgcaggccaagagtgctatttctggcacatcaggtcgagattttactgcaatctgttaccgcatttaaaaacgttttgggtattggtaactacagtttttctgcctgtttcggcggcacacatcccgaagagactgatttcgtctttgcgtcatttgatacgctctatagcaaactcgatgagctatctgcaggagcatttgattacgtcattgtcgatgaagcccatcatacgctggcaaaaacctattctgcggtggtgtcgcttttccagccgcaactcctgattggcctaaccgcgaccccgtaccggacggataatcgcgatgtagtgagtttctttggtggcgccgatgggcatatcggtaaattcgatctggtttgggcactcaaaaataaaaaactggcattccccaaatatcttgtcctgcttgacgatctggatcaggataagatcgaccagcttgagagcggtctttctctatccgatatcgataaactgctttttttgcataaaaaagatcatgagattgtccggctcatcaacaaaacagtgaccgagcaggggatagaggacgtaaaagggatcatcttttgccggaatatccagcatatgaatcatcttattgcgttctttgagcctggcacggccacccttgtgcactcaaaaatgtatgatcaggaacgacgagaaaatattcgattgttcagggaaggggattataaatacattttggtgtgcgacctgttcaatgaaggtattgatattccagaaaccaacctgttgatctttatgcggtatacagggtcacgtacaatctggttacagcagttaggacgtgggttgcgcaaaacgccaaataaagagtttgttcatgtcttagattttgttggatcccttgagcggttgaatgagattaagagcctagcaaaagagattgaacagcagccaaggtatcacgacagcactattgatgatccggaggagatggacgcgcccgaggtttatcatgacacttcgctggaggtgcaattcagcgcagaggcggcgaaagtactggctctgctggaagagatgaaaatgcagcttaatagccgcgatgtactgctggataagttgcgccgatatcgcgaaaaaaatgacgagttgccctccattgcagaactcgaacaagagttagatgacgttagccttgatcaaattgccacccatttcggctcttatttgagctacctgacagccgcattcaatgaagacgtagatattccttccatgcgcacgagactgattgaatttctcgatacctttgtcgggaagaacaatatggcaccaagtttttacacgatttcactgaatttcggcgtgaacccgttgtacgaattcagcgaaaaagagattcaacagcttctgccagattacgacaaccttgtcagtgccagaattaaggtgacagccccgcaggacgtgagtgatatgccggtgaaggaagtggaagtttgcccgtggatcgaaacgtaccggggacagcctttgaaccttgtcagatttaagcaattaccgtcggatgtgcaggaacagattaaaaacaaatatcaatcggcattcgtgtttctcaaaaagctaaaagacgcgctttaa

SEQ ID NO: 17299 - DNA, 2451 bp, Escherichia coli
atggaaaaaattgacatcgttgcagatcaacttcagctcgaccgagctctcaatcaactcatccataacctggtcgaagaaagtcagctcacgctcggagaaacgctcagtgcctgggagctctgtgaaaaactcagcatgcagcaattcatggcattgaagaaaaatgtctattttgcggatttgctgcgagcagtagagatttcgctctccctcaggcagacgcttcacgtagatggcgcggaaatcaggcaggttgaaactgagtttgaggaaaagcccgaggtagcgcgtgatgaaccggtgatggaatgcctgcggatccccgccttatccacctcgctggagacgattcaattgcctgaacgatttatgaaattaatcaagcgattgaaaaacattcaactgataaacccaaattttgtgcctggtgaaaccttcggagaactcatcacgttgtcagtcaacgagctggctgaacagcctggcgtcggtgtgctgtatattgatacttttaaagaattgcaacagttggctcagtctgcacctgccgttgaggctatagacacagctaatatgggcattgatttcgcgaaggtggatatcagccagatgcggttgagccttgcgggcgtggaaaccaaacatacgaaagcgctggaaaaatttggtcgctatcttaaaacggaagatatgggcgagatgttgcaggctattctgcatgccgaatatgagcaattagtagccattccgacctggggaaaaggaagtatcacaaagttattggcattcagagacaggttacgagaagagatcatcgctattcagaatggtgacattgactacctagcgcttgaatccgtcttgatcgttccaaaacggcttataaactgcccattgaataaacttgaagccgttttactggaagatatcgaatcttacttcgataaaagcagtgaaatgaaggtcgacattgcccaacgccgctgggggtttgtcgaagaaaaaaagaccctcgaagagatcggggccgattacgtcgtatcgagagagcgcattcgccagattcaggccgatataagacaggaatttctagggcatatgcggatcagtcaaccattggtttgggaggcactggagcctgagatatcgccggaccttagtgtgagaatgcagacgcttttttcctgtttctcctctgaacgtgacttcttcgaatttctggatatggtgtcagggcagacagagcttatcgctcatgtctatcccgagattgataaagcgatcctgaatacctactttgccgagaatggcgcaccaatccaccttgacgacatccgggagtttattccctccgtctgcagcatcgaaataccctacgttgacaatgcgattcgtcatcttgcgcaacaaggcgtcatccagcttaaagatgagaacgtctaccccctgcaactgaagaaagctgaagccagcgcctgcgtgctgattaaacacgaaaaaggtctgccctggctggatattgcaaaattaatcaatggaaataattattcgcgcagccctgtttacgaggaccgtctggatcacgaagcgtttaaccagcctgaatatatctacctgtccggcaagggtacctacaagcacacctgttttatcgatgtcgatgcggcgctgatagacgacatttttctggaaatgatggaatacgccgagaaaaattcccgtccggtgttccacctgaatgagttttaccaagcctcgcgcaatctaaaaaagcatgattactatgtcattcgccattttgtgaaacatttcggcgaggattacggtttttacttcgacggaaaatctcagacggattcgatcgggctggagaaaggctttaagaacatcacacaaaaggacgtcatcgtcgaagcgatgaacaacagtgataaaccgctaacgaaacctgaaattgccaatttgctgaagagtaaaagcctagcacatgcgtcgttttatctggatgacctgattgagcggggaagtgttgttcaagtggaccacatgctctacaccacacctgcctgcgcctataaaaatatcgtcatcgacgactatgtcgcggcccttcatgcattgcttctgcattttggaaagccagtagagccctccatttttaaagcacaactgaacatgcaatttgagcgaagctactcgaaatatttctatgcttctcttgcccggttaaatgccaaagcacagggctggcaccgtaaacatagcctatattcggccacagagattccttttagcaatatatcatcggcaatggacatgctctgcgattctggggctcccttgcagcagaatattgatgccctgcaggcaaatatcgccattacacgtgaaacggctgcgattgccattcgaaactggcgcacagcacgatctatggtcaacggctaa

SEQ ID NO: 17300 - DNA, 2202 bp, Escherichia coli
gtggctgttctaacgatcaggggcgtcagaagttacggtgctgacaaagatgtgcgtatcgacctgagcaataaggttacgctcatttatggccagaatggttctggaaaatcaacaatatcaaactatttttctggctattatccggaaaagtaccttcagtgtcattttgaaagtcaggtggaattatttccgcttgtctttaatcaggattatatcgaaagaaaatttagtcttgagaatgttcagccaggtatattcacacttagtgaacacaacaaagatattcaggaaaaagttgatgataataggaaaaagatcacccggttagatacaaagataagtgaacttaacactgaaatcgcagggcgggcgaaaatggagttgaccctaataaataactgcgccgtcagaatgttcaaaagaacatctactgaacggtcccgattctcgtcttttcttaccggagcgaagcagcagagaaatttttatgatcgaataaaagatattccccttgaagtcacagaacttaacatggaggaactttctgctcgtctaaaaaacttggagaaaagtaaaggaacaagtttaccttatatcagctttacccttccaccaccgctaaatcctgctgtgcttcagctcatccattcaccgcttcagcccgcgtcaggtacacaatttgccggatttattgcaaatctgggaaatgccgactgggtcagagaggggactcgatatattcgtgacgatgtctgccctttttgtcagaacacgtttgatacagcccattttgccgaagaaatggcgagaatgtatgacaaaagctacaccgacgcgattaacgtaataaaaaaggcggcaggagatgtagcggaaaatattgactatctcaatgacctctcggagagacttttcagacatcctgcggtaaacgaaggtgcagaggtttttgtctccctcaagttacttattcagatcagtcagtcacaccaccagacaatcgtcaacaaactccaaagaccttctgagatatacgatgtagctgatatttctgaagcgagcaacagcctcatcagtagtatagaaaagataaataataccgtttctgcgaacaaccaactggctgataactacgatgccgaaatggcgagattaaaggccgatgttgatatgtatctgcgccagatttgcgacgagtatcttgtggcactcacagctgaacttcaggaagtcagggctcagaaaacaaaagccgagcaacaggcctcagctcttttgactgaaagaaggcaactcggggatcaaacgtcccggcttgtaggacaactttcagtcattcaaccaaccatcgattccatcaatattaatctgaaagcgttgggcgtaactgacttccacatctgctgccataacgaggagatgaaactttaccggcttagacgggtaagcgatccaggggaacaggatgtattcagaacgctgagtgaaggtgaaaaaactattattgcgttgctctattttatcgaatcctgcaccggcagtgtcacgcctgatgccgtccacgatggccggaagataatagttattgatgatccgatatccagcctctcacataattacatttatgaagtagcctcgctgatcaaacggaaaattattaaacctgagacagcccgccatctggtaatcctcacgcataacctctttttcttccaggaaattttgctgacggccgtgagaaggctggagagtaaacttgatgcccctaaaggatggtcactgctgcgtattatcaagaatgagcacagtgactgtatccctttatccatgcacgaaatgcttaatgagtatcaggctctctggcagacgctcaaagacgtgcgggacaacaagagtcaggttattgtgctgcctaatacgatgaggaatattctcgaatactacttcagctttgcttgcaaagaagagaagctggaaaaaacgcttgccgctctggcttcagagcacgccgaaggccgttatgattcgttctatcgggcaataaacagacattctcattcagatggccggaacatactatctacaggcattatggataaaagcgaatatttcaggcttttcagaaagatatttgaagaaatggacgaactgactcattactgctcaatgatggacgaaaaactggatgaagtgatttaa

SEQ ID NO: 17301 - DNA, 231 bp, Escherichia coli
atgaccgacatgtcggataaacggggttcgtactcttccctgtttcgtgtttcccgcactttccgttttccgctaaagtcggcacttgcaaatagcactaacttatcggactgctgtgggatttttgctgtgtcaaaaacgcaggaagattatgacacttggtgccattttttgtatgatagccacgtcatcacctcgggcgttcccctctggatcattaccagcctgtaa

SEQ ID NO: 17302 - DNA, 741 bp, Escherichia coli
atgtctgttcataaaatttcggctagatttttcgcgagcctgaatgttgaatggccatgcccagcatgtgcccagaaaacactggttattgataaagagactttccacgctaagtcactgctggaaagtcgacaaattcagaatgaggattggtttgaacctgaaatggatgagaaggttttcagctgtatggcacactgttcacgggcaaactgtaatgaagtggttgtctgcattggtaagggaggctgggaggaggaatgggacgatgaaatgagtaatcgagactatgttgcctggtataaaccgatgagctttactcccaccttacatccatttgcacttcccgaaaaatgtcccgatgagattaccgctcctctaacggcttctttttccgtctatctcagccagccaggatctgcggccaatttgatcagaatagctgttgagagaatgctgacggcgattgatattcctgaacatgacgatagacagaaacgcattaatcttcatcaacgtattgaacttctcgacgggcaatataccccctataagaacacgctgatggccattaaattcctgggtaacgccggcagtcatacctatgatgaagtgaccaccggcgatatcgaagcggcattcgagataatggagtatgtcgtgaatgacctcttttccgggcgtaaggagtcgattgacgttctcaccagacgactacatcgcaagttcggaaaccagtaa

SEQ ID NO: 17303 - DNA, 450 bp, Escherichia coli
atgaatagtagagtaaccaaccctgagtcgtacatattttctgcaatcatctatattggcaaagataactttaccagtaacgaagtagcgaaaattcttatcgagcgattttcacttccgaaaaattatttaaaggcaaaagcttttgcttataaccaaattcaaagtctggttagaaaaggattgttaaataaagtaaggaaattaggtgcgtatcaatatttatactcagccacatctgaattcaatgtcgtaaaggaaagcgtagagttaattgaggcaccacaaaataaaccctgtcaaattatttcaagtactgccagctatgaacatggcaatgtagacattcaaataagatctcttattgaaaaatacagcagtgagttggaaaaagtattaggcgcaaaggagatttatgaggaattgataattgccgtaccgagcaggtaa

SEQ ID NO: 17304 - DNA, 216 bp, Escherichia coli
atgaatcactatgagaaagggcgccatgtccccgacattgatacgcttcgaaggatggcggcagagttaaacgtgccgttgaactactttttttgtgatgatcagacaacagcagaacttgcattactcatatcacggatgacagaggaagagcgaagtaatcttatcgaagcactcaaaaagcatccaggcgaaaagcatgctgacaaaaaatga

SEQ ID NO: 17305 - DNA, 429 bp, Escherichia coli
atgcgcggcaaggaactgaacacactgattgagcacgaattacaactgatgctggttgaaggctttgacaagtcccctatttccgctaaggccctgcatattaggctcaaggcaaaaggtatcgttaacggtggtttaagtacgctgagcagcctagagcgtaaacgcctaattgctgcctatattgatcagcaacttggcccattgaatctacgcccaaaagaaaaacagcaatacgtcaaccgcaaaacccgtcaggctttgctggccagaaaccagcagttgcaagctgaagtaagtgaattgcgagaccaattagcgcaaaataccctttcgttgatagaaattgtcaaagcggtaaaaatcaattcggttataccggtggaaagcctgttggccaaccatatgattcgggaactacataagtag

SEQ ID NO: 17306 - DNA, 2367 bp, Escherichia coli
atgaaaaatcactttgagcattttcaggcttttattgaagagcaaaaaaaatggttcgaacagcacctgtctgctgattttgcccaaacatggaatgatcatatctgggtaagtggtaaccagggaagtggatggttgcgagggaacggcagaaatacattacgttttgatgagatgaacagattcaaaggtattgtagaacatctgcccatcgacaaagaatatagtcagttcatgaaagctatgctggtagtggtttaccgacagggaaataggaatatgtcgccagcggtggcaaaggcaactttaatgattctgaaacgatggtaccatgcgatgctttatgagacaggacagacccatccatcttacctgagcacagttgtcattcaacgagcgatggatcttctcagtagcgtttcatctcctggtgatcccaatacagctaactataaagggcggtgcgttagccttcaaaaattggtcaatcacttcacatttacgttggttaaactgcaatacaactctgatgtgaagtataccaacaaaaccaacctgacccgcaaagcccgggaaaccatggctctgaaacagcaggccaagctgtctgataccactaccgatggtgaagatgcgttgattaccattcgcggatttctgaacatagttgcattaatccagcgggtggaaagtgatgctgagaaaatcgcgttaaattgcctattgttattggttattaccggctttcgctccattgaagcgtttaatctcagacaggatgccctatttaaacgccagattgatgatccggcaatctgtaaacgatttcaggacaagggattacccgattattttcttggtatccgttatgttggtgtcaaaggtgctggggagcgaacgcattgggtagaaccgctggcagtaccgctggtcgagagtatattcagtaccgttaaaatgttgaccgcaccaatacgcagacatcttacctatctacgggtaaagtcttttgatgattacctgccacaggccatcagcaacatgcccggtgaacgagtcgaactggatgatgtggtgaaatacatcacccaaactacctcaagtttacggggccgggcaggacaacgggacaaaacatccaaagcccttagcaaaagaggtgtgctgcccgttcaagaaataccaggcccgaaaaacagcaaatctatctattattccaagactgatctcaatcattacattaagaccgaatttggcctggcgaatgccaacgaaccctgtacacacgcctggatggaaaatggcaaacgctaccaagttaactacgaggacctgctatttctacacgagaagggttcgctggcattaaagcgcacactggctttgcttgctacaccgatacccttcactaacacacttatgaataaattcttaggcaacgttgaacctgatggatcagtattcagcaaatatcaattactggaggaggatggcacctcgacgcggatgcgtacccacattccccggcacaacatcaatacctttcttgctattgcggatatctctgaccacttacaggcaatgttgatgggtcgagtggacatcacgcagaatcagtattatcaacatctggcgcttgcagaacggcgaaaagccgcctcgttggtgcccttgcagccaatatcgacagcactaattgccgcgccctcttcgtcctccattgctacgcctctggaaatcgtcaaacggaccggccaactggcggtcacggaacacatgactttggacaataccatcaaagccaacctgcatacttttgacgatcgggatgatatagccaggtttgtcgaggcgtcatttgctaacggcctctttgaagatgttgctgccgcctttgaagaaatccgcgacgcagaaggaccagagcaagcctctgccatggtggcaagacatgccgtgctgtatccgctgaaatttggctcctgtatgcgggaagttaacctctggggatgtccttatcgactgaaatgccagagtgctgccttttgtgaacatttcacgctgacaggccggatagatgagctaccaaatctgattgccaagaaacaggctttacagcaagcacattcgaagttgacccaacttactcaacatcagcctgattaccagaccagactggccgacatcgaacgacggttacagcaactcgaggcaatacaagcacaatggcatcgtcgtgccaagactcaacaactggttgctgcggagagtgtgttgtctggtggagtaatcaccgagggcaaagtccgtacactggcccagctttttgcacttgaataccaacaattgatgcaggagaaagactga

SEQ ID NO: 17307 - DNA, 1566 bp, Escherichia coli
atgacatcatttgatcatgcattaaaatctgacgaagggaactcagtttaccctcctgatttagctcaggctatctttgaactcgatattcctgaccgaatttatctaaaaacggcaatggagtttgatgataaatatattgttagcaaaggagataaatgggctttcgattattcaggcagtcggcgatatcttgttttcaatcaagatcatatctcaaataaattaaacaagtatatttgtttcaaatatgcatcgacgagatttccaaccaaacttccagcgttgcaccttgattggaggaatatcatttcatattgtcgagaacatggtggattttcgcttgctacgctccgattatttatcgaaaaagaagatgttgataatgctactttttattccgtgttattcggattaaaaatactttgtgctgaaacattcccaggtttcaatcttgaagattacgatgatcttgagttcgtccctcgaccgtatctcgaacattgggggatttaccaagaaatcgataatattcttgaccctcttgaaaaaaacatgatttgcaatggactgtttgaaatggcttcgttgttacgcgatggcaaaagtttcagtcacagcgaagtgcgaaatgcagctatccttgggttggcttatgtaacgggtgcacgcccagttcaactcgctaggctggcggtcaaagatgttcgtatcgatacacgaaatcaggaatctggtctgattcgatacagtgtttttttaccatatgctaaacaaagacgagtgacgacagagcggttatttctggcgatcccctcagaaattggggagttaattatgaactataccgtgagatacaagaaaaaccccgaagataaactattcgatttcagcgtttcagctccgcattatgtgtctcaggcaattaatcaggcaatcctaaatttctgtcctcctgaatatcaagccgccgtagcatgtggcgaagctgcattgcccacaattacacccactgatttacgccacaatgttgggcactctttggcgatgcaaggtgctagcgctgaagagatagcacatgtactggggcacacctctcttgccgtagctaaatactacattatggcaactcccgccttggccttgatccgtgctaaagcgcttggggcgaatcccgtttggcaaaatatggtggctatgatgctcactggtgaactggtcgactcagcacattggaaaggccatccagtggtgggacttgttggtgacgagttgcataataaaattggtggttgttccaggaacagtagtacatgccctttcagcgaagtgcgttcttgttacggctgtctgtattatcgcccttttacggatggtgaacatcaggctctacttgaatgcgtcaaaaaagaagtcgatgaactaatcgctatttcagacagtgtaggtaattcccgaaatccgctcattttaatccatgaaaccacacagtttgaaattgagtctgttatcgcccgctgccgttttcataaggaacaggtgaagtccaatgaaaaatcactttga

SEQ ID NO: 17308 - DNA, 1395 bp, Escherichia coli
gtgtattcactaaagcagttggttatctcaggccgtaaaaggcgatggatcctgatggacttggaaacctctctgccgttgctgtatccccttaggtaccatattgaccatttggctttccgctcattgtccacacagtcagcttcacttcaatctgtgaagtttttttacgaattctggaggcaaaagtatggtgtctcgttttgctacagcttctattcatctgaccacaatccagacattgctgtcggtgaaatgcccgcattttggatgtatctagaaaatggccacaacgtccagtcaaatgtattgtctttaacgagagtcacaaaagccaatagcttaactcatacagtcagagttcgtgctgtgatccatttcatttcttttttgattaacacctacatatcacctgcataccgggatgactctcccaaagcattatcacttttggcttcgcgtttacacacccgtttacagctttgccgggagaattatcgaacgcttacatcaaacaaattttcgcaacatagtcacagcagccaaggatttcagagtttgtctggggcaatggtgctcagcctttatggaataataaccccctcttctgcccaaaagcataacccgctaaatcctttcccttccgggcatcttcagttccgcaattttttgattattcgtctgttgttaaattatggtatacgaacaggtgagctattgttgttagagtgcagctcaattaaacctaatttaaaaggtgataagtttagtttgattgtgacaactgtcgacgaggcatacgaaccaagaaagaatgcgccatctctcaaaaatgcatgggctaatcgtgtgttggagctcgataagcaggattatatttttttaagcatttatatagcaaggcttcgaccaaaaactgataaacacgattttatctttacatcgagtcaacagtcagcgaagcctttgtcctatacatcagttcattctattttttcgaaagtcgataaggtcttcactaaccaatatccagagtacaaatcaccaatgtactctgactcgttgcaacgattgactccgcatacaacccgacatacttgggcctttttgacattgcaaaaaatatggcattcaaaatatttgaaaagccagcaaaataaaacacactttattgctggagtcccttccctctcagggataatggaagaagccaaagatgaactacgactgatgggtggctggagtccgacaagtcaaatgcctgatctatatgcaaaacgtttcctgtctgagcaggctaatgctgccaatgtccaacgaattattcaagataatgcagcgctacataatacgttagatactataatggatagatataacgatgacatcatttga

SEQ ID NO: 17309 - DNA, 141 bp, Escherichia coli
atgttcgggcatggcaagcgaatgaatatgccgtggtggggcggttttgatccgcgcgcgtgggatgtggcaagcctgatggattttgctgtgccggtggtggcgtgtctgctggtctggctgttggttaatcgtgggtga

SEQ ID NO: 17310 - DNA, 753 bp, Escherichia coli
atgaacaatccggttatcggtgtcgtaatgtgcaggaacaggcttaagggtcatgcgacccagactctgcaagaaaagtacctgaatgccatcatccacgcaggcggcttgccaattgcgctgccacatgcgctggcggaaccgtcattacttgaacaacttttgccgaaactcgatggtatttatcttcctggtagtcccagcaatgtgcagccgcacctatatggtgaaaacggcgatgagcctgacgccgatcccgggcgtgatcttctgagcatggcgttaattaatgccgcactcgaaaggcgcatccccattttcgccatctgccggggtttacaggaactggtggtggcaaccggtggttcgttgcatcgcaagctgtgcgaacagcctgaattgctggaacatcgggaagatcccgaactgccggtggagcagcaatatgcgccgtcgcatgaagttcaggttgaagaggggggattactgtctgcgttgttacctgaatgtagcaacttttgggtaaactctctgcatggacaaggggcgaaggtcgttagcccacggttgcgtgttgaagctcgctcgccggatggcttagttgaggcggttagcgtcatcaatcatccttttgcgctgggcgtacagtggcacccggaatggaacagtagcgagtacgcgctttcgcgtatattgttcgagggctttatcaccgcttgtcagcaccatatcgctgaaaaacagcgactctga

SEQ ID NO: 17311 - DNA, 594 bp, Escherichia coli
atgcttattggctatgtccgcgtatcaacaaatgaccagaacacggaattgcagcgtaacgcgctggaatgcgcgggatgtgagcggatttttgaggacaaaatcagcggcacgaagtccgacaggccgggactgaaaaaactgctcaggacattatcggagggggatacactggtagtctggaagctggaccggctggggcgtagtatgcggcatctggtcattctggttgaggaactgcgcgaacgtggcattaattttcgcagcctgacggatgctattgataccagcacgccgatggggcgttttttctttcatgtgatgggtgccctggctgaaatggagcgagaactcattgtcgagcggacacgcgccggactggaagcggccagagccaaaggtcgtattggtggcagacgtccgaaactcaccgcgagtgagtgggagcaggtcggacggttgctggctgcgggggaatctcgtcaacgcgtggcgctgatttttgatattggcctgtccacgctctataaaaaattcccctcatcagcgacaaagaataaattgtgtcatcccttagccaaccgggacaaatag

SEQ ID NO: 17312 - DNA, 1281 bp, Escherichia coli
atgaaattacttattctgggcaaccacacttgcggcaatcgtggcgacagcgccatcctgcgaggcttacttgatgccatcaacatcctcaatccacatgccgaagtggacgtgatgagccgctatccggtcagttcttcctggctactcaaccgcccggtaatgggcgatccgctgttcctgcaaatgaaacaacataacagcgcggcgggcgttgtcgggcgcgttaaaaaagtcctccgtcgccgctaccagcatcaggtattgctctcacgcgtcaccgacactggcaagctgcgtaatatcgccatcgcccagggattcaccgacttcgtgcgcctgctgtcaggttacgacgccattattcaggtcggcggatcgttttttgtcgatctctacggcgtgccgcagtttgaacatgcgctttgcacgtttatggcgaaaaagccgctgtttatgattggtcacagcgtcggccccttccaggatgagcaatttaaccaactggcgaactacgttttcggtcactgtgacgcgctgatcctgcgcgagtcggttagcctcgatctaatgaaacgcagcaatatcaccactgcaaaagtggaacatggcgtcgataccgcgtggctggtcgatcaccacacagaagacttcaccgccagctatgccgtccaacactggctggacgttgccgcacaacagaaaacggtggcaattaccctgcgcgaactggcaccgttcgacaaacgtctcggcaccactcaacaagcgtatgaaaaagcctttgccgggttggtcaatcgcattctcgacgaagggtatcaggtgattgcgctctccacctgtacgggcatcgacagctataacaaagacgaccgcatggtggcgctcaacctgcgccagcacatcagcgatcctgcccgttatcacgtagtgatggatgaactcaacgatctggaaatgggcaaaattctcggtgcctgtgaactcaccgtcggtacgcgcctgcactcggctattatctcgatgaactttgccactccggcaattgccatcaactatgaacataaatccgccgggattatgcagcagctggggctgcaagagatggcgattgatatccgtcatttattagacggcagcctgcaagcgatggttgcggataccttaggccagcttccggcgctgaatgcgcgacttagtgaagccgtcagtcgtgagcgtcagacaggaatgcagatggtgcagtcagtgcttgagcgcatcggggaggcgaaatga

SEQ ID NO: 17313 - DNA, 1221 bp, Escherichia coli
atgaaggtcggcttctttttactgaaattcccgctgtcgtcagaaaccttcgtcctcaaccaaatcactgcgtttattgatatgggctttgaggtggaaattgtcgcgctgcaaaaaggcgatacagagaacacccacgcggcatggacgaaatacaaccttgccgccagaacccgctggttacaggacgaaccaacgggcaaagtggcgaagctgcgccaccgcgccagccagaccttacgcggcattcatcgtaaaaatacctggcaggcgctcaacctcaaacgctatggtgccgagtcgcggaacctgattttgtctgccatttgcggccaggtcgcaacaccatttcatgccgatgtctttatcgctcattttggtccagcgggggtaaccgcagcaaaactccgcgaactgggggtcattcgcggcaaaattgccactatcttccacggtattgatatctccagtcgggaagtgctcaaccactacactcccgaatatcagcaactgttccgccgtggcgatctgatgctaccaataagcgatctgtgggccggaaggttgcaaaaaatgggctgcccgagggaaaaaatcgccgtatcgcgcatgggcgtggacatgacgcgctttagcccgcgtccggtgaaagcgcctgcaacgccgctggaaatcatttccgtcgcacgcttaaccgagaaaaaaggcctgcatgtggcgatcgaatcctgccgtcagttgaaagagcagggcgtggcatttcgctatcgcatcctcggcattggcccgtgggaacgacgcctgcgcaccctcatcgaacaatatcaactggaagatgtggtggagatgccgggctttaaaccgagccatgaagtgaaagagatgctcgatgacgcggatgtcttcctgttgccatcggtaacgggcgcggatggcgatatggaaggcattccggtagcgctgatggaagcgatggcagtcggcattccggtggtttctactctgcatagcggaattcctgaactggtggaggctgataaatccggctggctggtgcctgagaacgatgctcgcgcactggcgcaacgactggcggcgtttagccaactggacaccgacgaattggctccggtcgtcaaacgcgcgcgcgaaaaagtcgaacacgattttaaccagcaggtgatcaatcgagaactcgccagcttattgcaggctttatag

SEQ ID NO: 17314 - DNA, 1395 bp, Escherichia coli
atgccatttaaaaaactctcccgacgcaccttccttacggcaagctccgcgcttgccttcctccatacccctttcgcccgtgcacttcctgcccggcaaagcgttaacattaacgactacaaccctcacgactggatcgcctcatttaaacaagccttcagcgaagggcaaacggtcgtcgtgcccgccggattggtttgtgacaatatcaacaccggcatcttcattccttctggcaaaacgttacacatccttggaagcctgcgcggcaacggcagagggcgatttgtcttacaggacggcagccaggtgacaggggaggagggcggcagtatgaataacatcactctggatgtgcgcggctctgactgcaccatcaaagggctggcgatgagcggctttggcccggtaacgcagatttatatcggcggcaaaaacaaacgggtcatgcgcaacctgaccatcgataacctgaacgttagccacgctaattacgccatcttacgccagggatttcataaccagattatcggtgccaacatcaccaactgtaagttcagtgacttacagggcgacgctattgaatggaacgtggcgattaacgacagtgatattttgatatccgaccatctcattgagcgcattaactgtaccaacggcaaaatcaactggggcatcggcataggccttgcgggaagtacctacgataataattatccggaaaaccaggcagtgaaaaactttgtcgtggcgaatatcacgggatcggattgtcggcaactgatccatgttgaaaatggtaaacattttgttatccgtaatatcaaagctcgtaatatcacgccggatttcagtaagaaagcaggtattgataacgccacagttgctatttatggttgtgacaactttgtgattgataatattgaaatgattaatagtgccgggatgttaatcggctatggggtaattaaaggcaaatatctctcgataccgcagaatttccgggtgaataatattcaactggataatactcatcttgcttataaattgcgcggcattcaaatctccgccgggaatgctgtctcctttgtggcgctgactaacattgagatgaagcgtgcctcgcttgagctacacaataaaccgcaacacctttttatgcgtaatatcaaggtgatgcaggaatcctcagttggacccgcattgagcatgaacttcgacatgcgcaaagacgttcgcggcgtgtttatggcgaaaaaagaaacactgctatctcttgcaaatgttcatgcggtgaatgaaaaaggacaaagctccgtcgatatcgacagggttaatcaccatattgttaatgtggaaaagattaactttagattgccggaacggagggagtag

SEQ ID NO: 17315 - DNA, 1014 bp, Escherichia coli
atggaaaatataaccatttacgattatgtgattgtaaataacggtctatttaataaagatgctgtaatcgttttttttataatattttatttgtttggttgtcttattaatattgtatccaattatgttagctgtatttatgttctattggtactaataccattatcactattattcgcattaaatggacctgataaagcatcgtatttgtctttatataatgcaatagatacagtgagcgatgtttttaaatattacaatacaatagattctccattatactatataacaatggtcttatttaaaaatatagggcttacattttacagttttatggtagtgcaaaatttaattatatcattttcattatcatatctaatttataaatataaatgggggtatcacatagcaatgtggctatattttacccatctactcgtaccattttcggttcgtggacatttggtcataattaccattttatttgcaaataggagtgtggtatctaaaattataagttcgttaggattagtggcgattcatccactaatatctgcattaccaatcacttatcaattgcgtggcttgataagaggtaaacgtagtattctaataatcgtgctaacgatatgtgcgctagtattttcatcatcctatttgattagtaagtatactagttatgctataaacggtgatgagtatgttaaaaacgcggggttatcactaatatatatagttgatgcaatagagttattgctattttggtcaataattagaccaatagctttaatcgataagttatttttacttttcccggtcgtattaagttttggtacaataataatcccaatgcttggtcgattttcatatgcatgtgatttggtgtatattttaattttaattaataacgcaaataggctaaaaaataaaaagacactttttatgtgtttatcacttattgcattaatccgatttgttaaaaattattattcaattgagtattttatattatga

SEQ ID NO: 17316 - DNA, 492 bp, Escherichia coli
atgaagccacgaaatattaataatagcctaccactgcaaccattagttcctgatcaggagaacaaaaataagaaaaatgaagagaaatacgtgaatccagttaaaattacgatgaggtctggtttaaattatattgaacaagaatctcttggaggaaaatatctaacacatgatttgtcaataaagatagcggatatttctgaagaaataattcagcaagcaatattatcggctatgagcatatataaatttccgataacagatgatttaatgagtatggctacaaatgaactcataaaactggccaaaatagagaataatttagacctgaataaattctctactatatgtaccgacgttctatcccccctcgtcaccagacataataaagaaaaaaaaccagacgacttactacccttcgcaaaaatcccttttttaattttcatcgaaaaaatggaaattgataatatgaatctaggccatgcacattaa

SEQ ID NO: 17317 - DNA, 480 bp, Escherichia coli
atggcgaatttaatttatttaacactaaatggtgataatcaagggctcatttcaagtggttgttcatcacaaccatccattggaaataaagctcaaacagcacacattgatcaaattatgatttatgaattcatgcatggattaaatcgagatcaaaacgtcaaccatcatcatttgacaataaagaaacctatagataaagcatcacccttattaggcaaagcaatttgcgacaatgaattattgacatgtgatttttccttttatcgtacaaataaatttggaattaatgaactgtactataaaatcaaattaactggagcaaagataagcgacattcatgtctctatatcacatattgttgttgataacagcgttcaacccgaagagtcagtttctttcagttatgaatcaattatatgggagcattgttccgctggcactagtgcatacagtttatgggaagatcgtcttttttaa

SEQ ID NO: 17318 - DNA, 897 bp, Escherichia coli
atggctaacaatattttacactcttcaacatcagacagtgaaagcaaaaatacaagcactgacagtacgttatttaatgaaaaattcccatttcaactaagacaagatttcgcatcaagaataacagaagatgaaagtgatttttttaaatggaaaaaaataagagagttggcatttgtgagcaatcataaagaatggaataaatatgacttattaattttaaaatctgttaatgaaatcaacattcatttgtccagcactccatactttcagccgttggattggtatataataaaagccatgctctggactgaaaacgatgcggaaaatacttctcagtggaatggttatccattacaaattggtcgttttcggaaagataaagcgatgccagctttaatctctggagaaaaatccacagcccttgttaccccaccacaatggagaaacaaagcattcaatgggttaaaagatccagaaagaaattactgggcaaaagaacaaataactggctctccagaagagaatatcaaagcagcaattacttacttaatgatgaaactttctaatacaaaggaagaatcaactatcgatcaatatgactcaactctatatagcgccattgtccaaaaaggcgatttggctgacaacattagaaaagagagaaaaacgaccatacctaacttaacgaaaaacaatcctggaaaaaatctcgataaaatacacccgggagatattttatattatcaaaaagcatccatgaaagtaataattactggatggaaacctatcacaataaaaaatgtagcgatgaattataatggtggtggcgatcccaagtatgcaataaaacttcagtttgtttatacattactcacaaaaaacagagtattatga

SEQ ID NO: 17319 - DNA, 450 bp, Escherichia coli
atgcgaaaaataacaattattctactgctgacattctcatgtacaaaaggtctggcatttgacatttccatgtctaaagaatgtagtggtgttgatgaacttgaatttattgattgtgttaaaaactcatttattatgagcactattacacttaaaaaagcagaagcaaatataaaagagaaaattcaaaaatggaatagtgatgaggacgaagcaataagaaaagaagcagttatttctttaaaaagactagaatcttctaatcgggaatttatacgttacagatttgctcaatgctcttttgctctaacctggggggccagagtaggacgtctggcattctctcgactatatccatgctatactgagttaaacaaaataagagccatgcaactaaacaatgcttacatttcagattttcaaaatccagatgagatatccagcaaatga

SEQ ID NO: 17320 - DNA, 357 bp, Escherichia coli
atgattattataaaattaagattaacattactatttatactggccacaattacatattcagtacaatcagacgaattcgatgatcaaaccacttacacgcaataccgttatttttccacagccataccagaagatatacgtagatttatgttctacgtagattattgctttgtagatttagcattcgatatcgaaactgactcaatgacagctaaaaatgatattattaatgaatgtaccccattaaaagaaagaaacaaaacattaaaagaaaaatataaaaaagatgaagagataatagcaattctttccattgcagatgataccattttaatttatgaagaattaaaaaaataa

SEQ ID NO: 17321 - DNA, 1119 bp, Escherichia coli
atgaaaagcaaagtactggcacttttaattcctgccctgctcgccgcaggtgctgcacatgcagccgaagtttataataaagacggcaacaaattagatctgtatggcaaagttgatggcctgcattatttttctgataataccaatagtgatggtgatcaaacttatgtgcgttttggttttaagggtgaaacgcaaatcacggatcaactggttgggtatggccagtgggaatataacgtgcaggctaatggctctgaaggtgataaaggtgattcctggactcgtcttgcttttgccggtctgaaatttggtgacctgggttcattcgactatggtcgtaattatggcgtaatgtacgacatcgaaggctggaccgatatgctaccggaattcggtggtgactcttataccaaagccgataactatatgaccggtcgagccaatggcgtagcaacctatcgtaatactgatttcttcggtctggttgatggtctgaattttgcgttacagtaccagggtgcgaatgaaaaccaggtcacccatgagcaagaaggtaccgcaaacggtggtgatcgaaacattaagaacgccaatggcgacggtcttggcatctctactacctacgacttaggtatgggcatgagttttggtgccgcctataccagttccgatcgcactaaccagcaggctgaattctctaccgcaaaaggcgataaggcagatgcctggactgccggggcaaaatacgatgctaacaatatctacctggcgaccatgtattctgaaacgcgtaacatgacaccttacggtgattcaacaaatacgattgccaacaaaacccagaactttgaagttactgcgcagtatcagttcgattttgggctgcgtccggcagtctctttcctgatgtctaaaggcaaggatttggtcggtaccgacggtgataaagatctggttaaatacgccgatgttggcgcgacttactatttcaataaaaacatgtccacttatgttgactataaaatcaacctgttggatgaagatgacagcttctacgctgccaacggcatctctaccgatgatattgtcgctttaggtctggtttatcagttctaa

SEQ ID NO: 17322 - DNA, 576 bp, Escherichia coli
atggatttcgacacaatcatggaaaaggcttacgaagaatacttcgaaggccttgccgaaggcgaagaagctctcagcttcagtgagtttaaacaggcactcagaataagaatgtgctctcacaatgacgcggagcacaaatatgagaagcaaaatcagaccgcagaaaattttgttctggaacccggagaaacgcttttcaaaattcccgttacgtgccccatttgcggttttacatcagaagaacttgacgactcctgtaacaatcaggaaacaaccaagtatgtcgaagatgataccgagtgcgcacgaagaacgattatatccacgagtccaaactccagggccaataaatctcactttgagagggtgattaatccactcccccaaaccaataaaaaagatgccggaggacaaaaaacccaatggaacaacgggatatctgtcaaaaaaagacgttccattaaagacaaacaacgcagcgccaacaactgtaagcgctttataccagtaatcaattttcatgttcttaagcggatttattggtggttgcgacattgcttaatgaatccttaa

SEQ ID NO: 17323 - DNA, 189 bp, Escherichia coli; identical to SEQ ID NO: 15522

SEQ ID NO: 17324 - DNA, 993 bp, Escherichia coli
atgcagagcgataaagtgctcaatttgccggcaggctactttggtattgtgttggggacgatagggatgggatttgcctggcgctatgccagccaggtttggcaggtcagccactggttaggggatgggctggtgattctggcgatgatcatctggggattattgactagcgcatttattacccgactcatacgctttccgcatagcgtgctggcggaagttcgccatccagtgctgagcagttttgtgagtttgtttccggcaacgacgatgctggtggcgattggttttgttccgtggtttcgcccactggcggtgtgcctgttcagttttggtgtcgtggtgcaactggcttatgccgcatggcaaactgcgggattatggcgcggatctcaccctgaagaagctaccacgcctggactgtatctgccgacagttgccaacaactttatcagcgcaatggcctgtggtgcgttgggctacaccgacgccggtctggtgtttttaggcgcaggcgttttctcatggctaagccttgaaccggtgatcttgcagcgtctgcgcagttcgggagaattacccacggcgctgcggacatcactcggcattcagctcgctcctgcgctggtggcctgtagtgcctggctgagcgtcaacggcggcgagggtgacacgctggcgaaaatgcttttcggttatggactgctgcaactgctgtttatgctacgtctgatgccatggtatctctcccagccatttaatgcttcattctggagtttctcgttcggcgtatctgcactggcaaccaccggtttgcatctggggagtggcagcgataatggattttttcatacgctggcggtgccgctgtttatctttaccaattttattattgcaatactgctcatccgtacttttgcgcttctgatgcagggaaaattgttagtcagaaccgagcgcgccgttttaatgaaagcagaggacaaagaatga

SEQ ID NO: 17325 - DNA, 981 bp, Escherichia coli
atgcgcaaatatcgtctaagtgaagaacagcgagcctttagttatcaggaagatggcactaaaaaaagtgtgttattacggcagattatcgccattagcgattttaacgatgtgatagcaggaaccgctggcggctggatcgatcgcgaaacggtgttagcacaggaaggaaattgctggatttacgaccagaatgctattgcgttcggcggaacggtgatatccgggaatacgcgtatcaccggcaccagcgtgctgtggggagaggtttacgcaacggataatgtctggatcgataatagtgaaatcagccagggtgcatatataagtgacagcgtcaccattcgtgactcattagtttgtggtcaatgtagaatatttggtcacgccttaattgatcaacattctatgatcgtcgccgcacaaggcttaacgcccgaccatcaactcctgctacaaatttatgatcgcgcaagggttagcgcctcgcgtattgttcaccaggcacaaatttatggcgatgccgtcgtccggtatgcttttattgaacatcgcgccgaagtttttgattttgccagcgttgaaggtaatgaagagaacaacgtctggctatgcgattgcgctaaagtctacggtcacgcgcaggtgaaagctggcatagaagaagatgccattccgacgattcattacagttcgcaggtggcggaatatgccattgtggaaggtaattgtgtgttaaaacatcatgttttgattggcggaaatgccgtggtatgtggcggaccgattctgctcgacgagcacgttgtcatacaaggtgagagccgtattacaggtgcggtgataattgaaaaccatgtggagttaaccgaccacgccgtcgttgaagcctttgatggcgacacggttcatgtccgtggtccaaaagtcattaacggcgaagagcgcattacgcgaacgccactggcagggttattgtga

SEQ ID NO: 17326 - DNA, 342 bp, Escherichia coli
atgagaaaatcagtggtgacattagcttgtttgttttttattagtgcatgtaaaccatcagataattatgttatttctttaggggaaaacttagttaaagataagcttattgatcctgatagtgcaaaatttaattctttttttcataagtcaggtgatttatatggttatgtttgtggggatgttaattcaaaaaacacgtttggtggatatacagggaaaaagccatattttgtttatttggaagttgtggatggaaaagttaagagtcatgggactgtaacaattgttaatgatcatgatccaagcagtatggaaaaatataagttgttttgccaataa

SEQ ID NO: 17327 - DNA, 279 bp, Escherichia coli
atgatgctggcgctcaggatggggcgcacattgtcagagttacgccgggaaatgtccgcatcagaaatcatgatgtgggcagaatttgacaggttcagcccgctgggtgacgagcgggctgatatccgggctgcccagatagtttctgcggtttacggtgcgcagggtgtcaaagtaccactgaatgatgcgcttcttcagtgggagcatgattcagaagaaaataaatgcgatgatccatttattggattagaggttgctctaatgtcttcactataa

SEQ ID NO: 17328 - DNA, 339 bp, Escherichia coli
atgcaggcaggaagattacgtgatcgtgtggttattctgaatgccaccaccgttcggtctccgtcagggcaccctgtggaaacaatgacggagggggcaaccatatgggcagaagttaaggggatcagtggcagggagagaatatccggaggcgcagaaactgctcaggctacagtgagggtctggatgagattccggcgagatgtaacagcaacttcatgtctgaaagtgctgactggtgcattcaaaggcgcgattctgagtatagacggtccgccgataccggatgctcgtgccacacggcttgagatactctgttctcagaaggggaatgtgtga

SEQ ID NO: 17329 - DNA, 183 bp, Escherichia coli
atgtttctgataattctcgcgccactggtgggcgtgctgggtgcgcttttgctggcgtatggtgcctggctgatttatcccccggcgggttttgttgttgccggggtgctgtgcctgttctggtcgtggctggtggcgcgatatctcgaccgtacacagccgtctgtcggcggaggtaaatag

SEQ ID NO: 17330 - DNA, 1032 bp, Escherichia coli
atgggactaaaaatggccgggtttgatgtcaaagctgccgttgaactggacgcacatgccgccgctactttccaagcaaatcatcgtgagacaaaactctttgttcaagatattcggtttgtaaaggggagtgatatcctaaatcttatccctgagcaacatttagatcttttatctgcgtgcccgccatgtcaaggatttactagtctcactgccaagtataaaagggaggaccctcgtaatttattgattaacgagatgttacggttggttgaagaaaccaatccatcagcaatcatgatggaaaatgttcctggattagcttcccggggaaatcatcttctttcgccagtaattgagagattgaaaaaacttggttacatagttaattatggagttttgcaagtagctgactttggtgtaccacagttcagaaaaaggcttgttctgttggcaggaaaaggatttgccatcccattgcctgatggatcacactctaaggatggaagagagaaacccaaatgggtaactgttaaagaagctattggagatatgccaaaacccttaaccctttcacaggctaagaagcaagggaagtttccattgtcgagttggcatattgttagggatttgtctgagatcaatataaagcggttacaagcggctgttccagggatgtcttgggagtgtattcccgaagaactccgtccagattgccataaaggcgactataaaggatttagtaatgtttatggtcgtatgctttgggatgacgtatcgcctacgattacaggtgggtgcacaactttaagccgtgggcgatatggacatcctgaggatacgcgtactatttctgttcgagaagctgctagactacagacttttcctgataactatgtgtttgatacagctttgatggataaagtatgcgtcataatcggaaatgcacttccatgcaagtttgcagagtatttggctaaccactgtaaaaattatattaataaagcaagaacagctggattaataccataa

SEQ ID NO: 17331 - DNA, 2112 bp, Escherichia coli
atggcgcgtcaatatgaaatgcagatatcaaggatgacagtagataaattaggtgtgaaattatatgacagggcttatgctgttatagccgaattagtatctaacagttacgatgcagatgcgactaatgtcactataaaagcacctatgggccaatacctggctgttagacaggatggtgttgtcaggtcaaaaaatgtcacaatagaagtagaagataatggcgtcggaatggcacctgatgaactacagaacttttatttggttgttggcaaagaaagacgtaaggatccaaaaagaggtgaaacctcgaaggtgtttcaccgcaaagtcatgggacggaaaggcgttgggaaattagcaccttttggtgtttgtaaaagggtcgagattataagtgccggtggggaaaaaatcagtcgtgatggaaaggaagggtatgaggttgctcatattcagctagataaagaaaaaataatggatgatactgcagtgtcttataaaccggaaactggggatttagacggtacactaagtgacaggacctatactaaaataatattaagtgattttgaatatagaaaaattagcgaaataaaagatttatctcggcagctttcacaacgttttggagtgaagagtaagaactggaatattaaactgattgatacttcgaaaacaaagtctaatcctgactatgaagttgaggtcggagagtttactgttcctgttatgcctaactctaaaattgaatttcgttccatgagtggaagtattgcgacagattcttgtacggatttaagtgattatgcggcttttaatcctgacggcacgcgttcatcaattgttaaggccggttttgaacatgaagggaaagcttacccgatattaggttggattgcatacgcgaaagagccttataaggacgagttaatggcaggtgttagaatttattgccgaggtaagtttgctgcgcaaacagcagtttttaatagaaaagctggttttactggagagcactctatacgttcatatttggtaggtgagttgcatgctgactggttagacgaaaaagaagatcttatccaaactgatagaagggatattctatggtctgatgatttaggaacgcaatttcagaattgggggcaagaagttattttacttgtgggtaaaataactcgcgacccccttagaaataatatgatgaatcaattcttcgaattagcgcaagtggaggataaggtcgagcaagcataccctggagccggtcaaaaggatatgcgagcacaggctaaaaaaatagccaagttgttgggtaaatctttacgaggtgatgaattacatgatcctgatgcactcgagaatttagtgcagttaagtattatgttagcaccattacaatccttagatgagaagttaatagaagcttccagtaaagcggatacaccgctcaatgttctcaatgatattttagcaacggctcaactagctgaaaccgttagttttggtcaaaaggtcaaaaagcgtcttcagattattgagcgtctcgagtctttaaaagatgcaaaggatacagcagaagatgagttacaagatctaattgcatccgctccgtggctagttaaccctcaatgggtcccagttacagcaaataaaacgttgtccacgcttaaaagggaatttcaaaaattttataaaaagaaaactggtgaggagatatttcttatagattttgataaaaaaaataaaagaccagactttgtattgtttagtcaggatggaaaattacaaataattgaaataaaaaagccacatcattatatttccaatgatgaaatggatcgtattattaattacttcgaaacattcgaggaatttttgaacgatgagagacataatgattttaaatcaatagcatctgattttcacgttacgctggtaagtgatggggagcgcttgagtggggcacgtcgtaaagcttatactgcatacatcaaagaaaaacgcctaacacccgttgattgggcagggttcttgctgaggacaactcaaactcaccaagaattcttggatgaggcagaacagttgaagttgggaaataatgagtga

SEQ ID NO: 17332 - DNA, 135 bp, Escherichia coli
atgtatggtttagatattttgcatctttcacagacactttttacctttgccatctccttccacattgtttctccggaaatcactaacggtttggcatttgcagaaccattatcagccatagcttcttgccgttaa

SEQ ID NO: 17333 - DNA, 276 bp, Escherichia coli
atggggtttgatgtcaatgaaactcttaactctcttatacggaaaattaatgattttgataaaacactacagcatgctgcggcgcgtagtgatataacattgttagcaatttcataccttgcatctgccatgaataaagatgaaacggtacgaaagaatctcgttgattatatcgactcgcttcagccgggcactttcaaccctgagagcttcaatcatgagaaagagcatgttaaatctgtaattaattctcttgttttgaatcaaaagaattga

SEQ ID NO: 17334 - DNA, 222 bp, Escherichia coli
atgattgctcatcacttcggaactgatgagattcctcgtcagtgcgtgactcccggtgattatgttattcataaaggaagaacatatattgcttcggtaaacaacattaaaaaacaacggctctatattcgtgatttttccacacaacactgtattaaggaaaccatgattaaagtcttccttggtcgtgatggtttacctgtaaaagcagagtcatggtga

SEQ ID NO: 17335 - DNA, 171 bp, Escherichia coli
atgttgctccaggaattgccaggtaaatttggcacgggcgcggcgttcgtcgccggcttcaatggcagtggctacagcaactgcaccttcttcctttattgcctgttcgtccggaatggcggcgcaaataaagactttactcattttgttttaacctcattacagatttaa

SEQ ID NO: 17336 - DNA, 1500 bp, Escherichia coli
atgacagagccgcatgtagcagtattaagccaggtccaacagtttctcgatcgtcaacacggtctttatattgatggtcgtcctggccccgcacaaagtgaaaaacggttggcgatctttgatccggccaccgggcaagaaattgcgtcaactgttgatgccaacgaagcggatgtagataacgcggtcatgtctgcctggcgggcctttgtctcgcgtcgctgggccgggcgattacccgcagagcgtgaacgtatcctgctacgttttgccgatctggtggaacagcacggtgaggagctggcacagctggaaaccctggagcaaggcaagtcaattgctatttcccgtgcttttgaagtgggctgtacgctgaactggatgcgttataccgctgggttaacgaccaaaatcgcgggtaaaacgctggacttgtcgattcccttaccccagggggcgcgctatcaggcctggacgcgtaaagagccggttggcgtagtggcgggaattgtgccatggaacttcccgttgatgattggcatgtggaaggtgatgccagcactggcagcaggctgttcaatcgtgattaagccttcggaaaccacgccactgacgatgttgcgcgtggcggaactggccagcgaggctggtatccctgatggcgtttttaatgtcgtcaccggggccggtgctgtatgcggcgcggccctgacgtcacatcctcatgttgcgaaaatcagttttaccggttcaaccgcgacgggcagaggtattgccagaactgctgctgatcgcttaacgcgtgtaacgctggaactgggcggtaaaaacccggcaattgtattaaaagatgctgatccgcaatgggttattgaaggcttgatgaccggaagcttcctgaatcaggggcaagtatgcgccgccagttcgcgaatttatattgaagcgccgttgtttgacacgatggttagtggatttgagcaggcggtaaaatcgttgcaagtgggaccggggatgtcacctgttgcacagattaaccctttggtttctcgtgcgcactgcgacaaagtgtgttcattcctcgacgatgcgcaggcacagcaagcagagctgattcgcgggtcgaatggaccagccggagaggggtattatgttgcgccaacgctggtggtaaatcccgatgctaaattgcgcttaactcgtgaagaggtgtttggtccggtggttaacctggtgcgagtagcagacggagaagaggcgttacaactggcaaacgacacggaatatggcttaactgccagcgtctggacgcaaaatctctcccaggctctggaatatagcgatcgcttacaggcagggacggtgtgggtaaacagtcataccttaattgacgctaacttaccgtttggtgggatgaagcagtcaggaacaggccgtgattttggcccggactggctggacggttggtgtgaaactaagtcggtgtgtgtacggtattaa

SEQ ID NO: 17337 - DNA, 1440 bp, Escherichia coli
atgagcaagaaatttaatactttatctatcatcaggaatagtggcgttgcctttggtaccagtggtgctcgaggcctcgttacagaattcacccccgaagtatgcggagctttttctcatgcttttattaacgtaatgaagcaaaagtacaagtttcatggagtcgcattagcaattgataatcgccctagtagttactctatagctcaagcatgtgcatctgtgattgcgcaatacggcttaaaggtaaattattacggtgttatcccaacaccggcattagcttataaggcactggaggataaaataccgtgtataatggtaacgggtagtcacataccacatgatcgtaatggattaaagttttatagcccaattggcgagatcactaaggaagatgaaattcgcattaaagatgtttctatagattttacattggactcatccataccaaatttatatccgtgtcctgacgcagctagttgttattttaaaagatacattgacttttttcctgaaggaattttaaaaggtaaaagagttggcttttacgagcattcaagtgctgggcgtgacttatacattcctatttttgaaaagttaggagcagaaatagttcccatcggtagaagtgataaatttatcccaatagatacagaagctgttggtcatgatcttgttattcaggcaaaaaaatgggcgttagaatataaattagatgctatttttagtactgatggcgatggcgatcgcccaatgttaagtgatgagaatggaaaatggttgcgaggagatatacttggactgttatgtgctgaaacattgaatataaaatctattgcgattccaattagttgtaactccttaataatgcaacgtaattgttttgaagaagttgttttaacaaaaattggttcgccttacgtattagatgctttttcttctttaaaagataaatatcataattatgcaggttttgaggctaatggtggttttatattaggttcggatataacagttgataatagaaagatcaaagccttacctacacgagatgcattactccctatattagttttactttctgcaaataaaaaaatttcaagcatggtacatagcttaccaagtagatttacttattctgaccgaattgctaattttcttccagaaaaaagagataggttatttacaatatgtaaaaataatccacatacaatagttgatcttttgggagagaatgaggcgggcattgaagttaaagatataaataatttagacggttatagatttacactaaataataatgtcatcattcatctaagatcttccggaaatgctccagagttgagatgttattgtgaggctgacagtgagttttgtgctcaaaaatatgtggagagaattttaagttcggttgcttgccttataaaaataaattaa

SEQ ID NO: 17338 - DNA, 1392 bp, Escherichia coli
atgctttttccgataattatggctggtggcaccggtagtcgactttggccactgtctcgagagtcttttccaaagcaatatctaaaactttatggtgacatgacaatgttacaatctacaattgcgagattaaatacattagattgttcgaccccattagttatttgtaatgaagagcatagattcatcgttgcggaacagttaaagaaaattaataaattagataagaatattctgcttgaaccacaaggtaaaaatacggccccagcaataaccttgtgtgcgtttgctgctttaaaatatgcaaaaaatgatgaggatccattactacttgtattggctgctgatcatgtaataggaaacatatcttcttttactaagtcagttaaaaatgcattaccgcatgctcatgctggcaagcttgtaacatttggtataatacctacaacacctgaaactggttatggatatattcaccgaggagaaaaatttaatgatgcgtacaaagtttcatcttttacagaaaagcctgatatttatcgtgcgcaagaatttttaaaaacaggtgaatattattggaacagtggtatgttcctatttagcgctaaacgactgcttgcagagatggaaaagtatcgcccagatattttttctgcatgtgaacaagcttttttatcgccatctaatgatctagattttattcgtgtggatcgtgataagttttcgttatgtcctagtgagtcaattgactatgctgtgatggagaatacggatgatgccatcgttgtacctatggatgcagaatggtctgatgttggttcgtggtcttcattatgggatatttcagataaggatgtaaatgggaatgctgttagtggtgatttgattagttttaactcttataataactttattaaagctgaagataaactagttgctttggttggcgttaatgatttagtcttggtacatacggatgatgctatattagtgtcaagcaaatatgaagtgcaaaatgtaaaaaaaatagttgaagtccttaaccaaaacggcagagatgagtcaaaaaaacataaagaagtatatcggccttggggtgaatatcattatattacggaggcagagaaatacaacgttagacgcgtactaattaatccaggtcaaaaaatctcaacgcaaacacacaaccatagatcagagcactgggttatagtttcaggaatagcgaaaattacaattaataacgatataaatataattaaagaaaatgaatctatttatatacctcccggtactatgcataccatagaaaactcagaaatgtttccattagaaataattgaaattcaaaccggtcaattattaactgaagatgacgttattcgtccttaa

SEQ ID NO: 17339 - DNA, 966 bp, Escherichia coli
atgaaaatgaaaaaaatatatattgcagggcatagagggatggttggttctgcaatcaaacgtcagttaatgatgaatagttctgttgagttaatttttcgtagtagtcacgaacttgacttgatgaaccaagatgctgtccaaaatttttttaatacagaaaggatcgatgaagtctatttagcagctgctaaagttggtgggatatatgcgaataataaatatccagctgactttatatataataatatactcatacaagccaatgtaatcaattcagctcatagagctggggttcaaaaattattatttttaggctcatcatgtatctatcctaaatttgcagaacaacctataaaagaagaatccctactttgtggttcattagaacctacaaatgaaccttatgcgattgcgaaaataacagggattaagttgtgtgagtcttataatagacaatatggtcgtgattataggagcgttatgcctacaaatctttatgggcctaatgacaattttcatcatgaaaattcacatgtattacctgccttaatacggcgtttccacgaagcaaagattaataatcttccagaggtcagtgtttggggttctggcaatgcgttacgagaatttcttcatgtagatgatatggcagctgcatccatatatataatgaatttacctaatgaacgttataaagaatatactaaaccagagtgctcacacataaatgttggttctggtaaagattattcaattcggcaattggcagaaatggttgcggaaattactaattataaaggaaatatttactttgatagtactaaacctgatggaacacctcgtaaattaatgagcaatgaacgattgagtaaactaggctggtcacccaaaatcgagttatatgatggagtaaaaaatacttaccagtggtttttgaataatatagaaaatataagaaaataa

SEQ ID NO: 17340 - DNA, 1122 bp, Escherichia coli
atgaaaaagaaagctctgattactggaattactggacaagatggttcttatctggccgaatttttattagataaaggttatgaagttcatggcataaaaagaagagcctctctttttaacactaatagaattgatcatatttatcaggatctacatcatgagaaacaaagtttttttcttcattacggtgatcttaccgattcgttgaatatagttagattggtacaagaaatacaacctgatgaaatttataacttaggggcacaatcgcacgtagcagtatcatttgaatcaccagaatatacagccgatgttgacgcaattggtacgttacgattgttagaagctattcgtatatgtgggcttgagaaaaaaactcgtttttatcaagcctctacctcggaattgtatgggttagtgcaagaaatacctcaaaaggagactacaccattttatccaaggtcaccttatgcagtagctaagatgtatgcatattggattacagttaattatagagaatcttatgggatatatgcttgtaatggaattttatttaatcatgaatcacctcgccgtggtgaaacatttgtaacaagaaaaatcacccgagcattagcaaatattgcgtacggattagagccatgtttgtatttaggcaatatggatgctttgcgcgattgggggcatgcaaaagattatgtaagaatgcaatggttaatgttacaacaagaaacacctgatgatttcgtaatagctacgggcaagcagatctctgtaagagagtttgtgagaatggctgctgctaatttaggtattgagcttgaatttattggttgtggtttgaaagaagtaggagttgtgaaagcaattcatggaaatgaagctccttcggttaaaattggcgatgttattgttcaagtggatcctcgttattttcgacctgccgaagttgaaactttgctcggttatcctgaaaaagccaaaataaaactagggtgggaacctgaaataacgatcgaagaaatgtgtaaggaaatgataagaaatgatcttaacatagcaaagcaacattctctgttaaagttaaatgggtatgatgtgtccttgtcagtggagaaataa

SEQ ID NO: 17341 - DNA, 1122 bp, Escherichia coli
atgaaaataatgcatacggtattaaatacatttactgcaaagaagtttgttgagccgcttttagataatgttaatgagcaacacaataaagaaaaaataattcataaaattttgattgatcctgttaatggtgatgagcgttttttaaaagaacttcatgtacattatgaaataaaaaaatttgatatagattatttatttatcaaacatataattgagctttatttctattttagaaaagaaagaccagatatagttatagcccatatgtcaagaggggctattctaccgttaatttctgcttttatagcccgagtacccaaacgtatatattttaatcatggggtgccatatattggttataagaaccttcctaggatgtgttttaaattacttgaaaagctaaattgttttttttctaaccaagtattaactgtttctcaaggtatgattgagcctttaaccgctataactaaaaagccagtatcaatacttgggcctggctctgcttgtggtattgaccacaatgagtttcaaagaaagtcaaaatatgatatagaaaatataaaacagcaatacgctgcatcagatactttcatctttaccttcgtaggaaggccggttgcacgaaaagggtttgatataacgctgaaagcgtttactaaggcatttagtggtgcagataatgtaattcttttattagcaggggcaacttcggaagatatttttcgcgtattaggtagtaaacctaataatatcaaaccattaggttttataatggatttagataacgtatatttagctacagatgtagttgtcgtaccaagtgagcatgagggtttttgctacgcacttttagaaggagctgcaagagagtgcgctctcatttgtagcgatatccctgggcctgacgcaattgttattaataaaagaaatgggattttaataacccctaaaaatattgatagccttatggttagtatgtctgaattatttaatgatagagaaatgacaaaaaaatatggagaacaagcatatatgatagcttccgaatttgaacgaaaaaaaatcatgttatattatagttactacataagaagtttatttattgaacaaaggtga

SEQ ID NO: 17342 - DNA, 753 bp, Escherichia coli
gtgaagagaccatatttttcgtttttattatgcgttaacaaagatgaaggttttctcaatgatgctcttgagagtattataaaccaagactattcttatgaatatgaaattattgttattgcaaataattgtgatgataatctatgggcatatttgaactccgttgagagtgacaaattgaaaatacatcgtaccaatattgggcagttagcttttaatttaaactatggagcaaatattgctagaggggagtatattgttaggatggatgccgatgatgtatccaccccgaatcgattaaagattcttgaggcggctattcaagaaaataactatccagatgtaataggaacttcagtttattttataagtgagacaggtagaatcataaagaaatatgttcctcctttaggagaggtaaaaagtgctctcattaaaaatccattcgttcacccaactgtggccatcaaaaaagtgtcattatttaaaattgggggctatcttggtggatttcaatcagaagataatgatttatggattcggatgcttagagcgcatgaatttaagttagtaaatattgattctgtaacattattttatagaataaacgatcatcaaactcgtggtcgagttctaccatatgcagaagttgcgtcttatgcgttgagagaatttcttttaaaaaagagaataaaatattttgcggcgctacttatcaatattggaaaggcgcttatacttccaaaaagataa

SEQ ID NO: 17343 - DNA, 894 bp, Escherichia coli
atgtctattataagattacaaggcggacttggaaatcaactttttcagttctcatttggatatgcgctttccaaaattaatgggacaccattgtattttgatataagtcattatgctgaaaatgatgatcatggtggttacaggctaaacaatctccaaattccagaggaatatttacagtattacacaccaaaaattaataatatttataaattattggttcgtgggtcaagattatatcctgacatctttctttttttaggtttttgcaatgaatttcatgcctatggttatgattttgaatatatagcgcaaaaatggaaatccaaaaaatatatagggtattggcaatctgaacactttttccataaacatatattagatctaaaagaattttttattccaaagaatgtgtctgaacaagcaaatttacttgcagcgaaaattcttgaatctcaatcatcactttctattcatataagaagaggagattatataaaaaacaaaacagctactttaactcatggtgtttgttcgttagagtattacaaaaaagctttaaataaaatacgcgatttggcaatgatacgtgacgtgtttattttcagtgatgatattttttggtgtaaagaaaatatcgaaacattactcagtaaaaaatataatatatattattcagaagatttatcacaagaagaagatttatggttaatgagcttagctaaccatcatattatagcgaatagtagttttagttggtggggggcttatttaggttcatcagcgtcacagattgttatttatcctactccttggtacgatataactccaaaaaatacttatatccccatagtcaatcactggataaacgtggataaacatagctcgtgttag

SEQ ID NO: 17344 - DNA, 891 bp, Escherichia coli
atgattattaaacgttatttcaatataatgaaatctacagaggtagcaatttttcttccctttactttctcttgcatatttgcaaaaaaaaatgatttggtaataatgcctgatgactcaattcgatcaataaccagcgtttcaaaagtgaggtatgaaaataaaaaaattttaaaatggctatttcagaatatcaggttaattataactaagaatataatatctttaaaaaaagacgtggtctatttaaccgtctctaaagacgatcagtggtcattgcaatcaaaattcccaaagcataaaattgtctatattcctcatcctatacaatctgcaagtaataaagaagatgtgttggatagatgcgaaaatataagtactatatgttttatgaatttacaggaacattattctgttaatccaagtacttttattcggcctaaaacaaaagttaatctgaatgatttgcataataaagttaatattatttttcatggttcttattctcaagcttggtacgggaagtatatgtattattatgggaaagcaaattgcaaagcagtaaggtatgtcgaggatttcgaacagttctataataatatagatctaatcatcttgccattagcagctggcgcgggaattaagaatatcgttttaaattcagtatacaggaataaacttattttaggtaccgaagaggcattttcaggaatacctaaggaatttacaagaaaattaattattgattcgaatgatgacatcttaacaaaaattaactcagaagtagagtgtttagctattaaggaaagttgtaatattttacgtgactatctagtcgttgaacacacagaaaaagcttttatggatacaatttttaaaaacataatttaa

SEQ ID NO: 17345 - DNA, 582 bp, Escherichia coli
atgaatcttgccctaagaaagattatatatgatccaattagttatattcatcctcaacgagtaagtttgaataatgcacgtattagcaatccggtactgagatctattaccaatgaaatgatactcctacagtacaatctttcagttgagcatttcagtctgaatagttcacttatttactacataaacaattggaaattatttccattgatctgtttactcagtggttgtcacttttatcgagaaaggtttgcagaacgcggatttttttacaaggttcctgatgtgctaaggaattatttatcagctataccggtggaaataaatgaaaaggtacgatataaacctggtattgttaactatcagaatatcatcacatgtggtttttcaacgttgttgccctatgtaaggcaacaaccgttggcaatgcagcaacgatttaatttattatttcctgattttgttgaccacatacaattgccgttaccacttgcgtctactcttttggagagaattacattttatgcgaaaaaaaatagagatgagcttgataaactctcctgcaaatggtgttgtgattaa

SEQ ID NO: 17346 - DNA, 327 bp, Escherichia coli
atgctggcggtgaccgcactggttccggcgatctggctggtgactgagatctccaccgtgccgtccgaccctgtgatgacagtcgaagcgaccattgcactgttgtctgccgtcacgctgaccgtctgcccggcaagcgcattaccgaatgcatcggtgaccctcacctgcagcgtgttcgccgtcgaaccgtccgcctctgaaccatccttaatgaccaccagatcagcgatctgcgccgtcctgacatcggcaataaacttcacgctctggctcaggctgctgttgttgatgctggcggtgaccgcactgactcccgccgtctga

SEQ ID NO: 17347 - DNA, 327 bp, Escherichia coli
atggttgcagtgaccgcactgattccggcggtctggctggtgacagagatctccaccgtcccgtccggctgcgtggtgaccgtcggagcagtcgtggcaccgttgcctgccaacacgctgaccgtctgtccggtaagcgcattaccgaacgcatcggtcaccctcgcccgcagcgtgttcgccgtcgaaccgtctgccaccgcgttatcctggctaacgaccagatccgctatcttcgccgtcctgacatccgcgacaaacgtcacgttccggctctggctgctgctgttgatggttgcagtgacggcactggtgcccgccgtctga

SEQ ID NO: 17348 - DNA, 1275 bp, Escherichia coli
atggatatgatcaccggatttgcgccgggatataaaaaaattactgttggtgcggatgttgtcactatgcctagtgacaagattgttagttttacccgtgcatcaaccgctacatatattaataaatctggtaggcttagtgtcgctgcaattgatgaaccacgatttgaaaaaaatggtttattgattgaaggtcaacgaactaactattttgttaaatctaacacccccgccgaatggactagcacaagcaatattgataaaagcaataatggcgttgatgaatttggtttttcatttgcaaaaatgaaaactaaggaaaatatgacgggtcaatcatccgctcttagtttgcatacatgcagcgcatcccgtggtgttgatgttagtggtgataataagttttgcactgtttcttgtcgtgttaaggctcctgatggcctccgttgccgtttacgctttgaaaaatacgacggatcagcttacacctttttgggtgatgcttatttgaccttcggtaaaactttgacgatcaaaaaaactggcggtgctgctaaccgtataacggcaaatgctattaaagacccggttactggttgggtcttctatgaagcaacgatagaagcggttgaaggggaatccttgattggcgcaatgattcagtatgcgccgaaagagggtgggaagacagaagctgatgattatatctatcttgccacaccgcaattcgaaaatggtagttgtgcgtcatcttttattattactacaacagccccttctacccgcgctagtgatatggttaatattcctattaccaataatttgggatctattccgttgagttgcttagttgaggtgcatcgcaattggaatatttctcctagctctgctcctcgaattgtccacacaattggggtcgcttcaaatgacgagcaaatgattttggcgtttaggaatccaacaagtggtaatgtcgaaccgttgccatattgtcaattcggcattaaacaatcatacactccggttgaagtaaaaactggtggtttgatggttgctggatttgtttgtaaatccaattatgaatttaaatgtgttgtgaatggtacatttgcatcaactcaaacgacaacatggaataatccgggcgcagcgtcacagattagaatgggtggatcgtctggtggcggagaacggcatctgttcggtcatttaagaaatctccgtctttggcataaagcgttaactgatgcacaaatgggggagtcagtagaatga

SEQ ID NO: 17349 - DNA, 1422 bp, Escherichia coli
gtgagcgaaacagcggctgcgaactcagcgaaagcatcggcagcaagccagacggcagctaaagcaagcgaagatgcagccagagagtacgcaagccaggctgcggagccgtataaatatgtcttacagccgctgcctgatgtgtggataccatttaacgattcgctggatatgattacgggcttttcgccgtcatataaaaaaattgttattggtgacgatgaaataacgatgcctggcgacaagattgttaagtttaaacgtgcatcgaaagcaacctatattaacaaatctggtgtgctgacagaggctgccattgacgagccacgatttgaacgtgatggcctgcttattgaggggcaaagaacaaactacatgctcaattcggaaagccctgccagttgggggcgatcgtcaaatatggatgtgcccgaaacagggacggataattttggttttacctatggaaagtttgtctgcaacgattctctgattgggcaaacctcagccattaatatggcatcaattgctgcaacaaagtcagttgatgtctcaggcgataataaacacgtgacaacctcatgtcgttttaaaacagaactgcaggtaaggttgcgtatccggtttgataaatatgacggtagcgcaacaacttttcttggtgatgcgtatattgatacacaaacgcttgaaattaatatgacaggcggtgctgcctcaaggattacagcgagagtcagaaaggacgaagctaccggatggatttttgcagaggcaacaattcaggcaattgatggggagttaaaaataggctctcagatacagtattctcctaagcagagcggggcaaccgtatctggtgactatatttatctggccaccccacaagtagaagatgggccttgtgtatcatcttttattatatcaggagcgacggcggcgacccgcgcaagcgatatagttacagttccaattaagaataatctttataatcttccttttacggttctttgtgaggtacataagaactggtataaaacgccaaatgcagcgccacgtgtttttgataccggcggtcatcaaaccggagcggctattattcttggcttcggtcgttcaacagattacgacggatttccttattgcgatattggaggagctaacagacgggtaaacgaaaacgcatcgcttgaaaaaatggttatggggatgcgtgtaaagtcagagcagtctacgtgctcagtaagtaacgggcatatatccagcgaaacaaaaaccacatggtcctgtattcagaacaccgcaattatccgtattggaggccagactacagccgggttacgtcatttatttggtcatgtcaggaatttcagaatatggcacaaggcattgactgatgctcaggtgggggagtcaatctaa

SEQ ID NO: 17350 - DNA, 606 bp, Escherichia coli
atgacgttggcatatagatcactgcgaataatccacctctaccactgcgactatcgcggcctgccgctgacgcttatcagccctgacggggcaacagaatggtgcgcagaatatgatgaatggggcaacctgctgactgaagagaacccgcagcacctgcagcagcttatccgtctgccggggcagcagtatgatgaggagtccggcctgtattacaaccgccaccgctattatgacccgctgcaggggcggtatatcactcaggatccgattgggctggaaggcgggtggaatcagtatgtatatgcttccatacatccaacctattctattgatccgctgggcttaattgataaacctgctccagtattcaatcgagaactaaattcagatgcgtattatcttgccgtaaataattgctattcatatgctctaaataggtatggaaatcctgggagtaggatttttggcggcggaggattacaacctggagaattatctggaaaagagttttctaaactcacttgtagtagtatttttgaagcgtcaaaaaatgatggtgccaaggacagggaaagatcatcagaagtacactttttgtactaa

SEQ ID NO: 17351 - DNA, 570 bp, Escherichia coli
atgcagccggtactccgtccgccgtcccgccgcatccgtctgcgccttcagtctccccgcctcatcatactcgctgcgggtgatgctcccgtccgcatgctccttcttcaccacacgcttcaggccgccctcgccttccgtgtacagcacctcccgccggttcagactgtccgtgatggtcacacggtcctgcccgtactcaaagcggtagtccagcccctccgggttgacctgctccgtcacccgcccggtatcatcataccggtagcggctctccggcctccccgcataatggtgcgccaccatccgcccggcgtgctccgcatcataagtaaacccgcgcacctgcgtcccgctgcggtcatacaccgccagcagttctccgctggccgtgtacgtgtagcgcgccagcggcgcagtcggcagttcatccgggtatgccgggtcgtgtgtcagccataccgcctccagccggataccgttatcggcaccgtactctgtaccgacgggcagcgtgtcggggaaaacctgagaagaggaaacagaacggggaccggcaggggaagataa

SEQ ID NO: 17352 - DNA, 738 bp, Escherichia coli
atgggcgtcacgctgatggttacctggtggtggcaggcaaaacgactgaatttaccttgtcagccgaaagcctcactgcgagaagtctggcaatccttagtttccggtatttgggcgctctttttaccgataattattattggcggtttccgttcggggttatttacaccgaccgaagcaggcgcggttgccgccttctacgctctgttcgtctcggtggtggtctatcgcgagatgaccttctccacgctttatcatgtgctgattaacgcggcaaaaaccacatccgtggtgatgttcctggtggcctctgctgcggtatctgcatggcttattacgatcgccgaattacccatgatggtatcggagctattacaaccgttggttgattcgcctcgcttattattcatcgtcattatgctcgctattatggtgatcagtacggtcatggacttaacgcctaccgtattaattcttacaccagtattaatgccattagtgaaagaagcgggaatagatccggtctatttcggcatcatgtttattatcaactgttcaatatcactgattacgcctccagtcggtaatgttcttaacgtggtatgcggcgtggcgaaacttaaatttgacgatgcggtaaaaggcgttgcgccttacgtcatggttttattcatgttgttagcattatttatttttataccggagctcattaccgctcctcttaaatggatgagttaa

SEQ ID NO: 17353 - DNA, 252 bp, Escherichia coli
atgcgcgactggtggcagccgacgaaagcaaacttcttcggacacctgaaaaagccgcagattatcgcagccctgaatgatgccggactgtccggtgccgcacgggacgcggagaagatgaagaaaggtgatgcggctgaacatgcagagcaccatatgaaagacaaccgctgggttccaggctggatgtgtgcaccacatccacagacggataccactgaacgcaccgataacctggctgatgccgcctga

SEQ ID NO: 17354 - DNA, 252 bp, Escherichia coli; identical to SEQ ID NO: 16616

SEQ ID NO: 17355 - DNA, 915 bp, Escherichia coli
atgatcgactggtttaccggaatcctgccttgcacacaccgaccgttaccggctggtagtgtcgtcagcgtcgatgctgacggtgcagtggagtgggaaacagtaaaacggttgaccgttcgcggttcgcatgagtccacaatgaaagtaaggtctgttggatctgatggtgaaggtcgggcaacacatctctacattgacggtaatccatcaaagtttttgcaaggtcactctgttatcggttccgacgatttgcaagggttggtgttaacagcttacgccagaatattggcattactgcatattcctcatgatctaccatcctatcggcagggcatggaaggggaatttaagatctcgcgcatcgatatcaattacatgtattcattgtcaacattagaaaatgtccgcgcatggttatatgccgcagaatttaaagctaaaactcgccacggtcgcgcctgtggtaaaggtggcactgtttacttagggaaaaactcccgtcgttggagcctgaaattttattcaaaatatgatgagcatacatctggcaaaaaagggcaccagatggcagacgaattcgttaaagctggtttactggactggtcaaaagataaattacgcattgaattaacattaagaacaactgaattaattgatttgaatcttacgcttggtaatagctggaatattgagacgcccaataaattattctctgactatgtagggagaatagaaatgaatcaaaataccatattaactgatgaaaaaataattaatctcccaagaaaaatgcgttatcgaaaacataatctggtgtatcaccaacaaatgccattaaagagtatcgaattgagccaaattcttttttgtgatctgactcttcaccaaatatttttgatatggcggtcttag

SEQ ID NO: 17356 - DNA, 447 bp, Escherichia coli; identical to SEQ ID NO: 13744

SEQ ID NO: 17357 - DNA, 738 bp, Escherichia coli; identical to SEQ ID NO: 12355

SEQ ID NO: 17358 - DNA, 381 bp, Escherichia coli
atgaatgatcttgataagaaaaagtacgaccaagttattgattctgtgaacttcgcccttagatcgttgtcagagttattcgaagcccatggaatgcatgggatgtatgatctaacgaatccaagccttgatgagctaaaattagtgtttacaaggatgaaaaacggtgttgactctattgctcaaagctttgagcacatggtagagacagcaaaggatatggatgccgcaagtgcaagcataaatgttatgaacatcaaacaaggattgatgtatgctgaatcactattgcttgctgtagagaaattagactatgataaatgtgtggaagcaaatacgcagataaaaacccacgatcttccaccaacccaatggccttaa

SEQ ID NO: 17359 - DNA, 234 bp, Escherichia coli
atgagtaatgaactactacgctggcgaaaagaggcttctagtgaggaatggaagcgactcgccgcattagcgaaaacttcagttggctatcttgaccagattgcatatggatttcgaagagcttcccctgataaagcgaatgcaatcgaggaagctactcgtaatttcacggcttataaacctgtgaaaaaggaaaacctggtgttcgtatcgcgtagagcatcagctgcataa

SEQ ID NO: 17360 - DNA, 300 bp, Escherichia coli
atggaacaaacaagttacagcaaactatcacagcgcgatgttgatcgcgcagaaacagatttactcatcaacctgtcaacgcttacccagcgcggtctggcaaagatgattggctgtcatgaatcgaagatcagtcgtaccgactggcggtttattgcttcggtcttgtgtgctttcggaatggcatcagacatcagtccgattagcagggcttttaagtatgcgcttgatggactcatcaataaaaaacgcccggtgtgcaagaccgagcgttctgaacaaatccagatggaattctga

SEQ ID NO: 17361 - DNA, 357 bp, Escherichia coli
atggacgaatcaagaaagcagtttgaggaatacgttgccaaaaaattgagattaccattcgagatgataaccgaggcaagaaatggtgataggtacttcgcattttcaagcatggatattcgtcactccttaaatgagtggtggactttatggcaggcatcgcgagcagctattgaactggatatcgactggccagaatcgaatgacgacttttggaaagatggtgaagaaggtgcttatgcgatgggttatgaggatgggcgtgacaaaacggtaattgcagtaatgaaagctatcagagccgctggaattaaagagaagaatttcgatgaagcaaacaatattcctccgaactaa

SEQ ID NO: 17362 - DNA, 792 bp, Escherichia coli
atgtcacaccaggtgatttgcgaggatttacccagcaccacttttttgcaggaatcggagtttggagctatgcacttagaaaagcaggatggccagacaacaagagcatctggacaggaagttgcccatgccaacctttcagctcggcaggcaaaggaaaaggggttgatgacgagcggcacttatggccggcattcttctggcttattgaaaaatgcaatcctggcatcgttattggcgaacaggttgcaagcgcagacggcctcgcttggctcgaccttgtacaaactgacttggaaggtgcgaactacacctctgcaggtaccgatatttgcgctgcgggcttcggttctccgcacatcaggcagcgattgtattgggtggcctactccaacgacaaatatcaactttcagccagaaacgcgcaggggaattcagaacctatctggatgcgtgagactagcgggatggcaaactcctttagcgaacgatgcaacaggttcaacgcattgctacagcggaaaagacaagagcggaaccccaagaatctgcttgaaacttcccgggacggtgaagctatgtacccattaccggttaacggcttctggagagatgcagactggctttactgtagagatgaaaaatatcgtccagttagacccggctcattcccgatggttaatggcattgccaaaagcttgggacgaggcaagtccacactgggaagaatggcaaagcgcaatcaagatcagcgaattattggatatggaaacgcaatcaatgcagaagtag

SEQ ID NO: 17363 - DNA, 1410 bp, Escherichia coli
ttggctacatggcaacaggctggtaattcaggcgcgcttcttgccgggttaggcggcatgaactccaacgctccaagagcaagtgatgcagacgccacgcttgcatacattcgacagaataacgagatggagcgttcaggacgtaataacgttggcttgcaggctttgcaaggcatttcatctgtcatggatatgtataagcagatggatcagcagaagcgacagcaagagtttcagcaggcttatgctgatgcatatacatctggtgaccgcgatgcaatgcgaaaactggcatcacagtatcctgagcagtttgacgctgtaagaaacggcatgaaatttgtcgatgaagaccagcgttccactgtcggtacactggcagcaagtgccagactcgcagcttcatctccagaagccatgatgtcatggttgcagaacaactcatctgagcttactcgtgccggagtagaccctcttgatgtggcgaaaatgtatcagcaaaatccacaaggtttcacagagtttgttgatcaccttggaatggctgcacttggtccagaacaatattttcaggcacaagacagaatcgttggtcgtgagattgaccgcggaaaacttgcagagacaatccgcagcaatcaggctggagaagcactaacagcgcgtggtcagaacatcacgatgcgcggacaggatttatctgcttctactgcacgacgcggtcaggatttggcaatgcagcgatcgtcaacaagaggaactgctgggaatgatgagcgcacagttcagttatcagatggcagaactgtaactgtcggcgggaagcttcatggcgctggggctaatgcgttctacgaaggtatcgacaacgaggggaatatggttcgcgttcctgctggctctattgccgctccggctacatcggcagcaagcgcgcagaattacgcaatgaagaaagatcttgatgcaatttctggtgcatcaattgacgatcttggcttcatgactggcattacaggctcttcaggttctcctgctcttggtgcagatattcgtagccgtgcatctggtggtgatcagaggaaactatacaacgctgcacagcgaatccaaggaaagatgcagaatcagggcattgcagcagccagagacatgggggcatccggtatcaacaccgttgcagaagcaaagatgtattttcaaggtatgccacaggttgatttctcaagccctgaagcactgcaacaatcaatgcgcgacattcagcaatataccgacaattacaaccagcaatataacgttaatgtcggtaatggagggaagaaatcttcaatgcaacagccgcctactcagcaatcagcaggaggtagctacacgtcaaaatcaggcattcaatttacggtggaatga

SEQ ID NO: 17364 - DNA, 1830 bp, Escherichia coli
atgaaagtaactgcaaacggtaagacatttaccttccctgatggtacgagcacggaagatattggcaccgccattgatgagtattttgctggtcaggctgttcagcaacaaacagttaatcaggccaataatgaaccagcacgtgaagaaccatcattgatgcaacaagctggcgattggctcacaggtggtcaaagtgcagggcaaattgcagagcaggctggtcgtggtctggtaaacataccatttgacgtattgcagggcggcgcaagcctgattaatgcaatcagtcaggggcttggtggccccaaggttttggatgatgtttatcgtccagtagacagaccgacagacccctacgctcaagctggagaaacaattggcgggtatttagttccaggagttggaacggcaggaagcatggctattggatcactggcagaggccgcaaatcagaaaggcgatttcgcacaaaatgcagctaaaaatgccggagtcaaccttgccgctcagggggttctttccgcagcagcaaagggaatagggcgtggaattactgctgttcgtggcgaaatatcacccgcagatcagcaattgctcaagcgtgccgctgcggcagatgtaccagttatgacatcggatgtagttcctccaaaaacaaaacttggcaatcaactgcagggttactcagaaggagtcatcgctgggactggaccaatgagagccgcacagcaggatgctagaaccaagcttgttaatcgcttcaccgaaaaatacggcgactacgatccatctgtagtagttgatagtctaaagtcaggcgttgcgagggaaaaatcgttagccaagtcaaaactaaacaacctgtcaggaagaatggttggaaagccagttgatacaagtggcgccataagagctatcgacggagcagtaaacgaacttgggaaacttaaaggtgtttctgacacacagaccatttctgcgcttaatgattataagaatgccattcaggagataacaaatggggatgatgcctttgagttacttgataagctgagaactcagttccgcattgacgtaaaaggcgatcgtacagttctgccatcaatgtcgcaaacaatggtcgacagggtctacaactcgctaaccaatagccttagtaaatctatagcgaaaggacttagcccaaaagatgcttcagcatggagagcgggaaaagctgattatgcaaaaatggcaacacatgcaactcaaacgcgccttaaaaacgttctaaacaaaggagatttaactcccgaggctgtaaataccattgtgtatggacaatatgggtcagatatagctcgattgtacgggaaactcgatcaaaaaggtaaagacatgctaagggcggcatatatcagcaaaatagctgacaaggtaggtgacagccctcagaaaatgatgaccgagcttggcaagctgcaaaaacaagcaaatggtcaggtgtttaaaactgtatttggtgggaagaacggaaaagagatagaggggatgttatctattctcgatgctaccaaaagagcatctgaggctaatgttgtgacgaagactggcatgacactcgcgcctttggtaagggttattggtaacctaaaaaacggaggcgcgctattggctggggaaacagggattggccttatgtcgagggtttatgaaagccctatggctaggaatgcgctcttacgtctggcaaacactaaagctggaacgccagcttatgaaagagcgttaagcaaagctgcaaatgccatcagaccgctgcttgccactgaggcaacacagcagtga

SEQ ID NO: 17365 - DNA, 1761 bp, Escherichia coli
atggataaaaacacaataatatctgttttaattagattactaaatgaaaaacgtgaaggtctaattttgttaaacggtgagtggggggttggtaaaacattcttccttcaaaatgaatttaagcaatattattccaacaaaactcaattttatatatctgtgcttggattaaatagtttgcaagattttaaagacaaggtgttgagtgtaacttatttagagaatccacccgatatagaaataattacagagttagcatcaaatgtaaccacagctattactaaagaagaaagcactgggaagtttactggaaaaataatatcaacatttgcaggggcaatgcaacattatgtattaaaagatctttcaggagtttttattattgatgatctagaacgtatacctcaaaatttgcgagatgaaatagcaaccttttgcttacaaaattatcaaaataacaagatgttagactatattttagttggtaatttttcaaaacaaagcaatgaggtattgaatcataaagaaaaagttattagcgacgaggtatacttttctataaacaatctttctgacattttagataaaaagcttgagaaaatacaagaaaattatagagacatcattaagcaagtaattatagatttcgaagaaacaaatatccgaatcattaatagagtcattgtaaaactcctaccgttgtttgaacaaacaacgcaagacagagatatctctgatatagatattaaaaatttagtaagctcattgtgtgcacatataatacttaaggaaaaattcaactataaggaaaatgagtttcgtgaaaattttgtttcatcatcactcaaaacaatttcaaccacaccagaaaacgaacacaatgaaataagtgaagaagaaaacaatttattaagtattagtgcatacaaaaactataataataaaatggctccatattgttttaatgcaatttcgcataaagacattcttccatatgtttttactgacaatacccctcccaagagaaatgattatgctggattattaagacctgagttatataacatatctgaacatgactatcaggaagaaataataaaaacaattttaaaatcaaattctccagatctatctacatggttaattgccacgaataactatattagactctcaaaatatgaatatatacctcatataaacaccctagatgaagacaccattaatcaaagcaaacttagcttcagtgacgatgaaataaaatcatattttcataaaaccgtgccaaacatcaatgacatcccactaaatatgctaaaacatgatggagataatttatataacttttttgttgacaaatatattaacataacaaaaagagaaagaatagaagaattaaaaaacaagatggttaacgatggttggaccactatcgatatggatatatatcattcagatttcaagtttaaagcactggaaactttagatgtaaatttaatcataagtgccatacaacataattggtccatttacgatattcaaatgttttcagaccatctattatctgtatacaacttttctaaccttcgcgattatctatctaacgagctacctcatctaaaaaaactagatgagttcttaaattcttacctgaatgaactttcaatttcttttcgtcgcggagccattattgagttaaaaaacaccgtgaaaaaagtaaaggagtcactagagaacagtatttcattcataaataaaaactga

SEQ ID NO: 17366 - DNA, 1551 bp, Escherichia coli; identical to SEQ ID NO: 8975

SEQ ID NO: 17367 - DNA, 159 bp, Escherichia coli
atggtgaattaccgtcttatatcactggcgctgacatacccgcaggatcttcgggtgcacgtgaccataaagcaggtgcctaccaaagctgtggcgattcagatccctaaactgatggggtcccaaaaagtatgccatagcaagtgtaagtatccctaa

SEQ ID NO: 17368 - DNA, 966 bp, Escherichia coli; identical to SEQ ID NO: 5072

SEQ ID NO: 17369 - DNA, 216 bp, Escherichia coli; identical to SEQ ID NO: 8996

SEQ ID NO: 17370 - DNA, 771 bp, Escherichia coli
atggaaaccgtatctgacgcactgaaagcactgaaaaaagcctcttcacatgtggtggcagctcgccttggaatcagtcgtgaagaggctgtcaacgagctgtgggaactcaaaagaaaaggcgtcgttgataaaactggtcacacctggtttctggctggcgaaggtgaatcccgggtaaccgaagagcggccagtaaaatctgaagcacaggatatgctgaccggggaggtcgaacaaaaagttaccgcagacatgatgattgagtttatcggtcaggatggggctaaaacgtgtgaggaactggcgggtaagttcggtgtcagtactcgcaaggttgcttccacgctggcggtggtaaccgcaacggggcggctggcacgcgttaatcagaacggtaaatttcgttactgcatgccgggcgataatttaccagcagagccgaaagccgcgctggtaacggaaagtgatggtaaggcctttcctcagccagcaggtgctgcgttaccagtccgggaagccgcaacacaggaagaaattaaaacagaaactgtggcggacattgtgcagccgttgccatcgtttaccgaaacgcaagcagatgagctgatttttccgtcccttcgcagggcaaacctggcgctgcgcagggcgaaaagtgatgttcagaagtgggagcgagtctgcgccgcgctgcgggagctgaacaagcaccgggatattgttcgacagattactgattcttcccgccgtgttgtatcggaaaagtga

SEQ ID NO: 17371 - DNA, 225 bp, Escherichia coli
atgttccaggaattgccagtgaaattttgcgcgggcgcgacgttcatcaccggcttcaatggcagtggctacagcgactgcaccttcttcctttattacctgttcgtccggaatggcggcgcaaataaagactttactcattttgttttacctcattacagatttaagggtgaacaaatccctgccattgctggcataaattcatggttaatttgtgttttataa

SEQ ID NO: 17372 - DNA, 351 bp, Escherichia coli
atgactcaaaactatgaactgattgtgaaagggatccgcaattttgagaataaagttacggtaactttagcgttacgggacaaaaaacgctttgacggtgaaatttttgacctggacatctcgctggaccgtgttgaaggtgccgcgctggggttttatgaggcagcagccagaaggagcatcagacaggtcttcctggatgttgctgccgggttatgtgaaggggatgagcagtcgccggaaaagcgccccgtaattttagaggcgcagaatgtgtggataacctacaaaggaaagctaccaggaagaattactggttctctgaagactcctccggaatcacaaccttaa

SEQ ID NO: 17373 - DNA, 216 bp, Escherichia coli
atgaaatccatggataaaatttcaacgggcattgcctacggcacctccgcaggcagtgctggctactggtttttacagtggcttgatcaggtcagtccgtcacagtgggctgcgattggtgtactggggagtctggttctgggcttcctgacatatctgactaacctgtatttcaaaatcagagaggaccgtcgtaaggctgcacggggagagtaa

SEQ ID NO: 17374 - DNA, 189 bp, Escherichia coli
atgacttcagcatttgcactgatgatgacggtttttcttataacgggtgaatcacagaatgtgattaccggaatttatgcaagtaaagaatcctgcctccaggcaagagacgagcaaaaaatttctggtgaatgcctcccgctaaaaaaagtatcgctgtacctgaataacgaaacaccggctggataa

SEQ ID NO: 17375 - DNA, 189 bp, Escherichia coli
atggaaacgttattaccaaacgttaatacgtctgaaggttgttttgatattggtgttctgctcagtaaccgggagtttactgaagatgccattaatatgaggaaatatgagccttatctgctcaatgataattccatactttcccgaattgctcttcttgaacttggtattttcggagaacgtcaatga

SEQ ID NO: 17376 - DNA, 366 bp, Escherichia coli
atggtggatggtaagcccgtcataccgggaatgaagctgtcgaaggaaaaatgcgaccaggttaacgctattgaacgtgataaggcgctggcatgggtagagcgcaatattaaagtaccactgaccgaaccacagaaagcgggtatagcgtcattctgtccctataacattggccccggtaagtgtttcccgtcgacgttttataagcggctgaatgccggtgatcgtaagggcgcatgcgaggcgattcgctggtggataaaagatggtgggcgcgattgccgcatacgttcaaataactgctatggacaggttattcgtcgtgaccaggaaagcgcattagcctgttgggggatagatcagtga

SEQ ID NO: 17377 - DNA, 291 bp, Escherichia coli
atgaggcgacctaaacgtcgccgttgggtaaatgagaaatatacgcgctgggtgaagacacagccgtgtgcgtgttgtggtcagccagccgacgatccccatcacctgattggtcacggtcagggagggatgggaacaaaggcccacgatattttcacgctaccgttgtgccgggaacatcacaacgaacttcatgcggatccgctggcgttcgaagaaaagcatggttcccaggttgatttaatttttcgttttcttgatcacgcctttgcaaccggcgtgcttgggtaa

SEQ ID NO: 17378 - DNA, 480 bp, Escherichia coli; identical to SEQ ID NO: 12357

SEQ ID NO: 17379 - DNA, 909 bp, Escherichia coli
gtggcgattgacttgattgacttacgggcagcgttcgagaacgaaccgcccgcactggactttatttggccgggcttccttgctggaacagtaggcgcgttggtggctcccggagccacgggtaagagcttctgggcgctggaagcggcaatgtcggttgcctgtgctgcaaacgttgaaagcagagcgtccggtggtgacttggtagggcttgcacctgcgaaagctggccgcgtcgtctattacgccggagaagaccccaagccagcgctgattgggcgaattcattctattggcaaacatcttgggcacgaagctcgcgaagccgtcattgaaaacctcatggtcataccgatcatgggaaaactaatggacgtgatgaacgaaagtaagcgggccgaggtaatcgagcaatgcgaaggcgctcgactaatcgttctggacacgttgagccgtattcatacccttgatgagaacagcaacggcgagatggctcagcttgtcgctaagcttgaggaaattgcgaccattactaaagcgtcagtgctttatctgcaccatgtcagcaaaggcagcgctcgcgacgggcaggccgatcagcagcaggcagtacgtggtgcctcggctcttgtcgataatcccagatggtgcgggttcgtcgcgaaaatgactgacaaagaagcgcagaaccatacggaccgcgcctatgaccgacagcctatcggggaagaccgccggaagttctttgtccgttttggtgtcagcaaacagaactatgccgaaattgacgacgatcgttggtatcaacgtcatgacggcggcgtgttgctgccggtggagttgttggacgccaagcaagagggtgcggatcggacccgaggcaagggccatgccgcagccgcatattag

SEQ ID NO: 17380 - DNA, 984 bp, Escherichia coli
atgccgcagccgcatattagaccggcttacgctcggctcgatcctgcccatgcgttcgacggactattcgtacccacgaagggcaagccgcgcggacgtttgctcgtggagccgcgccgcttcggtaggctcgaaatcggctttcaaggcttcgagcagcttggagccgatgatcaatcgatcctgctggcattgactgctcagcttggcatagagcgtcttgtaattgaagctaccccagtcgggcctgtcagcaaacagttgcgcctcgcgctggactttaaccgagacgaaggcgcaccgttggcgaccaagcgcaccagtctgcgaagcctcctgatcgacgccggatatcgagaccccgaaagtggagctgcgcttgcaagagcgaaaaagagtctcaaccggctgcgggcaacacaaattcgggaaatcgatagggaaacggggtgggatagggcctgcaaccttatttcgcttagcttcaaccataagagcggggaaatttatgtcgccgccaatcctcgcctgacgggtgcggtttttcacggacagcatgtccgagtctcgttgttcgagcggaacgcactggaaacggaggtcgccaagctgctgcactgctggctatgctcgaatatccgacttggccgagcgctggggaacggcaatggagcacacctcgacacccttgcgcctcacgtctggggcctagtggcatgggagcgcttctccgcgtcggaccgcagtaaaaggcgcggccagctgcgagcggcattggatgaaatcgcagagcgcacatgcggcctgcaagatggaatgggctgggccatcgaccagaccagcagcgggctggtgttggtcggccgccccaaggtgctgccacttcttgaaagcgagcacgaaacgcctcccgccggaatgtacggactcacaagtcagtccgaccgagagccgtcctccttgtcagattggacgccgaattga

SEQ ID NO: 17381 - DNA, 327 bp, Escherichia coli
atgatgaacgatatattttttggcctgatgatgctcggcggtttttttgttctcggtattggtatgtgggcgcttggccaatggctgcgacgcaaaggcttcggcccgcagctcgatgaactggataagcagtacacggcactacagcatcgtgtgaaccgattggctctgcctgccgctgcgcatttctacggcggcatgggtatgcttaatcgcatgccacttttcggcagcaagaatcaggtggtactggtagagcgtgtgagaatggccatccttcagatggaagaggaagaacggcagcgaggcagggtcatcaatcgctga

SEQ ID NO: 17382 - DNA, 1644 bp, Escherichia coli
atgcgacgttcaaccgtttacgcacttgtcggcgcggtgctcttgctatctgcaactagtgcgatggctgccggggtcgatttggcgcagagcaacacgtctatgaacagccttctgcggctgattcagaacgcttcaaaccaatgggcaccgcgcctgcatgattacgccttgtggctcttgggatgccttgccgtcatccagttagtttggacttttgctcctttggtcatgcgcggggctgaactgggcgacatcctccatgaactggtgaaattcatcctcgtgatagggttcttctatgcgatgctcgatcacgcgaccgagtggggcggggccatcgtcaacagcttccggcaggccggggcgcacgcggcagggttgggtagtgcggaactgatgccgggggatatgttctcaactgctgtggacttttcacggcaggtgctgacggcaggtgtttcgatgttcagcccaatcacatcggttgtagttgccgtatctgcattgatcgtcctgatgtgtttcacgtttatagcggctctggtgttcgtgacgctcgtagaggcctacgtcatcatcaatgccgccgtcctgttcatgggtttcggtggctctcaatggacacgcgaatatgcactggctcccattcgctatgccgttgcggtaggtgccaagctgtttgtcctgactctgattgtgggtctgatcatgcaggtttccgcagaatggtcggcagcctacaccaacgacgaagcgtcgttgatgaccttggtcggcctgtctttggtgtgcgcctacctgaccaaaaccatccctgaactgatcggcggcatgattaacggcacgtcgatgggcggcggctctgcaattgggggcatggccgcagccggtgcagccggtgcggcggccgcaatcgctactgttgcaacagctggggcagcagccccggctgctggagcactaggggccgcgggaactggcggaggcgctgccagtgcagcgggtggtggactggcctccgcattgaacgccagcatggcaggcggcagtaccgcagggggcatcggtggtgcgacgggcgtcggcagcgctggaattggcgcaagcacaggagggggcagcggtgcgaccgcaaaggccgcaggttctcgcgtcgggggtggtgccgcgtcaggatcggcgaatccagtgtcggcggccgcttcgcctgctagccaagcatcaggcagcggcttgaagcaagccgccaaacaggccggaaaagctgcgaagggtggtgacgacgatatgggtcagcaagccgtcgcgcagcaacggcagatgacaccaaaagaagggactggcggcaacggcaaggctgttgcgcagggcgccgaggtggccacacgggcgcttggcgtgctgggcgctatcagcgtacccggcatggaaagctcccacgggctttcgctcgggggcaccggatctccccctccagtccccggcggtgacagtccaacgcctgatgacggcgctgagccgactgcacaagcggaatccaacattattcgtccggcatcggacaccactagcaccggagacgtcggcgcgctcaatgtgcccggcatggcttctagtgttaactctcaatcggagacgtaa

SEQ ID NO: 17383 - DNA, 183 bp, Escherichia coli
atgatgatttctaaggcgctgattgccgccctctgtctcgtctcggcccttggtgggtcggcactgacggccgtggtcgtcacgaacgccgccgcgccggaatgcgcagcggtcggcaatggccatcaggatgaccaattccgcagccgcccaaacactcgcggcccgtctgaggggttctga

SEQ ID NO: 17384 - DNA, 243 bp, Escherichia coli
atgaccgaccatcaaaatgcaaatactgaacgtcgccctcaacgccgtggccgcgcatcgttcgtggcggtacttgatgaggtgcggaaggagcacgaacgcggggtaccgctggtatggatttatgaggcattcgcggaccggctcgaaatgggatacacccagttcaccaaatacgtcacacgatacatcaagcaaggtcagccaatcctcgctccctacaagcacgacgggaagcgatga

SEQ ID NO: 17385 - DNA, 381 bp, Escherichia coli
atggccggtgaaaatgcgattgaggctatcaagccgcattcgcgtgggacacgtccacggcgggagcgaattgaggtttgggtcagcattgatgagaaaaaagagttagccgaaagggccgatcaggcggggttgtcgaatgccgctttccttcgcgctgttgggctgaatctgcctataggttcacgggccgatttggaagctgtccgccagttggcaaaggtgaatggcgacctcggccgggtggccggattgctgaaattgtggctcgctgagaaacgcggtcagggcgcgcgaccgattgacgtagaagcgatgatgatggatttccgcgcaatccaagaggacatgcgggcgctcatggggaggatttccaaatga

SEQ ID NO: 17386 - DNA, 1953 bp, Escherichia coli
atgatcgcacatcgcatcaaccgtgaacgcaaggcctcaagcccagcccggttaatcaagtatatggtggcggccaagggcggcattgacccgacgagctgggagcgcacggccgattacattctggattccgccaatggcacgaccgagggcgagaaggtcgccagctaccgcgttaccaactgcggcacggatgatccggcagatgccgcaatcttgatccaagccacgcaagcggctaacaccaggtcgaaggcggaaaagacctaccactttgtctattccttcccgcccggcgagcagccagaccttgagacgctgcacgccatcgaagacgaactatgcgctgccatcggcctcgatgagcaccagcgtgtatcagcggttcatatcgacaccgataacctgcatgtgcatgtggccatcaacaaggttcacccgaccgggttacagaacattgaaccctattacgatcagttccgcctgatggaggcctgtgagcgtcttgaggtagagcacggcttgcaaagaacgtttcatggtctggaggcaaagcagcggcatcagaaccgcgacattgagctgttgccagcgaaagccccagagcagcgcgacagcctattccgtgaacaccttagaaacgcttacgacctcagcatatcgaagcctcctgaagccaaaaccctgaacgggttgcgcaagctgtccgatacccgtctacagagacagtcagcagataaagcggagccagtccgcatcggcgcgaaggtggccagcgtggaggcgcagtccggcatcgagacgctgaccgggtacgcggcccgcgagctggccccggcgatgcgacaggcgacgagctggcaggagctgcacgacgcagcggccgaacacggcctagaggttcgccagcgcggcgctggccttgtcatcggcgagccagattcaggcatttgggcgaaggccagcaacgtcggccgcgacctttccatgaaggccctaactgaccgtcttggcccgttccagccttccgaacggcaggccgaggcgaaggcgaaccgcaagcggtacgagccacgaccccggcggccggataacccgacgacagcgggcctgttcaatcagtaccagcgcgagcgacaggcggccattctggcccgccgtcagggcctcgaccagatcaagcgcgagagtgcagctttcaatgcgcaggttaagcagtggagccagacagagcgaatgcttttgaaggtcgcgggcaaggggccgaccaaacgcctgatgtacggcactatcaaacagcaggccgacgcctcgcgccaaaagaaccggcagagcgcagacgctcgccgtcaggcgctgttcaaacagacgacgatgcccacttgggccgactggctgacgcagcaggccgagcgcggcaacgccgaggcgctggccgtgctgcgcgaccgcgaggaacggacacgccgctggaacggggagctactgaccgccgaccgggccgacaaggccaaggctgttgttctcgacaagctcaagcccaaggcccggaaagacgggacgatggcgtacagcaccatcgacggcggcatggtgatcgaccggaagacgcacgttcaggcgcagaaagccacgaccggcgcggcactggttgcgctcgaactggcgtccaagcggttcgagggccaagccctcatcgtggaaggcacagacgagttccggcttgaagtcgcccagctcgccggtatgcacggccttaaggtcacgttcaccgatccggaaatggagcgtatgcgccgcgagacggccgagcataaggaaatggagaaggcctttcagaccgaggtatacgctccgaaggacaccaaaaagggagaggcgagcgatatgccaggcgtggccccacagcgtaggcagatgcaaccgaaggaccgctctaatggactgatatag

SEQ ID NO: 17387 - DNA, 1008 bp, Escherichia coli
atgcatctaataatgctcgatacatgtgtttggcttgatatttcgtctcaaaaagctgaattgccgatgattactgccatagaacatctggtgcaggatgggagtatcaaaatactactgcccgatctgatacgtgccgagtacgaacgaaataaagatagggtgattgaggctacgcgaaaacggctcgccagtgaatttcgagtaattaaaggggtggttgagtcgtttggcggtgaaggtaaagagactgcgctcaaaaccttggatgatgttaataacaggctgcctattctttccgaagtaaatcaaaacacagtaaatcgtgttaccaaactttttgacatggcccacgaagttgtaatctctgatgtcgcaaaaatcagagcagcagagcgggctatcgctaagaaggcaccgttccataagcagaagaatagtgttgctgacgcagtgttagcagagactttccaagagtttcgggtgtcacacgcaagtgagtacgaaacctttagatttgtcactcataatgtcacggatttttccggcaaagaccacaggcagccacacgacgatttcgcagatatttttgacggcagcagctctttattctttaacgccacaagctctgccatcgaggatttgctcgatcttgaagaatttcactatgagaatagctttgcttgggaggacgaaactcgtgggcttcaggaaatcatgtctgcgatggacgagttgttcgataaagtttggtacaaccgccatatgaacatgatgtatcacctagataatggtgacatagagatcgtccccgctggcacaaaacgctacggcaatgatgtgattcacgaagatatcctcggccaagcagaaattgcagctcaacgggtcagggataaatatgaagatactgggccttggagcgactttgaatgggggatgctcaatgggaagctctctgccctgcgatgggtcttgggggatgagtgggacatgctcgacacgtaa

SEQ ID NO: 17388 - DNA, 825 bp, Escherichia coli
atgggcaatgtaacaattattaccaatgctattgggcgttttgccaacgccatgcggctctatggtgaagccttcatcagatatcgagggctggcagcaatcgaccgtgaagaggctatccacaacctcgaccgagcatttgagcaaaatcttgagagttttcatacgttatatgatgtatcgcaagggatgtttgactttcatgctcatccggataccagtctcctaattgctattcgtaatgctcttcatcatcgtgaccatcctttgttccatagtcttcttcagactatttggttggacggggagccagagcgtctgcttggagcggagtatttaatggctaggcatcgaacgacgggtggcaatcccccgccgatgatgcacttgatcaagttggaagatatatacagtcgcctcgacccacgtcgtgaatcggtgcacataaatccaatgggtaagagcaatgctttatctagatttatcactctggaaaatggccttgccttcgagagagtgtgggccaaagcaaaaaaagatcgctatcctaccaagcaggtgtatttggacttgttgccgatatttaattctgcggtttcgagagtttttgctgcattggatacggctggagtgccgtttcaagggtttgatgcaaacgcctataaatctacatttattgatgaattaaagacagaccttcaacatttcgatttctttggtctgcgtatgcatgcgctacagatagaattaggcccgaagttcacaatccaagaggcctctatcagacggggctgtacctacgaaaaggtgatggaggacgaatag

SEQ ID NO: 17389 - DNA, 189 bp, Escherichia coli
atgaaagacagaccacatagagaggcgatggccgagcaattccgggccgatccgacttatgcggcggagttgcttgccgaagtccgtcgcgacggcaacccggacgagctggcaattctgttgcggcagatgcacgaggcgttcggggacgattgcacgcgttccggctctgcaacgaggcaactatga

SEQ ID NO: 17390 - DNA, 699 bp, Escherichia coli
atgacgcaagcagcttggacccgcgatggtcggccggtggatgcggcttctattcccggcgccgagtgggaggcgttgaaggcggcggcgcagttaggtgacttcatgatgccttgctgcaaggcaccggcagtactcaagacaagcatcaatggcttgcctttcttcgcccatctgtcggacgagtgcagtactgcgcccgagacaaaatggcataagtcgggtaagaccgcagtgatggccgccttaaccggcatgggtatcgagaaccgcgacgaggtgccgggccgatcaccaagcggcgacaagtgggaggctgatgttctcttttcggtttccggtcgcaccatcgtaatcgagctgcaacgctcctaccagcatctacgcgacttcacacgtcgtcaggagcggtacactgcatcgggcgttgagtgctactggctggtccgcaaggagacattcatgactttaggcaaggccacgtcgcgcctgctgttgaagcgtgatttcggcaacgtgtttccgcccagtggaattggtacgggcatgctgcccgagctgccggtggcgatgctggacaccgagggcgagcaactggttcagttcggcgggttcaagagcgcgactgttcctgtttggctggcaggcatcctcaatggtgcataccaatatcgcggcggctcgtggaatcttgactga

SEQ ID NO: 17391 - DNA, 1149 bp, Escherichia coli
atggctaacagaatgattctgaacgaaacggcatggtttggtcgaggtgctgttggagctttaaccgatgaagtgaaacgccgtggttatcagaaggcgctgatcgtcaccgataaaacgctggtgcaatgcggcgtggtggcgaaagtgaccgacaagatggatgccgcaggactggcatgggcgatttacgacggcgtagtacctaacccaacaattactgtcgtcaaagaagggctcgatgtattccagaatagcggcgcggattacctgatcgctattggtggtggttctccacaggatacgtgtaaagcgattggcattatcagcaacaacccggagtttgccgatgtgcgtagcctggaagggctttccccgaccaataaacccagtgtaccgattctggcaatccccaccacagcaggcactgcggcagaagtgaccattaactacgtgatcactgacgaagagaaacggcgcaagtttgtttgcgttgatccgcatgatatcccgcaggtggcgtttattgacgctgacatgatggatggtatgcctccagcgctgaaagccgcgacgggtgtcgatgcgctcactcatgctattgaggggtatattacccgtggcgcgtgggcgctaactgatgcgctgcacattaaagcgattgaaatcattgctggggcgctgcgaggatcggttgctggtgataaggatgccggagaagaaatggcgctcgggcagtatgttgcgggtatgggattctcgaatgttgggttagggttggtgcatggtatggcgcatccactgggcgcgttttacaacacgccacacggtgttgcgaacgccatcctgttaccgcatgtcatgcgctataacgctgactttaccgatgagaagtaccgcgatatcgcgcgcgttatgggcgtgaaagtggaaggtatgagcctggaagaggcgcgtaatgccgccgttgaagcggtgtttgctctcaaccgtgatgtcggtattccgccacatttacgtgatgttggtgtacgcaaggaagacattccggcactggcgcaggcggcactggatgatgtttgtaccggtggcaacccgcgtgaagcaacgcttgaggatattgtagagctttaccataccgcctggtaa

SEQ ID NO: 17392 - DNA, 1776 bp, Escherichia coli
atgaaaaaaatcagcttaccgaaaattggtatccgcccggttattgacggtcgtcgcatgggtgttcgtgagtcgcttgaagaacaaacaatgaatatggcgaaagccacggctgcactgctgaccgagaaactgcgccatgcctgcggagctgccgtcgagtgtgtcatttccgatacctgtatcgcgggtatggctgaagccgctgcttgcgaagaaaaattcagcagtcagaatgtaggcctcaccattacggtaacgccttgctggtgctatggcagtgaaaccatcgacatggatccaacccgcccgaaagccatttggggctttaacggcactgaacgtcccggcgctgtttacctggcagcggctctggcagctcacagccagaaaggcatcccggcattctccatttacggtcatgacgttcaggatgccgatgacacatcgattcctgccgatgttgaagaaaaactgctgcgctttgcccgcgccggtttagcagtcgccagcatgaaaggtaaaagttatctgtcgctgggcggcgtttcgatgggtatcgccggttccatcgttgatcacaacttctttgaatcctggctgggaatgaaagtccaggcggtggatatgaccgaactgcgtcgccgtatcgatcagaagatttacgacgaagccgaactggaaatggcgctggcctgggctgataaaaacttccgctatggcgaagatgaaaataacaaacagtatcaacgcaatgccgagcaaagccgcgcagttctgcgcgaaagtttactgatggcgatgtgtatccgcgacatgatgcaaggcaatagcaaactggccgatattggtcgcgtggaagaatcacttggctacaacgccatcgctgcaggcttccaggggcaacgtcactggaccgatcaatatcccaatggcgataccgctgaagcgatcctcaacagttcatttgactggaatggcgtgcgcaaaccgtttgtcgtggcgaccgaaaacgacagtcttaacggcgtggcaatgttaatgggccaccagctcaccggcaccgctcaggtatttgccgatgtccgtacctactggtcaccagaagcaattgagcgtgtaacggggcataaactggacgggctggcagaacacggcatcatccatttgatcaactccggttctgctgcgctggacggctcctgtaaacaacgcgacagcgaaggtaaaccgacgatgaagccgcactgggaaatctctcagcaagaggctgacgcttgcctcgccgctaccgaatggtgcccggcgatccacgaatacttccgtggcggcggttactcttcccgcttccttaccgaaggcggcgtcccgttcaccatgactcgtgtcaacatcatcaaaggcctgggaccggtactgcaaatcgcggaaggctggagcgtggaattgccgaaggatgtgcatgacatcctcaacaaacgcaccaactcaacctggccaaccacctggtttgcaccgcgcctcaccggtaaagggccgtttacggatgtgtactcggtaatggcgaactggggcgctaaccacggagttctgaccatcggccacgttggcgcagactttatcactcttgcctccatgctgcgtatcccggtatgtatgcacaacgttgaagagaccaaagtgtatcgtccttctgcctgggccgcgcacggcatggatattgaaggccaggattaccgcgcttgccagaactacggcccgttgtacaagcgttaa

SEQ ID NO: 17393 - DNA, 471 bp, Escherichia coli
atgaaacaagaagttatcctggtactcgactgtggcgcgaccaatgtcagggccatcgcggttaatcggcagggaaaaattgttgcccgcgcctcaacgcctaatgccagcgatatcgcgatggaaaacaacacctggcaccagtggtctttagacgccattttgcaacgctttgctgattgctgtcggcaaatcaatagtgaactgactgattgccacatccgtggtatcgccgtcaccacctttggtgtggatggcgctctggtagataagcaaggcaatctgctctatccgatcattagctggaaatgtccgcgaacagccgtggtaatggacaatattgaacggttgatctccgcacagcagttgcaggctatttctggagtcggagcctttagtttcaatacgttatataagttggtgtggttgaaagaaaatcatccacaactgctggaacgcgcgcacgcctag

SEQ ID NO: 17394 - DNA, 471 bp, Escherichia coli
atgcaaatacccaccgggcgccgctgccgcgtgggaatcggcccaccttgccaggcgccgctgccgtgtggaaatccgcccatcttgccgggcgccgctgccgcgtggaaatccgcccatcttgccgggcgccgctgccgcgtgggaatcggcccaccttgccaggcgccgctgccgcgtgggaatcggcccaccttgccgggcgccgctgccgtgtggaaatccgcccatcttgccgggcgccgctgccgcgtgggaatcggcccaccttgccaggcgccgctgccacgtgggaatcggcccaccttgccgggcgccgctgccgtgtggaaatccgcccatcttgccgggcgccgctgccgcgtgggaatcggcccaccttgccaggcgccgctgccacgtgggaatcggcccaccttgccgggcgccgctgccgtgtgggaatgcacccaccttcctgacggaaattaa

SEQ ID NO: 17395 - DNA, 429 bp, Escherichia coli
atgcaaaaacaatacttcagtcagattcgtcgccagctcgtcaacgtcaccggcgtgttgctcgcttcattcatcgtcattccagccctggcagcgcaaggcggtttctccgcagagaaagagccagtcgccactgaacgcatgtatgccggtcataaggttcagcaggaaaacagtcaaagccgcattcaggccgtgccgtcgatgcacgaaggggcgtggatcacactggaaggcaatgtcatcagccagcagcaggaagagtggtatacgttccgcgatccaaccggaaccatcaaagttcgtattccacagaaagtctggaacgggcagcacttcgatgcgcaggatttggtgcgtgtgagcgggcagataagccgtgagaatggcactacgagcctgaacgttgaggtgatcaaaaagccttaa

SEQ ID NO: 17396 - DNA, 1143 bp, Escherichia coli
atgactgatttttctgctcttctgcagcaaggcgtagccaatgcctggctgtttattcccagcgctatcctgctgggtgcgctgcacggactggagccaggacactccaaaacgatgatggcggcgtttattgtggctattcgtggaacggtgaaacaagcggttctgctgggactggcggcgaccatttcgcacacctctgtggtctggctcattgccatgggtgggatgtatgtcagtcagaaattcaccgctgaatctgcggagccctggttccagttaatttcggccatcatcattcttgccacggcagcatggatgttctggcgtacctggcgcggtgagaagctatggaaaatggagcaggaagaggagcattcccacggtcatcacgaacatgatgaaacccggattatagataccggccacggcagcgttgaactctctattttcgaggaaggacagccacctcactggcgtttacgtacgctcagcggcagaaagtgggaagccagcaacatttctgtagccacaaggcggggcaatggaacctattctcaggttttcgacttcgttgaaaaagacgggtttatggaatcagccctggcgatccctgagccacacagttttgatgtgcgcctgtctttaggccatcgtgggcatgtacacgattatgatgtggagtttcgcgagcatgagcacggtcacgaccatgaccacgatcactccgcactggaggggctggatgttaattcccgcgaataccaggacgctcacgaaaaagcccatgcgaacgacatcaagaaacgttttgccaatcgcagcgtaaccaccgggcagattatcctgtttgggctgaccggcggacttattccttgcccggcggccatcaccgttctgctgctctgcatccaggtgaaggaatttacgctcggtgccgcgctggtactgtgtttcagcatcggcttagcaattacgctggtttctgtgggtgcagctgcggcgtttagcgttcgccaggcaaccaaacgctggagtggcctggatactctggcacgccgtgccccatacttctcaagcgtactgatagccctggtcggcatttacatgggctaccatggctggatcggcgttacccgctga

SEQ ID NO: 17397 - DNA, 270 bp, Escherichia coli
atgactgttcacgcatcacaccctgacattattaaaagacttaagcgtgccgccgggcacctgaaaagtaccatccagatgctcgaagatgaaaaagcgtgtctggatatcgcccaacagctgcatgcggttgaaaaagcgataacgaatgcaaagcgtaccttaattcatgaccatcttgatcactgcctggaggatgcgcttcatgccgatcatgccggaactgaaacaacgctaagcgaatttaaagagatcaccaaatatctttaa

SEQ ID NO: 17398 - DNA, 1299 bp, Escherichia coli
atgctcaatattctttctaatcgtacctatcgccacctgtttatggcacaggttatcgcccttatcggcaccggtctggcgaccgtcgcgctggggttgctagcttatgatctggccggagacagggctggtgctgtgctgggtaccgcgctggctatcaagatgagcgcctacattctggttgcgccggtagcggcggcctttgccgataaattcccgcgtcgcaccatgctggtgacgctggacttagtccgcgctctggtggcgatcgcgctgccttttgtcactcagatctgggaaatctacatcttgatcttcttcctgcagtctgcttcggcagcgtttacaccgactttccaggcgacgatcccggacattctccctgacgaacgtgaatatacccgggcgctgtctctgtcacgcctggcctacgatcttgaaagcgttatcagcccgatgctggcggcggcgctgctgacagtcatgagtttccataatttgtttgccggtacggcagtcggattcctcgcctctgcggctctggttgtttccgtgtcgttgccaaaaatgaaagcgttaaccgtcaaacgcagcgtctatgacaaaacgacgcgaggcatgcgcatcttcctgaaaacaccaaggctgcgtggtctgctggcactcaatatggccgtggcagcggcaagcgcgatggttatcgtcaataccgttgttctggtacaggctgactttggtttatcacagcgctcgactgccattgcgctggccttcttcggtgtcgggtcgatggtgtctgcactggttctcccgagactcctcgacaaaatgcgcgaccgcatgccgatgcttgtgggggccgcgcttttggtgattggcctggggctgggtattttcctgatggattacttcactctggttgtgctttgggcattgctgggcgtcggatattcactttctcaaacccccagtggccgcctgctgcgccgctcatcaacggcggaagacagacccgcgctatttgccgctcaatttgcattgtcgcattcatgctggctggtgacttatccgctggccggatgggtcggcgcgacatggggcacacaggcttcgttcatcgcgttgaccatcgtagcggcgctgtcgttgctcaccgccgtgcttatctggcgtcctgagcatgaagaatatgttcagctgcacagccataccgacgccgaaacgaataatgcatccactcatgaacatgatttcgtcatcgacgatgaacatccgtcatggccgaagaaagagaagtaa

SEQ ID NO: 17399 - DNA, 759 bp, Escherichia coli
atgacaacattactgccgggggaaaccctggcagcctctctggccgaaaaagtcagtgatacatggcaaagaattatcgctcgccgcactgctaaggagacgataacgccgggctggattttacagtcgctcgggcttcaaccgggctcaacggaactgcggagagccatttttgaactggtcaggcgaatgccctatcagcttgggtcatggaataaccaaagcatgagcctgtttgagcagggttttggcgactgtcgtcataaagccgccgcggccgaacgattgctggttgccggtgggattacagcaaggcgaaaactggtgcagtttgactgggctgacttgcccgttcctccggaaatactggctattttgccgcaaacccagggatttcatgacaccgtgacttttgagttaaacgggaaaacatgcctgtttgatgccacctgggatatagccctgcgcggcgcgggcttcccggtgatgccttcctgggatggcaactctgatacctggtcggtgacttcccggatgtcgacgcagcaaaccgtacagatgccacagcccgggcaggatatttacagcgctaaccagatgagctggcctcagcgcgagaaaaccatggccttcaatcaggcgctgaatagctggctggacgacgttcgggctaaccgtgatgactggtgcaccatcgtccatagcgatgttgaagccacacggctgagtctgaaaacctgcctgggacttctgagttaa

SEQ ID NO: 17400 - DNA, 921 bp, Escherichia coli
atgtacacagactccatacaggcgcgtcgcgagattgcgcgtaattttactgaacttaattatcgaattacccctctgcactggcagacactgtgcatgggcgttaatcgcgatctccaggccaaaaaactgcgtccgaacgtccctgttccttcacgacgtaaggtcattccgttcctgaaaatgatgcacaaagaaacgggctcgatgttgaaagccattcttgcctttggtttcgatggcccctggacctccagcggtggttcgtttcgtctggcgcgagaaattgggttcgatattgcccaccatgcaaaaaacattcatcacaaaaacggtaccgtcaccttccttgaaattggtgctgcctgggcaggttttcgtgctgaagaagcgaccagccatcaggcggcaatttccggacttgcccagagcttcagggagcagctcggggagagcgcattcctgcatttcaccaatctcacgccatggcacgaatcgctgccaaagggggtgactgagcatccctacgtgacggctgccgggctgtgcgtactggagaagcagggagttcgggccggtgaggtcgatattatctactctcaggccgcagcctatttcgaacaggattacacggcattccttcgcagcgcagcccgtctgctgaaaggggatggcgtcttaatcttcaatcatgatcctgttctggcgagcgcgatggatgaagtcgcgtgggagcaaggactccggctggttcgacgtaagcaaatgggcggaatgaatggcgcgattgcccgttatcaccggcttcgttcatccccggtgagtcaaatggttttccctggggtaaaccgtgaacaggacgatgaagtggtctgtgaatcactggttatgtcggcacttcgtcgcagcgtggaggtgtaa

SEQ ID NO: 17401 - DNA, 372 bp, Escherichia coli
atgtatctgatgtttaaacgttcaccccgttatattctgatgattgtcatcatggccgttggcatgatgatgtcgtcgatgggcacgtttgcgtcacacggtaccaacggcctgactggttacgagatgaatctgcatgatgcagaagtcaccatgacagtgcaggatcactcccacgactcggatatccctcagtctggtcacgcaggccatcatcagacagaccatttccatgaaacccctcagcagccgccctctgtggagatctccctctctcctgtagcagacagatggttgccgcttgccgatcttcgcagcccggttaaggccacggacatcatttaccgccctccaagcacccgccagatctga

SEQ ID NO: 17402 - DNA, 690 bp, Escherichia coli
atgtataacaccgatttaccgacccgcgcagagctgccatctgcgatgaagctgatgcagtccactatcctggcggctattgttgctttaacgctgctgataaccatcgtgatgccttcagaatatggtatcgatccaacgggcgttggccgcctgctgggccttaaacagatgggcgaaatcaaaacgcagctggcggaggaagccgccacggacaaacaggcgagtacgagccagtgggggcagtcaaccactccgacgaatgagcgcccggtggcggataacccgccgacaatcacgcaaaacaactacccggagctgagcgttccggcgacaactcgtgcgccagaagccccaactgccggttctcagcgcaatcagctgttaattactctgaaaccgaatgaagcggctgaagttaagatggaaatgcgtaaggatgcccgggtgacttaccagtggacaagctctggacctgtcaacgtggatgcacacggcgatccggttaacgcaccgaaagggttttaccacggctatggtaagggccgccagataacctcaaaggatggtgtgttgcaggcggcctttgacggtaagcatggctggttctggcgaaatcgtggttcaaagacgattactatccagcttgataccaatggcgaataccagagcattaagcgcgtaatctga

SEQ ID NO: 17403 - DNA, 738 bp, Escherichia coli
atgaacacctgccttaatttacaaggccggttgagcggtggcctgttttcgactcaggcgcgttcggcttgtctgtttttcatattgttattgcttttctacagccagggtgcggccgcacatggcgtagccgaaggcgacaaagggtacatccaggaaatcaccgggattaacatcatcccgtttatctaccttggcgcgaagcatatggtgaccggctacgatcacctgctgtttctgttcggcgtgattttctttctctacaaaatgcgcgatatcgggctgtacgtcagcctgtttgctatcggacactccacaacgctgctcattgggacgttctttgacatcagcgtaagcgcttatctcattgatgccattatcggactgtctgtggtctacaaagcccttgataaccttggcgcgttccagcgctggtttggctttcagcctaatacgaagatggcgacgcttatctttggtttcttccacggctttggcctggcgaccaaaatcaaggagttcgaaatttcccccgatggcctgttcgtcaacctgattgccttcaatgtcggggtcgagataggtcagcttctggcgctgagcgccatccttatcatcatgagttactggcggcagacggcgagctttttccgccatgcctacaccgccaatgtggtgatgatgagcgccggtttcctgttaatgagttaccagatttgtggctacgttttagcctga

SEQ ID NO: 17404 - DNA, 366 bp, Escherichia coli
gtgttttttagccgtgaagtcatttccagaatcgtgcttatcatcatggctgttgccgtgctgagcagttcgcttatggcaaaaccacaggctgtctacaacgtccaggatacaacgaccatcagtgaccatcagcacgatagcgatgaaccgctgaatgagcacgatccgctgctgttccactcgcacggtaatgtgcaccacctcaatgccgatcattcccacgatctgaacaaactcttcaccctgactgctttgcaggcctggaacgcgggcatacgggcgacctttgcgctgagttcagaacaaattctgcgaatgccacaggccacccccgaacgccctccgagatccctgtttgcgtaa

SEQ ID NO: 17405 - DNA, 147 bp, Escherichia coli
atgcgcagcttattgcttatgggagttcttctgattagcgcctgttccagcgggcataaaccgccaccggagccggactggagcaacaccgttccagtaaacaaaacaatcccggttgatacgcaaggtggtgcaaatgaaagctaa

SEQ ID NO: 17406 - DNA, 1470 bp, Escherichia coli
atgaatacaacaacacccatggggatgctgcagcaacctcgcccatttttcatgatcttttttgtcgagttatgggagcgattcggctactacggcgtgcagggcgtactggcggttttcttcgttaaacagcttgggttctcgcaagagcaggcttttgtcacttttggtgcttttgctgcgctggtctatggcctcatttccattggtggctatgttggcgaccacctgctgggaaccaaacgcaccattgttctcggagcacttgtgctggcgattggctacttcatgaccggcatgtcgctacttaagcctgacctgattttcatcgccctggggactatcgctgtcggtaacggcctgtttaaagctaacccagccagcttgctttcgaaatgctatccgccgaaagatccacggcttgatggcgcattcaccctgttctatatgtcgatcaatatcggctcgttgatagcgttatcgctggcccctgtgatcgctgataaattcggctattcagtcacctacaacctgtgcggtgcagggttaattatcgcattactggtttacatcgcctgtcgtggaatggtgaaagatattggttctgaacccgacttccggccgatgagcttcagtaaactgttgtacgtattacttggcagcgtggtgatgatcttcgtctgcgcctggctgatgcacaacgtagaagtcgccaatctggtgctgattgttctctccatcgtcgtcaccatcatcttctttcgtcaggcattcaagctggataaaaccgggcgcaataaaatgtttgtcgcctttgtcctgatgctcgaagcggtggtgttttacattctctacgcccagatgccaacgtcgctgaacttctttgccatcaacaacgtgcatcatgaaattctcggcttttccatcaacccggtcagcttccaggcgcttaacccgttctgggtggtactcgccagcccaatactggcaggcatttacacgcaactgggtaacaaaggcaaagatctctcgatgccgatgaagtttactctcggcatgtttatgtgctcactgggctttttgacggctgcagcggctggaatgtggtttgcggatgcccaagggctgacatcgccatggtttatcgtgctggtgtacttattccagagcttaggtgaactgtttattagcgcccttggcctggcgatgattgctgccctggtgccgcagcatttgatgggctttattctcgggatgtggttcctgacgcaggctgccgcgttcttgctgggcggctatgtggcaacatttaccgcagtaccagacaacattaccgatccacttgagacgttgcccgtctataccaacgtgtttggtaagattggcctggttacgctgggcgttgcagtagtgatgctattgatggtgccgtggctgaaacgcatgattgcgacgccggaaagccattaa

SEQ ID NO: 17407 - DNA, 273 bp, Escherichia coli
atgaaaattacggatcacaaactctctgaaggtattgccctgacatttcgtgttcctgaaggaaatataaaacatcctttgattatcttatgccatgggttttgcggtatcaggaatgttctgctcccttgctttgcgaatgccttcacagaagcaggattcgcaacgattacttttgattatcgaggattcggtgagagtgatggagaacgagggcgtctggttcctgcaatgcagaccgaagatattatttcagttatcaattgggcataa

SEQ ID NO: 17408 - DNA, 1152 bp, Escherichia coli
atgagacgaacatttacagcagaggaaaaagcctctgtttttgaactatggaagaacggaacaggcttcagtgaaatagcgaatatcctgggttcaaaacccggaacgatcttcactatgttaagggatactggcggcataaaaccccatgagcgtaagcgggctgtagctcacctgacactgtctgagcgcgaggagatacgagctggtttgtcagccaaaatgagcattcgtgcgatagctactgcgctgaatcgcagtccttcgacgatctcacgtgaagttcagcgtaatcggggcagacgctattacaaagctgttgatgctaataaccgagccaacagaatggcgaaaaggccaaaaccgtgcttactggatcaaaatttaccattgcgaaagcttgttctggaaaagctggagatgaaatggtctccagagcaaatatcaggatggttaaggcgaacaaaaccacgtcaaaaaacgctgcgaatatcacctgagacaatttataaaacgctgtactttcgtagccgtgaagcgctacaccacctgaatatacagcatctgcgacggtcgcatagccttcgccatggcaggcgtcatacccgcaaaggcgaaagaggtacgattaacatagtgaacggaacaccaattcacgaacgttcccgaaatatcgataacagacgctctctgggacattgggagggcgatttagtctcaggtacaaaaaactctcatatagccacacttgtagaccgaaaatcacgttatacgatcatccttagactcaggggcaaagattctgtctcagtaaatcaggctcttaccgacaaattcctgagtttaccgtcagaactcagaaaatcactgacatgggacagaggaatggaactggccagacatctagaatttactgtcagcaccggcgttaaagtttacttctgcgatcctcagagtccttggcagcggggaacaaatgagaacacaaatgggctaattcggcagtactttcctaaaaagacatgtcttgcccaatatactcaacatgaactagatctggttgctgctcagctaaacaacagaccgagaaagacactgaagttcaaaacaccgaaagagataattgaaaggggtgttgcattgacagattga

SEQ ID NO: 17409 - DNA, 336 bp, Escherichia coli; identical to SEQ ID NO: 17229

SEQ ID NO: 17410 - DNA, 432 bp, Escherichia coli; identical to SEQ ID NO: 8375

SEQ ID NO: 17411 - DNA, 174 bp, Escherichia coli
atgcaacatgacttccggcacaccacctgccataaaggcattgaccgttggatgataaaccgggccattaggcagtacgctcaccagtcggggcacgcgcttgttgatgcggatccagtcatcaacggtcgggatatggcaacctgcctggtgagcaattgccgggatgtgtaa

SEQ ID NO: 17412 - DNA, 597 bp, Escherichia coli
ttgctcgaaaccgggacgccgaatattgatttcagtggtcatagtgagaacacattccgtatcattgatttttctgtgcctcccacggcttatggcaagtttatgtcaaccatttttatgcaatgggttaaaaacgatgtgggtgaaattttcatccgtcagtttgaaagctttgtcagccgttttttggggaatgggcataccagttgtattttccaggagtcctgcaaggataatctggttgttgaaagtaatggagacatttacgaatgcgaccattttgtctatccacagtacaaaattggaaacattaataaatcggaactcaaaacgatgaacagtgtacaactgacagcgcaaaaaaaacggatttcagcgaaatgtcagcaatgtgtatataaacctatctgcaatggtggttgccctaagcatcgtattactaaagtaaacaatgagactgtttcctatttttgcgaaggttataaaatccttttttcaaccatggtaccttatatgaacgccatggtggagttagctaagaacagagtaccgctttaccacattatggatgttgcaaaacaaatggagaataattaa

SEQ ID NO: 17413 - DNA, 810 bp, Escherichia coli
atgtatgagacgcgctatgctgataaccgcacgaaattaccgcaagcaaatcagattgcacagtttactgccgcagatgcactggctgccgatcgccagttgttttcatctccagcggatatcacgtttgtcattgtcggtaatgtcgcagaagacaaactcgtggcgttaattacgcgttacttaggatcaatcaaacactctgattcgccattagccgcaggtaaaccattaactcgcgcgacggacaacgcatcggttactgtaaaagaacaaaatgaaccagtggcacaggtttcacagtggaagcgttataattcccggactcctgttaatctggcgacgcgtatggcgctcgatgcttttaacgtcgcactggcaaaagatctacgcattaatattcgtgaacaggcatccggggcatacagcgtttcttctcgcctctcggttgatcctcaggccaaagatatcagtcatttgctggcttttacttgtcaaccagaacgacatgatgaactgttaacgttagcgaatgaagtgatggttaagcgtctggccaaagggatcagtgagcaagaactgaacgaataccagcaaaacgttcagcgcagcctcgatatccaacagcgtagcgttcaacaattagcgaacaccattgtaaatagtcttattcaatatgacgatcctgcagcatggactgagcaggagcaattgttgaaacaaatgacggtagagaatgttaacactgctgttaaacaatatctttctcatccggtgaatacctataccggagtattattgccaaaataa

SEQ ID NO: 17414 - DNA, 291 bp, Escherichia coli
atgtataattttaaagataaaatagaagattacacagagcgggaattcattgagttgcttggcgagtttacaaatccaaccggggataacgctcaattaaaaggggaagagcttgacaaatattgggatgatctagaagaacatcttaccagaattacacaacatccgttgatgagcgatcttatctactatcctgcaaagaagggagatgatgaacctgaaaacatcctgaaaattgtcaaagaatggcggcgttcacaggggctacccttgtttaaagactctaaataa

SEQ ID NO: 17415 - DNA, 819 bp, Escherichia coli; identical to SEQ ID NO: 6059

SEQ ID NO: 17416 - DNA, 252 bp, Escherichia coli
atgctcgcaatcgtttatcgtggaatagcgatacctatcctttggacattgcttaataaacgtggaaattcagatacgaaagagcgtattgctttgattcaacgctttatagccatttttggtaaagaccgtattgtgaatgtgttcgcagacagagagtttatcggtgagcagtggtttacatggttaattgaacaagacatcaacttctgcattcgtgttaaaaaaacttcattgtcaccaatcatttag

SEQ ID NO: 17417 - DNA, 546 bp, Escherichia coli
atggatgcagggatagcctcagttgtcgccgcaattattgccgcagctgcagctggagtggggcttgttatcactaaggagaataaaacatctgagtttcggcaagcgtggatagatggtttaagggaagagttagccgaattgatggagaactttttacaattacgcacgactccgcctgagaagctccctgaggtggctggaaaaatttattttctttccgcaaaagtgaagcttaggttatccagtaaaaacttaactaatgaagagtctcagcttttgaaaatcattgaggattacattttaaaaatggatcgctcatctaacattacagatgtggtcagacagtattttgaatatagttccagtgttcttaaaactgagtgggagagagtgaagcgaggcgagaaaaaatacagagtcgctatcacggtttcgtactcaatattggtttttttggggctctattttgcttcacgtttcattccagcgataagtgaaaaaatcttagaaattatagagtttttaaattattcgttgttctga

SEQ ID NO: 17418 - DNA, 156 bp, Escherichia coli
atgtctgatttagatattgcagcaaagctgtatgaagaaaacacattcatgggcagatgtgacattacagggagttttagttttcaattgctgaagacatcgaatcatattcatattcatattgttttgaggggtaatttatggatgcagggatag

SEQ ID NO: 17419 - DNA, 327 bp, Escherichia coli
atgaaaccgaagaaactaagagctgagcagcagtaccatttagaccttgaattagtaaagaagaagccagcgaaccgcaccgaggcaaaagcccatttggcggcacaattacggattagcaagtacaagacgcaggcctcttccaaaattcgcgttggtagtttcaagggaagaaagaaggtgcattttagccaggcggaagaagatgctaggaaggcaatggctaaagctaatgcagttaggttttcagaaggtgaggttgaatccgttgatacagaaagaatatcagaaagtaacaaacgctggcgcgggagaaccgctgactaa

SEQ ID NO: 17420 - DNA, 495 bp, Escherichia coli
atgagaaaatttattttagcctttgtcataagtgcctcgtttacagcaaatgctggtgtagagaagttagggccgtggataacaaagtctgagataaataaaatgactgaccagactgactttgtggctcttaatttatcaccagattcatataacaaagcaggtactgatcgtgcaacttcactggtgttgcgttgtagtgataacaaaacagatgcctatttatcattcaatgattatatgggttcggacaacccaagaattacagtgcggttagatggcggaaagccggtcaagagtgtttggggaggtggggaaggcggtgattctgcatttgctccacaaccaatacaatttataaagaccttggctaagcataaaaaagctatttttgggtttgaaccttatggatcaactatgcaagtagttgagtttgacttgtctgagattgataaggttgtggaaaaaatttcacagtcttgcaattggaaatga

SEQ ID NO: 17421 - DNA, 1026 bp, Escherichia coli
atggttgattctatgaatagtgaaaatagcagctctgtaaataaaaaacataataaacctaaacaagtgaaattaagagcttttaagatagaaaacaataatctaacagaaaaatctagccccgcgaaaaagcttttattacaaaagctagttgactcatctaccgtaaaagaacgttgcatggttttaaactctgacgatcttaggcaagaacaagatttgatatcgttctatcagacatcagacaacagtaattctgttttttgtacaatggttagaattgccccaagcgagggagttgaaaagattcccgatcaactttttaacaaaaaatcatttacaattagtgatctccataatgctgacattgatacagaggtcgtatgcaaaaaccatttctacttctgtataagtgataattatttagttaccaatctgcagatgaataggactatatcatctctacaaacttatatacgctggctggttgggaatgaaatgattgaattcacaccgatgattgttaaaggtaataaagttcagcttaaggatataaaatcaatttctgtgagagatccatctcctcttccaaaagaagtattggttcagtcatccgatatgaaatcgccaccatcagaaattgaagaaaaaaatacaaaaataaaactttcacacgctgttttaaatgcattgaaatcagctgtaccaaatttcccaaatctaaaagaaataattgacaatcaaatagtatcagctgaactgttgataaagtttagtaaaccaaggagcatggatgaagatagttatgctaaactattaggtgcaacattaaaacctgttagtgatcttgataacattgtattcaaacgaagtgatggtcgctcagaaataaaaggcaaagatcttcttaagattaaaaatgtaacaattgaggttactgattcaggcaagcttgtagaacaagaggtatttcaagaaatgagcagatatttaaaagagatagaaaatgaagcgacaaatagctag

SEQ ID NO: 17422 - DNA, 450 bp, Escherichia coli
atgaagcgacaaatagctagcttgctaattgttctgataattactatcgggcttccatcatttttagcttggaggcctgatcagtttttgatttctacattgtattctgtctgtggcataatgttttctatcgggttagggttgattgtaacttttaacatgtctggcattaaaaacattaattatgttaaagttatcagaaaagaattggtatctatacgaaattcttttttgcgctttttcactctttctactttatgccttgtgcttagtgaatatttaaaagagtatgagttcagctttgaatttaaatccctgatactaaaattctctccttcaatactttttttcacattaataatttacgcaattgtcttcttcatagtaaatttcctaaatgtgcaaaaattaagtcatgatatcttcgataagatcaatcaagaacaataa

SEQ ID NO: 17423 - DNA, 1434 bp, Escherichia coli; identical to SEQ ID NO: 8840

SEQ ID NO: 17424 - DNA, 1158 bp, Escherichia coli
atgacttcagataataaaaatattgatttacaattaaatataaatgagcatggagtttctcataaactgattaaaaaaacgtctaataaattgctcgtctttttttcaggtacagataaaaaagatggccgctttgatttttggaaatcagcagatgaactgccatataacattttgttaattaacaatggtaaaaatgaatggtaccaagatagtattccagggtttagttcttcaatatcagaaacaatagaaaaaataaaatatatttctgaaaaactaggttgtgacgagattataacaataggcgtcagtatgggaggatatgcagcttcattatttggcgctcttctggattgtcgtgtgttagcctttagctttgacactgtactaaaatatcccttgagccgtagtgctaaaagaattcctaaaaagacaaaaattatatataagaatctacgccctattataaaaaattctaaatgtagaattacagcattaagtggggaaatggattttcctgatttactttcattgagtaggatttcagatcttaaaaatgttaaagcgtattccgttcgaggagtaacacatggtgtagggcggtttatagataaaagatatggaattcctaatataataaccttttttgtggaaaataatacacttcccgaaattaaagagattaataatctttgccataataaaatcttatcaaaaaatatattcctgtcttaccaagcatttgttaacaaagatttttccactgctcaatctttaatcagagaggctttgttggctgaaccattacttgaacctgctatatttatttctgctttagtaaatatggaactcaagaactatactttagctgtagagcagtttgcttttattgtcggtatttcgccacattttacaacagctaaatataatttggcaaagtcattaaggatgtcaaaaaaatatgatcaggcaatacaacatttctatgaatatatatctttaatgccttcatccgctggctcatattataatttatctctaatatatgaaagaaaagggttattggaagatgcaaaaaaaatggcccaaatggcatatagtctatcccctgaaagtgaaacatataaaaaaaggtatgatacttatttttcataa

SEQ ID NO: 17425 - DNA, 1191 bp, Escherichia coli
atgaaagtaggatttataatctggaatccattccagttgattcaattcaaatctattgcattaaaattagaaaaaccaactatttttattattagaaaaaacaataaccttaccttgtttcctaaggagttaattaataacaaatcatggagtatagtgtatattgagccccatgatgttcccgttatcgatgggactcatgatatcttactttttcagtcagctttccctggtattgagaaaattaaaaatagtaaattagtctcaatacaatatggtttagcaaaggagcgccataattatggtgaatggcgttctcttgctgacatgaatttaatgtatggtgactattcatctaatattgtgtctcactatgcgccatcttatcctgttggaaatccaaagtttgataattggttagagtacaaacaacaatactcaaatagagaagagctttataaagaattaaaattagatataaccaaaaaaacattgctttacatgcctacttggggggagttgggttcatattttgaacttctagatacaatatctcggttacaatcaaaatataatcttatattaaagatgcatcacaataatgatgcaaaaacacctgaatgggtagattctgcaaagaaagcaaacttaaaacatgtttacgatggttctgcagaccaattaaaattgctttgtgcggcagatttgattataagtgatttttctggagctatatttgacggtatgtatgcagaaaaacctattcttctatatcaagctggattggagaacaaaataggtattcaaaaatttgatcttacatctttagagtttaaacatagagatgagataggttatgtttgcactagtctttctgattttgaaccatccataattcactgtctcaataactgtcaagatattgtattaagagcatcaaatcttcgtgaaaaacttttttacgtagataaagaggtaaatgcttcacagctatgtattaactatataaaaaaactatataatgggttaattccgccactaacacaaacgcagttctatgttagagagactgtgcaagagcttcgaacatgtaagccaaagctgaataaacttgaaaaatccattaagaataaaaaactaccattttacagaaaagcgaaaaatttattttctagaaaattaaaagtataa

SEQ ID NO: 17426 - DNA, 1251 bp, Escherichia coli
atgtcaataaagaaaacactcataaaaaaaacgcaagacatttatttttctagatatagtatttatgacaagctaataatgaggttactcatttttataggtgaagataatgtggtgaagttacaagattctaggtttatacgtaaagttcattttttacattttattaactctttgctgtttataaagataaaaaaaacgaatgataatgtagggatggtaccttttcacttattcaataaagtaaaatcacgttacattcattactcaattgctgattggttactaagacatcgtaactatagcaatattacagaaaaacattttatttcggctcattacagaaataaagaaataactattaatcttaggtattctgattttatttcacaaaaatatggctataaatcagagaggcttaaaagaataatatcacgactttgctctgatgtatcattgagaaatttaaataaaggtcaaaaattacgcttggcaataatgttatatcaaaaaaataaggatgctaaagctaatgaaattattaagcaaatagggaagaggtttttgttgaaatatacaagcagtccttatgtttttaacaagattaaaaagaataaaatttttaatgatccatatatacaaagaggaagtgagcaatattctcacatattaaaatcacgaaatgagtttataaaattaattagaaattccgctggtagtttctgtattgttgggaatgcaccaacagaaataaatactggtcatggagcgttgattgattctaaaaaaatagtgattagaataaacaattatacactggactatccggatgattatggtacaaagcaggatatatgggttagagtggcaaataaagaagtaagcaataaaaatctcaaaaacaatagacttgttatttttgcggcgaataatttcacaataaaaagaagagatgcaaacaaatattttcttgcaccacaattattggaaatggaatatacagttataccaaatcatgtgtacaaatcacttataaaaaaactagatggtctaccaagtacaggattagcagttgcctattgggtctactctatagttggtaaaatacccaaagaatgcttgttcggttttactcatttccataacaataaagattttcatactcattattttgttgatgagaatgaagtgggaacccacctgcatgaatgggataaagaaagaatgatttttgaacaaattacaaagtga

SEQ ID NO: 17427 - DNA, 396 bp, Escherichia coli
atgcgtacagtcataacctttggaacatttgatgttttacatattggccacattaaaattttagaaagagcaaagaaatatggtgatcgattaattgttggcgtgtcatccgatgcattaagtttctctaaaaagcaaagatacccagtttatccagaaaatgagcgatgtgaaattattcggtctctacaatatgttgatgacgtatttcttgaggagtcacttgaattaaaaggtgagtatataaaaaaatataaagctgacattcttattatgggtaatgattgggaaggtaagtttgatatgtttaaaaaaatatgtgaggtaatttatttgccaagaacggaaggtgtttctactacaaagcttattacgcagattaaaaaatacagttaa

SEQ ID NO: 17428 - DNA, 765 bp, Escherichia coli
atgaataactccccccgctacccgcagcgcgttcgcaatgatctgcgcttccgtgaactgactgtgttacgcgttgagcgcatcagcgccggttttcagcgcattgtcctcggcggcgaggcgctggacggttttacatcgcgcggctttgacgatcacagcaaactcttctttcctcaacctgacgctcactttgtgccgccaacggtaacggaagagggcatcgtctggccggaaggaccacgcccaccgtcgcgtgactatacgccgctgtatgacgaactacgccatgaactggcgattgatttctttattcacgaaggtggcgtcgccagcagctgggcaatgcaggcgcaatcgggcgataaactcacggtggcaggtccgcgcggttcgctggtggtgccagaggattacgcgtatcagctgtatgtctgcgatgaatccggaatgcccgcactgcgccgccgcctggaaacgttgagcaaacttgccgttaaaccgcaagttagcgcgctggttagcgtgcgggataacgcctgtcaggattatctcgcgcaccttgatggttttaatatcgaatggctggcacatgatgagcaggcggtagatgcgcgtctggcgcagatgcaaatccctgccgatgattacttcatctggataaccggcgaaggcaaagtcgttaagaatttaagccgtcgctttgaagcggaacagtatgacccacagcgggtacgcgcggcggcttactggcacgcaaagtaa

SEQ ID NO: 17429 - DNA, 522 bp, Escherichia coli
atgactacggtgatcaagacaatggacgatattgccgacagtacccagcgcattggcaccattacttcgctgattaacgatattgcgtttcagaccaatattctggccctgaatgcggcggtggaagcggcgcgtgccggcgaacagggcaaaggttttgcagtggtggcgggggaagtgcgtcatttagccagccgcagcgccaatgctgccaacgatattcgcaagctgattgatgccagtgctgataaggtgcaatctggttcgcagcaggtacacgccgccggacggacgatggaagatattgtggcgcaggtaaaaaacgtcacccagttgatagctcagattagccattcaacgctggaacaggccgatgggctttccagcctgacccgtgcagtggatgagcttaacctgatcacccagaaaaacgccgagttggtggaagagagtgcgcaggtgtcggcgatggtgaaacaccgcgccagccgactggaagacgcggtgacggtgctgcattaa

SEQ ID NO: 17430 - DNA, 693 bp, Escherichia coli
atgattaatcaactaacttttacaaaacactatgacacgtttgataatgtatcaaagatttattctgataaattccctcaaggaaaagatttagatctattacatattgtgctttattttcgattccttagttatcaggaaaacaaccttaattgttatgaaagtcacgaaacattagctaagatttttaagtcttcatcgtcaacaattaaacgtaagataaacgatcttaaagagatgggattattagaaacatccccacatcctgatccgtatatttcatctttgatttacaatgctctccctctcacagatgcacatattactcccccaggagaatcatcactctctgatctttctgaggcagaagaagcacaggaacaacctaaaggccataaacagccttcttttgatgttcttgatgatgattgggatacgcctttaccctgggagacggaagaaacacctgtttcatcaagtgaaaaggtagctaatgataatgaggaggatgtgttagagaattttgcctctcttatcatccaggagaagactacaagaacaggaggggcatcatttattgagtttgcaaattcactagcttgtagatacgggttaaaacgaccaaatggtattgaggcatattttgctaagaaacatcccaaagtatacgaagactttgatattccattttaa

SEQ ID NO: 17431 - DNA, 279 bp, Escherichia coli
atgattcaatatttagtaaaaaatcaagtagacagaattcagtgtaatgacacaggaaaacgcatctacgagacacttgcttacctctataaaggaaagccaacaccgctaaaatatagcgatgtgttacatcgagcagggtgctctgaagatggtttaaaattctggcttagacagctatcaaatttcggtgttatagagattaaagaattatctttctctacattcaatctcaaaagattagataaagaaatagacttcatctattccactctctaa

SEQ ID NO: 17432 - DNA, 411 bp, Escherichia coli
atggcaaaaagaaaaaacaacgttgttaagaaaatcggtgattcagcttctcttctaagtaaacctaaatctattctaagacgtaaagactttaaagagctagttacgctctccaagcaaaatagcgcccctggcgaatggaaaacagagatcatagaacattctccctctgtgccttgtggagatgaatatatcgcattacaagaaatcttatcttcaacacctggcgtattctggaaacctagaaaaagaaaagagtatatcgttgatagctctgatttacgcaaataccagattttaggatttgaagattataaccactacgtcggttatctcgccaccaatggcctaaataatttagttcctgaattccaaattttagataatgctgatcactatggagacttttaa

SEQ ID NO: 17433 - DNA, 1029 bp, Escherichia coli
atgattctaggtaatgattacgttgatttagctcctctgttctctgcgcatagcactagaaattatctactttctactctcgacttcactgatccggtgggcgttagttctcataaagtagctgtttcccagcttgtcgaaagcaacgaatctctctttaacaaagagacaagccgttttagttctgaacacaacgttactaagcgagaacaaggtaaagaatggctgattgaaatcccgtattttcttcgtgaagatgtgatccgtccttctgatgttcaaggcaagcgtaagcctggcactgatttccaggaaacactcactgatatctatgctgactatgttgctaaacaccacgtagcgtatcagcgcactaaagagagcgtgttggcggcttctttgttctctggcaaaacttacacgcctaaaactgatgatgttcttatcgagtggggcaagctgtttaacgtatcagctatgaaagccactgtgaacgcttccagcactgacaccacgaagatttttaaagaatttgatcagattgctactaacatttttgaaatcacacaaagccaggcgtcggcggtagaacgtattgttgttttctgtaagccggaagccttctctgcaattcgattctctgcgggtatggcaaacgcattccagtatgtaagcccactggaagaggggaacgttgtgtatcagcgtcgtgacctgctaccaggagtgacagcgttcactattccaggaactaacattgatgttgttaaactggtagatccgctacaccttgcacatatgaccgcagacgctgtagcggttccgaagtttgctaaaggctctaacgtatatcagaacatctacggggcagcttccagcacctttgaactgatcaatgccgctcctactgaggtttatagctacagttacgagtcttctcgtggtgatgctgttaacgttgttacagagaatagccagatggttgtaaaccacggtgtaggcttctccgttcaaatcactgttaaataa

SEQ ID NO: 17434 - DNA, 231 bp, Escherichia coli
atggaagtgattctgaaatcaaaaaatggtgtacacgtacatttagatgctaatgattctagaggcttgttaaatctgaaatatctatgttctctcttagatgttccctatgaaggagtaaaagcccgtatgttcagattaaacgagagtattgatcaagctctgcaccatttcttaagtaaagaaggtgataaaaatgataataaggggattttaaatgttagaaattaa

SEQ ID NO: 17435 - DNA, 1833 bp, Escherichia coli
atgttagaaattaacacttctaaaattaagaacacagttacatttagtgtagataaagacagcttgaaaaaagcgaaagactctattacaggcttaaagaaattcactgataatatcaagcctgctaaattgagatttgatactgtcactaaaggctataagaaagcacaaaacgaagtagacaagattgctcaacagaaagctaaaacagaaaagcagaatcaaagagcacaagctgccgcagcaagagcacaggcaaggcaacagcaacaaatagcagcacgtaaagagaaagcagaattaaagctccttgatgtttcaagctctatcagtgcaatgcaccgcctctctgtagcggaacaatacaaagctattgcacaggctagagagatagcaaaacaatatgagcaaggggctatctcgcttgcacgtatgaatagccagatgaaacgcctacaacagcaacaacgtaagattaatggcaacagaaaagctcaactagcccccgttaagggaggatcagggaattccgccactatgggcgctctgttatttggaggcgctacggctgctgctggcgtgatggctgttagtaaagcctctgaatttatggctaacagctttgctaacgctgaaacgctgggtgaattgtatagccgtgcgaagctgggcggtgtagacgttaaccagatgaacaatattgaacaatgggcgtataaaaacggcgttgattcaatgatgggggatcaaggtcgtcgtaagtatctggatcagatgaaagacgtcagggaacgtgctaccaaatcttatgacgaggctgaatatgtagttgataagaaaacagggaaaggcatatggaagggcggtgattctggtattaacactttaatgaatgaaggattcttaactaaaaaggatttaaaagactttgctgataatccggctggtctggttagtaaagctgtcaatggaatggtgaaaaagggctattcagatgcgcagatcggtagtcgtctggaagatctggctgatgatttgatgctcacctctaaatactggacacgctccgctaaagaagtggaacaatcagcacgagaacaacgagaatcagggcgctgggtaactaaagcccaacaggaaagcgtgattaaattccgtgaactgaataactcacttaccggactttctgactcacaagggatcgcctttgttgatggctttatgaaatctctcgatcctgctgtgattgaagaatttaaaaagagtatggttgcaatgctgccaatgtttaccaaattgggcgaggcgatcgggggactgtttaacgccataatgaaagcaatcaactggctgatgaaaaatgacgagaagacagatgctattcagaaaaatttaggtgatgcaccgccattaagcaatgaagggatgaaacagaatctttctgatctcgttcctgaacaatataaaggcgctggcaccggaacaactacacctgataatagtcattctctctttaacactattaagggattgcttttcgatgataatgcttcttctgtgtcagatgtaaaaatgtcagtcagcgaagcaccgataaccaatctcaaacagggtgctttaaataatcttgcaatgacaactccggcttataatttatctcctgtgtttaatctgaatcctacatttgaagtggtaacagaagttcctcttactattaattctgacacatccagattaagcgattatgtggattttacagcgagagcaagtcgggatagcttcttgaaatcattaacattaaccagcttatcaggacaatctaacggcgggtaa

SEQ ID NO: 17436 - DNA, 684 bp, Escherichia coli
atggcgaccgccgggattttaaccatacgagcagcaaatactcaagaacaagatgtaaactctacaaaaaacgaaaatagcaaagccaataaaacaaaaggggagaatggatttgctattgtcaccagtgggctggcatcttctggtaatgacgtttatgaaaattatatggcactggcctttgatagtgtagacaatgtgaacgtaagacgttcggcagatgtcacaagctaccccgtagaaaatggtgctactgtgtctgatcacgttcaaattaaaaacaataagttttctcttaaaggaaggatcactgaaacaccgattaaaagcgatcctggcttgttaaagagtgcaggggtgaacgggaacagaagatcattagctatagactacctgaatcagattatggacagtagacagccttttcttcttgttacagaaaataaaacttttgagaacgttgttttaacaggcatcgaatacacagaagaggcaagcgaatccctggtatttgatcttagctttgagcagatcaggctcgtttcgtatggcactgtaaacactgtagctatcaaaacacagccatctaagaacataggggcgaatatgaaaaaacgtgttaacactgaaaaatcaagtagtgaaggtgaagacactattactcctgcctttaaacaggaatag

SEQ ID NO: 17437 - DNA, 822 bp, Escherichia coli
atgttatcaattaatttaacaactacagcgtcacgtttagaactatgttcatcaactttatggtcattattacatcaaacaattatacccgatgaaataaatgtatgggtatcgaaagagccctacttggctgatgagggcataaatgagatacctatatttataacagaattgaattcagttagaaacattatcaaaattaaatttacaaaaaatataggtccctacagaaaaataattccaatacttagagaaagtaacgcagacgacatcattgtatatgccgacgatgatgtcatttatggatgcacttggcttgaaacattatatgatgagtttttgaaaaactcatgttctgtagttgtagcctctagggttaggcttatgcagtataatgtatttggtaaattgaaaagttatttatcgtttccattatgcactgaaagtattttgcttgaaaatgattttattattaccggggtaggtggctgtattttatcccgctcgatcattaaagatgagtttattacaaataatgaatttatgtccattgcacctacaactgatgatatatggattagtaaaatcatagaactttctgggggatttgtaaaatgcttacctgttaacttaaaaaacataaatgaaatttcacatgaaatcaatgcattaagccaagacaacatggtgataaaatataaaagtaatattttaattcgtttcgcaaataaaattattaataaggttaagtgctatttttgtttgatttcatcaggaaatgatgttgcaataaaaaaagtaaatcgttattttgataattaa

SEQ ID NO: 17438 - DNA, 711 bp, Escherichia coli
gtgattgatgatataatcaaaaagacaccaaatgtaatcgatattatgggcgaaaactgctctaattctcgagtaattacatttgtaaactcattttcatatttttcagtgaaggataaccctagagtcgaggaaatagattatattttcattgacggtatattgcttgtcaaactgtttaattttacgaacaaatataatcttgaaagatatagtttcgattactcctcattggcaggtgtagtgtttaatttttgtgaaagggaaaaactaaaagttggacttattggtgctaccagtgatgaaattagagttgcaacaaaaaatattaaaatgattcatccacaactgactgtggaatatactcactctggatattttttagatgatcaagaacgtaataatattattaatacgttagcagaaaactgcgatgtcatcatttgcggtatgggaactcccgtacaagaagaatttgcattagacttgaaagcattatctcgaaataagttaattttcacttgtggaggttttttttcccaaacggcaagaaaacctgatttttattattcgtgggtcaaaaaatataacttgatgtggcttcaaagaattataatgtacaaacatgttcgaaaacgctttttttttgattatccaaaatttgtttataaatatataaagcaaaatttacgcaattcttctaagaggtga

SEQ ID NO: 17439 - DNA, 546 bp, Escherichia coli
atggtagccacgattaaaaaaataactaagcaaattgtttttttcattaactttatatttaaaggtaaaaacctagtatgtttatcaaattgtcgcgaaaagtataatttaactagagaagatatagattatatagccaatgaaacattgcataaatctcataaaaagattaatttaaccttactaattagagaaatagatctttaccttttagatataactataaactcatgggcaccgatttcaaaatgtgttaactttaaaaatataaacggagttaatgataatttcttaaaaaaaattacctgtgagtatgggaaaaattatcttggtcattgtgaggaatctggattttttgtgcccttaggtgtcattcttttacctaaatggtataaccattttaatttaaattgccatgtgttaaatggagttgatattgatggtagacgatggcaactggaccttacctctggagcgcttaatcttgttgattgctataacgatcttgatgtccattttattatgatgagggtgaattgtgattga

SEQ ID NO: 17440 - DNA, 720 bp, Escherichia coli
atgcttagcaatattcaaagattagtaagattactaagattatcgctatcaacaattgacatgggtgataattataatattataccgcaaaagaaattcacattatctggtgtttataggataaagaatgcagagagttcaatagagcttgccattcgttcaattatagatgtaatggatgaagtgattgttgtagataatgaatcttcagatggtacattagatattttaattaaactgcaaaaaaaatatcctaataaaataaagattttccattataacaaaaaactgtgtagagcaggtaaaaattatgctgattgtgtgagaagtaatccatcagggagcttagccaaatattataactatgctttttccaaagcaactagcgaatatgtaatgaagtgtgatgccaattatattttcacgttgaaaggtaaaatagatattatcaatgcattaaataagaatcctgatgtattatgctatcctggtgttgaaatatttgggcatcatcactcaattgagccatttgtatatttaaggaaattaaattataaatactgtgatggtttgttatgggagtttttacattatgaacgaactgcgaaaataaagaaaatattaaatccgtgctttgtgcatataaaaagaatcaattacaataagtatatacatagcgaacataaaggagttgacggtttatatggtagccacgattaa

SEQ ID NO: 17441 - DNA, 906 bp, Escherichia coli
atgaatattaaagtatcaatagttatccctacctttggtagacctgagaatcttcttagggcaatcagcagtgtaatgagacaaacatataataatttagaaattatcgttgttgatgataatggtaagggtagcgaaaaccagattaaaacggaagaattgcttaatgacgaaaagtataaagatataatatacatagttttacctaataataaaggtggtggaattgctaggaattacggtatagaaaaagcaagcggtgaagttattacatttttggatgatgatgattattacttatgtaataaagttgaagtccagttacgtcatctaatagttaataacttagatatatctttgtgcgatatgattattgaatctgatggttcatcacgattcaaacattcaaaacgttattcaaatgctaaaggaataaatataaatgagtttttgattgatggtgtagcttttacacctatgattatggtgagaaaaaatatactattaagtgctggaggatttttagatacaccacgttttcaagatcatacgctgatgctaaagttatttttgattacggataaggtcggtcatgttgaaagtaaattatttgtacattgttccaatatgaatacaagagttagtaactctcccaaatcgttgaaggggtttctaatacgacacagattagaaaactatgtgatgaagaaccaaaggaatatagtagagcaagttaaattcaatcaatgcgcacaagtatctcctttcctttataaaagaaggggttacaataaatatgtttccttcatgatctggtctttaaattataatcttagtgtaaaaaatgtattattaacatttgcgagggttttaaaaatatcatgcttagcaatattcaaagattag

SEQ ID NO: 17442 - DNA, 1236 bp, Escherichia coli
atgagaaatagaatacttaccttgatgcaagccagtgcgatttttatgtttcttacaaaattgccgatgactactgtacttgtggttatattatccttagcaacaattttttataaacttcttcagaataaactatactttgataagttaaataataaaacaatagtggtaattatcgcaatgttgctatatatgttatgtcgaattatgtcgcaatacgtggtaggtatagatttatatgatgtggacattgattatatagtgacaatatcattagcgtttatattgtttgtatctattttatttcatcgagatgcatatgcaatattgtatgcaattatagcatcttcattatttactggaggatgggcaatatttgaattaatatttaattttaatactctatcttcacggtttagcgatcctgggaatattttttacatgtcaggtaatagagtgccaacagcattctattataatgaaaatgatatgctttattttttggttttgttcttaccaattaccttttttttctttaggagacgcttggtgtcattagtatattttttaatggtgctgacgcttgctctatatattgcatctaaagctgcggttataacattacttatttatgtaatgtggtattttatttttggtgtaaaaaatataagtgatatattaaaaaggatcgtgctatcaatactttttgtctctattggtgtgctgattctatatttgtttggaaaagacgcattagacctacaaataatagacaaggtcgtatatagattttctgggttggttgattttattaatggaaatggcggagacagtagttcattagagcgattttcaatttatttggccgtcgcaagttttatatatagtaatattagtatgctattcgtaggttttggcaattttagctattatgaaggaataatattgaatcactacccgttaagaatagcggactttcataacatgcattttgaaattatcacattgtttggtcttccattttatatattgttaggttgtgtgtttttttatatgtataaaatgaataaaaacatttcatttaataatactaaggtatttaagttgatgatgttaactttccttacctttctcgctatattatctagttctgtgctcaaatatccatctttttatgtttttattatgcttttggctgtgttgtgtgaaaataagagtcgagtaaatgaatattaa

SEQ ID NO: 17443 - DNA, 1443 bp, Escherichia coli
ttgtctacgttcaataatgctaaatgggttgggctatcacagtttactaaagttatcttacagataatggcactaataatctttagtaggttattggatccgcttgaatatggtattatggcaatggctacagttatatctaacttcgctcttattataagggatttgggaacaggtgcagccgttattcaaaggaaagttatcagtaatgatttgctatcttcaatattttggctgaatatcatcatggggttattagtaatggtggcaataattatttgtgctccattattatctgaattcttcaaagaatcaaaattatgcaatgtgttgttattactttcagtaacattccctctggctagtgcagcgattgtacaccaggcaaacctcgaaagagaatttcaatttgcaaaagtttgttcaattgaaatagcttcttcattaatatccttcttaattggaatagtctgtgctatcaaaaattatggtgtctatagtttagtcgcattaacaatcagtcaagcaatgatttcaactcttggaatgtggtttgcttcaaaatggagaccacagtttaaggttaattggtctgaaattcaggaagtttattcttttagtggtaatctgactctttttaatatggtgaattatttttcaagaaatagtgatggaattattatcggtagatttttttcgagtgccattctaggtgcctactcattagcttacagaataatgttatttcctgtacaaagcttaacctcagttatatcaagatcattatatccagtgataagcaggatgcaagatgatgtcaatagtatcaatcatgtttacatgagaacgttagcgttcatttctactttaactttaccactcatgatggggttatggtcgataaggaacgaatttgttatggaaattttaggagccaaatggatttcagttgtgggaatactttcatggttggcacctacaggatatatccaatctcttgttagtacaacaggtactattttaatggcgtgtggtagagccaatatattattttacctcggtgttgcagctgctgttttacaagtttctgcatttcttattggggcacaatttaatattacaacactctcaatgctttatttctattcaaacttaattaatagctttattgctatgtattttgtaatgaaatgtataaatggaagcttgatgatcttaattaaaaaattagtcccttcgattgtctctacaggtgttatgcttatatatgtgaagattattttgaaaattaaagagatatggttatggagtgatttagtaacattgattgtttcaattctgggcggtatgactatatatacttttatttatatagtctttttcaaacaatcgattagagaaaattttccttcaacattatctactaaaataataaaatcatga

SEQ ID NO: 17444 - DNA, 783 bp, Escherichia coli; identical to SEQ ID NO: 4541

SEQ ID NO: 17445 - DNA, 525 bp, Escherichia coli
atgctaccgggaatggatggttatcaggtactggaaggcgtccgggccagaaaacagacccccgtgctgatgctggcagcacggggctcggtcgacgaacgcgtcaaagggctgcgtctgggagcagatgattatctccctaaacccttttcactcattgaattggtggcgcgtattcaggcgttggtgcgtcgccgcccttcggatggcgcagacatcactcagcttcatattcaggatctgcatctcgacttactggcgcgcagggtatttcgcggtggaacgagactggaactaaccgcgaaagagttttccctgttgagtttgctcgctcgccatcaaggggagatcctgtcaaagatgatgattgccgaacaagtctgggacatgaattttgatagtgatgccaatgtggttgaagtcgctattaaacgtttacgcgccaaagttgatgccccattcgacgttaagttgcttcataccgttcgcggcatggggtatgtcctcgaagtccggcctgagtaa

SEQ ID NO: 17446 - DNA, 1113 bp, Escherichia coli
atggaccacatcatattaccaagcggagataacttaaaaactcttctttcccagagtaaaattacaaaggctgatattaaatccatattgcgacagagaggagtattttgttcaagcgatgagaagagtaatactgtccctttgcttatgaaatcattaatttcgccactagagtttaatgaactagtagaaaaaataaaaactaaagagcacagttccaaaataagcatgcgaactttagaatgggattctgaagatacactaattgatgcaattggtggagatatagatctaacaggattaatagatgatccatttagcaattacgaaatatcttttatttctgatttttatgctaaagatgataaagaaaatcttgttgctctagactttgaagttaaacgcaccgatttaatgagtggatggaatgaaacggagcaattcttctcaggtagaatcgaacttgagaaaaaaaatgaacaacctgacaaagttgaagtaaacatatctataaaccatacatctaatgaaacaaaacttgttgctgataaaatccttagaagattaaacactcattttaaagaaaacaatcacattaaacaaagcgctgaaatattaaaaatacaatttaatcatttcaacaatgaaggacgcatagctttccttaaagacatctctgaaagtcatcgtgagaatgaattctatttcaataaaattattgatgttgattttcatccagatgaaaatgccactttccctcagggcatggagtggttagaaaaaaatatagaagaactcaaactcaaagggactcttggcgattcaattttctttagaaataaaagcattcacccaagtctaaaaatagcaaaactagtcgcaagctatactatgcaggatatagattataatgctgagtgtaaaatatcatatgaatttcccgaatatacatctaaaaaaaatgaagccgcagagttagtaattgacttcaaatctttcaatggtaaaggtgcgtccaacgctaaaatcaacaggataaaatcagaaatcatgaaaacacttgaaagcgtaaaaattattgcttacgaacgccatcgtaataaagaccagtaa

SEQ ID NO: 17447 - DNA, 909 bp, Escherichia coli
atgggtgagttctcaaaattagttggtgatgttggtgaaaatattgtcacgcactttttagatttatttggatgggaaaatcacgtaacaaataaatatgttaaatgccatacccagaagcatcaaaaagaaactcatggaattgatgcgcttttcgcctatcattcccccttagaaagtaaaactattgaaaatgtcatagtatcatcaaaatactcctcaaatccttattctagcgtaccatccacgtttaaggcacactttgaagacattgcactagcgatagaatgctacaacaaatcaacgcttaaaaaagagattaatgagcgtctcagtactaatggttcatatcgtaaagttgagacaggagttttgttttatattaataacgatgacactcctgaaaaacaaagcatcattaatcaaataaaaaacacacaaagtaacagtgcgttaaaatatagaacaattcatgttattgataataaaagagccgcttttttatttgacagtataacattcattagaaataaatatggtaaagacaaagttaacttcttctacccaccgacatccctaaatttaatgatgataaagaaaaggtactatggaaaaatctttccagttgaatatatctcatctccaataatccctttccttattgagcaagaaaataacgaacaacccattatatgcatggtctgctctgaaccttattcaagcaatttattggatggattaataagctgtacaagagatttagttgctgatatttcccaaaatctaatgtttgtttttgagcattataataaacttaataacaaagagtctttagatgctattaggctagcaactgataaaaatataaacattaaaattacatcttacaatagcgatttcagagggtaa

SEQ ID NO: 17448 - DNA, 876 bp, Escherichia coli
atgcatgtaatttcagtaatttctactaaaggtggtgaaggtaaatccactcattccgccaacctggctggcttctgtgccgatgccggtctcaaaaccctcctgattgacggcgactacgcccagcccacggtttccagttactatcctttgcgctacgaagcgccatgtggtttgtacgagttacttatgcagactgtggatcttaatcggccggaacaactgatttcccacactgccattgataaccttgatctgattatttctaacgatccttatggtcagttaaaaatggcaatgatgcacgctccggacgggcgcatcagactacgtaaccagcttcagcatccattgtttgcctcttatgacgtgattatcagtgatacgcaaggcgcgcgctcaatcatgttagagctgatgttgttggcgacaacacatacggcactggcggttgtgaaaccggtaataccggacgttcgcgagtttctacggggaacggtaacgctgatggaggatctactgccttaccgtggatttggtattaccttgccgtcaatgaaaatcctggtcaactgcatggattacaccctgctggctgaagaagcactgggtgcgttaactacgattattgctgatgggacgtatagcaaagcggatattccccccgtcactctgctcgaaacccaaatctacgatcttgaagtctacaagttaggccatacgcgggggcaacccgctcaccgtcttgaataccataccgatcgtaaaagtttgccagccgctcagactatgcacgatctggcctgcgaattatttcccgaatggcgcgaccgttttgatgccgtactgcaaaaccagccgaagggggataaataa

SEQ ID NO: 17449 - DNA, 378 bp, Escherichia coli
atgaaactctatcgtgcaacgtacagtctcttaacccgcgatggtcgggtcacagttgatgagcagtgggtcttttttgaagccgaaacctactctgacgcgctggagaaaatacccgggctattgatgacgatgtgggattgcggtgagtcccaactggaggtctggaacctgatgcaggatacccagcttgttgatctcagcatggatatggaggttgattcccctcgggactggcgtttctttgaggttggttattccgctggttctgccgtttatcttgatgtcgaacgtgatggctggccgttgttccttgtctctccgtcaaatctggcccgtctgaataatgccttggtcgagtgccggaggccagcatga

SEQ ID NO: 17450 - DNA, 1353 bp, Escherichia coli
atgaataacatcgaacagatatcgccgccgcattcaatcagcgccgagcaggctgttcttggtagcctgatgctggataacgatcgctgggatgatattgcgacgattgtttccgccgatcgtttttattcgcggccgcatggcgtgattttctccgccatgcaggcgttgttgcttcagaataagcctatcgacctgataaccctggctgaatcaatggagcagcaagggacgctggaacagtgtggcggttttgcctatctcgccgaactctcgaaaaatacgcccagtgcggcaaatatcgttgcttatgcagagtacgttgccagctacggccagaagcgtcagttactggaactgggacacgatctggttgtgcaggccggtgatgccagaagtgatctgatggtactactggatgaagctgagcgccggatttttgccattgccgaacagcaatctccggatggcgatgttgatctgcctgcctcactggaactcttcctcaatcgattagagcggcgttgcggtagtgaagatcttattaccggtacgccaaccggctttgctcaactgaatacgatgaccagcggcttccagcccagcgatctgattctactggctggtcgtccgtcaatggggaaaaccgcgttcgggttggcattctgcgaaggggcattaaatgagcgcccggatatggcggtgcaggtctacagcctggaaatgcctaccgagcagttactgatgcgcttcaccgccatgctggggggtgtccctctgcaacacctgcgcaatggcgatatgcaggatgaagattgggcgcgggtcagtgcagcaatgaaagttctgcttgaagactggaaaggcaggctggtgattgatgattccagctatatgacaccggcgatcctgcgctcccgggtgagaaaaaacatccgtaaatacggtcatccatccatgatcctgctggactatctgcaactgatgcgctgcccggggcaggagaaccggacgcaggagatcgcggaaatctcccgctcactcaaagcgctggctaaagaaattggctgtccggtagtggcgttgtcacagctcaaccggtcactggaaagccgggcggataagcgtccgaataatggcgatctgcgtgactccggggcgctggagcaggatgccgatctgataatgttcgtctacagggacgaagtgtatgacgccgatacgcatgagccgggtgtggcagagattattcttggcaagcagcgcaatgggcctatcggcacaataaaggtgcaatatcaggcggagattacccgttttgaggattttacaggaggtcgctatgacttctaa

SEQ ID NO: 17451 - DNA, 1617 bp, Escherichia coli
atgacttctaaaaaatcaagccagctgggcgaaaagctgcttcagcggggccgtaccccgaatactgaaagctctgctgtggtgttgccagtgaatgaaatgccaatggttctggcgctggagcagctgcgtcccaatccggataacccccgtacttcccgcaatccaaagtatgaagatatcaaagcgtcgatccgcgcccgggggctggattcggtgccaaaagtcaccagagatccggaaagtcccgaagatgtttatatcttcagcgatggcggtaacactcgctattccatcctgacggagctgtatgcagaaacaggcgatgagcgttttcgccgtgttcagtgcatcgtgaaaccgtggcccgggcgtttgcagtgtgtcatcgggcatctggccgagaatgatgtgcgtggcgagctgtcatttattgaaaaagccttcggtatcgagaaggctcgggctatttacgaggaacaactggggcgagaagtgagccagcgcgagctggccgatctgctgaaagaggcgggttatccggttcaccattcgaatatcagccgtatggtggcgacaatcgaatatctatggccgtggatgcccaatttgcttaattcgggtataggacggcctcagattgcccagctaattacgttgcgaacagcggcagaaaaagcctggcaagccttcagtcagaacgtcgcgttacctccgaaacaggaatttattgatgtctttggtggtgtttgtcgcacttttgacgacccggatcactactcagccgatgtctttaaagaagagctgattgcggccctgttgaaggctatgcccgatccgcaactgacctacgatagctggctgattgaactcgatccgcaggagcagaaccggcgcaaattgtttggtgagccggagccgcttccccagcatgttctggatgcagacaaaacccataatgagccttcaccaccaccggctgcggagccaccctccgttgctactgattccgggttaaagaagaaaaagcctgtcacaaccgagggcaattcctccaatgatctggaccaaccgcccgatgaagaaccgctggatctttatgatgggaataccctccgggagtcaacacctgacttacccggcactcttcctggcgctgagccaggacctgctgctggtgacgagccgcttctggaaccacctgcaaacactatcgcttttgccgcgaacgggctggagccggtaaccgatatctggcatatcccggcgttacaggatgatgttgaacatctacaggacatcgcgtttcgcctggcgttcgaactggcggaggtgatggggattgaagatgctgttcaggaagataaatctctcctgggcgcggggtattccctctcatctaacccagatggcgaacctctggctacgttgtgcggtgaggcgacggatatgcctatatcgatattaaccgggtttcttatcggtgcatccagttctggcccgttagatgctccattatttgatgatgtgtatgcggtgaaattcctgcgtttaatcagggtagtgcgccggttgcgagagctgcaacgccagacattcagggtgggtgcagcatga

SEQ ID NO: 17452 - DNA, 243 bp, Escherichia coli
atgaaagctgactgggttgatgaggcgcaggaagtaacccaactgatggtcgatagccagattgaacgtattcgctcttcattgatatcaccggcgatatcgtctgctgactgcgaacgctgtggacatgagatcccggaagcacgccgcagagctgttccgggcgtcaggctgtgcgttgaatgccagagtattgccgagtttcggctgcgtgttggatacggaggatacgatgaaagctga

SEQ ID NO: 17453 - DNA, 525 bp, Escherichia coli
atgaacggactgttaacgcagattgttatggaactgaaatccggcaatatccgccgttgtgaggcgatggggttaaccctggaagagattcaggaacttaacagcttaaccgttgaagatctgcattatctggtgaatacgcaggtatcgcttctgaccttccgcatcaaccataccaacctgaacaccatgctggcgcaggcccgtcgtgagcagacccggacacagcgtatcgacagagcgttaacgctgggtggctctatcgagctgatgcagcattttttcggcctgacggcgacggaagtcagttcccggcgacgcctggtcggtgttgtgacccggcaggggcgcagccagatccctacagaagagcaggaactggcggtgtggcagcagtggaaggcatcgaacgttgacaacatggaatcactggatgcgctggaagccatgatgttaattgctgagcagcaggacatttcgttaaccgcagtctggacgttaaccaaaggatggagtgccgcctga

SEQ ID NO: 17454 - DNA, 1200 bp, Escherichia coli
atggctgttgttcccgtcgatgatgttatccagcgtacgctggcgaagatgcaaaaccggattgagcaaaaagcgcagtccggtgagcagagtaatgagcagagcggattactctttctggggaacgtgcatgacgccgttccccggcgtttatttctggattgtcggttatcgccgctggataaaatggcgtggatgatgatccgactgtacgcccagcagaacgagggcgctgtttttccgacctacgacgaattgcagtgccagctggcgttacctcattcggataaagcctcccgggagacggtcagtcgggcgctgttaatgctgcgtcttaccgggtggctgagcctctgcaagcgtgtcagagataaatccgggcgtattcgcggcaatatctatgcccagcatgatgagcctctggggctgtttgatacggaatacttcgatcccggctggcttgatgccgttgctgatgcctgccgacacaccaataaaacaatacgcctgacggcgctggccgttttgcaggatatcaaatccgatacccgtatgcgccaccggcactcacgcgttgcactgatagaagcccggttatcagccccacaaactccgcaggaaatggtgtcatcacggcagaagaaaatccccggttctgaaaccgaaccaggtcaaaaatcacaaagttcggaatccgaacttggcgttctaaaaggggatattttacctggttcggattccgaactaagccggaaatcaagggatggcggcttagttcgaaaatcgaaccgttacgtacgtagttttacacagagtgtaaaagatacgtacgtagggggcgaaagtcggttgtcgtggccgacggctgtgatcgagcggttgaacacacctgaccgggatatgctggaacagcagctaaacgcgctgccttgcgagctgggtcagcggattctggacgatctggctggccgcatgaaagcgacggaggtcaggaacgtcacggcctacctgctggcaaacctgaaacgggcaagggaagggcagttcaattctggtgacgtggggatggtacatccgcctacaaagcaaaaaccggttagtacgtcgccatctggcgggaaaaaagaggtcaaacgcgcccggagagagtttgtgtctggtgtgatggctgagatccgagggaattattttggctcataa

SEQ ID NO: 17455 - DNA, 258 bp, Escherichia coli
atgtcagataagcacgcccccgccattccggctgaaaaaactattcctgccaactgggcttacccgcttggggtactcgtcccttcgccggaattgccccagctgcattttgttatgaaggacaactatcatactttcctgctctccctggagaatattttactcagcctgcgtgaagccgagcgtcagggagaagtgccgcctattgctgatgaatggtgggggacacttcagggcaaatttgacgtattgcgctaa

SEQ ID NO: 17456 - DNA, 906 bp, Escherichia coli
atgaatgtctataaactctcagttcagacccagggctattttcttatcgaaaagaacgattatgagcagagaactgcgcgacgtcccccctggtataaaatgagtgacgatggcgagccaagatacttcgccatttgcccggcctgcaataatccaacgcagattattggcttatataaactgcctgcgaatgtttatcacccttatgccaagcactatggcaaaccaattccgggagttgggatatatgacagggaagcctatgagtggtgtccctattcgaacaggaagccagccagcaacgggaataaaccaaagcgtttgccgggtgtactgacacaacagatcctctccatactggtgacccattttgacaaagtcgtctggttattaagtcaatccaccggtatcagtattgatgagaaacttgcccgaaagatgcttgagcaatacaggcgggaggacgggtggctttactcccgggcaacgttaatgaatattccctgggcctttgcctacatgacggataaccaggacatacttttcaaaaaattcggcgatagcacacttgcgaatgagcttgtaacccgtgcaccggagattctggaatttacggacaagagataccttattaagcaaaaaacctgtaaggagtatatcgagctgggtgcatattataccttgcaccaatcaagggtggttgatgatgttctgacagaatcaatggacatggtttttaccctaaaaaaaggatacagggagccgctagagatttatcgtcagactatttcttttgattttgagcattttaataatctggtcaatttcagcgagtggaaaacatccccctggaatgaacaacttctccagcttgcccgggaaatcctgggggatttgatcgcttag

SEQ ID NO: 17457 - DNA, 753 bp, Escherichia coli
atgtcagacaagacagaaaagaaagctggtgcgctgcattctgagctgcgcatcgagctgcatacccaatatgccattaacacctggagcgggcggccagcctcggatagcaagccttcgctcatcggaatgccgctgtttttccggctcatctcccggattaaccgcgattcactggcagataatccgtgggcggatgcggccctggtggaagtggaaacattactggagacggccagccagcagctccagaaatggttgaatgatatcgatgccctgatggcgatgctgccagctaacgcttccatttccggcgtcacctccacctcgccgctgaatatcggcgttcacagccataccccgctgggataccgctgcgtttatcttcttgttgggtttgatcagcttattctgcgtgtcttccaggctcaccattacggtctgatgtcgttgaaagagcgcaaagcctggttacatcgtggtagccatcaaattcgccgcattttctcggttgccctgcgttaccgttctcaccacgttacccgccaggacattgcctcaaataacgatgctgcccgacaggctatcgaacaatttggggaactcgacagggcgatcctgctgggaacccgccgttcccgattttctccgccagtaagcgccgaaagtattaaggcgctgaaagccgcctttaaacgtctgtcacgcaaagagaaagcggcaaagcaggaggtgcgggatgatccgcaataa

SEQ ID NO: 17458 - DNA, 564 bp, Escherichia coli
atgatccgcaataaaacagcttttaccggattgttcgtcctgagtacctgcctgagtgggtgtgcgagtgttgacagtgtcaacagtgcgataaaccagattagcggtgggatcttttcagtcggttccgcaccggcagacagtggtccggtggtgttgtcgaaaggcgtaccgcaggccagccacaaaatagcacaggaataccgtgttcccgttgatgttgatacggcagctgcgcgggtaaaacgctactaccgctttatctcggctgaagaagtagcacagctacataacaacggtacgcaaagtggagggtggactgccgcttcagtagccgatggggcatgggtatgggatgggcaacccggtagctactacaaaatggggcgcgactggggaagcgaaaatactggtgacagcattcaggtcgagctggagaaaaacggttccggtagccgcatgtatatcacctttcgttccgggctggcctctcatgccacggcggcttataccagcaaactgtttgagaatatgaagagcgtggcggaagggacgattcgatga

SEQ ID NO: 17459 - DNA, 2004 bp, Escherichia coli
atgaagctctttctctgcgaaaaacccagtcagggacgcgatattgccgctgtgctgggtgcgacaaagaaaatgccggggcatcaaaccggaaacggcgtgtgcgtcacctggggttttggtcatctgctggagcaggccagcccggacgcctacggtgaacagttcggcgttccctggcgtactgacgtgttgccggtattgccgacaatgtggcaaatgcgggttaaaccggatgcagcagctcagttctccgtcatccagaaactgctgaaacaggctgatacggtagtgattgccaccgatgcggatcgggaaggagaggtgattgctcgtgaaatcctcgattattgtcactatcagggaaaagttgagcggttatggctctcggcgctggatgaggccagcgttcgcgccgcgctggcgacgataaagcccggaagtacgactttaccctactatttagccgggcttggccgcgcccgggctgactggcaaataggtatgaacatgacgcggctatattcggtcaaggcccgggagaacggctacggtagcgttttatccgtggggcgggtgcagacgccgacgcttaacctgatcgtggtacgcgatcgcgatattgtgcagtttgttccgaagccctactggaatgttgtggcgcagctggcggcgggaggaattgcgtttcaggcgcagtgggtgccagcagaggcgtattgtgatgaggaaaaacgctgtatcaacccgacagcggcgcagcaggtggttcagctttgccagaaaaccggacaggcgacggtggcagaggttgagaccaaaagggaaacggagtctgctccgctggcatttgatctcggtacgctacaacaagcctgttcccgccgtttcggttatggcgctcagcaggtgctggatattgcgcaggctttgtatgaaacctacaaagcaaccacgtaccctcgtaccgattgcggctacctgccaacatccatgcgtggcgagatcggacaggtgatgtcttcgatacagcaaagcgatcccgctttatctgcgatcatctcgcggcttgatatgaagcatgtttcccgtatctggaatgacaaaaaaatcaccgcgcaccacggtattatcccgacgaagcaaccctgtgatctggcgaaaatgagtgagcaggagcgcaacgtttaccagcttatccgtctgcattatctggcccagttcctgccgaaccatgaagtggatgccacgcgggtttcgctgcattgtggcggtcagttatttaagaccagcggtaaagctgtggtcgttgctggctggaagagtttgtttggtaaggatgctgacgaggatgcaggcgatgccggtgataaagcacggttacctgcaatggctaaagggagcttgtgccaggtcaccggcgcggaagcaaaaccgcagcagacaaaaccacctgagcactatacggaagggacgttgattgcagcgatgaagaatgcagcgcagttcgttaccgatccgcgtcttaaaaagatcctcaaagaaaatgcggggctgggaacggaagcaacccgggctggagtaattgaaacgctcctgaagcgtggatttgtggtgaagaaaggcaagcatctgctggcgacacctatcgcggctgatttgatggctgtgttaccggcacagcttaaagatccgggtatgacggcgctctgggagcaatcactggatgacattgctgaaggccggatgtcgcttgatgactttatggcgaaacagtcagcctggacaatgcaactggtggcaaaggggcagcatcagacggttaagatcacgttaccaccttctccgccgtgcccgatctgcggtggggtaacgcggcagcgcacggggaaatcaggctcattctggggatgcgtcaactaccctgactgcaacgggattgtgaatgtcggggcgaagaagcctggtcgtcggcggaaaagtccggcaaagaaaagtgtctga

SEQ ID NO: 17460 - DNA, 981 bp, Escherichia coli
gtggataaacggtatcaagtatttgtgagttctaccttcactgatttacaagaggaacgtagcaatgttatgcaatcgttaatggagatggactgtattccggcaggaatggagcttttcccttcgattgacgaagagcaatgggagtttattcaaaaaataatttgtgatagtgactactatcttcttataattggtggaagatatggaacggttgcggaagatggtctgagttttactgagaaagagtttgattatgctgtatctaaaggattaaaagtcgtagttctagttcatgagtctcccggtactttaccctttgataaatcagaagcagatcctgaattgcgtgaaaagcttcataagtttattgataaagtatctacagggaggcttagaagaacgtggacttcagccaaagatctccctggattagtggctttgagcttgaataaaaccatcaaggcatatcctgctgttgggtgggttcgtgctgataaagttagtagtgaagctactttgcatgagttgaatgaattaagaaaaagaaatgcagagcttcaagaaaaattggcacaatttgaaaatcgctctaattatattcaaccagaaaacctagcttcacttgatgaatactattcattgtcatatgaaataagcgcttatgattgggcttatggtacttctagagaagagaaaaaaacattgcggataaaatgggaagagttattttctataattagtccatttttaattgatgagtcaatagataatgatattcacgagattctaaagaattatatagaaaaagttgcaccacattcgtatgagcatacgacgatagatgctcaagaattgaaaacaatttaccttcaattcaaagcattagatcttctcgagcatagtaatctaaattggaaactatcgtcaaaaggaggtgatctaatgatgcagcttcgaactgttaaaaataaaacttaa

SEQ ID NO: 17461 - DNA, 402 bp, Escherichia coli
atgcgctctaatgagcatattgcagagaatgaccgacgtattcgactcctagaagaacgtatgaaggtgtggaatgcttttatagtgctacgtaacgtttttacggtatgtcatgtggtgaacgcgaagactcttgaatctactgttgatgcaatgcaaccagcgatatttctgtttgatcaggaggtttctatttatctaaacatattatctgctcaattaagatgtcatttgcaaaagcataagcggttacagaaccctgctgcgatcttgggtgttgatggattagaaaatgaggccagagaggaattgattcgccaaaaagaagaattagagatggaaattaacacaagattcgacgaggggaaacctattttcataaggcacatgagccttatgtga

SEQ ID NO: 17462 - DNA, 531 bp, Escherichia coli
atgtctactacatctaaaaccaccaccgctaaacctaaaaaaagcagtgccagcaagaaagccccggctccagttcctgctgaatcagtaaattcggttcagtcagcagctccggcacaaccaaaaccacaatccagctacttcaatttgcatatcgatggactgggttacctgagcaatattcgcgaaattaatactgctacgggttcattcctgagctgtacgattaacgcgttacacggctcaactgaaaaacctgaatacacgcgttttgatgtcacggtgtcgggtaaacagaccacttctttaatcagacgctgccagaatgcagtgaatgaagagaaaaaggtacttatcggttttaagctcagtaatctgactgccgatgtgtttactttaaccaaaggcgatcatgcgggtgaatcaagagcgtcactgaaagcgagactgataaaaatcagttttatcaaagtggggcagaatatggtttataaagctgaaaagtccgagtcatccgactcatcatactga

SEQ ID NO: 17463 - DNA, 597 bp, Escherichia coli
atgaaccttcatatcccaatggctgtctgcctgacggccagcatcctggccggttgtacccaaaagctccagcaacctgatacgcaacctcatccatcggcgctaaatggcaacgtccagccagcccgactggatgtctatgccgcctctcctgaagttgttcgctatgaccgctatctgctggttgatacttccccgagcgccgcacagcgtgctccgttggaacagaccattgatatccgtatccccgcgtcattatcgccgaccgtggcggatgccatgcgctatgccctgcgccagtccgggtactcgttgtgcagtacgacaccggcgaaccgggtgctgtacaaccagacgttgcctgccgtgcattatcaactggggccaatgcggctgagtcaggcattacaaattctggccggatcggcctggcagatcgaggttgattctgtacaacggatcgtctgccactcattgcgtgatggctatcgtttgccgccggaagcggtgaaaacgtcggtcacttcggccactgtgccgctacccgctcaacccgtcaatatcaccgttccggctccgcagaggatgctgaaatga

SEQ ID NO: 17464 - DNA, 720 bp, Escherichia coli
atgaacgagtccgctagtttcatggaggtgcctgaaattaaagagtctgtcagaccagcacgaagcaaactctgggcgatagtccgttacggattcggtgggctggttttgtttgctttggggggaaccacatttatcagccttaagtccgtccaggtactttccgccgaggttagccagcttaaaactgcattgcagggtagcccggatatcgcgccactccaggcacagctgacaacgctgcaacagcagtttgaagcgtcacaaattcaactggggaagatggctgacaaaccggcgcttgctgctttgcagcagaaggttgatgcgctggataagcaacagagtgagctggttgcttcggttgccgcccttaaaaccgggctgtcttctcttcaggagcaggttcgttctttgaatcagcgtccggccaacgtcgctgccgttgttcctgccgtaacgtctggcacggtgatggtaaagaaaaagcccacacctaaagcgcagcggccagttacggcacccttcgtcctcaccggtattgaacggcggggggggatagcctttgctgcgatagcgccgcagtcggcaacacagctcacggaaatagcgttaatggaaccgggggaaacccggcagggctggacactacagtcgatcacgggacagcaggtgcagtttcgtgtcgcggggaaaacccggacattgacagtgcgataa

SEQ ID NO: 17465 - DNA, 705 bp, Escherichia coli
atgaaaaagctcaaagttgtgttgttgtcgggagtgttgacagtgtcaacagtcgcactcgctgcaccttcagtgaatcaggaaaacagcctgacggtgaatacgtcgttacagatgctggaacagcaacaaatgacgcggagcgcacaggagtgggggctgacagcggaagagtggcagcgttatgaaacactgaaaaaaggacggcgcggcgtgctgtctccggggttagatcccctgacgatgctgggcatcgaggcgcgtagtgacgaagaacgtcgccatttcgctgaactggcggtgaagcaggagtttcagcgggttgaagcggaactggcatttcagcgggaagtgaacagcgcgtggacgcgggtctatcccggtgttctgcccgttcaggatctgcggagtgaagtcagtaacgcccgtcaggcgttgtttgtgaaaggcagctgtccggcctgcgagcgcaagctgactcagttgatgaaatcgaaccagccgctggatatctacctcgttgatagcggaggtaaggatgagacggtccgaaactgggcgaagaagcacaatatcccggctgaaaaggtgaaatcccgcctgatcacgctgaaccacgacaatggtatgtggctaaaatatggcagtgggctgatgccggttgtattacaacaggggccgcagggatggcagcgcgtaaactga

SEQ ID NO: 17466 - DNA, 567 bp, Escherichia coli
atggcagcgcgtaaactgatgtggctggcaatgttcatcgcactgccggagtgtctggcggcgcaatctgttccggaaggatatcaccgggttgcgcaggcggaaaatgttcctgccgaagcgctgtatagcctagcgctgacggagtcatcccgcaagctggcgcatggcgtacgcccgtggccgtggacaattaatgttgccgggaagggatatcgctacgcctcccggaatgaagcctatcaggcgctgttaggttttatgcggcgctatccgctcaagcgtattgatgttggtattgcgcaagtcaatctgggctggaacggccaccatttcacatctacctgggaagcatttgatccctataccaacctgcacgtcgccgctcgtattctgcgaacatgttacgagcgtagccccgggagctggatatcggctgcggggtgttatcaccatccggcaggcggcaaatcagcgcaaacctataaggctatcgtgtcgcgccacctgggtacattgcagccgtctgtacagacactggcgtttaatcagggaggaacacaatga

SEQ ID NO: 17467 - DNA, 501 bp, Escherichia coli
atgatgatgcgttttccgctggttctcgcactgctgtttccgggtataagtcaggccgaactaaccgttgtcgccgatctgggtgggcagtcaacggctgaatattttgccggtattaacaatcaaggggaggaatcacccacctcgcaagtgttgacactgtcaacacctgataaagcatcggtattacccattcgtaccccggagctttcacccgggccgctggaggcgcgctctctctctatgcccggaatgcggtcgattttcctgataggcgacgacggcctttcccggcgctggctgtctctgcgccgcgatcaacttattcagcttaatgctgtgggctatgtggtgaatgtctccagcaaagcagcatgggatgatttgcagcaccaggcgaacggactggagttgcttccggtttctggtagcgatctggccgttcggctggggatttctcactacccggtactgattagcgagaaggggctggagcaatga

SEQ ID NO: 17468 - DNA, 2085 bp, Escherichia coli
atgagcgaccgctatgttattgaagccatgctgcggcctgcggtggagctgaacaccgccgttgttgccgcctgcgccagctatatctgcgtgacggccccgtgggcggtggcgctggcaccttcagtcagttacgtcacggcggcagggtttgccgtactgtcgatgaaacgcacgcagcagggattacgggtattgcgttaccggcgcaatatccggcgtctgccgcgttatgttgtgacaagtagcgaggtgccggtgagtaatcaacggctatttctggggaaggggttcatgtgggagcaaaagcacacccagcgactactggataccctgcgcccggaagttgcagggtatgtgaatccaccggcgttgtatcaggctgcacgtcgttttgagcagcgctatgagcatcgctttcctgcattgtgcaagctgctggcccgtgattcggcgttgaatcccgttcggccattgccgccggtcggcggtcatccagcattgcatggtatcgaaccggatgaggtcaatgtctcgatgagtctgggagagcgcgtcgggcatatgttggttctcggcacgacgcgcgtcggaaaaactcgcctcgccgagctgctgatcacccaggatattcgtcgcggtaacatcaccattgttttcgacccgaaaggtgatgccgatctgctgaagcgaatgtatgcggagtcacaccgcgcaggccgtgctggtgaattccatgttttccatctgggctggccggatatcagcgcccgttacaacgcggtcgggcgctttggtcgtatttcggaagtggcttcgcgtgttgccggtcagctcagtagcgaaggcaacagcgccgcatttaaagagtttgcctggcgcttcgtcaatattattgcccggtcgctggtcgcgctggggcaacgtccagactttggccttatccagcgttacgtgaacaatatcggcgatctgtttgagacctatgcggaaacctggatggtgaagcacactccggcgctgtggcaacaggtggagaatctggcgcaaattctggatgagcgcgatattccccggcatatggaaggtcgttcgctgcgagtggtggcgattgaacaggtgctgaatagtgatgaagggaagaaagtatacgatccagtgctcgatggcctgcgttcgtcggtacgttatgaccagaagtattacgataaaattgtggcatcgcttctgccgttgctggagaaactgacttccggtaagacggcacaactgatctcgccgaactacaccgatatgtccgatccccgtcctatctttgactggcagcaggtgatccgtaaaaagggcgtggtttatatcggccttgatgcgttgtccgatccggaagtggcggcagcggtgggaaactcgatgtttgccgatctggtctccgtggcggggcatatctacaaatttggcgtaaatgatggcctgcctagtgacgagggcaagaagacgccgatcagccttcactgtgacgagtttaatgagctgatgggggatgagtttatcccgctcatcaacaaaggcggcggggcgggtatcgaagtgacggcctatacccagacgttaccggatatcgaagcgcggctgggcaatgcggcgaaagcggcgcaggtagtggggaactttaacagcctggtgatgctgcgggtgcggcatacggaaacggcagaactgatgacgaagcaactaccggaggtggaggtctataccaaaacgctggtttccggtgtcaccgatatctcgaacccggaaatgggcagcgattttacctcgaacacccaggacagggtgagtacggtgcgtaccccgctgattactgctgcaaacgtgatcaatctgccgaaaggacaggcgtttgctttgctggaaggtggcaggttgtggaagattcggatgccactgccatctgctggcgcggatgcgctgatgccggatagtattggacagattgcagactatatgcagcgaaattaccggacaagcgatgcctggtggtcgggcagtgcgttaccgggggattacgatgctgccactttttga

SEQ ID NO: 17469 - DNA, 270 bp, Escherichia coli
atgaaacaacgttatcgggttgaagcggttatggcatcttcaagacaaaataagctggaagtcccacgtgatgtgatggatgttttgtgcgagcaggattgctcgtcactccaaatcccggaaattattgagcgtctgacttcgctgggctatcgcccgagatatgaagccacagctgatacgctcacagacattgtcaccctgtggatttgggtgggtcaggaggagatgttgctgaactgccagatggagccgctggcggtgcattaa

SEQ ID NO: 17470 - DNA, 765 bp, Escherichia coli
atgtcgcagatgaacacgtcttcacccccggtacagtcgtcaacgccaccaaagccgcacggtttttttaccgtactgctgtgggatacgccgatgaacattatcggcatgctgctggtttcgttattattcagtgtaattgtggagttcatcggtattgcgttcttttggcctgatcagggagcggaacatagccgcgccgttatgctgacggagagcggttattttgccgaaggatttacgcaaagtttgctgctgtcatcgccggtggtgaccgtacagagctggatcgcgctgggttatcagtggttttttgtgaatagcggttttactggctggttgcagtcgcttcagacgacgactgccggaggcggtaatggcgttacggatgaacttaacgcctggtgtgcctgggcagtacagattgcatatgaatacctgatggcgacgatgtatgtgtcgctggtcttcctgatgcgggtcaccattctggtgctgtcggtgccgctatttgttctggttgccattgtggggatcgcggatgggatggttcgacgcgatctccgtcgctatggtgctgcgtatgagtcgagcttcctctaccatcatgccaaacgcgtggtgaagccagcagcatatattccgtgcgtattgtatttgtcagcgccgttcgcggtatatccgaatttgttgctgttaccggcagcattgctgatggggctggcgatttcagtgacgatggggagttttaagaagtatttgtga

SEQ ID NO: 17471 - DNA, 1062 bp, Escherichia coli
atgtcaatctacgcagtctggaacaataaaggtggtgttgggaaaagctatctgactttccaattggcttctgaatacgcaagacaacacccagataaaaaagtgttggttgtcgatctatgtcctcaagctaactcatcttcaatgttgctgggtggaatgattgcaggagaagctcaattaactaacatccactctcaacaaaacaacaggcgtactatttcaggttacattgaggaacgaatccgcagcccatatatgtcacctaattcgggtgcaaattatgtaactcaggtatcccaatacaacaatcgcattcctgataatgtcttcttggtcgttggtgacgagcaattagagacgcaatcatccagagtttccagcgctacaaatcctggtccacaagatgcttggcgtagcgtccacctatggattcgtgagctgattaatgacattcaaacctcatggaacaatgcggaaacctgtgtttttattgactgtaatcctagtttttcagtctatacagaattggcattaactgcctctgatcgtttgctaatcccattctcagcagatggctcatcgaaacgtgcggtaagagcaattctttcactggtttacggcgttcagcgacatgttggcgatcctctatctgatttcgtaactgaaacccgcagattcagaatgcaagtccctcaaatatatatgtatattggtaaccgtctgacacaaatgaatagttcttcagcttccgcattcagaactgttgtaagtgagattggggatgaaatttggaatgtatggcagactacaccacaggttttttgtatacaccccaatggagctgcaacacctaacaataaacgcgccttcaaagctatgtttcaatatgaagtcaatgatgctaactctgcatccgtagtttcaggcgcgttaggcataccaattgcatctctaacagctggacagaaaaatgttgcaggaaggagtattaccgtaaatcagtctcagttagacaaacaagtacctaatatacaagatttagtacagcacattgagtaa

SEQ ID NO: 17472 - DNA, 312 bp, Escherichia coli
atgcgcatgacgcaaccccgggcatggtgcctgttgggttttttgctgatttcgggcgttcaggccgccgagtctgacgagctggcgctggtaatgaagcagttggagcaagtgcaggctgcgctggaacgcgcccgtgttgtcgccgttcaggatgggcagcacggacgcttctatttcgattacctacgggcaacgcaggatatcaaagcgattcgccaggggattggtatctacctggaaccttcccgcgctcagccggtgccttcggcctctctcaccggtcagtaccggatggagcgtcgcccgtga

SEQ ID NO: 17473 - DNA, 237 bp, Escherichia coli
gtgaacgatgcccagaccagcgcatttaaggtggcaagtggcaacgccgatcccgcactgctgagcaaagtgttcattggtgcgctgattgctctgctgattttgtgggtgggatggggttttctgcatgtttatcgggggtacgcggcaggtcacatcaaagagcaggcactggtgcgttttgccatccgttcagtccttctcatcattatcgctatctatctcttcgccagctaa

SEQ ID NO: 17474 - DNA, 372 bp, Escherichia coli
atgttttgttctgcattatcttctctgcgtttttcttttcgtctctggtgtgcgcgggttctggccgttgccctgaccggaatttcggctgcccgggcgggtttgcccaccgttgaaggcccgaaaagcagcaccgacagctctttctacggtcagatctcgggatacctcaatgacggtgttgtgctgggcggattaattcttgcggcagttgccatgctggccgtcggtaacgccattattgccacctttgccgaagttcgtgacgggaaatcaacctgggctaaattcgggatgctttgcgttgtgggggtgatcctgatcgtcgtagttatctggctggcgtctaaggccgcaacggttctgctctga

SEQ ID NO: 17475 - DNA, 381 bp, Escherichia coli
atggcgactatcgaatttatgcctgacaggctgaatgctgagccggtggtgtttcgtggattcaccacgccggaactgggatttaccgcgctgttcagcgtactgggcggcctcgtggtcgccataccagttctgccatttctcggctggatagcctttccgaccgtggcgctgctgatgccgctggtcacggttatttttggcggcaggttaatggcgcgttttaagcgcggtaagccagaaaattacctctatcgcaggctggatctgcacatcagccagtttggtttgggtacaaagggactggtgcaaagcagtcgggtgctggcgctacgtcgtcaccggctggttgtccgccgccaggaggaaatccatgagtaa

SEQ ID NO: 17476 - DNA, 657 bp, Escherichia coli
atgagtaagtttaaaaatgccctgaatgcccgggatcaccatatccggacattacgggcgggatgcggggttttactggtgctgttggttctggcattgtccggctggatgatgtctccgcgcaatctgaccattcacaatccccccgatctccgctccggcagctcccgtccgtggtgggaaatccctccctcaacggtgtatgccttcagcttttatatcttccagcaactgaacagctggccgaaggatggtgacgttgattatccctatcgtattgagacgttgtcggcctacctgacaccgacctgtcaggaactgctgcataaggatgcgaagcagcgtaaggacctgggcgaatcgcgggatcgcgtgcgcggtgtatcggaaatccctgaacggggctaccgggatgacagcgtcaccattattgaccgcgataactggcaggttcgtctggatttagtcaccgatgaatatgttaactccgagccggttaaacgctcgctggtgcgctatccgctgaaagtggtgcgctgggataaaaatccggaggctaacccgtttggtctggcgctggattgtctctcggaagcgccgcagcgtctggaagcagcccctgtggttcaggaagagaaaaagggagtgtttaactga

SEQ ID NO: 17477 - DNA, 876 bp, Escherichia coli
atgagtttacgacgatttttactgtcgctggcctgtcttgctgcattaccggcgcaggcggttgaactggtgaaatgggagcgtattccgctgccggtggccctgcatgtcaatcaggagcgcattgtgtttgtgaaccgcaatgtgcgcgtcggatttccgcctgagctgaaggggaaattgcgcgtacaaagtaccggcggtgcggtgtacctgcaacccggggagcagtttgcccgaacccgcctggtgcttcaggatgtggagaacggcgagatgatcctgctggatatcagcgctgaagagggtaaaaacgtactggagccggtgagcctggtgtatcagggggaggtctccagctcgatgggggacggtgatgttgcggtgacagacaataaaaccgcaacaactggcgaacgacagtccacatcgaaactgaaagagaaaaaatccaccactccgctgccggtggccctgacccgctatgccgcgcaaagtctgtatgcaccgtcacggacgattgagccgctgcccggtgtgcattccatttcgctggcattgccagacaagctcacgtcattgctgccgtcagagtctgttgaggtcaggccgctggccgcgtggggattgcagggctatagcgtggtcgcgctgacgctgcgtaaccagcgtgcggagaaagtgattctcgatccgcgtcgtcttcagggcaatttctacagcgcgacatttcagcatcgctggctgggtgcgagcggtacgccggaagataccacaacggtgtatctggtgacgaaagggcgtcctgataccgcgtttcttcctgagccagtgaaggcgaaagcaggcaaaggagggaaggtcgatgcagattaa

SEQ ID NO: 17478 - DNA, 1473 bp, Escherichia coli
atgcagattaaatcgaataccctgctgaaggttattgtgccggtggtgttgctgtcggcagtgatgattggcgtgaagtcctgcggtggtcctaagcagacgccggattcggcggataataccactgttgccgacctgactcaggaggaactgcgcattctcggcatcgagggcgacacgccgcaggatacgctgcgtacgctggttggacgtattaaaaccattcagacgaatcaggaaaatctggagaaacagaatgttgcactggcagaagaaaatgcccggttgcaaaacaagggcaataacgtggacgggcgcatcaatgatgcggtgaatgccgccaaacaggagagtacccaggcgcagcaaaaacttcaggctgaacagcagcggctggctggcctgctggaatcactgaaaaataccgttcccggcccgggagcgggcagcaatacttccgcaggcagtgacttacctgtcgggctggggctggggctggaagatgccgggcaggccgaaacggtggcgcagggtacgctctggattgaaccgcaggatggtgtacaactggatcgcaacggcaaaccggtgaccggtgcagcagctgcgaccaatggcactggcacattccagttccccacggcgttcggtgggctgaatgacaacgcgatcactcgtcagaaagccgaactggatcgtaatgcgaaaaatcagcaggccattgaggaaaccgatctgccggtttataccctgccggaaaactccacgctggttggtagccaggccatgaccgccctgctggggcgcgtgccgattgatggcaaagtcaccgacccctatccctttaaagtgcttattggtaaagagaacctgaccgccaacggcatcgagctgccagatgtcgaaggcgcgattgtgtccggtacggccaccggcgactgggtgttgtcctgtgtacgcggtgaagttcactccattacgtttgtcttcactgatggcacggtacgcacggtaccgcagtcggcaaaatccagcgatggcagcaatggaaaatccaatggcggcagtattggctggttgtccgatgagcacggtattccgtgcctgtccggcgaccgcaaaagcaacgcctcaacttacctccccacgttatttgcgctgtctgctgccggtgcggcctctgatgtgatgtccgaaagccagaccacgaccaccactgacggaacgtccatcaccagtacgttgaccggcagcgccggacaggctgcgctgggcaaggcgttatccggcggcacgaacgagctggcggaatgggtgaaagcgcgatacggccagatgtttgatgcgatttacgttcctcccggcgcgaatgttgctgtgcatattacccgccagatcccgattgattacgaagagaagggccgcaaggtcaaatacgattttgatgtcagccagcaacacgagctggattaa

SEQ ID NO: 17479 - DNA, 402 bp, Escherichia coli
atgaaaggatacggtttattcatgctggtcgcgttgttgctgagcggttgcagtacctccaaagatgaaatgctgccacccggtgacagtaccatgctcgatatgtggcagaacaaagccagcagcgcccggaccacgacagaagcgcgtagcgtgttacgccgggggctgacggattcggatctggcaacccgtcagtcactggaagagagctatacccgcgatgctcagaatgagatccagcagcttttcccgcgcctgcctaacccggatatggtgatttatatctatccgcatatggcaggaaatgagcctgcgccggtgccgggatacagctcggtcttctctttctatagccgggtacagtatgcattaccgggcgaacggctggaggcactctga

SEQ ID NO: 17480 - DNA, 2769 bp, Escherichia coli
atgttcagtttattcaccaaaaaacagccgcagccggtggctgatgaaccggcgttgccgtcacagaaaaagagcggcaggctgacgcaggacggcgtgtgttcgctgtatcccaataacgcctcgtttatcgacttcctgccgtgggtggaatacttgccggaaagccagagcctgctgctcgatgacggtgtttcggtgggcgccgtatttgaagtggtgccggtgggaactgaagggcgcaccggcgaacgcctggaagagatccgcgatatcgttgaggatgcgctccaggacagctttgacgagcgggacagtcacccgtgggttatccagttcttctgccaggatgaaaccgatgtgacggagtacatcgataaactgcgcggctatgttaaaccgtgggcgcagggaacagcattcaccgacgcgtatatgaatgagatggaacggcatatgcgcggtattgcggtgccgaaagggctgtttatcgacaaagcggtcaccggcgcaccgtggcgcggtcagcagcgtcgtacccggatggtgatttatcgctatgtgaacccgggagcgaacgaaccgtattcaccagaagagcaactgaatcaggtctgtgagcgattatcgtctgcgctggccggggcgggaatagtgacttcccggcagaacggcgagcagatccacgcctggctgctgcgctggtttaaccctgagccggactgggtggataaagagacgctgtatcgcacggcggcgcatgttgacacccgcaacggtgagctgccggtgcttaatgatttcagtgaaaccctgatgttcacgccgccgcgctctgatgttgagaacggcgtgtggtggttcgatgagcggccgcataaagcggtcagcatcgatcgtatccgccgtgcgccttcggtcggccatcttacaggcgaaacccgcaaaggggagaacattaacgcgctgatggatttgctgccggaagggacggtgatttctctgacgctggtcgtgcagccgcaggatgtgctggaagagcgcttcaaccatctggcgaaaaatgcgattggcgagaatactgagtccgaacgcgtccgggccgatgccgatacggccaaaagttatttgggcgaacggcataaactgtaccgcgccagcatgaccttctttctctccggggcgtcgctgaaaatcctcaacagccgccagcgcgacctgacggccattctcctgaacgccgggttgcagccggtgaaaccggaatacgacgtcgcgccgctgaatggctacctccgggcgctgccgatgtgttttaacccgacgctggataagaagaactggtacacccgcctgacgtttgttcagcatatggcaaatatgctaccggtgtttggccgtgacaccggcaccggtcatccgggatttaccttctttaaccggggcggtgcgccactgacgttcgatccacttaacagcgccgaccgctccaaaaacgcgcacctggtgctgtttggcccgacaggatcgggcaagtcggcaacgcttaacagcctgtttgcccagttgatggcgattcaccgcccacgtctgtttattgccgaagcgggtaactcgtttggcctgtttgccgattattgcgcggagctggagctgtcggtgaacaaggtcagtatcaagccgggctgtggtatttcgctggccccgttcgccgatgcctacaagctgattgaagcgccagtgaaaactgttgacgaaagcgagctgagcgaacgtatcgaggtggaggaaacggacgacggcgatgcggaggaagagcgcgatattctgggcgagctggagattgtggcgcgtctgatggtcaccgggggcgaagccaaggaagaggcgcggctggagcgtgccgatcggggcatgatgcgcgaggcgattctggccggggcgcgtaaggcctggaatgaagagcgtcagatgatcaccggcgaccttcaggatgcgttttacgtcttcgcgcaggatgaatcccgcccggaagttcgccgtgcccgggcgcagaatatgggtgaatcgctgggcgtatttatgcagggcttcctgggcgagttgtttaaccgcccggggcagaactggccggaagcagatgtcacgctgattgatctcggcacactggcgcgtgaaggctatgaagcgccgctggccgtggcctatacctcgctggttaataccatcaacaatatcgctgaacgtgaccagtttctggaccgggagatcgtcttcccaaccgatgaagcacacatgatcaccacgaacccgttgctggccccgtacgtggttaaggtggtgaaaatgtggcgtaaacttggtgcgtggttgtggctggcaacgcagaacctggaagatttcccggccacggccaagaagatgctcaatatgatcgaatggtggctgtgtctggtgatgccgcctgaagaggtggaagagatcgcccgctttaaaaagctgactgccgagcaaaaagcgatgctgctgtctgcgactaaaacgccgcgctgctacaccgaaggcgtggtgctggcaacccgtattgaagcgttgttccgggctgtaccgccaagcctgtatctggcgctgggtatgacggagaaggatgaaaaggcggcacgtcgggcattgatggttgaacatggtatcagcgagctggacgcagcgaagcgcattgcgcaccaactcgatatcgcccgtgggatcgccacgaaggaggcggcatga

SEQ ID NO: 17481 - DNA, 399 bp, Escherichia coli
atgatgcgattcaggaacaccgtgctggacgttgtggagggtaatatctcggataacggcgtgttgtttgaagcgccaccgcagggtaatccgcgaattagtcagtataatcatgcacaactggcggaattatgccgccagatccgtcagcgggtaggggagaaggcgacatttacctgttcgcctcatcgtgtggccgggcataactgcctggctgtgcaggtgctgggtatgaccggaacggttaacctgctgctcactgtcaccgacagtctgcgctggcctgcggcagaggattacgaacatggggtgcgctggtatatcaatttggttgatgctgtggatgtgagttatttagtattcgaactctatagctcattgactttattaggtatttga

SEQ ID NO: 17482 - DNA, 1749 bp, Escherichia coli
gtgagtgatgtcaatgcaatcaaggaactctttttggaaaacaatgagtttattcttctagggttaacaggacgaacaggctctggttgctcaaccgccgcaaaaatattgtcttccgaaacccctaaatttccatcgttggagtctttgggtgatttttattcagagatggatggtattagatacaatgtcttaaagcaatataccgaagcgcactggaaagcttttaatttgataaaagttagtgatttaataagtgcatacatattgcttctatccaaagatatgctggctgagtttatctatcaatacagtggaaaaactaatgattcacgagtcgagaaatctaaaattctttctaagttagataaggctatatttaaagaggataggaaatcaaggcttcttaaaacgctaaataaattcattgatcattccaaagactttacactggtagccgatgattttagtaaaactagctcgcttctgaattttctgaagggggttaccacgacaatcaaaaatgaacttgatagtatacaacaagggctttatatctctacgtatcaagccgcagggaattccataagacggttggggaaaattgaagttaactatgaagataagccgtttgaaccactttcggtatttcatttgccagagactctaaataaatttattaaaggtattaaaaaggaaaacaaaggcaaggcttatgttgtaattgatgcgcttagaaatccttatgaagttaaattttttaaggatagatattcagcattccatcttgtttcaattaatgctccagatgagaatcgcagagactatcttaattcctataaatttagtggtgagtcgattgatgaaatagatgatcgagagtcagggaaggtcttcaatcaaacaaatattaggaaagataaaatatcatacttcacatctattaatatttccaggtgtatagaagtatcagatatccatatatataatcctaaaaagcatgatgatgatagtgatattttaaaagcgcaattggcttggtacgtttctttaatgctacatcccggcttggtaagcccaacatcaatggaaagagtcatgcaattagcatactcggcaaaattaaattctggatgcatttctcgtcaagttggggctgtggttactgatattaataattccataaaatcagttggttggaatgatgttgctaaaggtcaaatatcatgcgccttaagaaccgttcgtggggtcctaacaaataatgataatgatacatatagtcattatgaattaaataatgaaccttttagagcgcaaatggaaataataagagtaaaacttgatgaaagacaagaatcccttaaagggatgactgtgccttattgttttaaagatataaaaaataacttggattctaaagggaatcaagttcatacgcgttctctacatgcagaagaaaacgcctttctgcaactatctaagtatggctctgttggaattgaaggtggccgtttatatacaaccgccagtccttgtgagttatgtgcaaaaaaagcatatcaactaggtataaaggaaattatttatatagatccatacccgggaattgcgcaggaacatattcttaatattggaaaggaaaaacctacactaattcagtttagaggtgctattgggagaacatatcatcggttatatgaacaggttcttcctctaaaagatgaatatgattatttaataaattaa

SEQ ID NO: 17483 - DNA, 399 bp, Escherichia coli
atgaaattttcaaagttcctgatctcgctgctggccgttgctgttcaggcaccggcggcgaccactgtctacaccgatagccatcaccccccatcgaacgctgccagcgctcaggtcgtttacctcgatgcgccggataccgttcagcaccagattttcggtgaattacctgctgatccagcgcaggccgagcaaacagcaaaagccattatccagtcgcctgactggcagcaaaaacagcagcaaatcggacaggcgtaccagggcgtgctacaggcatacagcctgaaactggcgaagtatcccgccgtggtgtttgacgaccgctacgtggtttacggcacggcagatgttgcggtagctgaagctcgtcttgctgaatttcagggggcgcgatga

SEQ ID NO: 17484 - DNA, 954 bp, Escherichia coli
atgatgaaacagcttcgacggcaccggctggcgattgcattagcgtttggttgtgctgctcagccctttgcggccggagcgattaactccgcgcagatcatcgccagtgcgttctccccccagtgcctggaatacaaaatcgttggtatttgctactggctgctttgtacgcccgtgggctgcgttgtaaagacctccaccaaagtacgccattacatccctaacgcggttgtttccagctacaaccagacgggcagtaatccctggacggaaatgtcgtttctgggaacgggcctttccggtattgctgaaggtggcggtgcgaatgagcagaaacgcaccgagcggaaagataacctgcaattcaaaaatgcggatgttattggtcatccggcgctggccgcgcccgttttcaataagtttatgggacaaatggggtatacctgttccggtccggccacggcgatgatgccgtatcttctcagtacccttgatgcggtgatgtggcgatttggcttgccggagtcgttttatccggaagcgatgacgcccggactgcgtgaagtgggttctacaatgggcgcgaatatgtgggggaacgtttatccccgtagcggttttgtcactcaggttgatgactataaagcggcagcggtcgttgcacagcgtgcggcagatgttgtcacccgaaccgggcaaattcacgtctatcaaccgatgacggccagagccagcccgggctactggcctccttcggcggtcacggaaaacaccggcacccgtaatcataaatggcagctgctcacgccgtcgctgtccacatcctgtgctgtttttccggacagccccaatcccattgcaaccgatggcaattacgcctgggcgctatggcaaccctacagctgttgtaagcgtcgcggccagacgttcctttacagcgtcgattttcaataa

SEQ ID NO: 17485 - DNA, 1416 bp, Escherichia coli
atgaccattaaatacgtgttttgtgctggcgttctggtgggatgctttgcgctgagccttccggcacaggcggttttcgatctggataacgacgtgatcaataccgattccagcaagggggtgaaaggggcggtgaacgataacctcttttacaccatcggtggcgggacggtgatatcgcagccgcccagcaataacaatatggaaaaactgggcatggggattggctggaacagcgatctgatgtgcggcaattttgacatcaatactactgtaaaaaatcagctaaacggtgtgaccagcggctttaaggacatgatgagtaacgtgatcagcagtgctaccggcgcggtggcaagtttgccagcgatgatcatccagcgagcaaatccgggcttgtatgagcttctgaccaatggcgtgcttcaggccaatgtctcgtttgataaagctcaactcaactgccagaacatgtcgaagaaaatggcggattacaccatgtccagccagtggacgcaggcagcgataggggaagagttcaagaatatcgtctccacaacgccggatgcggtggctgctgataaccagttaaaaacctccaccggcaaagagggggtgaagtggattggtgggcaaaaacgaggtggtagcggccagccagcgattaaaccgacgcatgacctggcgaaagcgggattcaatattctgaataagcagcctgtcaccagcaatggtggagtcagtggttcatcctgcaacggttctctttgtaagaagtacaaaaccagtgaagaggctgcggaagcggtcgttaaagtgctgggcgacagggccattcgtacctgttctgaagccagcgagtgcagcagcggggggctggagaacgaacctggggcatccagcgctggagtcggtttttcaccgatgctggaagaaaccacaaaagagaacatggaggcgctggtgaagctggttaacggcagtctggaacccaatgccactaatctggcaatcctgaaaacaggcgatctggccgtttcccggggcgtgattcaggcgctgaaagatgatccggacaacgtcgccctggtgcagcgccttgcaagcgaactggctatgtcagagaccatcaccacggcgctcgggatgcgccggatgctgatggccgggcaatcggaacccaatgccgccgaccagaccatggcactggatgaatccgaccgccgtctggaattcctcgaccgggaactgctggcgctgaagaacgaaatggagatccgcaaggagatcagcaacaactccattctgatggcgctaacccgacaggaaagccgtgaagccgatcatggcctgcgtcagtcaacgcaacagaatgatgatgccgtacagaatctcaatgaaaaggcgggggattga

SEQ ID NO: 17486 - DNA, 333 bp, Escherichia coli
atggatatgattcataaaccgcgctggcagcgaattttgcggggtgttctgagctgccttgccgccattctggtgctgggaggcttcagtttcatccttctgcactttgtcggcagtgaggcagaactccgggcgtggctgctccggataaaaacgccgctcctgatctggcgtctgacgctgtatacggttatcgcgtttttctggctgcaccgtgtccggggatatctgctacgccactgtacccggcgctttcaggtataccggctggaaatcatgacggtgtgcctgtttgtgatgattgaaatcacctgctcgcgctgggggatgtga

SEQ ID NO: 17487 - DNA, 1530 bp, Escherichia coli
atgacggctgacagttatctggaaatggtgctggttctgatgggctggctgatcaacaacgcgctgtggacgattattaccaccacgggcattttcgctattccgctggcgttcaaaatcgccggtgtctggctgaaggttcgggaagagggagatgatgaagggaataaaggggcgctggcattaccgcgtatagagcatgtcatctatgtcgcttttgtggtgatcatgttctgtgcgatgccaatacaggatgttgatatctcgacgatgaagtttgatcgcacccgttcttcccagtgtggtgtgaatgtacctaagccagatgagtctggctatgggccactgattgccgagcttaacggccagactgcgaaaatcccggcatggtggtatctggtacattcgctatcgaaaggggtgacgcacgccgcgatagcctctattccctgtggcaatgacttccggatgctgcgttttgaagtgcaacatacgaagctgattgatccgattattcgccaggaggttcaggagtttgccagccagtgttatgcgaagtcgtattacaagctgaagaacgtgaattcagggctgtcagcggagacggtagattccgttggctggattggttcggatttttttctcaatactggcggctattacgattactacacgtcaacgatgccccgggcggcgtggccttacagcgacagccgggacagtggttatccaaatgttggccgtggtggttatccaacctgtaaagactggtggagtgcatcagggaaagggctacaaagccgtctgctgaaaaacttcgatacccgaacgatcaatatgatgaaggcaaaatcccccaataactgggaagaaagcctgttgcgctggctggtcagtcctcagaatacacaactttctggtggtggtgatacctacatgatgggcaatcagcaggggcagggaacgggtatcgataccggtatcaaacagttcctgagtgggctgggggcgctgtcagcacagaccacgcagctaccggcatttgatgccctgcggcaggcgctgccgatggtgcacagcattatattgatggccctggtgatcagcattccactggtgatgctgtttggtgcttacgacccgaaggtggtggtcaccattacgtttgcgatgtttgcgctgatctttgttcccttctggtgggagttgggcggctggctggacgacaagcttatccagttgctgtacgccagctacaaggggtataccaacagcttcaacaactggattgccagtaccggctcggatggctggatcatgaatctggtgctgggggcgatgtatgtggtattgccgatgttctggtttggggcggtgagctggagtggtgttcagatcggaggagcattatcttcagcagttgataatgccagcaaaggttcgcaacaggctggagctaaaggacctggcgttgcaggtgaagtcgtcaaaacggtagcaacgaaaggggcatctaaagggaaaggttaa

SEQ ID NO: 17488 - DNA, 213 bp, Escherichia coli
atgaacaatgataataaaccatctagccaagcagacttctggacagttttgtttaacggagtaacagagatcgtaaaaatgatcttttctataatcatggctatagtggctgccggaagcaaaacatccagtacatcaacagaagataaaacattacacacaggttatcggcacaataacgacaaatctgtgcattttgacaatgatgcttaa

SEQ ID NO: 17489 - DNA, 330 bp, Escherichia coli
atgtctgaaaaaactaaacttgagatattttccgttgaatacagaaaaaatatttttgatttatataaagatacatttgtttgcgtagctattgctgttttgggcgtttacttgattaaaaatgattatcaatttattggatggttaacatatattgttgctggtgcattatccatactggcatcaactactaccattaaaatgattggagaaaagcgaaaatcagaggaaacaagtaaatcaggattcttgctgttgttattcttcagcctgttttccataataattctagttgctggtttagttaaaggggtaaaggatgttctgtaa

SEQ ID NO: 17490 - DNA, 447 bp, Escherichia coli
atggaaggcgtaataaaatggttcagtgaagagaaagggtacggattcatcactgccgcgaataatatagattactattttcatgtcagtgatataaaaggctcattgcttcctgaaaaggggcaaaatgctcattttaatgcagaatcgacatctaagggccatagggcaaaaaacattactcttacaaagaataatattgcatcagataatcgtctggatttttgcaaaaactgtaataaaaaaattattccaagaatgattacctacaggggtgaaccacaaaaaaccgtttgcccttactgtgcaacagtaataaagaatttcgatgataattttttgggtgaaatcattgcagcgatattttattgtttcacttccatgataaaaatactctttgaatttatcacatggatatttagcatcatagctaacaaaaggaaataa

SEQ ID NO: 17491 - DNA, 891 bp, Escherichia coli
atgtcgaaattaagtaagcagctggttacgctggcaagacagggaggtggtgggttcaagactatcgcagatcgttcaaagattgcctctcgtgtagcggagcgaatagttaaattaaatattcagatccgggatgtgaagcatataaaaaccaatcatattgagctgtatgtcaagagtcgccaggccgaagggatatctaaaagaacaatgcagaatgagatggccgcaatcagaaatatgctgactgttgctggtcgaacaaaacttgccgatcctaatcatgaaaaattaagtaattcagctctcggattagcagatgccagtcgtgacggtactaaagtcgcaattaatagcgaacgctatctcgcagcgttcgcttattcagagaaacaagacgttggcgtagcagctgcaatgcaggttgctcgttgttttggcctgaggacagaagaagcggtgcaatctgtgaaatcattaaaaacctggcaacgtgcattatcgcgtggtgatgatcgtgtcaggatcgtatttggtacaaaaggaggacggccaagagatacgacggttatagagcgcgataaaatgctaagtgctgttaatcatgctttgaaaatcgctgccgaacagaatggtaagttggttgataaaccggatctgaaatcagcgattgatcgctatcgaaatattgtcagagatgcgggattagtggggaaatatgcgcctcatagtctgcgatatgcctgggcaggtgaagcaatggaatatcataaaagtaaaggtatgagtgacgatgaggcaaaagcaatggtgtctatggatctgggacatggtgatggtcgaggacgttatattgagcgtgtctataataaatctgatatcgaggaataa

SEQ ID NO: 17492 - DNA, 282 bp, Escherichia coli
atgactaatcgcttatctctggcatttatgcctgtttctatcacgcttccggcttgggaacatgccgttgaagtatttgatttctcccagtgggaacgtcggcaatttgcgctgatcaaagccgcgcaagatgcctggaaccatcgttcagatcctgatactcagcaggtgacattttcgctgacgttgtttgttcgtctgggaggtgaaactaccgaacggacgcaaaactttgtcgccagatatgttgacgatgcactggttgtaaccctgggagaatga

SEQ ID NO: 17493 - DNA, 195 bp, Escherichia coli
atgaaaattcagcttgaactgactgatgacgaagcgctggcattgtcgcatctgactcaaagtctgacatggaacacgatgcgtgattttgtcatgactaacagcgaatgcgatgaaatgcttgatgcggtccggaaattagaaagaacgttgacggaacacggcttcaggcaccagtacggctgtctcgcttaa

SEQ ID NO: 17494 - DNA, 399 bp, Escherichia coli
atggataacgtaacgatgattgacatgcagcccgttccctttggcctggttcttctgaaatatctgcacactccacgtcgcgtggctccgtttttagcgtgggctaagcgtctgggtgatgattatgaagaaaccagccggtgggaagctcgggtgttatcaaacgacggattctatcttgtccccaactcccgtctgacttatggcgtaagcgtggctgggaatggctatgaaggcaccatgacggcagaggcttttggcatcacgctgtctttgtttgccctcggacagattgcgaatacgactgaagatgacagcgatatcctgctctatcacgcgttacgtgattacgcattggatcactctgaatcggtcgagattatggccgcgatagactga

SEQ ID NO: 17495 - DNA, 213 bp, Escherichia coli
atggaaatcacggctgatcagtttgtgacttgccgtagcaggagagtgctgacggatgacggacagcaggggatggacggtaaactaggtattgggtcttctacagagaagactcaagggttggtagcagcggtgatttatgctaactgcgcagaccttaacaaccaacagcttgatgagattatcgagtgggttcgtctctataagtactga

SEQ ID NO: 17496 - DNA, 936 bp, Escherichia coli
atgacgaagaaaactaccaaccgcaaatcagccccacggcaggatttgttccagaccgttaccgataagattattacggcgctggagaacgggattacaccctggcgtaaagcatggcaaaccggaaaagagggtttacctgctaatgccataactggccggaactacagcggtattaacgtgatgctgttatggatcgatgctgccgataagggatttcattccaatcgctggctgaccttcaaacaagcgctggatgccggtggtaatgtccggaaaggtgaaaaatcgacgcttgtaacgctgtttaaaccgttccagaaggaggcaacggataacagcggccagccggtgtttgatgataacggcgaggtggtcatgcgggatcgctgttttatgaccagcttccacctcttcaacgttgagcagtgtgaaaacctgcccgacaacctttacccggaaataccggttttacccgacgtggaacgtattgctcgggcagaacagatcgcaacttgtagcggcgtacctgtgatacatcgttatcaggaccgtgcatattaccgcccgggagttgaccacattatgatgccggaagccgctcagtttgattcggcggaagactactacagtacgctgttgcatgaactggtgcattccaccggccatgcttcgcgactggcgcgtgaaggcattgtttccacttcgaagaagttcggcgatcctgtttatgggtttgaagagctgatagcggagatgggagcggcctttttgtgtgcggaacttggcatttatggcgacttgcaacatgagagctatatcgcgtcgtggctgcaaacgctgaaggaagacaatcgtgctgtatttcgtgcagctcgctttgcccgggaagcgtttgaatacctggtgttgcgtgagcaagcgctggcagcataa

SEQ ID NO: 17497 - DNA, 861 bp, Escherichia coli
atgacacgcaactccgttgtgaactctttcctcaaaaaccatgattcactgtttgccggttccactgccgccagcaaggcattcgaggcaatgacacgcaactccgttgtgaactctttcctcaaaaaccatgattcactgtttgccagctccactgccgccagcaaggcattcgaggcaatgacgcggaactctggtgtggccactcttttcgcaaagcaaagagaatcatttacccgggattattttactacgagtattactcaacacttagataaattaaatccaaccgagattcaaaaattacaggaagctgctattctattttcgcgctcacctcaaggcgcagccgttattgcaaccaatatcaatacagtagaaataacagagcccgacgcattaacaaaattaaaaaaatacatcgaagaaagccctgtcacttcacattttaggaaattacctttattagtacagcttatcataatttatcttgtaatgactatgtcctctgttatttccgataaaaacaaagagttagcaatttatttaattgaagaatcacaacaatattttagcaaagtagaatcaccaaacgcccatgttaagaaattgacaaaacagttacccaatgaaattgatgtaagtacattaaaacatatcagaataattactggcgaaaacgtccgattacggaatagaccatcaatgcatggtgatgtattggtcacgttgcaaaaatacacacctgttatcgttatcgataaaagtgatagaaaatggctatatatacaactatcacttggagatcaaaagatctatggctgggtcaatcgttcctataccaaagcattaaatcactaa

SEQ ID NO: 17498 - DNA, 225 bp, Escherichia coli
atgaaagagaatattcctgctgttacgcgtacacgtattgatgttggctgctgtgacagcagtgcagtttttgtgcttgataatggtcacgatcatttcgctgtttcccttgaaacggtactctcatgtctgaaggtggcagaggaacacggccatgtacctgaaattggcgcggattggtggtgtcttatcgctaaccatactgcgctgggatacccgtcatga

SEQ ID NO: 17499 - DNA, 870 bp, Escherichia coli
atggatgtattcaaaatttccgttgatacacagcaggttcacaagatcactcaggagaactttgatctcgcaactaaaaagcaggcaccctggtatcagccaatcaatggtcaccggggatggtttgcggtttgtccggcttgtgacaacccgatccagattattggaatgcttgaacgtgatgcgccgtatgggaagcacttcttcccgactgccggtgcagtggctgtaccgttgaaagggcgtgttgataaggaggaatatgagtggtgcccatatgccagcaagaataagagtctaacgaaagatgctcggcgagcagagggtagtgaacttgcgctattgataaaaaaaaccttaattgagcaatttgaccgggttatttatttgttagaaaagggcatcgggatgagaatttcgggggccttggcgaaacagatgctggaagattaccggctggctgaaggatggcgttatagaggggcgacaagacagaatatcccttgggtgttcgcttatatgatgcaggctaagtgggtgaaagggcgcatattctacgacaaaaatattctggaagaactttgtaccaaacgaaccgatttaatttttaacgacaaagggaaacttactactaaagatgaaaaaaaattttgcgacttaagttttagtttcatcaaacaccgtcgccatgtagagcagcatactttgtctgaaagtatcgagttcaatatcgcaaactcaaaacaggaaacggtatacaaaaagactattgctttcgaatatggcgatttcctgaggctgataaacagtaaaaatgaggcttacagaaaaatggaccttgttgatcttgccagaagcgtcttggcctga

SEQ ID NO: 17500 - DNA, 1392 bp, Escherichia coli
atgttgaatctgaaatctcttcttcgtccggggcgttcacgcccggatgcccctccgatagttgaggcgataaaaccttctttgcctccaggctacttccggcctatgcccgccagagaactgctggcgacaacccgccgccagcaatggctgcaatcgctctgggattattcgtccctgccaaaagacatgtaccaccagtattaccttgctccgctggatcattgcgtaacactgatgcaggaattcccgttaacagatagtggcccgtatgcccgtcctggtgggatgattgactatatgctggaaacggtgtcgtatgcggcgcggttgtcgaaaagctacatgttgccggttggcgcaccgccagaagaacaggcggcgcaaagcgcagcctggaatgcggtggtggtctatgcggcaatgttgccttcgcttgagtatctttgccacctccacgttgagctggagaacggtaaacgctggtttccgtcactggatgcgcctccggaaccttatcgctttcgctttgaaccggagccgtctccggaacggctgcaaagttttggcgcaatgctggcatggaagattatccctccagaagcgattaactggttgagtagctggccggaagccatcaaaaccctgtcaacgtacctgaccggctttcgggcgcagtcgggcgtggtcaatgccattgtgtctgaggctattcgcctcactgctggcgcaccggaaggcgagcaaccggctgtttcggcgatgattattccagttcaggatgaatcattgcagggtgacacgttgctgtccggattagctgatggtgtgccggagctggttgtgtcgtattccgaagaggaaatccttccggtagcggaacctgctcctgtgtcggatgcagagccgatattctcggatgagcaggaagggccggatgatactgatgcgttgctggcaatgatgggtttcgctagcgctgatgaagcagaaatcggagaaatcacgctatccgccgagttgaacgatcccggagaggcattctggcaatggctggtcacaggatgccgctcaggaagtctgattccgaacaaacctgacgggcggattcatctggtcgctggttacgtgtttctgcgtgcgccagggatttttcaccagtatatgacagagacgaatgcgccgggagaggataaggcccggcttcagaaagcatttgagcggctgggtcatcaccggcaggacaatggcacgatgtatacctgtcagctgtatcagaatgaacagcgggaagggcgcttccaaaaactgagcggctatctggtacttgccagtaaagtgtacggcagtgataacaatccaacggataacccgttattgattgttatataa

SEQ ID NO: 17501 - DNA, 963 bp, Escherichia coli
atgaatgtttgtacatttgggacgttaactgaacactacttttacagcaaatcattacgaccagcgactgagtggagttaccagaaagtggttcgctcgtttgaaggctttacaccgcataaccctgcaaatatcgatcatcttacggtgctgaaatggcggcatcgggtactgaatgaccaaaactgtgccacccggacgtggaataacaaagttgcccatatgagggcgctgttcaattttggtattaagcagggattattaccacaggctgagaatccatttaacggcgcggtggttcgtcccggaacgaaaaagaagaagacgctgacgcagacgcaaatggatgcgatgtaccgtctgatggagcggcatctggaaactgagggaaggaaagggaacagcagcatgttcaatggtcgcagaaatgcactacgcccggtgtggttctggctgacggtaatgaatgtttttcgctatacggctatccggcaaaaccagctcctgcatatccggctcggcgatatcaatcttgaggaacggtggattgatttgaatattgaaggggctaaaaaccgtcgggagcatcgcgttccgattgtttcggcgctgtatccgtcgctggagttactggttctcagagcaggcgaagttggcatggaactggatgaccagctatttaacgtgggatggttcgacctggtcagaaagaaaaaataccctgaggtgatgaacgaatatccgttacgggcgttctttaagcgtttgtcccgggaatgcaaattcacgatatccccgcatcggttccgtcatacggtggcaacgcacatgatgaaatcaccggagcgtaatttatatgtggtcaagaaactcctgggccacgtcagtattacatcgacgctggaatacattgatgagaatgttgatagcttgcggaatatactggaaacggagttgatgtag

SEQ ID NO: 17502 - DNA, 165 bp, Escherichia coli
atgagccatcaggagcgcaacagcgttcgggcggcgtatatccaccgggctgaacatctcgacgcccgtacagccatgatgcagtggtggtcggattatctggacgtgagccgcgaggggtacgttgcgccgtatatttatgcgcggcggcataaggcggcctga

SEQ ID NO: 17503 - DNA, 270 bp, Escherichia coli
atgaatgagttacagcatcagggagctgagctacgcagcaaagccaaagaattggctttatccgtactcagaactcacccagatggtcaaaaaaacggtaaaggggttaaacaagctgaagtatttcgccttagtggcctagattggggagaaaaacgaaaagcaacaagttcgaaccaacaatattgggttgttgcgttattgcgtgaactagaagacgaaggtttagtcgagcaggttgaagaaaaaggcccatggcgtctaaggtaa

SEQ ID NO: 17504 - DNA, 1332 bp, Escherichia coli
atgcctattgaatatacgtttgattatcgtgatgagttccttcgtaagcctattgctgaaaaattaatagctctactgaactctgatattaacttatctccgctggttatagatggcggatggggcacgggaaaaacagagttttgcaaaaaagttgcaaatctaattgaaaacaataatcaaaaacataaagtagtttacattgatgctttcgctgaagatcataatgatgcccccattttgacgttaatggcaggtgttgctgcacttttgcccgaagacaaacgaaaagagttgataagcaaaacactaccagcaatacgttttggtttgaaaaccattttcaaagctggcactggatgggtgttaaaacaaaatgcagatgacattgttgatggcttcgaagatgctatcaaagaagccacttcgagtgcaatcgacagtacaattgaaacattattagacgatcatatagaagcacagaaaaacatcgagacattgagaaatacaatttcgcaacttacagagaaatttaaaataacgattattatagacgaactggacagatgtaaacctacattcgctctttcaatcatagaaaatattaaacacatttttgaaataaaaaacttgaattttgttttggttgcaaagactcaacaactcaaagcatcaataagccatctgtatggtttatccataaatgcagaacagtatttagacaaattcataaaatttacatttgtattgcccgatacatttaaaccagacaactatacacctgcatacgcatctgtcgctttatgggaaatattaaaaaatgattctcaaagactgcaagaagtaaacgaagaatgcgggcatattataaaaacgataatacaaagagctaagttgtctttacgtgaagtagaaacattatcgcgccattttgaaatatatcaggtgctatctcaatctggaattggtccagaaaaaatatttggttattcattataccgaacgttaggagtgatgctatattctctaaatcgccctttggcattaagctatctagataattctgtggatgcagaaagtactatcaaaacattaggctttgaatatttaagttatgatgaggatatttatagtgtagataatactgaatatgctatttatgggatcgtactagactatattgatgcaacatctccattctttataaaggatgatgaaaccagaaaaaaatggactgaacatgctacctatagtttctttcaaaagggcttaaatactgttcctccccgaaaacttgtttcgtccgccattgaagttttaatgctcaactaa

SEQ ID NO: 17505 - DNA, 576 bp, Escherichia coli
atggatttcagcagcggtggtaagaaagtcattgaacgtctagttgaggcgtacgggttctctacgagacaagctctttgcgatcatttgggagtatccaagagcaccatggctacacgttacatgcgagacatcttccctgcagattgggttttgcaatgtgctattgaaactggttatccactagaatggttggcattcggtataggggacaaaaaaccctcaaatataaatgcacaaattttggtaccaaagaaaaaattaatttcaggaacgttaattgaagatggagcatatatttttgataaaacattcttacctgaaaaaatatgtaatccgttcatcattcaagatctggataacgaatacatatgtagctttgaatataatgacataagcgatggattgtggctaataggcatagacgaaaaaatttcggtccgaaccctgacccgcttacctaataacaggttatatgttgaaggaggaaatcgtggctttgagtgttccagagatgaaatacaggttattggaattgtgtggtgctgcatactaagaagagcagaaaaattttag

SEQ ID NO: 17506 - DNA, 2121 bp, Escherichia coli
atgagtacatatcataatgatcagccaatactaggtggtcaaaatgaccccgatttattaaacaggctcgattttgcaaatcacttggcaaatattctactattaaatcacaatgatgattgccttactgtatctatagaggcagagtggggatatggtaaaacgtcagtgataaatcttataaaaggtgctttgaatgaaaaggagttcttaccaataataatagaatataatccatggctggccggtcaacctgaatccttgattcaggattttttattacagttctcttcacaactaaatattaaagacaattcaaaagctgctttggaagcttcaaaagaattaattgcatactccaatctcttcagtgtagcaaaacttattccagggacagaaccttgggcatctatcatagaaaaagtcctctctaattttgggagtgctactaaaaagattgctgaattaaaaaaactggatcttttaggtagaaaaaaacaagtagagaaggcaataaaaaaaataaaaaatcctattgtggtaataattgatgatattgatcgattgactcctacagaaacttttcaagttttacgattggttaaagcagttgcagatttctcaggaacttcttttttacttgcatttgatcctaattatttgatttctgtgcttgataaaaataatatcgtcaattcttcggagtatcttaataaaattgttcaacttcgagtcccacttcctgtaatctcagaaaggggtatgaatgaacttgcaaatgcagaactggaaaagatagctaataaatctttaactgacagattcgaaagtgatcaagaaagactaagctggatttatcataattattttaaaaaactaattaagaatccgagagagttaaaaagattttttaaccatttgagattcgttttagagcaaattgaagggcaggtatgtttttctgatctctttgctttatctctggtcgccactaaatcgagtttggtatacgagcatattaaaagcacaccagaggcatatatagggaagagattcactaatgatggccttttgatggataaacctcaagatattgtggatagatttagtgatgagcgaaataagaaactgagtaatttttctgatcaagagcgttcagtgatgcaggaactcttaggagatattttcccacttctacagtcaagcgggtattctcattatggggtttctgatcccgatacagcaggaagggtttctgcaccacaaaggcttcatattgcgtttcattataaaactccagcagggtatatttctgatcatgatattatcagtttcattaatggagatgttaaaagaaacgaatttctaagagatgtgctctcgcaaaatgcagaagaaagattttttgaaatgatgaataattattcgagttattgtaaggataatagttttgaaatattaacgtgtatttatgatacttttctgttttctcaagaattgaaatcctcattggaaagaaactatggttttttgacaaaagatctttatagaaggatgaattggctcactaataaggtaatatctgaaagtgatgataaatatgggttaataaagggggttgtaggtaggcatgagaatgcgccacttggtgcagacgtattatgccaagctcgtaaacagattcaaaatggatggaatgacaaaatatgggttagtattgaagaattggctgaacttgaaggtatctttcaacaggtggctattaaagttttaagtgataaaatatattttgattatcatcttgaatctcatatatttttcgaattaaagagagtttcatctcaatttacatcagagtttattgcttctgtattatcaagtgatggcctgattaggatgtgtgagattattggtgaaacaggtagtgattcaacaaatggcccttattttaagtttgatgaaatttacttcggggaaatacttgatgtgaatgaacttcgaaataaagcgaaaaatttagatttttcaatttatcccacacgcattcaagctgtacttaagagtattctggatggacaaaaatattatttgagagatgcaactgttcgtgaagattggtaa

SEQ ID NO: 17507 - DNA, 903 bp, Escherichia coli
atgatagccgggttgtttatccgtaacgtcaaaacatatcaaggcataaattatattcctttgacagacgctccaaattttagcggtttcttaggaaataatgggatagggaaaagctcaatacttgaggcattggatgtaatatttaatgctaaagagtggaattataatacagctgtcaaaaagagcggcatagaaaaaaccagcccacatattgtaccggtttttatattggaggaggatttttttgattctgagacactcccttttgcaaaaacgctagatgctttagctagggaggttagcttagaggatgctacaaactcacaaacaaaaactattcttgaaaattttataagtcatcgtgatagactttttgcacgaaatgatatgcaagggcagttaattattcctattggacgccttcataataataatatgtcattatctgttttagcaggtagaagtctatctactataatggaaaaagatatatttggtgccggattcaagttaagtgaaggtatagagttagctaaacattttcaagttttatttgattatatcactggtaagttagaatatttatatataccaaaagagattgatactgaggtttttactaagcttgagagtattggaactcaagtattgatgggtgaatcgctgcatgaaattcttgatagaatagttggtgagtcaaaaattggagaaatcaacagagaactaagcggatttcttgaagatatctcaacgaagctagttaactatacgtatagaacgccttcggataggcaaaaaagaattcaaaaaaaagaagtctataacttaattatacaagcgttttttaacgtcagaaaattacataaaacccacaatggcgagcatttttttagaaattag

SEQ ID NO: 17508 - DNA, 1065 bp, Escherichia coli
atggcgagcatttttttagaaattagtaatttgagttcgggggaaaagcagaaggctattattgatgttgcgcatgcattgctgacaaagcatagaagtaatagtgataatttaatcatagccatagatgagcctgagtcttcattgcacatgtctgcttgttttgaacaatttcaagcgttatcagaactaagtttaggatgtaggcaactattgttttcctctcattggtatggttttctccccaccttggaaaagggaactgttacaataataactaaaaaaaataatgagcatctttttgatctgatcaatttagcatcttaccgggaagaaataaaacaacttgttcgagatagtaggggaaagttaccatttgatattagaattaaaagtatgaatgattttactcagtcattattatctagtgcaacaggtgagaaaccatataattggttgatttgtgagggttcatcggaaagaatttatctttcagcatattttaaggatttgataaagaatcataatcttcgtattgtacctgttgggggggcgtcggaaattaaaaaaatatataactatctctctgcctgctataaggatgtagaaggggagattaccggaaatatatatttgttagctgatactgatagccagttggtcagatatgacgtcggaacatatcaaagattacattgtaaaagatttgtttatgattcgtctaaaaacagggcgatcttagttaagatagactcaaatccggtatcgcctgcaactgagatagaggatgttttgaacgcaaaaatctattaccagaccttattgtcatttgctggtgattacgattatttaagtttcattaataatattgatgctccaagtgataatctggaatcttactcggctcttgatctcagagttagtgaaaaaaatgccataaatagattttttgatgatggaaataataagtttttattcgcaaaaagatatgttgaattaatgacggaagaaaatagtgttccagagtggattagtgagattagagaggtaatgacttcagcttag

SEQ ID NO: 17509 - DNA, 660 bp, Escherichia coli
atgatggttcttgacgaacaaaaatataacgaaatattgaaagcaatggaaaaacgagctagccgctctaaaattactacgctcttatttttatatattttattaactgctgtactctgcattcctgcaacttatattttttataaagcagaaagtaataagcgtgacaatgcacttgcctcacttagattgagctctcagcaaatagaatctgctttcgaaaagttcaccatcatgcaacagttaactgataaacttgcacaagcatcagaaaacctcaacgcttcaaaaaattcaaacccgataatcaaaaaaaatgaatcaggtattaattcaacatacctaaatactaaaagcacctttgaaaaagccattaaaaccgcggcaccttatttactaatcttatctggaatattattcactggatatatacttcggttatttattgtgttcattaaatacaacatgcaaatgagcaacgactatgacaaccagagaattgcattcttactatcgcaaggtgatactgatgagttcggcaaaatcattcaaacattacgtgaacacaatgtaagtttcgaaaaaacccccaatctacttcaagaaaaaatcatcatagaattaatgagtcttttacgctcatccaaaaataagagctaa

SEQ ID NO: 17510 - DNA, 561 bp, Escherichia coli
ttgcccgttacctacattccgttttgccgcttctcccaaaccaaggtatgcgagaagaccagctacatcctttccactcaaattagtcagcgtattgtccagcggttgtttacctgccagcgcattaagcattgtcgtggcaaagttcgggtcattccccagcgccgctgccagttcgttcaatgtatccagtgccgcaggtgcagaccccaccattgctgcaatcgccgatttcacaaaagctgtagtggcaatctgtgtattgttgaccgactgtgccgcagtaggtgctgttggcgttccggtgagtgcaggactcgacagcggcgctttttgtgccagcgcattgttaatggtggtactgaatttcggatcattgttaatggctgcggctatttctttcagtgtgtccagtgtggctggcgcaccattaataagggctgtcagtgccgcctgaacaaacgcggtggtcgcaagctgcgtagtattattccccgccgctggcgttggcgcttttggtgtcccggtaaacgccggactttctttgggtgcatactgtga

SEQ ID NO: 17511 - DNA, 672 bp, Escherichia coli; identical to SEQ ID NO: 4505

SEQ ID NO: 17512 - DNA, 426 bp, Escherichia coli
atgggtggccagaaagatattgcagataagatacaaaaacagggcggtgattatttattcgctgtaaaaggaaaccaggagcggctaaataaagcctttgaggaaaaatttccgctgaaagaattaaataacccagagcatgacagttacgcaatgagtgaaaagagtcacggtacccggcatgacggttattatgagaccgccatcaccgccgggtcatccaccgtttttatcgatggtctccccgcagcccgtcagggagatccgctgacgccgcatgataaaccgaagcatccacctcatccccgaaaaatcgccagaggctcttcaaccgtctttattgacggcctgcccgccgccagaaccggtgatgctattgactgcggcggcgtggttattggtggcggtacggtaaatataggctga

SEQ ID NO: 17513 - DNA, 666 bp, Escherichia coli
atgcgtaaaaaatacatttctgttagagttttttttatgtgtcttttaatactaacagtagctggttgctatggaaaaggaaatgaaaacttaatattgccttttgattcaactcaatcttttcaattggaatgttattatcaatatattaataatatgcatgatattacagagataaagttatcggaagtgcataataaacaaactaaggcatttagtcagcaagaaaccaagattcctgtgaaaggtgagaattttctctctccatatgtggatattaatgatcgctattatgaattaggccattttgaatatgaggataatacatataaattgatagtttataacaagataggggagtctgatacactattgcttaatgtacagataaatagctataatgcaacggagaatttagtggatgctttattacttggcagcttttttggttatgaagatatagtccgcttttctgattttatcattcacccagactattcaataagtattgataattatgtcgtatatgcatacgaagaaagcaaggatggtctttcaactagaatagctaaagatccaatccctcatatttatttaaaagagcaatataaaatagaaaatggtcagttcaagttgacatccagaatggaaatattaaaaaattaa

SEQ ID NO: 17514 - DNA, 900 bp, Escherichia coli
atgataaacgatatcgttcaaataacgacaggttccacatctacggatgaaaacaatacaatacaacaacaaatcacaagagtaaaatcttcagttgaataccatatatatcatgatggtagtataaaatacaaattaattgatgaaacaggcaatggaacagagaaaactgtgctggctctaaaaagagcacgaagcaaagctaaatatatttttcatgattcgttaagtaatgagcatgagatcggtacatataatattataatgacagaagatacatataataatgatctttataaagataagttaggtactgatatgatttatctaataagcataaatgataatgtaagtagctactcaagtggtgatgtaaagtttacattagaaataaatacaacacgttattatgcaaatgatgttacaactgcttctttgttgggggcaatgttaaatactggttattcggattttaattttaatggtggtagtaacgatgaaggtctgtcaactggtggcagcacaagtcataaaaatgggatgaacttagatatgcgttatttaagaaaagatgaatcaggtaatggaattcatctcaacttaaatagtgaaacgggagatccttgtggctggaaagggttggatgttgaaaggcaaaataattttatatgcgagttaaaacgatttggctggggggttattaaaggatggaaatattgggatagtgatagtagtccaaataccggccccatttggggtgaatggtatgtcgcatggcgaaatgaacatccaggagaaacggaaagaccaatattaaaacatattgaacacttgagaaaccatcatcatcatatacatgttcaaggatataatccaacactagagttaataacagactaa

SEQ ID NO: 17515 - DNA, 738 bp, Escherichia coli
gtgaatgtggggagcaaaaaggaaggtggtcatgaccagaaagtgatagtggcgaacgaccggtgcatcacggtacgtaacgaccagatgctgaaggtgacgaacgaccggacggtgagcgtgagtcacgatgacagtctgtatgtcagaaatgaccgctgggtgacggtgaaagggaagctggagcacaggacgacggggaaccatatcagccaggtggaggggaagcacagcctggaggtgaagggcgatctggctgagaaggtgagtggcgcgctggggataaaggtggacggggaaatcgtgctggagagcagcagtcagataagcctgaaggtgggcaggtcgttcgtagtgatacactcgggcggcgtggatatcgtcgggccgaagataaatctgaatggtggggggagtccggggacgccggtgtcaacacttcagccaagcgtgctagaggttctgacagatgatgaaggtgatgataaaggcgaatgtgagaagaaccgtgactctgatgctggttcaggaggcaatgacgaccagctggataatcctaaaaaatattacttacgcttccattttacagatgatagcagtattccgtatgcgaatactaaatatatcgcatactttgcagatggtacaaaaagagaaggtatgatggatgatgatgggtatacagaagtatttataaaagatattgaagaggaaataaaagttcatttgcttatttaa

SEQ ID NO: 17516 - DNA, 1641 bp, Escherichia coli
atgaaagtgacattaacgtttaacgaacaacgtcgtgcggcgtatcgtcagcaagggctatggggcgatgcttcgctggccgattactggcagcagaccgctcgtgcgatgccagacaaaattgccgtggtcgataatcatggtgcatcatacacctatagcgcgctcgatcacgccgcgagctgtctggcaaactggatgttgacgaagggtattgaatcaggcgatcgcatcgcatttcaactgcctggctggtgtgaatttaccgttatctatcttgcctgcctgaaaatcggtgcggtttccgtaccgctgttgccttcctggcgggaagcagaactagtatgggtactcaataagtgtcaggcaaaaatgttctttgcaccgacgttgtttaaacagacgcgtccggtagatttaatcctgccgctgcaaaatcagcttccacaactacaacaaattgtcggcgtggacaaactggctcccgccacctcttccctctcattaagtcagattatcgccgacaatactcctctgaccacggcgataacggtccatggcgatgaattagccgcggtgctgtttacctccggaaccgagggtctgccaaagggcgtgatgctaacgcataacaatattctcgccagtgagcgggcttattgcgcgcggctgaatctgacctggcaggatgtttttatgatgcctgcgccacttggtcacgcaacgggctttctgcatggcgtaacagcaccatttttaattggtgctcgcagcgtgttgttagatattttcactcctgctgcgtgtctcgcgctgcttgagcagcagcgttgcacctgtatgctcggcgcaacgccgtttgtctatgatcttttgaatttactagagaaacagcccgcagacctttcagcgctgcgtttcttactttgtggcggtaccacaatccccaaaaaagtggcgcgtgaatgccagcagcgcggcattaaattattaagtgtttatggttccacagaaagttcgccgcatgcggtggtgaatctcaacgatcctttgccgcgctttatgcacaccgacggttacgctgccgcaggtgtagagattaaagtggtcgatgacgcacgcaagactttaccgccaggttgcgaaggtgaagaagcctcgcgtggccccaatgtgtttatggggtattttgatgaacctgaattaaccgcccgtgcgctggatgaagaaggctggtattacagcggcgatctctgccgcatggatgaggctggctatataaaaataaccgggcgcaagaaagatattattgtccgcggcggcgaaaatattagcagccgtgaagtagaagatattttattgcagcatcctaaaattcacgatgcctgtgtggttgcgatgcccgatgaacgtttaggtgaacgttcatgcgcttatgtcgtgctgaaagcaccgcatcattcattatcgctggaagaggtggtggctttttttagccgtaaacgggtcgcgaaatataaatatcctgaacatatcgtggtaatcgaaaaactaccgcgcacggcctccggtaaaatacaaaaatttttgttacgtaaagatattcttcaacggctggaacaaacatgcgttgaggcataa

SEQ ID NO: 17517 - DNA, 1698 bp, Escherichia coli
atgagtaagccttcagacccgcgtattgataccagccgtgtaatccatgcgccacacggtacgcagctgcactgcaaaaactggcaaattgaagcagcctaccggatgttgcagaacaaccttgatcccgacgttgccgaaaatccacagcatctggtggtgtatggtggtattggtcgtgcggcacgtaactgggagtgttttgacaagatccttgaatcactgaaaaatctggaagctgatgagtcactgctggttcagtccggtaaacccgtaggcgtgtttaaaacgcataccgatgcgccgcgcgtattgattgccaactctaacctggtaccgcaatgggccaactgggatcatttcaatgaactggatcgtaaaggtctgttcatgtacggccagatgaccgctggctcgtggatctacatcggtagtcagggcattgtgcagggaacgttcgaaacctttgttgaagcgggtcgtcagcactacaacaattcgctgagtggaaaatggatcctgaccgcagggctaggtggtatgggcggtgcacaaccgctggcggcgactctggcaggggcttgttcattaaatatcgagtgccagcaaagtagcatcgacttccgtctgcgtacccgttatgtcgataaacaagcgaaagatctcgatgatgcactggcgctgattaaataccatactgagcgcaaagacgctgtttcaatcgcgctgttgggcaatgcggcggaaattgttcctgaactggtgaaacgtgcacgtcagggggcgatcaagccggatctggtgaccgaccagacttccgctcacgatctggtttatggctacctaccgatgggctggagcgtagaacaatggcgcgctgcacagcaggatccacagcaacacgccagattgcaaaaagaagcggcacagagctgcgtcgcacatgttcaggggatgctggacttccaggcgatggggatcccggttgtcgattatggcaacaacatccgccaggtggccttcaacgaaggtctgcaaaatgcctttgatttcccgggctttgttccggcttatattcgtccaatgttttgtgaaggcaaaggtccattccgttgggtggcgctgtctggcgacccggaagatatctataaaactgatgccaaaattaaagagttgttccccaataacgtactgacgcatcgctggctggatatggcgcgcgagcgcattgccttccagggacttccttcacgtatttgctggctggggcttggtgagcgtcacctggcggggctggcattcaacgaaatggtgcgcaacggtgaactaaaagcaccgattgtgattgggcgcgatcatcttgataccggttctgtcgccagcccgaaccgcgaaaccgaaagcatgcttgatggcagtgatgcggtttctgactggccgttgctcaacggtttgctcaacactgcagggggagcaacgtgggtatccctgcatcatggcggcggcgtcgggatggggtattcacaacacgccgggatggttattgttgccgatggtagcgaagaagccgaaaaacgtctggcgcgtgtgctggtgaatgactgtgcgtccggggttatgcgtcatgcggatgcgggttatgaagcggcaattgaatgtgccaaaaactatggtctgaaattaccgatgattcgctaa

SEQ ID NO: 17518 - DNA, 270 bp, Escherichia coli
gtgccgcatcagttcctgttcgccgaaatactgaccacgctcggtcatattaatcgttcagcaattaacgtgttgttattgcgccatgaacgcagttctctgccgctcggcaagtttttggtcaccgaaggcgttatcagccaggaaacgttggatcgcgtcctgacaattcaacgcgaattacaagtttcgatgcaatcactattactcaaagcaggtttaaacacagaacaggttgcgcaactggagtccgaaaatgaaggagaataa

SEQ ID NO: 17519 - DNA, 2973 bp, Escherichia coli
atgaaggagaataaccttaatcgcgtcatcggatggtctggtttactgctgacgtctttattgagtaccagcgcactcgcagacaatatcggcaccagcgcagaagagctggggctgagcgattatcgccatttcgttatttatccccgtctcgacaaggcgctgaaggcacagaaaaataacgacgaagcaaccgccatccgcgaatttgaatatatacaccaacaggtgccggataatattccactaactttataccttgcggaagcctatcgccattttggtcatgatgaccgggcgcggctgttgcttgaggatcaactgaaacgtcacccaggagatgcccgacttgagcgcagtctggcggctattccagttgaagtgaaaagcgttacgactgttgaagaactgcttgcccagcaaaaagcgtgcgacgctgcgccgaccctgcgttgtcgcagtgaagtcgggcagaatgccctgcggctggcacaattacctgtcgccagagcgcaactaaacgatgcgacgtttgctgcatcgccggaaggaaaaacgttgcgaaccgatctgctgcaacgcgcaatctacctgaaacaatggtcccaggcagatacgctatataatgaagcacgccagcagaacacattaagcgcggcagaacgccgtcagtggtttgacgtgcttcttgccgcgcagctggatgatcggatcctggcgctgcaatcacaggggatcttcaccgatcctcagtcatatattacttacgcgaccgcgctggcttatcgtggcgaaaaagcacgcctccagcattatctcattgaaaataagccgctgtttaccacggacgcacaagagaaaagttggctctatctgttatctaaatacagcgccaaccccgttcaggcgttggcgaattacacggtgcagtttgccgataaccgccagtatgttgttggcgtgacgctaccggtgctgttaaaagaaggtcagtacgacgcagcgcaaaaactactcacccccctccccgccaatgaaatgcttgaggagcgttatgccgttagcgtagcgacccgtaacaaggctgaagctctgcgtctggcacgattgctgtatcagcaagaaccggcaaatcttacccgcctggatcaactgacctggcaactgatgcagaacgagcagtcacgcgaagctgccgatttattgctgcaacgctatcctttccagggcgatgcgcgtgtcagccagacgttaatggcgcgactggcgtctctgctggaaagtcatccttacctggcaacgccggcgaaggtggcgattttatcgaaacctttaccgctggcggagcaacgtcagtggcaaagtcagttgccgggtattgcagataattgcccggcaatagttcgcttgctgggcgatatgtcgccttcctacgatgccgccgcctggaaccgtctggcaaagtgttatcgggacacgctacccggtgtggcgttgtatgcatggcttcaggccgaacaacgacaaccgaacgcctggcaacatcgtgcggtagcctatcaggcgtatcaggttgaggactacgccaccgcactggcggcctggcagaaaatcagtcttcacgacatgagcaatgaggatctgcttgctgctgccaataccgcccaggcggcaggaaatggtgcggctcgcgatcgctggcttcagcaggcagaacaacgtgggctgggaaacaatgccctctactggtggctgcatgcgcaacgttacattcatggtcagccggaactcgcactgaacgatctcacgcgctcaatcaatattgcgccttctgccaacgcttacgttgcgcgggcgacaatttatcgccaacgtcataatgtcccggcggcggtgagtgatttgcgcgccgctctggaactggaaccgaataatagcaacacccaggcagcgcttggttacgccttgtgggatagcggtgatatcgcacagtcgcgggaaatgctcgaacaggcgcataaagggctaccggacgatccggcacttatccgacaactggcctacgtgaaccaacgtctggatgacatgcctgcgacgcagcactacgcccgactggtgattgatgacattgataatcaggcgctgataaccccactgaccccagagcaaaatcagcaacgcttcaatttccgccgtctgcatgaggaggtcggtcgccgctggacgttcagtttcgattcttctatcggcttgcgttccggcgcaatgagtaccgctaacaataatgtcggtggcgcagcgccagggaaaagctatcgtagctacgggcaactggaagccgagtaccgtatcggacgcaatatgctgctggaaggcgacctgctctcagtttatagccgcgtctttgccgataccggtgaaaacggggtgatgatgccggtgaaaaatccgatgtccggcactggtctgcgctggaagccgctgcgcgatcagatctttttcctcgccgtcgaacagcagttgccgctgaacggacaaaatggcgcatccgataccatgctgcgcgccagcgcctcattctttaatggcggcaaatacagcgacgaatggcacccgaacggttcaggctggtttgcccaaaacctgtacctcgatgcggcgcaatatatccgccaggatattcaggcgtggacggcagattatcgcgtcagctggcatcagaaggtagctaacggacagactattgagccttacgctcacgttcaggacaacggctatcgtgataaaggcactcagggcgcgcagcttggcggtgtcggggtccgctggaatatctggaccggcgagacgcactacgacgcctggccgcacaaagtcagtctcggcgtcgagtatcaacatacctttaaggcgattaatcaacgtaacggagagcgcaacaatacgtttctcaccattggagtgcactggtaa

SEQ ID NO: 17520 - DNA, 210 bp, Escherichia coli
atggaaataaagacacggagagaaaccaggcagacgttagcgcagtggtttgaagagaagggattccagaaggcgtatcaagaagcgtatcaagaagtaagacaggaattcgcccaacgttttctgaataaagggatgtctcgggaagacgttgcagaggtgacagctttatctcttgcagagattgataagctaattaactctaactaa

SEQ ID NO: 17521 - DNA, 1323 bp, Escherichia coli
ttgtttctcgcacaagaaattattcgtaaaaaacgtgatggtcatgcgctgagtgatgaagaaattcgtttctttatcaacggcattcgcgacaacactatctccgaagggcagattgccgccctcgcgatgaccattttcttccacgatatgacaatgcctgagcgtgtctcgctgaccatggcgatgcgagattcaggaaccgttctcgactggaaaagcctgcatctgaatggcccgattgttgataaacactcgaccggcggtgtcggcgatgtgacttcgctgatgttggggccgatggtcgctgcctgtggcggctatattccgatgatctccggtcgcggcctcggtcatactggcggtacgctcgacaaactggaatccatccctggcttcgacattttcccggatgacaaccgtttccgcgaaattattaaagacgtcggcgtggcgattatcggtcagaccagctcactggctccggcggataaacgtttctacgcgacccgtgatattaccgcaaccgtggactccatcccgctgatcactgcctcgatcctggcgaagaaactggcggaaggtctggatgcgctggtgatggacgtgaaagtgggtagcggcgcgtttatgccgacctacgaactttctgaagcccttgccgaagcgattgttggcgtagctaacggcgctggcgtgcgtaccaccgcgctgctcaccgatatgaatcaggtactggcctccagtgcaggtaacgcggttgaagttcgtgaagcggtgcagttcctgacgggtgagtatcgtaacccgcgtctgtttgatgtcacaatggcgctgtgcgtagagatgcttatctccggcaaactggcgaaagatgacgccgaagcgcgcgcgaaattgcaggcggtgctggacaacggtaaagcggcagaagtctttggtcgtatggtagcggcacaaaaaggcccgactgacttcgttgagaactacgcgaagtatctaccgacagcgatgctgacgaaagcagtctatgctgataccgaaggttttgtcagtgaaatggatacccgtgcgctggggatggcagtggttgcaatgggcggcggacgccgtcaggcatctgacaccatcgattacagcgtcggctttactgatatggcgcgtctgggcgaccaggtagacggtcagcgtccgctggcagttatccacgcgaaagacgaaaacagctggcaggaagcggcgaaagcggtgaaagcggcaattaaacttgccgataaagcaccggaaagcacaccaactgtctatcgccgtatcagcgaataa

SEQ ID NO: 17522 - DNA, 795 bp, Escherichia coli
atgggattttttaatacattgtttaataagaaagaatcattaacgctgtcgaataaatgggaattctttattaccacggtggaagataatgtaacgggcatacgtgtagatattggcgcaattgaggacgaaaaatttgatcgtcttatccacacatggtttttacgtgtccgttatactcactgttatgaaaacggttttccgcaacctgatgaaacacagcgtttaaatcgtattgaggactggcttgaggcgcagggtaaaacactaccgatctggctagtgggtgtggtcacgcaacaaggttcacgcgattttgttttccagtcagaaaaagacctggactgggaaaagacattggataaattgttggcaggtggcccggagctcgcttgcagctttaatgagagtaaaaacgaccacggaaattactaccgccagtttttgtatccaaccaaatacgactggaactggatacacgattcccgagtatgccgcgggttactggagcatggtgacgatttgactctcccacgcaccatcgattattacgcgacattgccgacagaaactgcggcccacgcctttgtggaggacgtgacgaaattgccatatggcatcacgctggtgagcattcggatgaacgaccaacaaccggagtatatggcgtcattgattaacactgatgctccggaacaatggcatatgaccgatatcacatgtcagcttaccgatttggcggaaaagcatggaggtagttttgatggctggggcgcaccgatagcaacggcataa

SEQ ID NO: 17523 - DNA, 1662 bp, Escherichia coli
ttgaccgcctggaataagtacgcagaagacgtaaaaacgggcaaaattccggcctgtaaacggttaaaacaggctgttaaacggtacttttcggaccttaaaagccccctttacacgttcgatcgtgaggttgtggagcggtttattgccttttccagggtgtgcccgcacgtaaaaggaccgatgcgtggcagacccattgagctggagccgtggcagcagttcgcctttgcgtgcatcctcggctttaaggttaaggccaccggacggcgcaaatacacgagcgcctttatcgaagtgccgcgcaaaaatgcgaaatccacgaccgccgcgattctggctaactggtttctgattatggagaacggtcagcaggatatctacaccgcagcggtgagccgtgaccaggcgcggatcgtctttgatgatgcgcgtcagatgtgccttttatcccgaccgttacgcaggcgggtgaatattcaggcgcataaggtgatacacccgaaaaccaacagcctgttaaagccactggcagcaaaagcggcaaccattgaggggacaaacccgagtcttgccattgtggatgaatatcacctgcacccagacaacggggtttattccgcacttgatatggggatgggcgcacgtcccgaagggctgttatttgccattaccacatcgggcagtaacgtcgtttcagcctgtaagcagcactatgattattgctgccagatcctggacggcgaagaggtcaacgattcaatttttgtactgatttacgaactggacgacgaaaacgaggttgatgatccggcgatgtggataaaggctaaccctaacatcgatgtttccgtggatcgtgaaaaactggcctcaaccatccagaaagcgcggggtattccgtcgcagtgggtggagatgatgacaaagcgatttaatatctggtgtcaggggactaccccgtggatgggtaatggtgcatgggctgagtgtaccggaacgttcacggaggaagatttacacggtcaggagtgttacgcggggctggacttatcatcaaccagcgatatttccagcgtatgctatgcctttccggtcggtaaaaatatcatgctggtttcccgtcattatctgccggagttccagctacagaacccagccaataaaaatcgcgctgtctatcgccagtgggctaaagcgggctggatacgcacaacgcctggcgactgcattgattacgaccggatcagagatgacatcatgcaggacgccgagaaatttaatatcaggcgggtgggcttcgatacgtggaacgccacgcacctgagaacgcaattacagggggcaggctttgaggtggagccgttcccgcaaacctacctcagattcagtccggcggcgaaatcgttcgaagtttttgttaaccgcagggtgattgtgcatcgtggcgatccggtgttgtcctggtcgatgagtaacgtcgtgatgcagagtgacgcgaacgccaatatcaagccgaacaagaaaaaatcaccgaacaagatagacccgagcgtagcggcactgatggcgtttggtacatttcaggcagagcatgaggattttgcttttgatataagcgacagccaccgccagaaactggaagaatttagcggggtgtaa

SEQ ID NO: 17524 - DNA, 465 bp, Escherichia coli
atgcgtaaaaaccgcttgcaaaaaattatcacggggctgtatgcttcccccgtcgcccacatggcgactgggtttagcagcctgaatacatctggcggacagccgcccacatccgataagcggtttttttgtgtccgtaaacctacccatacccgcattatggcggggcgtaacgggggagcctttgtgctcgctggtttccagatgaccagtctgctaaccctgttacgtctcgccaccatgtttagcagcgtagtagcgagactccttaaaattcatctgggagcctttcacatggctgtattcgcacgcccttattttgtctggcgctttatgcagtgcctgacagacagtattgcaatattcaccgttaccgctgccactgagcgcgaagcacgtgcacagctgccgcacgcacatcttatttttgtcgcccgtattcgccagggggggagtcatgcataa

SEQ ID NO: 17525 - DNA, 180 bp, Escherichia coli
atggaaagagaccatatcaataacaaatcacaaaaattacaggctcgcgccccgcatgaagttgttgaggcaatggagcaagtcaaagaaacaggcgagagcactgcgcaatttatcgttacagccatgcgcggcgagatcaaacgccgccagcgtcgcaaagccaaagaatcagaataa

SEQ ID NO: 17526 - DNA, 366 bp, Escherichia coli
gtgcgactggaagcgccggggcgtgattatcgacgctatcagatggaagagtacggtggcgtggacgttcgcctgtatcgtattcctgacccgatggcatttttgcgccagcagaaaaacctgcatcgcattgtggtgcaaccgaaatatctgggcgacgggctaaacaatacgctgacctggctgtggggtaactggtatggcaaatctcgccgtgtaatgcagcgtactttctcttctcagtcacggcagaatgtgactcaggcgttacccgaattacagctcggtaatgccattgttaaaccttcccgttatgtacagaacagccagttttcaccgctgaaaaaatatccactggtggaatag

SEQ ID NO: 17527 - DNA, 624 bp, Escherichia coli
atgaggcacggactgctggcgctgatttgctggctgtgttgtgttgttgcccatagcgaaatgctgaatgtcgaacaatccgggctgtttcgcgcgtggtttgtacgcattgcacaggaacagctccgccaggggccaagtccgcgctggtatcagcaggattgtgcgggcctggtgcgattttcggcgaacgaggcgctgaaaattcacgacagcaaatggctaaaaagtaacggtatagcaagtcaatatttgccgcctgaaatgacgctaacacctgaacagcgtcaactggcgcaaaactggaatcatgggaacggaaaaactggcccctatgtgaccgcgattaatttgattcagtacaacagccaatttattggccaggacataaaccaggcgctgcctggcgatatgatttttttcgatcagggcgatgcccagcacttaatggtctggatggggcgttacgtcatctaccacaccggaagcgccacgaaaactgacaacggaatgcgcgcagtcagtctgcaacaacttatgacatggaaggacacccgatggatacccaacgattccaatcccaatttcattggcatttatcgtttaaattttctggcgcgatag

SEQ ID NO: 17528 - DNA, 690 bp, Escherichia coli
atgattctggttgtggtcatggtgttgttccttttaacccgcttcccaacctgtaaagtggcacagacaagtcactataaacgcccgtcagcaatggatacgctgcgctatctggctagaaatccgcgctttcgtcgcggtattgtggcgcagttcctttatgtgggtatgcaggtcgcagtatggtcatttaccatccgtctggcgctggagttgggcgatatcaacgaacgtgatgcttcaaacttcatggtctatagctttgcctgcttctttattggcaagtttatagccaacatccttatgacgtgttttaatccggaaaaagtattgattctctattccgttataggggcgctgttcctggcatatgttgcactggctccaagtttcagcgcggtctatgtcgccgtcctggtaagtgttttgtttggcccttgctgggcgacgatctatgcaggaacactggatacagttgataacgaacatacagaaatggcaggagcagtcattgttatggctattgtcggtgccgcggtggttccggcaattcagggatatattgcagatatgttccactcactacagctttcattcctggtttctatgctctgctttgtctatgtcggagtctacttctggcgtgaaagcaaagtacgtaccgcactggctgaagtcacagcgtcctga

SEQ ID NO: 17529 - DNA, 1014 bp, Escherichia coli
atgagtacgcgtattaatttgtggcgggcgctttttggcgagaaacctcgtatcttgctggaaaatagtgattttactgtcacgtcttttcgctatgacagcggtgtcgaggggcttaaaattgcaaacagtcgtggacatttgattattcttccctggatggggcagatgatttgggatgcgcaatttgatggacacggcctcaccatgtgcaatatgtttcgccagcctaaaccggcgacagaggtgatagagacctatggctgttttgcttttcattcaggtttgctggctaatggctgcccatctgcggaagatactcatctgctacacggtgaaatggcctgtgccgcgatggatgaagcatggctggaattagacggagatatgttacgccttaacgggcgttacgagtatgtaatgggtttcggtcatcattatctggctcaaccaacagtggtccttcacaaatcctctacactgttcgatattaagatggccgtaaccaatctggcttctgtagatatgccactacaatatatgtgccacatgaattatgcatatataccaaatgctacattcagccagaatatcccggacgaaatattaagattgcgtgaatcagtgccttcgcatgttaatcccaccgctcagtggctggcgtttaatcaacggattatgcagggagatgcctctctgtcgacgctgagtcaaccggaattttatgatccagaaattgtcttctttgcagacaaactggacgcttatacagatcagccagagtttcgcatgatctctcccgatggcactacgtttgttactcgtttctacagtgctgaactaaattatgtgacacgctggatcctttataacggagagcaacaggtagccgcctttgcattacctgcaacctgtcggcctgaggggtatcttgccgcgcaacgtaatggcacgctgattcaggttgcaccgcagcaaacgcgcacttttacagtcaccacaggaattgaataa

SEQ ID NO: 17530 - DNA, 744 bp, Escherichia coli
atgaaaaaatcctcccgaatgtctattgtccattctcatgctgcgggcgttgatattggggccaaatttcacgttgtggccgtaccgcctgatgctgacgccgagccaataaggacttttcaaagtttcaccggcgaccttcatcgtatgtctgactggctcaaaacctgtcatattacaaccgtcgccatggagtccaccggcgtttactggttgcctgcttttgagatccttgaagcagcgggttttaatatgatactcgttaatgtcagtgccgcaaaaaatgttcccggtcgcaagactgatgtcaacgacgcacagtggttgcagagacgacatgcatttggtcttctccgggccagtttcagacctgtacacgacatttcagtcctcaggtcttatctgaggcaacgagaacgcttgactgaataccgggctgcgcatattcagcatatgcagaaagcgctgatgcagatgaatgtgcaattgcatcatgccgtatcggatatcactggcgtcaccggtctctcgatcgtcagagctattgtcagcggtgagcccgatccttcagtattgatccagtaccgtgatgtgagatgtaagaagacgccagaagtacttcagcaggcactgacagggaactggcaacctgagcatctttttgcacttgagcagtcggtggcatttttctatttttaccaggaaaagatccgtgaacgtgacgatcaaatcgaaattcattaa

SEQ ID NO: 17531 - DNA, 774 bp, Escherichia coli
atgcatgaccagccattattgagtatgtccttgccgtcgattccctcttttgtgttgtcgggattattgttgctttgcttgccgttttcttcatttgccagcgccaccacatcacatatctctttcagctacgccgcccgccagcggatgcaaaaccgtgcgcgtttattaaaacagtaccaaactcatctgaaaaagcaggccggctatattgtggaaggcaatgccgaaagcagaaaggcgctgcgccagcacaaccgcgaacagataaaacagcatccagaatggtttcctgcgccgctcaaggcgagtgacagacgctggcaggcgctggcggagaacaaccatttcttaagcagcgaccatctacacaacatcaccgaagtggcgattcaccgcctggagcagcagcttggcaagccttatgtctggggcggcacgcggcccgataaaggcttcgactgtagcgggttggttttttatgcctacaacaagatccttgaggcgaagctcccgcgcacagccaatgagatgtatcactaccatcgggcaacgattgtggcgaacaacgacctgcgccggggagatttgctgtttttccatattcacagccgcgagatagccgatcatatgggggtgtatctgggagacggtcagtttatcgagtcaccacgtaccggcgaaaccattcggataagccggttagctgaacctttctggcaggatcattttttaggcgcgcggcggattttgacggaagagacgattttgtag

SEQ ID NO: 17532 - DNA, 1815 bp, Escherichia coli
atggttgccaatattaatctcattaaacaagaaagttattctattgttaatttagaaaaacaactaatgagtaatgaatcaccgaagcaaacgctattaaatgatttttcacatcgccttaaaatggaaggtgaggagcaactgtgcgattgtgttaacgaacttaaactcgggttgtcgagtaataataaatatgacctgtttaaaaataaagaaacctcactgtggaaacgcaaagtaccagaaagtgcagcgctggcaatgacgggaacagtatataaattatttggtagtcgcttactcaacgtccgcaatcagttagataaaaatctcctcgaaatggctatgcaaatggtttatggcaaagatatggtgacaaagtccggggatatattgattgatatacaattaaacaaggatggcagcctccagagtaagcactacacatttgatgtaggtgaagttataaacagttataatattgacctctttgtgaatgcttcgagtattaatcaaacttacttacatgataaaaatcctggtgacgttattagcctgtatgacactttagataacattcctcttgtagttaaggaatgcacgggtaaaaatcatcaaattaacgttaaagccaaattgcctcaagaacgaagtgaaaaagttgaggatatgtgtgaaagaatgagaggtggcatctctatgtttaatcacactacaaaaacagctggtaatatagagcataatttgcagctaagttttctcgtggattcacgaccgtcgatcacaaataaatactcagtcaaagatgtaggtccagatatacttgcattacccgtcaacgtatatcatgcagattttaaaattaaaatcaataatgcagtagagaaggcttcgtcaattgtgttatgtgctgtgcaaaaaaatctccatgcagcaagaaaggttcttggcgggataataggaaatgtgccaaaaaataataaaccaaaaacaatcatttttgatttacgttttcttagtgcaattaagcagaaagtttttttgggcagtgaaaaaccgttgtttgtaaagcataccgcaatgatgagggaggcatgtgaggaattaccgcagtcagtggaatatgttcctttagcctgtgaagcgcatagccatcgcagcgtcgcccttgccaaaaccgtggctgcgcccatcatggcgacaggtgtgggctcggctttaatgtatgcaacatcatcaggaccgtattatgcacaaagtctttctggttcgccggatatcgagatgataaaaaatcgcatggctcaattgtttacccaattggatgcttctgtgcgcaacaaatatcgcccggcttttgataaatggaatgagctggtagataaattaaatcacgaaagaaatacagttccgtttgcgtgtttgaccaccattttagcgacggcgataaatgaaactcctgagggggatacgaatgttgccgttgtgatggggtgtaaatctgcgaaagatcgcacgatatccattgtccttggcaactcgatgttgcaaacactctttgaaaaacgcctcgctgatgatggagaaatagaaaatctttttgagcaacagggatattttaactgcgattcattaacagccgaagaattaatgatattaaaagacctttttgatattcgagttcttcatgtctctaacaaattcaatgttgggttgcaaggtaatatcaacactgatgttttacaagattcgttttttaaaaatgtcgatttcattcatgaatctatctcgtataccgtagggatgggagtctga

SEQ ID NO: 17533 - DNA, 1845 bp, Escherichia coli
atgattaaaaaagcttcgctgctgacggcgtgttccgtcacggcattttccgcttgggcacaggataccagcccggatactctcgtcgttactgctaaccgttttgaacaaccgcgcagcactgtgcttgcgccaactactgttgtgacgcgtcaggatatcgaccgctggcagtcgacctcggtcaatgatgtgctgcgccgtcttccgggcgtcgatatcacccaaaacggcggttcaggtcagctctcatctatttttattcgcggtacaaatgccagtcatgtgttggtgttaattgatggcgtacgcctgaatctggcaggggtgagtggttctgccgaccttagccagttccctattgcgcttgtccagcgtgttgaatatatccgtgggccgcgctccgctgtttatggttccgatgcaataggcggggtggtgaatatcatcacgacgcgcgatgaacccggaacggaaatttcagcagggtggggaagcaatagttatcagaactatgatgtctccacgcagcaacaactgggggataagacacgggtaacgctgttgggcgattatgcccatactcatggttatgatgttgttgcctatggtaataccggaacgcaagcgcagacagataacgatggttttttaagtaaaacgctttatggcgcgctggagcataactttactgatgcctggagcggctttgtgcgcggctatggctatgataaccgtaccaattatgacgcgtattattctcccggctcaccgttgctcgatacccgtaaactctatagccaaagttgggacgccgggctgcgctataacggcgaactgattaaatcacaactcattaccagctatagccatagcaaagattacaactacgatccccattatggtcgttatgattcgtccgcgacgctggatgagatgaagcaatacaccgtccagtgggcaaacaatgtcatcgttggtcacggtagtattggtgcgggtgtcgactggcagaaacagactacgacgccgggtacaggttatgttgaggatggatatgatcaacgtaataccggcatctatctgaccgggctgcaacaagtcggcgattttacctttgaaggcgcagcacgcagcgacgataactcacagtttggtcgtcatggaacctggcaaacgagtgccggttgggaattcatcgaaggctatcgttttatcgcttcttatggcacgtcgtacaaggcacctaatcttgggcaactgtatggtttctacggaaatccgaatctgaatcctgagaaaagcaaacagtgggaaggcgcgtttgaaggcttaaccgctggggtgaactggcgtatttccggatatcgtaacgatgtcagtgatttgatcgattatgatgatcacaccctgaaatattacaacgaagggaaagcgcggattaagggggtcgaggcgaccgccaattttgataccggaccactgacgcatactgtgagttatgattatgtcgatgcgcgtaatgcgattaccgacgtgccgttgttacgccgtgctaaacagcaggtgaaataccagctcgactggcaattgtatgacttcgactggggtattacttatcagtatttaggcactcgctatgataaggattactcatcttatccttatcaaaccgttaaaatgggcggtgtgagcttgtgggatcttgcggttgcgtatccggtcacctctcatctgacagttcgtggtaaaatagccaacctgttcgacaaagattatgagacagtctatggctaccaaactgcaggacgggaatacaccttgtctggcagctacaccttctga

SEQ ID NO: 17534 - DNA, 279 bp, Escherichia coli
atggccctggctcaggccagggcgggcaataccggttcctgcgaagcgatgacggcggcaagtgtacacgaaatgcggtatcacttgctgttttctgtcctgaagactggcgctcaccgtgccgtcgaactttcaatcaaatatattgcgagagggcgtctttgcgagccgctttccagaaacagaaaaaccattacccctgaaaaccgaaaaatgccacaatattggctgtttatacagtatttcaggttttctcatggcattaaccgcagcgcttaa

SEQ ID NO: 17535 - DNA, 885 bp, Escherichia coli
atggaaagtacacatcgtattgatctcaagttattgcgctattttcttgcggtcgcagaagaacttcactttgggcgggccgctgcgcggctgaatatgtcgcaaccgccattaagtattcatatcaaagatctggaacaacagttgggcactttgctgttcgttcggcattcgcgcagtgtggcgctcactcatgcggggaaaattttactggaagagtcacgtcgtctgctggctaatgctagtcaggcgttggcacgagtagaacagatcggtcgtggtgaggcagggcgcattgagctgggcgtggtgggaaccgcaatgtgggggagaatgcgtccggtaatgcggcggtttttgaaagagtgccctaatgttcatgtctcatttcgtgaaaaatcaccagggatgcaaatggcattgctcgagcggcgggagctggacgcgggtatctggcggatggcaattgaacccacgacaggatttaccagtctgcgattacacgaatcttcgtttttggtggcgataccggaagatcatcatctggcttgcgaaagcgctatcccgttaatggcattacgcaatgaatactttgtgacgctgccatcggtccattccgattgggcgtttttacagcgtgtctgtcagcaggcagggttttcaccgatgatcgttcgggaggccgtagaaccgcaaaccgtactggcgatgatcagtatggggttgggtgtgacattaatggcagatagctatgcccaaatgagctggccgggtgtggtatttcgtccactcgaggaacgtattccagcagatttgtatattgtttacgaacagcgacaggcaacaccagcgctggagagattagttaatgctttgatagcatga

SEQ ID NO: 17536 - DNA, 930 bp, Escherichia coli
atggcaaatcaattgtataaccagtgtcgggtttattgtgcaccctggcgattagatgctttgaatttaaatgatatcattgatcaatggattgacgaggggctgttgccgcccctgatccatacttttcttccatatcgtgatgatgccggtgcctccagtgaagaagagatttttgttaatgatgtcgcgaatatggacaatagtgttggggttatcggttatttcgatggtggaacctatgattccggttgtgcatgggaagtaggctatgcatgggctttagggatgcctgttcacttggtaacgacagactttcttatatgggcagcggggaattcttcagagttttaccctatcagtaagctgatgaattatgtggcaaaagtggtttcggtgtcagattccgatgctagcatcagcaactatcgtgaacaaaccaacgatatcatcaagcgtgcgttgcaaattcttcaacaaaatttaatcgccgacttcggcacgacgattactcccgctgtaccgattacgccattgccgattgagtatgactattatcttgagcctaactttatgtataccgaaccctctcggggcttactggagaaaatcaaagatgcgatcattagtgcaggtaagactttcatcgttggcgacaatatgaatgatattgcgactgatattgataacttaagaaaatccagacaggccatcttttattccgatacctttgagccgaatgtcgacaccggtattatgaatggtattgcctatgcattaggacagcaatcgattgtttattgtagcaagcaacaaaagtatcaatctgcgctcgcgacagattatttgaatttaatgattacctggtcgtcaacggtggcgcattcatttgcggagcttgaaacattgattggtaacacagaaaaataa

SEQ ID NO: 17537 - DNA, 1254 bp, Escherichia coli
gtgaatctaaaactacaattaaaagtactttcatttctgcaattctttttgtggggaagttggctcaatacattcggttcctatatgtttatcacgctacgttttaaaggcgaggatattggtgcagtctatagtaccttgggtattgcagcattaataacatcaacgttatttggtatcgtggccgataaatggattagtgctaaatggatatatgccgcttgtcatttatttggcgcgataacattatttgtcgctgcatcggttaccacgccttcggcaatgttcattgtcattttacttaactctctcgtgtatatgccaacgctcggtttgagtaatacaatttcctattaccgcatacaaactgcggggatggatattgtgacagaatttccaccaatccgtatttggggcacgattggatttattgtcgcgatgtgggcggtgagtttggcaggttttgaattaagtcatatgcaattgtatatcggcgcggcagcttcgttaggcttgagcctgttcacgttgacattaccgactgtaccagtggcgaaatctaaccaggcgcaaggaatgatagacgtgctcggactgcgtgcatttgcactgtttaagaacagcaaaatggcgattttctttatctttgccatgctgctcggggcagaactacaaattaccgggatgtttggtaatacatttctccacagttttgagagtgttccagagtttgccaatagcgttgttgtaactcatgcttctattttgttatcaatttctcagatatccgaagtctgcttcattcttgccattccctttttcctgaaaaaatacggtatcaaaaatgtcatgctgatgagcatggtggcctggacgctgcgttttggtttattcgcttatggcgatccttcattcggcggtaccattctgttaattctttcgatgattgtttatggctgtgcttttgacttcttcaatatatctggctcggtatttgttgaacaagaagttgatccatcgattcgtaacagcgctcagggcgttttcctgatgatggccaatggttttggttgtattctgggcggttttatcagtggtaaagtcgtcgattatttaacaacggatggcaatccacagtggtcaaccatttggctggtatttgccggatattcactggttttggctctcgcatttatggtgttgtttaaatataaacacaacagtaacccgacaacatccggtcatttcgcctga

SEQ ID NO: 17538 - DNA, 768 bp, Escherichia coli
atgaaaaaacagcttcttgcattaagccttggtctggttcccatggcttttccgcaaatgtcttatgccgagtttaaagggggctttgctgacattggtctgcattatcttgactggacatcccgcacgacagagaaaaccagtaataagtcccataaagatgattttggctatctggaattagaaggtggtgctaactttagttggggagaaatgtacgggttcttcgattgggagaacttctataatggccgacattcaaaatctggcagtgaacaacgttatacttttaaaagtaccaaccgcatttatcttggtgatacaggactgaatctttatcttcacgcttacgggacttacggttcacctgaacgtgttaacttctatgatgatacattcctttacgggcttggatacaattttacgggaaatggttactggtttaagccattcttcgcgaaacgttacaccgatcaaacctattataccggtgacaatggctatgttttgggctgggttgccggatacagtttcacgcttggtagcgaaaaattcagcctgactaactggaatgaatacgaattcgaccgcgacgctacatatgcagcaggtaatggcggaaaagaaggtataaacggagcagtagcgttttggtggaatgcgacaccgcattttacggcagggattcaatatcgctacgcagataataaactgggtgaagccttcctccaggatggcattatttattcaataaaatatcagttctaa

SEQ ID NO: 17539 - DNA, 1206 bp, Escherichia coli
ttgagcaagacaccactgacagcaaaggccatagaggccgcacaaccgcaggacaagccatataaactcaccgattcactgacaccgggccttttcttgctggtccatcccaatggcagcaaatactggcgattccggtactggatagacaagaaagagcggttgcaagctattggggtgtatccactgattagtcttaaggaagcgcgcaaacgagccacagagagccgtttactcatcgccaagggtgacgatccgatcgaggtggcgaggaaagaacgccagcttaatgacctgaacgccgccgccagctttaaggcgatggcgaatgagtggtatcagacaaaggtcagtagctggtcagaaggatacgcccgccaggtgagagcggcacttgataaggatgtcctttcggtaataggcaaacaatccgtaaccgatataacgccgcgggatgtgctgtctatcctgaagaagaaggagaagaagtcaccagagcaggcaaggaaaatcaggcagtggacaggagaagtttttaaacacgcaatcattttgggcctgattaacaacaatccggcggctaacctggtgggtgcaatgaagccacgccgccctggtcataacgcatggataccactggaacagatcccggcattctttgaggcgcttcaggtcgtcggcagcgtgaagataaaaacgttcattcatttactcatcctcacggcactaaggacgcaggagcttcgtttatgccactgggaatgggtaaacctggaagacgcaacaatcacattgcccgctgaggtaatgaaagcgagacgaccgcatattgttccattgccacgacaggccgttgcgctattgcaggaccagtacaccagatcaggccatttcgaatacgtgttccctggtcggtttatggatggaccactttcagccagtgccacgctaaagaccatcgaccggatcggctggaaaggtgtggtaacaggtcacggattcaggacgactttcagcaccacactgaacaacagcggcaggtattccccggactggatcgaaatggcgctggcgcatgttcccgctggtatccgtggcgtttataaccaggcgctgtatttaaagcagcggcggcagatgcttcaggattatgctgatgccgttgatgcggtcctggagggccgaccttccccgctggagccgtga

SEQ ID NO: 17540 - DNA, 768 bp, Escherichia coli
atgcgtaatagtttagcagttcgctttagcttgcagcaaggcgaagaattatcacaggaatatcaattcatcaaatacgaagaagcgccggaacaggtgcaaatagcttttgatgatcagcactacggcaacactatccgctacgacggtaaaaaatggtttctcaatccggtaacaaatgccattcacgtatgtcaaatcattacgccagtaaataacagcgcggataacgattcggctattgacgctgaactggtgacagaaccactaccgccatcgccgccagtacaagaaagcgatgtaaaacccgacgccatcgatctgacagcagaagccagagagcgcaaacaaccgaagccggaacaaccgcaagccaaggataacaaacagtggcacggtaacacggcgtatctgaatacgtttgcttgtcatcttcatgaagtgctaccacaggccatctatagcacatggtgcgacaaacaaacggcggcacacttccacctgctttacgcgctttgctacctggcaagctacgaaaacaaagatgaaggtatcgagcttggcgaggtgttatatggtgctgaaaagatcacaaagggcggcgtagtacctggtttccatatggcccgatcaacgttcgatatcaagattaacgagcttgaacagtggggattaatcaaggtaacacgaggtaagaaacgtaaggacgggcaaggcaacttgccgaacagtatcaaactgaattttaagccgtacagttcaaaataa

SEQ ID NO: 17541 - DNA, 192 bp, Escherichia coli
atgaatgatagcgaattaatgacggtgaacgaggtagccgctttattcggcgttacccgacgcactatattccgctggatgaacaagattaaaggttggcccgttccggttactccggtcggtgcacgaattaagtttatccgatctgagattttggaaatctataaaaacaaaggcgctcgccaccaatga

SEQ ID NO: 17542 - DNA, 327 bp, Escherichia coli
atgaaaatcaaagcaaacacaattaaagaaataacatcaatcaaagtaaaaggagcagatgccatgcattcattagacagttattttcagcgcacgacagcccctaaatcagccgcccaggaacgccgtgaggaattccaggaaaaagtgatgcgttctgctgattatattgcggacaagttcgtggaaacggttaggccacttgttgatgaagtagctgataaacttcagtctgaaatgccggaagacatggaaggcactgcaaaggcgcgactcctttttgaattaagtcgtcgttttggcgtgtcaataagcgcttttaaataa

SEQ ID NO: 17543 - DNA, 543 bp, Escherichia coli
atggacgcatttgaggtactggcaaataaaggcgcggaactggtagcacagcgtgataaaaccgccaacgaaggggaacgcgcactgctaaataaacagattaaagcgatccgcatggcccagtttaaattaatcagcaatgaagttatcgaaacaattaaaccgcagatcccacaaatcgttgctgacgctattaaagccaccggactggagaaacgcattgccgggctaaaaacgaacgcagagaaaatggagatgcacaaacagagcggtgctccgaatcccgatgagtacttctcactggatgttgagtttatggcgcaggttgaggaacgtctgggtagctgtctcaccgaggaacagcgtcgctattttgatggagtggatagttcggcaggtattgacctgaactcgtatttcggtcgtgaaattgagcattttgatgccgccccgtctatgccggagccagaaccagaaatggccgccgatcctgaagctgagcaacggaaacgcgtattcaatgcgatagggattcggtactga

SEQ ID NO: 17544 - DNA, 288 bp, Escherichia coli
atgttggcactacgcatcatgcagggcatcgctaagaccctcgcagaacatgtcttagacctgaaacattcgccactgagcaaacaggccatgaagcgccaaacgcttcgtctgtgggctgaatattcgcttggaactatcaataaaatcatcgacatgaaatcggggccgagcaaccagagcgcggaggaaatggagttcatcaggcgtttaattctcattcgcagagacattcatagccagttacacagcgtgggaatcgatattaatgatgggacggacgattaa

SEQ ID NO: 17545 - DNA, 231 bp, Escherichia coli
atgaagcaagatattgcagacaggctggagatactcgaaggccagcgggcagaagcgaaacaactacgtaaacaggccagaagagcgcacaggaactatgaagcagaatcactgaccgctttcatcaacttcacaaaccgttgcatccaggagtgttacagggaggatgcagaaaactggctggattcattgccagaacagactctgcatgaactgaacggcgaccagtaa

SEQ ID NO: 17546 - DNA, 2199 bp, Escherichia coli
atgagtgggaatcttgggaccatatactatgaggtcgacgcccgtacagggaagctattaaccgcagggaaacaagctgacgacgcattcgatcgcattgaacgcggcgcaaagcgcgctgacaactcgatcaacaaactgaatacgacaatcagcaaactggcggcggcggttaacgttggcctgctaatgatggcggctaaacgctttattgaaatcgcggacaacgtaaaactactacgcgcccgtgtatcccggctatccggtagtctggttgaagctaaggctaattttagcggcatcctggaaatcagtaagcggactggcatgaagattgaggataccacgaagctatgggagagccttacttcagccctgtctgattcaaacgctaccagaggccaaatcttacagttaacagagacactacagcagatcgggcgtattggtggcagctcatccgaggaagccgcaaacgccttgcgacagttaggtcaatccatcaacggtggtattgtccgtgctgaagagtttaacagcatccttgaaggtatgccggagctatggcgacgcgtagcaggtcagatggggatctcaatgggtgagctacgtcgccgcatgttggatggcaaactgacggctgaggatgtagtaaatgcaatcctgaaaggatcaggcgaaatcgaaaaagaatttaacaagctgccaacaaccacggaacaggcaatgacagagctatcaacaaattttagcctgttactggaaaccatcgaccagacgctgcatgttactgaactggtcggtcgcggtattaaaacgctggctgattattgccgcgagctatccggctggtttaaaacgctgaaatctgattctgcgtcattggctgataagctatggacacttgccgcagcctttgagccgtttgtgccgggccttgatttattccgcgctcaagccaaacaaaccgacttcttaggggccgcgccagacaatcaatcaacgggttttgtgtcaacgctaccgacacagcaggccactactgatattaagctgaaagacaatggcggtggaggtggcaataaaccgaaacgcacacagaaagatccggcagaagaagcgctgaaacggaaacgcgcagaactggaacgacttaaccagggctttgttgagggtagcaaagaggctgaaatgtgggacgccgttcaggaaataggcgctaacgcaacggcaaaacaggttagtgagatgaaaaaccttgcgcacctgatttacgaaacaaacgccgcgcgtgaacaccagatcgaactggaagacaaagcaaaacagcttaacgagcaatttaaccccgttgacgcgctcaaacaacgccacgccctggaaatgcaacaggccgatgagctattcaacaaacagatgattaacgaggaaacgctaaacgcgcttaaacaacagcacgcagaagaattacttgcctcgcagtgggaacaattcagggcgcaaggtgggattaatggcctgattggtgatatggctgatggcctgagtggtggcgctacaaatgccgttgtcggcctgcttaatggtacgcagaacctggaaaccgctttcgccaatatcgggactaccattctcggaaaagtggtgggaagtatcgctgagatgggcgctgaatacgtcaaacaaatgatcttaagcgaggcagccagcgccagcgcaatgagcggacaagcggcaacagcagcggcatcaggcgcatcaatcgcatcatcaatggccccggcagcagcggcgacagccacagcgacaatgggtacagccccgatgatcgcaatgtcagctatcagcgccttgatggctggaattactggcttgtttggcggtggtcgctacaacggcggcgcggtaggtgctggcaacctgtaccgcgtaggggaacacggtaagccggagctattccagaccaatggcggtcggcagtacatgatccccggagagggcggtagagttattcctaatcgtgatattggcggcggtggcggcatcacactgaacgtaacaaacaacatccaggcgacaaacggttggagtgaagcggacagtaaagcgttgcaacaaactatagagaacacagcaatgcgcctgatgcagcgtgaatcttcacgacctggtggcatgttgcaaccgcgccgccgttaa

SEQ ID NO: 17547 - DNA, 528 bp, Escherichia coli
atgaacagagaaaagacattcccggaaatgctggaagaggcagcgattaacagcctggctattgcagacactaaggaattaatgacgttcaccaagcgccagataagcgcgattatgcagatgccgagtattagcgaggaacctgcgacggcacacgctatggctatccatacgctcacaatggcgacttacctttggttgtatagcgacttcgggttgcagccagtcgatgcagacgatcgcgagttattcgctgtggatgttgacgacgtacacgccatgctgatgccgctaaatgttctggttggctggatttaccacaatagcgtcgaggctgtttgcagggcgaaagcgggaaatcctggtggaactgactggcggttactgttccggaaaatgactttagagcagatcatcgacgacaaatatggactatcacacgacattgctgatgctctttacgaagcaatgaaagaaggcgcaacagccgcgctaaatggcaacctggcagcaccgactattcactga

SEQ ID NO: 17548 - DNA, 345 bp, Escherichia coli
atgaaacaggtaattgcaatcatcttgatggtactggcactggttggatgcacaagcgccccgctacaacaaagcgcttattatggcgagtgtaaggcggtcgctatggagctgaaagagaaaatgaaatacgacagcaacgaatacggctatggatttagtgacacactggctataggcgtgattcatgggtgtgttgatgttatggaagccaacagcaataaggactttaatgttgttgcgccgtaccttaacggacgcagtgaaagcaaactcccatatgacaaggcttatatgtacgggcacaattacgcaatgagcaaaaagggttacactgaattttag

SEQ ID NO: 17549 - DNA, 759 bp, Escherichia coli
atgtatcagccaatgaccttaccggatctgctatttgccgcagccgaccgcgcgggctatgtcaacggtagcggcaaactgaaacgcaaggaattagccgatactctcggcattggtgagcaggcgcttaacagctacatgaaaggtagtcgagatgttagcacagaacaacttaacaacatgctgacattatttggcgtgtacggcatcgcaccattcaaaggcaatcaatggatggcgctggacgtggattataaagcgcgtagcgacgaaattgttagtaacaagatgattgcactggaacgcgacaaccagcaaaaggcacagcagatcgcagcactgaaagctgagattgatgtgttgaaaaaacaattaagcaacaaaagcgatattgtagacaaaccagttaatcaacaaatcgagatcaagggcgacgctattgtaggagaaccagtcatgaaggacttaagcaacaaaagcgatattacagaagaaccagctaaacaacaaaaagcggctggcggacgtccggcaaaattcaaagtagaacagcttgagcaatggcttaaggagcaaggcggatacaaggggactatcgacgatttggcgttacatgcgttcggtaagatcggcaaagatggcaagctgcatggcgcaccaggccgccactggatgtacaaggcgttagctaaactggaggacgaggggaaaattgccaaagaggcagcgacaaggagcgggattaatattgttgcttaa

SEQ ID NO: 17550 - DNA, 1404 bp, Escherichia coli
gtgaacactcgccggctactgagcgtcggtatcgatatcggcaccaccaccacccaggtgattttctcccacctggagctggttaaccgtgcggcggtgtcgcaggtgccgcgctacgaattcatcaaacgcgaaatcagctggcaaagcccggtgttctttacccctgtcgataaacagggtggtttaaaagaagcggaactgaaaaccttaatcctcgagcaatatcaggctgcgggcattgcgccggaaagcgttgattctggtgccatcatcatcaccggtgaaagcgcgaaaacccgcaacgctcgcccggcggtgatgacgctttcccggtcgctgggcgattttgtcgtcgtcagcgctggaccgcatctcgaatccgtgatcgccggtcacggtgccggggcgcaaaccctttctgaacaacggctgtgtcgggtcctgaatatcgatatcggcggtggcaccgcgaactacgccctgttcgatgccggaaaaatcagcggcaccgcctgcctcaatgtcggcggtcgcctgctggaaaccgacagccaggggcgtgtggtttacgctcataaaccggggcagatgattgtggatgagtgcttcggtgcaggcaccgacgcccgttcgctgaccggcgcgcagctggtgcaggttacccggcggatggcagagctgattgtcgaagtgattgacggaacgctttcgccgctcgcgcaggcattgatgcaaaccggtttgctgcccgtaggtgttacgcccgaaatcattacgctttctggcggcgttggcgaatgttatcgccaccagcccgccgacccgttctgttttgccgatattggcccgcttctggcaacggcgctgcatgaccatccgcgcctgcgtgagatgaacgtgcagtttccggcgcaaaccgtgcgcgccacggtgattggtgcgggtgcacataccctttcactctctggcagcacgatctggctggagggcgtacaactgccgctgcgcaatttgccggtggcgatcccgattgatgaaacggatctggtgagtgcctggcaacaggcgctgattcagctggatcttgatcctaaaactgacgcgtacgtgctggcgcttcccgcctcgctgcctgtgcgttacgccgcggtactgacggtcatcaacgcgttggtcgatttcgtcgcgcgttttccgaatccgcatcccctgctggtggtggccgggcaggactttggtaaagctctgggcatgttgttgcgcccacagctacaacaactcccgttggcagtcattgacgaagtgattgtccgcgcgggggactatatcgacattggtacgcctctttttggcggatcggttgtgccggtgacggtgaaatcactcgcatttccttcctga

SEQ ID NO: 17551 - DNA, 951 bp, Escherichia coli
atggctatgtcagacgaggcgatgtttgccccgccgcaaggaataacaattgaagcggtaaacggaatgctcgcggagcggttagcgcagaaacacggcaaggcgtctttattacgcgccttcatcccgctgccgccgccgttcagcccggtacaacttattgaactgcatgttctcaaaagcaacttctattaccgctaccatgatgatggcagcgatgtgacagcaacaacagagtatcagggtgagatggtcgattattcgcgccacgccgtccttctcggcagtagtggaatggcggagctacgctttattcgcacccacggcagtcgttttactccccaggattgcacactgtttaactggctggcacacataatcactccggttctgcaatcatggctcaatgatgaagaacagcaggtggcgctgcgtttgctggagaaagatcgcgatcatcatcgggtactggtggatatcactaatgcagtgttgtcacatcttgatctcgacgatctgatcgctaacgtcgctcgtgagatccatcattttttcggtctggcttcagtcagtatggtactgggcgatcatcgaaagaacgagaagttcagcctgtggtgcagcgatctttctgcctcacattgtgcgtgtctgccacgctgtatgcctggcgaaagtgtattgctgacacaaacgctacaaacccgacaaccgaccttgacgcaccgtgcagacgatctgtttctctggcaacgcgacccgttattacacttacttgcatctaacggctgcgaatctgcgctccttataccgctcacctttggcaaccatacaccgggtgcattgttgctggcgcatacctcttccactctctttagtgaggaaaactgccagctactacaacatattgccgatcgcatcgctattgccgttggcaatgccgatgcctag

SEQ ID NO: 17552 - DNA, 237 bp, Escherichia coli
atgcaggaaatctatcgttttatcgacgatgcgattgaagccgatcgccaacgttataccgatattgccgatcaaatctgggatcatccagaaacacgttttgaagagttctggtcagcggagcatctggcttcggcgctggagtctgcaggcttcaccgttacccgcaacgtaggcaatatcccaaatgcctttattgcttcgtttggtcaaggcaaaccggttgggggaatatga

SEQ ID NO: 17553 - DNA, 1134 bp, Escherichia coli
atgaaaagcaaagtactggcactcttaattcctaccctgctcgctgcaggtgctgcacatgcagccgaaatttataataaagacggcaacaaattagatctgtatggcaaagttgatggcctgcattatttttctgataattcagcgaaagatggcgaccagagctatgcgcgtctgggttttaaaggcgaaacccaaattaacgatcaactcactggctacggtcaatgggaatacaatattcaggcaaacaacactgaatcttcaacaaaccagtcatggacccgtctggcatttgccggactgaaatttgcagattacggttctttcgattacggacgtaattatggcgtaatgtacgacatcgaaggctggaccgatatgctgcctgaatttggcggtgactcttataccaatgcagacaactttatgactggtcgtgccaacggcgtcgcgacttatcgtaatactgatttcttcggtctggtaaatggtctgaacttcgcagtgcagtatcaaggtaacaacgaaggtgccagtaatggtcaggaaggcaccaacaacggacgtgatgttcgccatgaaaacggtgacggctggggtctttccacaacatatgatttaggcatgggctttagcgctggtgcggcatacacctcatctgaccgcaccaatgaccaggttaaccatactgcggcaggtggtgataaagcagacgcgtggactgctgggctaaaatacgatgctaacaatatttacctggcaaccatgtattcagaaacgcgtaacatgaccccgtttggcgacagcgattatgcagttgcgaacaaaacccagaactttgaagttactgcacagtaccagtttgattttggtctgcgtccggcagtctctttcctgatgtctaaaggccgtgaccttcacgctgccggtggtgcagacaacccggcaggtgttgatgataaagatctggttaaatacgccgatgttggcgcgacttactatttcaacaaaaatatgtccacctacgttgactataaaatcaacctgttggatgaagatgacagcttctacgctgccaacggcatctctaccgatgatattgtcgctttaggtctggtttatcagttctaa

SEQ ID NO: 17554 - DNA, 846 bp, Escherichia coli
atgaaaatattccgtttgataacctgtttgttactgctgatgtttgcgggggagggcgcgcaggcggcgaaaaagattgccacgttgcatacgatttcgggcatttccagttacaatacgcaaatcagataccaccttgatattcttacccccgacggtgttatgcatggtgtgtataagaactccaccaccacgttgcaagtgggttatctggaaaatattagctggacagggagtgataccccgcccagtttatattcgaattattttgtttcaacatcgatgtcaaactgccctgggcttgctgagtatgatcaaaaatcggataaaaccaagtgggattgttacgatatgcctatcgacgtttattatgatgccgacgtgcatggctgcccatggctggtcacaacgtataatgagagttctgcgccgttagaaaaaactatgggcccctatatcggcccgcaggcgcgtaactcgagctgcccggtctcagtagccacctatgatatttcgtggagtgaggattacatttcgtatacgaaggtgctgtcgttgcagtcgacgggcggcataattgagaaaacgctcccgaccttcctgatggaaaacggcaagctttgcgacggcagccagatggatgaacgcggtgcgtactgccgctttgtggcagagatgatcacgttctccacctccggctgcgacaattcaagcgttacggttacgcccaaccggcaccccattacggacaaacaactgcacgacatggtggtgcaggtggataccagcagcaggcagccgattgattccacctgccgcttccagtacacgctcaacgagctgtag

SEQ ID NO: 17555 - DNA, 585 bp, Escherichia coli
atgaccctaccaaaaatcaaacaggttcgcgcctggtttactggcggtgcgacagcagaaaaaggcgctggcggtggtgattatcacgaccagggggcgaatcactggattgacgatcatattgccaccccgatgagtaaataccgcgattacgagcagtcacgccagtcatttggcattaacgttcttggcacgttgattgttgaagtcgaagcagaaaacggccagaccggattcgccgtttcgacagccggtgaaatgggctgttttattgtcgaaaaacaccttaaccgtttcattgagggtaaatgtgtcagtgatatcaaactgatccacgatcaaatgctcaatgccaccctgtattactccggctctggtggcctggtgatgaatacgatttcctgtgtcgatctggctctgtgggatctgttcggcaaagtggtcgggcttccggtttataaacttttaggcggcgcagtgaaccgccccgggtttcctggagagtgttttatctgtgaactcaggctgccagatcatcgtttccgatggaagcataataagctttttctgcttctgccggagtaa

SEQ ID NO: 17556 - DNA, 240 bp, Escherichia coli
atgtcattgcggatgcgctgctttagggtggcgcatctggcatcgacgcatgcctgccggatgcggcataaacgccttatccggcctacgattcaggcacagggtggtaggcctgataagacgcgtaagcgtcgcatcaggcaatggtgctcggatgccggatgccggatgccggatgcggcgatgttttggcattacgcgacctttttgcacgttttccccggcgtgccaaatatttaa

SEQ ID NO: 17557 - DNA, 2454 bp, Escherichia coli
atgagcctgattattgatgttatttcgcgtaaaacatccgtcaaacaaacgctgattaatcctggcgacgtcacggttgttatttatgagccttccgtggtgcaggttcatgctcaggcctctgtcgttgcgcgttacgtccgtgaaggaaatgacctgctgatctatatgcaggacggcacggtgatccgctgcaacggttatttcctgcaagcggcgaataccgctgaacaatcggaactggtgtttgccgatggacaacagctcacccacgtcacctttgccgatactgctgcgggtggattagcccccgtagaactgactgcccagaccaccgcgattgaaagcattgcgccatttcttgataccattgctcagaccagcaccttcccatggggatggctggcgggggcggcggtaggtggtggcgcgcttggtgcactgctggcaagcggtggcgatggcgactcgaaaacagaagtgattaataaccctccgccacccgctgagcctggcaacgccacaccatcatttttagttaccgataatcagggcgatcagcgcggcattctcgccaccaatgacatcaccgatgacaccacgccaacctttagcggcagcgggcaggcgggggcgactattcagattaaagacagtaacggcaatactattgccagtactcaggtagacaacaacggtcagtggagtgtctcgttacccacgcaaagtgcaggtgaacatacctggtcagtggtgcaaattgtcggcagtaccatcactgacgccggttcgataacgttaaccatcgacaatagtcaggccagcgtgcaggttgccaccaccgcaggcgataacattattaacgccagcgaacaggccgccgggtttacgctttctggcaccagtagccatctggcgcagggaacagaactcaccgttacgctaaacggcaaaacctacaccaccagcgtaggcgctaacggtgcctggagcgtgcaggtgccgaccgccgatgcacaggcgttaggcgaagggaatcaggcggtgctggtcagtgggaaagacgccacaggcaatacggtcactggcgcgcagctgctaacggtcgatacccaaccgccaacgcttgccatcaacaccatcgctcaggacaacatcatcagtgctgcggaacataacgtcgcgctggtactgagcggcacgtcgaatgcagaagcggggcaaaccgtaacactgaccgtcaacgggaaaagccatacagcaaccgtcggtagcgacggaacctggcaagtgacgctgcctgccacggaagtccaggcactggcggagggtaattacgctgtcaatgccagtgtcagcgatcgggcagggaacagcaccagccacagcgcgaatttcacggtagacacctcagcacccgtggtcagtgttaataccgtggcgggcgacgatattcttaataatgctgagcaggccgtcgcgcagatcatctccggacaagttagcggtgcttctcctggcgatacggtcaccgtgaagttaggtgccactgttctgactggtgtagtgctggcggacggtacatggaatgtggcgctggatccggcggtaacccgcaccctggcgcgtggccctaacgatattattgtcacggtgaccgatgctgctggtaataccggtacggcgactcataacatcactctggtgggcgtcgcgccgcaagtggcgatagatgcgatcagcggtgataacgtactgaatgcgctggagtctcagcagccgctaacgttaagcggcaccagcaatttacccgatggcggcacggttaacgtgacgttgaataatgtcacgtatagcgctcaggttagcggcggcgtctggtcgctgagcgttccggtaagcgatgttgttaatctggcgaataccaattacaccgttactgccagcgccacagatgtgaccggcaacaccggcaccgcgcagagcaatttactggtcgatacggtgctgccacaggtgatcatcaacacctttgcgggcgacaacattgtcaacaacgccgaagcggcggcagatcaaactctgagtggcgtcgtggtgggcgctgcgcagggcgacacggtcaccattgaactgggcggcaatatttacacggcgacggtgggcagcaatctcacctggagcgtgaacgttccggcggcagatttacaggcgctgggcgacggtgcgttaaccattaatgcttcggttaccaccgtacatggcaatacaggcagcagtgcgcttgatatcaccatcagtgccgggctgccggggctgcgcattgacactatcgcgggcgatgatgtgatcaatgccgttgagcagcagcaaaacctgattatcaccggtagcagtaccaatctgcccgccggaagagtggtcactgttttgctcgggggcaacacctactag

SEQ ID NO: 17558 - DNA, 13251 bp, Escherichia coli
gtgcctgcggcagatctacaggcactgacgccgggtacgatagtggttaatgccagcgcaacggaccccgccgggaatccggtttccatcgatcgcaacgtggaagtcaatccgggcgcggtgcttatcaccatcaataccgtctccggtgatgacattattaatgccgcagaaaaaggcgcgccgttaacgctgactggcaccaggcagttggtggaaaccgggcaaaccgtggtagtgaaattcgccgggcagacctttaccaccaccgttcaggcggggggcggctggagcctgaccgttcccgccagcgcggtgagcagcctggcagatggcgcggcggaaatcaccgcgaccgtcaccaacatcagcggtaatactggcgacacctcccgaaccattaccgtcgacagccaggccccggcgttgagcatcgatccactgaccgctgataacatcattaacgccgccgaaagcgggcaggatcttcctatcaccggcaccactgacgcccagccggggcagacggtgaccgttacgttgaatgggcagacctatcagggcgtcgtgcagtccgacggcacctggagcgtgaccgttcccgccgccaacgttggcgcactggctgacggcaacgctacggtcaccgccagcgtgaacgatgttgccggtaatccgagcagcgtctcacgcgtggcgctggtcgatgccacgccgccggtggtaaccattaatccggtggcgaccgataacgtcatcaatacgccggaacatgctcaggcgcaaatcatcagcggcacagtcaccggcgcgcaagcgggcgatatcgttactgtgacgctgaataatgtgaattacaccaccgtggtggatgcttccggcaactggagtctgggcgttccggcctcggtggtcagtgggctggcggacggcagttatcctgtcagcgtctcagtaaccgatcgtgccggaaacacgggcagccagtcgctgaccgtcacggtcgataccgccgcgccagtaattggtattaacaccattgctggcgatgatgtgataaatgccagcgaaaaaggggccgatctccagattaccggtaccagcgatcagccagccaataccgccatcaccgtgacgctgaacgggcaaaattacaccaccacgaccgacgcctccggcaactggagcgtcacggttccggcatcggcggtaaccgcactgggccaggccaactacacggtaacggcggcggtgaccagcggtatcggcaacagcgccaccgccagcggcacgcgggatatcaccatcgacgccaatctacccggtctgcgggtcgatacggtggcgggcgatgatgtggtcaatatcatcgagcatgggcaggcgctggtgattaccggcagcagctcggggctggctgaaggcacgccgcttaccgtcacgattaataatgtggaatacaccactgcggtgcaggccgatggtagctggagtgtgggcgttacggcggtgcaggttagcgcctggcctgcgggaacagttaatattgccgtatccggggaaagtagcgccgaaaatccggtgagcattacgcatccggttatggtcgatctcacgccggcggcgatcaccatcaacaccatcgccacggatgatgtgattaacgccacagaaaaaggcgctgatttaaccctttctggcactaccacgaatgttgaagcaggccagacggttactgtgacctttggcggtaaaaactacactgctaccgtggcgagcgatggtagctggaccgccaccgtacctgccgccgatttagcggcattacccgagggcagcgcctccgcgcaggccagcgtcagcaatatcaacggcaatagcgcctcggcggtgcataactacagcgtcgatagcagtgccccgaccatcattatcaataccgtcgccagcgacaatatcgtcaacgccagcgaagccgatgcgggtgtgacggtgagcggcagtaccaccgctgaagcggggcagattgttacggtaacgctcaatagcccgaccgtgcagacctatcaggcaacggtgcaggccgatggcagctggagtattaacattccggcggcagaccttgaggcattgaccgatggcagccacaccctgactgctacggtcaatgacaaagcgggcaacccggcgagcaccacgcataatctggcagtggatctcaccgttccggtgctgaccatcaacaccatggcgggcgacgatattattaacgccgccgaacacgggcaggcattggtgatttccggctccagcactggcggagagtcgggagatgtcgtcagcgtcacgctaaacaataaaacctacaccacgacgctggatgcctccggcaactggagcgtcggcgttccggcggcggatgtcacggcgctgggtagcggcccgcaaaccatcaccgccagcctgagcgatcgcgcgggcaacagcgacagcacgactcacgatgtgaccgttgatcttagcggcccgacgctgaccatcaataccgtctccgacgatgacattattaacagtacggagaaaacccaggatctgatcatcagtggcggctccagcggtctggcgaccggcaccacggtcaccgtgatgttgaacggcctggcgtacagcgccactaccgatagttccggcaactggagcgttaccgtgcccgcttcggcggtcggcgcgctgggcgaggcggtctattcgattagcgccagtgccaccgacagcgcgggcaacagcggcagcaccacccatacggtgaatgtcgaatcgctcctgcctggggtgatcattaataccgtggcgggcgatgacattatcaatgccgctgaaatcgctgtggcgcagaccatcagcggtcaggtcacgggaacggcggttgcggggaatacggtgattgtcaccattggcggcaatcaatacaccgccaccgtgcagtcagatttaagctggagcgtcagcgtacctgcgaacgttttgcaggcgctgggcaacggtgaactgaccatcagcgcctcggtgaccaattccgcaaataataccggcaccgcgacgcgcgacatcgtgatagacgccaacctgccaggcctgcgggtcgataccgtggcaggcgatgatgtgattaacagcattgagcacactcaggcgctggtggtcaccggtagcagtagcggactggcggcgggcgcggcgttgacggtggttatcaatagcgtcacctacggcgcaacggtactcgccgatggcagctggagcgtcggcgttccggcggcagatgtcacaaactggcctgcggggacggtcaatattgccgtctctggcacgaataccgccggaacaacaaccagcattagccatccggtcacggtcgatctcgctaccgtggcgattaccatcaacaccctttccactgacgatgtaattaacgctgctgaaaaaggctctgatttgcagctttccggcaccacctccggcgtggaagcggggcagactattaccgttattttcggtggcaaaagctacaccaccacggttgccgcggataatacctgggggctgacgatcccagccgccgatctcgcaaccttgccggatggcgcagcaaacatccaggccagcgtcagcaacgtcgcgggtaacaacgcccaggcaacgcatgtttatagcgtcgatgccaccgcgccctccgttactatcaacaccatcgccagcgacgatattcttaatgccgccgaagcgggatcggcgctgaccatcagcggcaccagcaccgcagaagccgggcagacagtgaccgtgacgctaaacggcgtcaattacagcggcaacgtgcaggctgacgggagctggagcgtcagcgtaccaactggcgatttagccgaccttaccgccagcccctatacggtgagcgcggcggtcagcgacaaagcgggcaacccaacctcggcaacgcataacctgacggtggatcttgccgctccggtcgtcaccattaacacggtagcgggcgatgacatcattaacgccacggaacatgctcaggcgcagattatcagcggctcggcaacgggcgcgacgacgggtaacacggtttccgtggcgattggcacgactacctacaccaccgtgctggacgccaacggcaactggagcatcggcgtgcctgccagcgtgatttccgcgctggcccagggcgatgtgaccattaccgccacggttaccgactccgcaggcaacagcggcacggcctcgcacactgtcagcgtggcgctcggtgcaccgatactcgccattaacaccatcgccgtcgatgacatcatcaacgccacggagaaaggcgcggatctgtcgatttccggcaccagcaaccagcctgcgggcacgcaggtaactgttacgctcaacgggcaaaattacaccaccacagccgatgcttccggtaactggagcgtgaccgttccggcgtcacgggtgagcgccctcggtgaagccacttatacggtgactgccgccgccactgacgccgatggcaacagcggttccgccagccataacgtacaggttaataccgcgctgccgggcgtcaccattaacgtggtggcaacggacgatattattaacgccgccgaagcgggcgtggaccagaccatcagcgggcaggtgacgggtgcaacggcaggcgacacggtgaccgtcacgctcggcggggcgacgtacaccgccacggtgcaggcgaatttaagctggagcgtcgatgttccggcagccgctttacaggcgctgggcaacggtgaactcaccatttcggcttcggtaacgaacagcgtaggcaataccggtaacggcacgcgcgaaatcaccatagacgcgaatctcccgggtctgcgggtcgataccgtggcgggcgatgatgtggtcaacattatcgagcacggtcaggcgctggtgattaccggcagcagctctgggctggcggtgggtagtaatgtcacgctgaccattaacgggcaaacctatgttgcggcagtgctggcggatggcacctggagcgtcggcgttccggcggtggatgtcagcgcctggcctgcgggggcgctgacgattacggcgagcggcagcactaccgccggaaacccggtcagcgttacgcatccggtgactgtcgatctctcggcggtggctgtcagcatcaacgccattaccgccgatgatgtgattaacgctgctgaaaaaggcgcggcgttaacgctcaccggcagcacttctggtgtcgaagccggacaaacggtcaccgtcacctttggcggcaaaacttacactgcaagcgtcgcggctaacggttcctggagtaccacggttccggcggcagatatggcagccctgcgtgatggcgatgccagcgcacaggccagcgtcagcaatgttaacggcaacagcgccaccacgactcatgcttacagcgtcgatgccagcgcgccaacggtgaccattaacaccattgcgggcgacgatattcttaacgccgccgaagcgggtgcggcgctgaccatcaccggcagcagccaagcgaatttactggtcgatagcggcctgccgggcgttaccatcaacaccgtggcgggcgatgatattatcaacgccgccgaagccggggccgatcaaaccatcagcggggtggtcactcgtgccgccgctggcgatacggttaccgtcacgctgggcggcaacacttacaccaccacggtacagggcaacttaagctggagcgtcagcgttccggcagccgatctccaggcgctgggcaatggtgatttgaccattaccgcctcggttaccaacgcgaatggcaacacgggcagcggcacgcgggatatcaccattgatgctaacctgccggggctgcgggtggataccgtggcgggcgatgatatcgtcaacagcatcgagcacggacaggcgctggtgatcaccggtggcagtagtggcctgaatgcaggcgccgtgctgacggttaccatcaacagtgtggcgtattccgccacggtacaggcggacgggagctggagcgtcggcattccggcggcaaacgtcagtgcatggcctgcggggccgttaaccgttgaggtagccgggcaaagcagcgccgataacccagtcagcgtcagccatccgttcaccgtcgatttaacggcggtggcaatcagcatcaacaccgttgccagcgatgacgtaattaacgccgccgaaaaaggcactggcctgaccctttctggcagcaccagcggaattgaaagcgggcaaaccgtcaccgtcacttttggcggtaaaacctacaccgcaagcgtcgccgccaacgggagctggagcgtgaatgttccagcgggggatttggcaaccttgccagacggcgcggcgaacgtgcaggccagcgtcagcagcgcgagcggtaacagtgcctcggcgacccatgcgtatagcgttgacgccagcgcaccgacgctcaccattaacaccattgccagcgacgatattcttaacgccacggaggcgggaagcccgctcaccatcagcggcaccagcaccgccgaaaccgggcagacggtgaccgtcacccttaatggcgcaacctacaccggcactgtacaggcggacggtagctggagcgtcagcgttcccacttcagccctgggcgcgctgaccgcaagcaattacaccgtcagcgctacggtcaatgacaaagcgggcaaccccggcagcgccagccagaatctggcggtagacaccaccgcgccggttctcaccattaacaccgtggcgggcgatgacatcatcaacgacgccgaacacgcccaggcgctggtgatctccggcaccagcagcggcggggaagcgggcgatgtggtgagcgttgtgctcaacggcaaaacctacaccaccaccctggatgcctccggcaactggagcgttggcgttccagcagcggatgttgcggcactcggtagcggtgcacagaccatcaccgccagcgtcagcgatcgggcaggcaacagcgacgacgccagccgcaccgtgaccgtcagtctcaccgcgccagtgattagcatcaacaccatcgcgggcgatgatgtgatcaacgcgacggaaaaaggatctgatctggcgctttccggcaccagcgatcagcctgcgggtacggcgatcaccgttacgctgaacggacaaaactacagcgccactaccgacgcctccggcaactggagcgtcaccgttcctgcctcggcggtcagtgcgctgggcgaagccacatatagcgtgacggcgagcgtcaccaatgctcagggtaacagcagcaccgccagccataacgtgcaggtcaataccgcgctgccgggcgtcaccattaatccggtggcgacggacgacattattaacgccgccgaagctggcagcgcgcaaactatcagcggccagataaccggtgcggcggcgggcagcaccgtcaccgttgaactgggcggtaaaacttacaccgccaccgtccaggctgatttaagctggaatgtgagcgtacctgcctccgactggcaggcgctgggtaacggtgagttaacggttaatgcctcggtgaccaacgccgttggcaacaccggtagcggcacgcgcgatatcaccatcgatgccagtctgcctggcctgcgggtggataccgtcgcgggtgatgatgtggtcaatatcatcgaacacagtcaggcgcaggtgatcaccggtagcagctccggctttgcggcgggcacggcgctgaccgtagtgataaataatcaaacttacgccgccacggtgatggcgaacggtagctggagcgtcggcgttcctgcgacggatgtcagtaactggcctgcgggaacgctgaatattaccgttagcggcgcgaacagtgccggaacgcaaaccagcattacccatccgctgaccgttgatctcactaccgttgccatcagcattaacgctattacccctgatgatgtgattaacgccgccgaaaaaggcgcggcgttaacgctctccggcagcacgtcaggcgtcgaagcggggcagaccgttactattacctttggcggcaaaacctacaccaccacggtggcggctaacggtagctggagcactaccgttccggcggcggatatggcgaccctgcgtgacggcgatgccagcgcccaggtgcgggtgactaacgtcaatggcaacagcgccacggcaacacatgaatacagcgtcgatagcgccgcgccaacggtgaccatcaacaccattgccagcgataacatcatcaacgccagcgaagcggcggcgggcgtaacggtgtccggcaccagcaccgcggaaaccgggcagacgctcaccgttacgcttaacggcactaactaccagaccacggtgcaggcagacggcagttggagcttaacgctgcctgccagtgacctaaccgcacttgccaataacggctacaccctgaccgccacggtcagcgatcaggcgggtaaccctggcagcgccagcaaaggtgtgaccgtcgataccaccgcgcccgtcatcagctttaacaccgtggcgggcgacgatgtgattaacaacgttgaacacactcaggcgcagattatcagcggcaccgccacgggtgcggtggagggcgaccgcctggtggtgaccatcgccgggcagcagtatgtcaccagcaccgatgccagcggcaactggagcgttggcgtgcctgccagcgtgatttccggccttgcggacggcacagtgactatcagcgccaccatcaccgatagcgcaggcaacagcagcacgcagacgcacaatgtgcaggtcaatacggcggcagtgtcgctctcggtcagcaccatcagcggcgataaccttattaatgccgccgaagcaggcagtgcgctgaccctgagcggcaccggaacgaactttgccgcaggtacagtagtgaccgtgttgcttaacggcaaaggctacagcgctaccattcagaacaacgggagctggagcgtgaatgtgccggcggcagacgttgcggcgcttgccgatggcaccagctatacggttagcgcctccgcgcaggacagcgccggaaacagcgccacggcctcgcgcagcgtggcggtggatctcaccgcgccggttatcagcattaacaccgtttcgacggacgaccgactcaacgccgccgaacagcagcagccgttaacccttaacggctcgaccagcgcggaagtagggcagacggtcaccgtcacctttggcggcaaaacctataccgccacggttgccgccaatggcacctgggcgcttaacgtgcctgcggcggatctggccgcgctcgggcagggtgcgcagaccattaccgccagcgtgaacgatcgcgcgggcaatcccggtcaaaccacgcacgccctgaccgtcgataccgttgcgccaacggtcaccatcgccacggtggcgggtgacgatattatcaacaacgccgagcagcttgccgggcagaccatcagcggcaccaccaccgccgaagtgggccagacggtgaccgttacctttaacgggcaaacctggaccgcaacggtcggcagcggcggaagctggtcggtgtttattccggcgcagcagtttgccggattaagcgacggcagctacaccattagcgcgacggttagcgatcaggccggaaaccctggtagcgccagccgtggcgtgacattgaacggcgacgtcccctccgtcaccatcaacacctttgcgggcgatgatgtggtgaatgcagcggagcacggctcgtcgctggtgatcagcggcaccaccaccgccccagtcgggcagacgctgaccctgaccttaaacggcaaaacctacaccaccacggtacagaccggcggtagctggagctacaccctcggcagcgccgatgtcaccgcgctggcggacggcaatgcctacgtgattaacgcctcggtgagcaacgccattggcaacaccggcagcagcaatcacaccattactgtcgatctcagcgccccggcgatgggtattaatatcgactccctgcaagccgacaccgggcttagcgccagcgactttatcaccagcgtcagtccggtggtggtcaacggctcgctcaccgccgcgcttgccagtaacgagacggcacaaatcagtatcgacggcggcgtaacctggaccacgctcaccgttaccggcacgacctggcgctataacgacagccgcacgctgaccgatggcaactatctctatcaggtgcgggtgattgacactgcgggcaacgtcggtgccaccgacagccagaatgtggtgatcgacaccatcgcgccagatcccgcggtgaaaaccatcgccatcagcgcgatcactaccgatacgggcctgatcactaacgattttgtcaccagcgacacgacgcttgcggtaagcggcacgctgggcgcggcgctttctgccggtgagttcgcgcaaatcagcattgatggcggcagcacctggcagaatctttcggtaagcggtttgacctggacatatcttgacgggcggacgctgaccgatggcaactacaactaccaggtgcgggtgatcgacaccgccggaaatatcggcgcgaccgccagccagatagtcaccgtggacaccaccgcgccgctggcgagcaaaaccatcgccattgcgggcattagcgatgacactgggttaagcagcagcgatttcgttactcgcgacaccacgttgaccgtgcgcggtacgctcggagcggcgcttgccgccgatgaacgggcgcaaatcagcctcgacggcggcgttacctggaccaccttaaccgttatcggcaccaactggagctatgccgatggtcgcacactgaccgacggcacctggaactacacggtgcgggtggtggatctggcggggaacgtcgggcagacggcgacgcaaaacgtggtggtcgataccaccagccccgaagcggcgaaaagcatcaccattaccggtatcagcgatgacaccggagccagcagcagcgattttattaccagcgacaccacgcttaccgtgcgcggcgtattgggggcggcactcggggctaatgagttcgcgcaaatcagtaccgataacggtgcaacctgggtgaacgtaacgctggcggcagacggcctgaactggagttacgttgacggacgcacgctaacgaatggcacgacgacctggcaggtgcgggtggtcgatcttgcgggcaacgttggcgcaaccggcagccagtcggcgcagattgacaccgtgaacccggcgcaggtgttgaccatcgccagcatcagcaccgacacggggagttcggcaactgactttatcaccagcgatacctcgctcacgctgaccggttcgctgggggcggggcttgccagcggcgaagtggcgcagattagcctcgacggcggcgcgacctggaccacgctcaccaccaacggtacacagtggacctacaccgacagccgcacgctgaccgacggcagctacgtttatcaggtgcgggtgctggatctggcggggaacaccggtccggtggtatcgaaaacggtggtggtcgatacgattaaccccaccgccacgccgaccattgtgtcgtataccgatgatgtcgggcagcggcaggggacattaagcagttcgcaggccaccgacgacaccacgccgttgctgaacggcgtgctctctgcgccgcttgccagcggtgaagtggtttacctctaccgtaacggcctgctgttaggcgcggtgacgatggtcggcgcactgaactggacctacagcgacagcgggctggtcagcggtgcctatacctacagtgcgcgagtggtggatctggcggggaatatcacctcctccagtgattttgtcctgacggtcgatacctctattccgaccacgctggcgcaaatcaccagccagaccacgcgcgatactacgccgattatcagcggggtgatcacggcggcactcgccagcgggcagtatgttgaagtggtgatcaacggcaaaacttacacttcgcagccaggcggcgcggtagtggtcgatccggcgcacaacacctggtatgtacaactgccggataccgacacgctggcggcgtctgcgaccgcctataacgtcaccgcgcaggtaaaaagctcggcgggcaacggcaacactgccaacgtcagcactggcacggtaacggtcaacgcggcgattgattacactccgacctggaccaccgccagcaaatctaccgcctggggattgacctacggcctcgactcgcacggaatgtggacggtgctggcaaaccagcaggtaatgcaatcgactgacccactcacctggtcgaagaccgcgctgacgctgtatcagagcggcaacaactacgccaccagctccatcgccgattacgaccgtaacggcacgggcgatctgtttatcacccgtgatgactacagtacaggctatatcaacggctttaccaataacggcgacggcaccttttccagcgctattcaggtcaccgtcggcacgctgacgtggtacggctcgattgtggcatttgataaagagggcgacggctatctcgacttctggattggcgacgcgggcgggccggactccaacaccttcctgtggaacaacgcaggtacgctggtaggtaactccaccacgtcgaacagcggcggtagcgccacggtggacggggcggtgacggggtatctttcgctcaacgaaggttctggcgtcgatctgaacaatgacggcaggatcgacctggttcagcacaccttcaacctgaacaactattacacgctatcttcgctcatcaaccaggggaatgggacgtttgtctgggggcagaacaccattaacaccttcctcagcacggcgggcagcggtggtaactcgacgtctgtctccatgacctgggcggatttcgatggtgatggcgatatggatctcttcctgccagccagggaagagctaactacggctccctgttattcaacaccaacggcgtgctgggtagtccggtggcggtgggggctacggcaaccacctacgccagccagtttagcctggcggtggactggaaccatgacggcctga

SEQ ID NO: 17559 - DNA, 1266 bp, Escherichia coli
atggatatcgcccgtatcgcccagaccggacaatcgtatctttacaccaacgttggtggtgccagcaactggacacaatcggccctcggcggcagtcagagcggcactaccagcggcgtggcggcaatggactacgactgggacggcgcggtggatgtgctggtgaccaaacagtcgggcagcgtgttcctgatccgcaacaccaacacggtgagctacggcacctcgctgcacctgcgcatcaccgatcctaacggcattaacgtctattacggcaataccgtaaaactgtacaactcggcgggggtgctggtcgctacgcaaatcatcaacccgcagtcggggatgggggttaacgacacctcggcgctggtcaacttctacgggctgaatgccggagaaacctacaacgcggtgctgatcaaatccactggcaccaccgccagcaatatcgaccagacggtcaacaccagctggggcggcttacaggccaccgatgctacccacgcttacgacctcagcgccgaagcaggcaccgcgagcaacaacggcaagtttgtcggcacgggctataacgacaccttctttgccaccgcaggcaccgacacttacgacggctccggcggctgggtgtacagctccggcaccggaacgtggctggcgaatggcgggatggacgtggttgatttccgcctctcgacggtgggcgtgaccgcgaacttaagcagcaccgccgcacaggccaccggctttaacacctcgacatttaccaatatcgaaggtatttccggctcgaattttaacgacactctgaccggcagcagcggcgataaccaactggaaggacgcggcggcaacgacacccttaacatcggaaacggcggtcacgataccttgctctataaactgctcaacgccagtgacgctaccggcggcaacggctcagacgtggtgaatggctttacggtagggacatgggaaggcaccgccgacaccgatcgcattgatatccgcgagttgttacagggcagcggctacaccggcaacggcaaagccagctacgtcaacggcgtggcaacgctggatgcgcaggccggaaacatcggtgattttgtcaaagtcacccagagcggcagcgacactatcgtgcagatcgaccgcgatggcacgggcggcaattttgcgacagctaacgtggtcacgctgacgggcgtgcacaccgacctcgccactttgctggcgaatcatcagttgatggtggtgtag

SEQ ID NO: 17560 - DNA, 414 bp, Escherichia coli
atgaacattagcgatgtagcaaaaattaccggcctgaccagcaaagcaatccgcttctatgaagagaaggggctggtgacgccgccgatgcgcagcgaaaatggttatcgaacctacacgcagcagcatctcaacgaactgaccttactgcggcaggcacgccaggtgggctttaacctggaagagagcggcgagctggtgaacctgtttaacgacccgcagcgtcatagtgccgacgtcaaacgtcgtacgctggagaaggtggcggagatcgaacggcatatcgaagaactgcaatccatgcgcaaccagctactggcgctggcgaatgcctgccctggcgatgacagcgccgactgcccgattatcgaaaatctctccggctgctgtaatgccagtcagttaagcaactga

SEQ ID NO: 17561 - DNA, 945 bp, Escherichia coli
atgatttttctcaagaatggcgaaagttttattcgcgtgaatgactgggcagaaattcaggcgagagagtcttactatcccaaattagagttaaatgatcagcaactctctgacgtttttggttactacgatgacctaccagaggaaattccatgtggaaaatcaaattgccgcaaagggcataaaaagggatttctggtagttacgaaagaaggatttgaaacgaatatcggccatgtatgtggaactaatgtttttggtatagcatttgataatttagcaatagaactttgccgaaaagcagatttccatcgcttacttaccgcacttaaagaggcaaaagatgatatttttagctattacaaactcaaagccaaaatcgaatctgggcgtccatcactaactgaggttgctcatagaatacttgacatgaaagaccctaaaatcatcgggcgtgcggcttatcaaacattgaaaaagatggctgcttctggtgatgggcgtgttttccgctcaagattaaaaaatacagaagagctagaactggacgaaattatgtcccagaagcaaacaagcgactcagctccaaaagttaacaacaaaaacaaaaccgtaaatgaacttattggggtaatacaataccctgaatgcttgctgaatgattatgacattgctcttctttatgaaagagatataaaaatggttctggaaaaattaaacaaatgtaccccagatgaattgactgaaagagaggtgttgtcttttggaataaaggtttcaagattaagagaacgctttaactttgttcaggaacgcttagaaaaatccagggtttttgcaacaagagaaaaccttaaacctttacgtgcattacttaacattcagaaatctgtaagcaataaagacaaattactatttaagaaatttatggaaaatttaccataa

SEQ ID NO: 17562 - DNA, 816 bp, Escherichia coli
atgaagcttgaggcatcgctaaaatacttcagtcctcagggaatgtatatcggcgacgatgtgaaaggaacctctccggaacgtcttacaggcaccgatgttatggcggctattggtaccaccagtaatcgtgagcggtttggcctggcggccttcttcgggaaggccggtatcagcaagactgatgagcagatggcagtccaggcgctggcgcgtcacgcgatggaaattgcaccgaagaatgtgcgtaaagcagctggtggtgaatttggctggtgtatgctggtactggctcagtttgcttttgctgagtattcccgatcggcggccaccagcgtaacatgccatagttgcagtggtaccggactaacaccccgtaagcaggtcattcgtaaggtttcatacccatggggtaaagcaccatattgggccagtcgctcccgtgctgttcgaccgtcagactgggaaaaatggacagaggtaacggaagttgtaccagtcgtttgcgatgtatgtaaagggaagggagtgataagtgccaggtgtcgttgtggtggaaagggagaggtactggaccgcaaagccacaagcgagcgtggtgtgccagtgtttaaaatctgcgagcgttgtagtggaaagggattcgtatctatcaaatcagctaatgttcatcgagctattcaaatatacattcccgatctgcaccagtcttcatggtcgcgcaattggaaaccattctatgaaaaattgattgatatcctgcatcaaggtgagcggcatgcggctagagaatttgagaaggcaacgagttactga

SEQ ID NO: 17563 - DNA, 141 bp, Escherichia coli
atgcaatatgccattgcagggtggcctgttgctggctgcccttccgaatctttacttgaacgaatcacccgtaaattacgtgacggatggaaacgccttatcgacatacttaatcagccaggagtcccaaagaatggataa

SEQ ID NO: 17564 - DNA, 681 bp, Escherichia coli
atgggaactgcgacattaatactcggtgaatctggcaccggaaaatcaaccagcatgagaaatatcaatccagaggaagcaatacttataaaaccaataggcaagccgcttccatttaaatcaaaagactggctggcatgggatgccagagcaaaaaaaggaaccgtagttaccactgacaaatgggacgtaatagttgccgtaattaagcgtgctcacgaatacgggaaaagaatcgttattgttgatgacttccagtatgtgatgagcaatgagtttatgcgccgctcagaagaaaaatcgtttgataaattcactgagataggccgccacgcatgggaggtgattaaggctgcacaggatgcacctgatgacctgagagtctattttcttgcacacaccgaagaaacccctatggggcgtgtgaaaatgaagactatcggcaaaatgctggacgagaaaatcactgtcgaaggcatgtttactatagttcttcgcacccttacccgcgatgaccagttctttttcaccacgaaaaacaacggtgcagacactgtaaaatccccaatgggaatgtttgattctaatgagattgataacgatctctctttcgtcgatgccactgtttgtgattactacggcatcaataatgttcatcaaattaaggaaaacgccgcatga

SEQ ID NO: 17565 - DNA, 222 bp, Escherichia coli
gtgagcgaaattaattaccaggcattgcgtgaggtggcggaacgtgcaattccagcaatggaatgcctgttaatgttgccagctgatgatgatttgttaagtgaacaggaactaaagattacggtgtggatattgatgcgctcaacgccttcaaatttctggccggaccagaaaccgtgctggcactactggatgaacgggaaagaaaccagcaatacataa

SEQ ID NO: 17566 - DNA, 339 bp, Escherichia coli
gtgctggcactactggatgaacgggaaagaaaccagcaatacataaaacgccgcgatcaggagaacgaggatattgcgctaacggtagggaaactgcgtgttgagcttgaagcagcaaaatcaaaactcaacgagcagcgtgaatattacgaaggcgttatctctgatgggagcaagcgtattgctgaactggaggagcgggaaatactgctcccggaacgtagcagcatgcttcatcgaacagattttcacgatgattaccaaacggtaatggcatacaaagtttctgaagtcatcgctgcaatccgcgtcgctggcattcgcatcaaaggagagtga

SEQ ID NO: 17567 - DNA, 537 bp, Escherichia coli
atgaccactattaccaaagaacgtattgaattgttcattaaaaatccgcttgaaaacgggcttacccgtggcgaacaaatggaactggcacggattgctctggcatcgcttgaggcagagccggtggcgtggaaggtaaccttcacgcaaattgaccgtgaatataacacgttcactggtatgtatcctgacaaagcagaagtcgaacggggggtgcggctgcataaagcatgtaattttcgggcagatataacaccgctttataccgctcagccagtgccggtaactccggatagttggataagctgtagtgagcgaatgccagaaatgggagagcgacaatgctatgtgttagctgctgactttaaaaacaactacccaccaagcatccccaacactcaggtcggcgtatatggcgactggtttaatgatggcaagcccacttgggatgacggtgatggcgaagacctgtatctcaaggaggtaacccactggatgccgctgccagaaccgccgcaggaagttaaccgtgactaa

SEQ ID NO: 17568 - DNA, 732 bp, Escherichia coli
atgattaacaatattgcaaatcagtcttcgtttccggctgcaacaatcgacagccagatgctgttgaaaatggttaacgaggtgcggaaattatgtagcgaaaagcccgttcgcaataatgatttcattgccagagttaaggatgagcttgaaggagagacctacgaaattttcgtaggtcagaaaaacggcgcagaaatagaagttataacaatgactttcaagcaagccctccgcgtcgccgcacgtgagtcgaaggccgttcgtcgttcgctggtcgataaactggaatcaatgcaacagcagttgcaacaaaaaacgaccacgaagaaatcaccggatggccttgaagaattccgtaaggcacgcgcattgaaaatgaccgtcgacacaatgaaggacctcttcgacttcctccctaaccttgcaccggaagctaaacaggtcgttgccgccagtctggttaatcccgtcgtcggctttaatgcaatccctctcccgattattgatgaacattactactctgcatcggaggtgggcaccatgcttggtatttcagccaacaaggtaggacgcattgccaacacctacatgctcaaaacggaaaagtacgggaagtggttcatcgacaaatcggcgcacagtgacaagcaggttgaaacatttcggtacaacgaggctggagtgcacaagatcgaggaactcatcgaaggagaacgaaaggctgcatga

SEQ ID NO: 17569 - DNA, 618 bp, Escherichia coli
atgaccagtcaactcatccccgtattcaacggcactatatccaacgaaaccgctcttctcgttaatgcccgtgatttacactctttcctcgatgtaggtaagcgatttgcttcgtggattgtcgaacgaattgctgaatatggtttcgttgaaaatcaagactttatgattatttcccaagttcgggaaaaaataggcagaggccgtcctgcaaaagactaccacctcaccctcgatacagccaaagagctggcgatggtcgagcgtaacgaaaaaggtcgtcagatacgccgatacttcatcgagtgcgaaaagaaacttcgcagcatgcaaccagcgcagcaattcacagacgaggaaatcatcctcctctgctacatgcaggtacagatggagaatgcacaggacatctgcaaacgcctgtacccgataatgaaggaacttaactcatcatacgcgagtaagctgtatgacattgcgtttgaaaccttctatgcggtgacgaaaaacagagatgtactgctcagggaggcgacacgacttgaccaggcaagcgccgttttcgaacgggcaagaccaatgttgaaaagccttcgggcgagacaattcgaattttaa

SEQ ID NO: 17570 - DNA, 1533 bp, Escherichia coli
atgtacaaagtccgagttttacaagaaatcaatgaccgactcgatgctgaatactataacccggcagcattgagcacgttgaagaagatggaaaccaaaggtacggttactacttttggggacctggttgacgaaggctatcgagtggtttaccacggtacagattctattaacggattaaaagattccgaggtacttccttttttatccccaacacaaattgatgccaatggttcaatcaatttcgaagatgctgataaacttcctctgtactacaaagatcaatatcctaaagggttaggaaaagctggcgagattttagtcgaagttaaaggtaatgtatcaaaagtgggtattgtcccttcagcgttcccaaaaaatttgatgataagtgggtctttgtataaagctactttgaaccccagaagagtagattcacactacgtactcgcattcttaaaatcgaaacacggacagatcctaaagaatcgcctaaccagcaacacaattattaactacattgctaaagatgcattgtattcaattccagttattgagcttaaagaaaaggcccaaaaatacatcggggataaagttcgccaagccgagcagttgcgcgcttgggcgaagtctatacagctaaaagtttcagagctactcccttcatacatcaatgaaattcaacgctataaagcaaaatgctatcgagcgaaagacattatacctgagcgcttagatagccttttttatcatcctgactacagcggtctggaaagtaaaatgaaagccaaaggctgtaagcgccttggattaattacaaaacaggttaaagatgcctggaataaaaagaaagccgaggcatttgagtattatgagatcggtggcttagacattacaacgggtcaagttttgtcagcaacaacgccaacagccggagcaccatcacgtgcaaaaactaaagttcaacaaggcgacgtgctggtttctacggttaggccaaatcgtaaaaatattggttttatagttgataatgtagcccactcagaaatggtcgcgacatctggcttcagtgttcttcggttttcatctttaacacaggctgctttttatcatgcctggctaagaactgatgatgcaaccgcccaactgatgcgctggaactcaggtagcgcgtatcctgcgattgatgatgatgttccgcttaatattattattcctgattttgaaaagacgtttgttgataactgggggcaaaaacttctcgatgcgcattttgcctatgtatacgcgaaaatgctaaccgaggcagctaaaaccctggtcgaagccctcatcgaaggccaactgactgagcaacaattaatccaggcccaacaggccctggaagatggcgagaacagcttagatcaggcgattttaagtaaactgagcgctgagggttatgccatagaaggcgccacaccgctatttagcgatgtggatgagttatacagtttgctggaagaggcggcgcaagcggaggctgaagagtaa

SEQ ID NO: 17571 - DNA, 984 bp, Escherichia coli
atgactcttgtagatagtgtcgaagcaggtaggctaacgattagtgaattgattgatgccctggcgaaagataaaaattacacagcttccagatggtatcagcgataccgtgcgtttacgactttgctacagcaaacctcaacttttgctgagcctgcaacagatggtctggtcaaacagctttggtatgagcgtgacaacggcattgcaagtattcgccagggcgttccatccttagcagaatatcagcaaagcctgccactgcttagagaactaactgaacgaattcggcaacagccggatgaagaaacttaccaatatgttggcaatgcacttcaacaagctaaagaaaacggacttctcaagcgtatgtattggagtttgagaaatcgcgtctttgccgcgttctcgccagaaaactacaccagtactgtggatgagaatgcttttaataaagcagcagaattcttaaatcagcacttccatctcggtttggtactgaccggaaattggttacagaaaaactatgaattgaaacaagccatacacgcccaatctcctgatacagatccttattatgtgaatatggccatctggcatctctatgaattgctccgtgaacgcgataatgaacaaaagcaggagaaagtagctagcactacatccataacccgcagtgagcccatcgagaacaagatcatcctacattcaccaactaacgtgatcttctttggcccccctggcactggcaagaccttcaggttgcagcaaaaaatgaaagagtacacttctcatgctgttcccgctgatcgtgatgcctggctggattctcgccttgaatcgttgaactggatgcaggttataacgctggtgctgctcgatcttgggaaacgagcgaaagttcgccaaattattgaacatatgtggtttcaacgtaaggcattattaaacggtcgtaatggcaatctatcgaatactgcctag

SEQ ID NO: 17572 - DNA, 324 bp, Escherichia coli
atgctggtacctgaggcgctacgctatcagacctacaaaacctgcacgttagccctttgtaggccagataagacgcgtcaacgtcgcatctggcataaacaaagcgcactttgctggtctgttcccctcaccctaaccctctccccggaggggcgaggggactggccgggcacatttttagactttgtcatcagtcagagcctgccaatggcaggctctggtgttcttttacgctaccacgctaataatcagcacaataatcagcccaaccacggagttgaccagctccagcagaccccaggttttcaacgtgtcttttactga

SEQ ID NO: 17573 - DNA, 258 bp, Escherichia coli; identical to SEQ ID NO: 2020

SEQ ID NO: 17574 - DNA, 1761 bp, Escherichia coli
atgagtgtggaaaagctgatcgttgatcatatggaaacctggacctcggcgttgcaaacccgttccaccgccgggcgcggcagctccggtaagattgatttatatggcattaagaaattacgtgagctgattctggaactggctgtgcgcggtaaactggtgccgcaggatccgaatgatgaaccggcgtcggagctgcttagaggaatgaaaaagcagcaagaagacttaattaaagaaagaaagattaaaaaaccgaaaaagcttccgtcaatagatggaactttagaatcaatttccgtgccgcaaggatgggagttgtgttatctgaatgatattggcgattggggggctggagccacaccaaatcgtacaaattctggatactacggtggagatattccatggtttaaatctggtgaattatctgaagattacataaccgattcagaagaacatattacagcattggcattaaaagaatgttccttacgcgacaaccagcctggggatgtattgattgcaatgtatggggctacaataggcaaaacatcaatactcaactctcgttcaacaactaatcaagccgtctgcgcttgtacccctttcgatggtttatcaaatcagtatctgttgatcttccttaaggctagtaagaaagtatttacagccatgggagcaggtggagcgcaacctaatatttctaaggaaaaaatcgttgccaccctgtttgcattaccacctctcaatgaacaattgagaattgtaaaaaaggtcgagcaactcatgtccctctgcgaccaactggaacagcaatccctgaccagtctggatgcacatcagcaactggttgaaaccctgttgggaacgcttacagacagccaaaacaccgaggaactggctgaaaactgggcgcgtattagcgagcatttcgacaccctatttaccaccgaagccagcgtggatgcgttaaaacagaccattctgcaactggccgtaatgggtaaacttgtgccgcaggatccgaatgacgaaccagctgaaaacttatttaatcggctttgcattacacgtaatctgtctttacagaaccagttgaaaaacaaagaagccgatataatgcttcgtaaaataaaaaaaacaaaacccgtaactcctcctttcaaattacctgaaaattggatttgtactaacctaatagaaatttgtgaatatttagttgactgtcataacaaaacagctccttatgtagatgctggtattcctatcatacgaacaacaaatattcgcaatcgtaactttcaggaacaagatttaaaatttgtaaacaaagaaacctatgagttttggtcaagacgctgtacaccacagcccggagacatcatatttactcgtgaagcaccaatgggtgaagctttaatcattccacctaatgttcagtggtgcttaggtcaacgaactatgcttattagagtcatgcacgaattcatctcaaatgaatttattttgcttgcacttacagaaccactcttattagaaagagcttcaaaacacgcggtagggttaacagtgaaacatttacgggttggagatgttgaaaccttaaatattcccttaccccctctcaacgagcaatatcgaattgtggcaaaagtgaaaatattacttagtctctgtgataaagctcagaaaaaaataaaatccgccaaacaaacccaactgcaccttgcagacgcactgactaacgcggcgataaactaa

SEQ ID NO: 17575 - DNA, 141 bp, Escherichia coli
atgtccacaatgaaagtattaatttgtcaggaaataaagaatttagtatgggaagtccgggaaagaccggtgccaggcgataatgaagcattaattaaaattaaaactgtcgggatttgcggtacagatattcatgcctag

SEQ ID NO: 17576 - DNA, 741 bp, Escherichia coli
atgactacaaaactcagttatggatttggagcgttcgggaaggattttgcgatcggcattgtgtatatgtacctcatgtattactacaccgatgtcgtcgggctgtctgtgggtttggtcggtactttgtttctggtggcgaggatctgggatgctattaacgatccgattatgggatggattgtaaatgctacgcgatcgcgatggggtaagttcaaaccctggatcctgatcggtacgttggcaaactctgtaatcttatttctcctctttagtgcgcatctgtttgaaggtactactcagattgtctttgtttgcgtgacctacatcctctggggcatgacttacaccattatggatattcccttctggtcgctggttccaaccataacgctcgataaacgtgagcgcgaacaactggttccttatccgcgtttttttgccagtctggcgggctttgttacggcaggtgtgacgctaccatttgttaattatgtcggcggtggcgatcggggatttggctttcagatgttcactctggtactgatcgccttttttattgtttcaaccatcatcactctgcgcaatgtgcatgaagtcttttcgtcagacaatcagccgtctgctgaaggaagccatctgacacttaaagccatcgttgcgcttatttataaaaacgatcagctttcatgcctcttgggtatggctcttgcttataatgtagccagcaatattaggtaa

SEQ ID NO: 17577 - DNA, 213 bp, Escherichia coli
atgacagtgcgggagggcgggcctcccggcggattattgcgttggttgttgtttgacgacattaatcatccacggtacgccaaatttatcggtgactttgccgaagccatgcgcccagaaagtttactgccaggccatttcgatttttccgttggcggcaagattgtcaaaccagcgtttcccttcttcgacctgttgcgaatcgagcactag

SEQ ID NO: 17578 - DNA, 822 bp, Escherichia coli
atgagtgctatagaaaaccaagaaacagttatacaagcagttaatagtttacatccaacaacgttgtttcactttactaaaaatgaagaggcattctatagcattttaacagaactctattttaaaccatttcttgcccgtgaacgcatagtcggagtaaaaggaagaagaaatttcgcagtaccaatggtttcattctgtgacatcaagctttctcagattaaagatcatagtggaaaatatggtgaatttggatttgggttaacaaaagaatgggctgagaaaaatgatctccatcccgttctatacatgaatcaaggcagtgaattattttcaaagtataataaaagaattagaaaactaaaggatgcgttaattccgctatggtcgaaaaggcatatccttgataataaagagcgtaagtattttgaaagccttaaagaagagtacgctgacctttataatttattacgctatatgaaaaattataaagggaaattagaaaggacgaacgaaaaaaccattgagaattatatctacgctgacgaaaaagaatggagatatgtaccgcatccgtttgttggcgatttatggcctagcctaaatttagagcgagtggtggaacctaaccagaaggccgtcttaagtaaaaaattctctgaatttggcattggtttttctttcgatgatattaaatatatacttatacctgatgatagccacgtttccaatttgataaattgccttatgagtataagaaattatgatccttatataataagtaaagttttaacgatggataaagtaaaacaggatttctaa

SEQ ID NO: 17579 - DNA, 129 bp, Escherichia coli
atgaaaggtcagatcgatatcgaactccaaagattgatacgggcgcggtataacaccgcggtagaaaattggagtgaatggaaatggttagaaatcgggcatggcgtcgtcatcatatatctcggttaa

SEQ ID NO: 17580 - DNA, 4764 bp, Escherichia coli
atggtcaaaccaaactgggataactttaaagctaaatttagtgagaatcctcaaggtaattttgagtggttttgctacttgttgttctgtcaagaattcaaaatgcccgcaggtatatttagatataagaatcaatctggtatcgaaactaatccaataaccaaagataatgaaattatcggttggcaatctaaattctatgacacaaaattgtcggataacaaagctgatcttatagaaatgattgagaaaagcaaaaaggcttatccaggattaagtaaaatcattttctatactaatcaagagtgggggcaggggagaaagtcccatgaacctgaaggcgataagaacgctgataattatttggaaactgtcggaaatagtaacgatcccaaaataaaaattgaagttgatcagaaagcatatgagtcgggtatcgaaatagtatggagagttgctagtttttttgaatcaccgtttgtaatagttgagaatgaaaagattgctaaacatttcttctcccttaatgaaagcatctttgatttattagaagaaaagcgcaagcacacagaaaatgttttatatgaaattcaaaccaatatagagttcaaagacagaagtattgaaattgacagacgacattgtatagaacttctacatgagaatctagttcagaaaaaaattgtcatcgtcagcggagaaggtggggttggaaaaacagcagttatcaaaaaaatttatgaagcagaaaaacaatacactcctttctatgtctttaaggctagcgagtttaaaaaggacagtattaatgagctattcggtgcgcatggcttagacgatttctctaatgctcatcaagacgaattacgtaaagtcatagtcgtagattctgctgaaaagcttttagaactgaccaatatcgatccttttaaagaattcctgactgttttaataaaggataaatggcaggttgttttcacaacccgtaacaactacttggcagatctgaactatgctttcatagatatttataatataactcctggaaacttagtaataaagaaccttgaacgcggcgagctaatagagttatctgataacaatggatttagccttcctcaagatgttcgattattagaactaatcaaaaatccattttatctaagtgaatatttgaggttctataccggtgaaagcatcgattatgtgagcttcaaagaaaagctttggaataagattattgtcaaaaataaaccttctcgggagcagtgtttcttagcgactgcttttcagcgggctagtgagggccaattttttgtctccccggcatgtgatactggaattttagatgagttagttaaagacggaattgtcggctatgaagctgctggttacttcattacacatgatatatacgaggaatgggcattagaaaagaaaatttctgtcgattatatccgtaaagcgaacaataacgagttcttcgaaaaaataggagaatcacttcctgttcgccgtagttttcggaattggatatctgaacgattgcttttagatgaccagtccataaagccttttatcgcagaaatagtctgtggagaaggaatatcaaatttttggaaagacgagttatgggtagctgtccttctttccgataattcaagcatattttttaattactttaaaagatatttacttagtagtgaccagaatctattaaaaagacttactttcttattgaggcttgcttgcaaggacgttgattacgatctgcttaaacagttaggtgtaagtaattcagatctgctttccattaaatatgttcttactaagcctaagggaactggttggcagagtgtgatccaatttatctatgaaaatttagatgaaatagggatcagaaatattaattttatacttcctgtgattcaggagtggaatcaaagaaacaaagtgggtgaaacgactcgattatctagtttgatagccctaaaatattatcaatggactgtagatgaggatgtctatttatccggaagggataatgagaaaaatattctgcatacgattcttcatggggcggccatgattaaacctgaaatggaagaggttttagttaaggttcttaaaaataggtggaacgagcacggtaccccatatttcgaccttatgaccttaatccttactgacttagattcatatccggtttgggcatctctcccggaatatgttctacaattggcagatctgttctggtatcggccacttaaagaaacaggcgaacgttatcacagtatggatattgaagatgagttcggtctatttaggtctcatcacgactattatccagaaagtccatatcagactcctatatattggttactacaatcacagttcaaaaaaacaatagactttattcttgattttacgaacaagacaacgatatgttttgcccactcccattttgctaaaaacgaaattgaagaagtcgatgtctttattgaagaaggaaagtttataaagcaatatatatgcaatcgtctgtggtgctcatatcgaggaacacaggtctctacctacttactttcatcaattcatatggcattggaaaaattttttcttgagaattttaaaaatgcagactcgaaagtgttggaaagttggcttcttttcttgttaagaaataccaagtcagcttctatttctgcagtagttacgagtattgtacttgcattccctgagaagacattcaatgtagctaaagtactattccaaacaaaggatttcttccgttttgatatgaatcgaatggttctagacagaacacataaaagttcattaatctccctcagggatggctttggcggtacagattacagaaactctttgcacgaagaagatagaattaaagcttgcgatgatgtgcatagaaatacttatcttgaaaatcttgccttgcattatcaaattttcaggagtgaaaatgtaacggagaaagatgtcattgaaaggcaacaagtgctctggggtattttcgataaatactataatcagcttccagatgaagctcaagaaactgaagccgataagacgtggaggctctgcttggcaagaatggatcggcgaaagatgaaaataactaccaaggagaaagatgaagggattgagatatcattcaatcctgagattgaccctaaactaaagcaatatagtgaggaagcaataaagaaaaactccgagcatatgaagtatgtaacgctgaaactatgggcaagctataaaagagaaaaggatgaacgttataagaattatggaatgtatgaggacaatccgcaaattgctttacaagagaccaaagaaataataaaaaagcttaatgaggaagggggtgaagatttcagactattaaatggtaatataccagcagacgtttgttctgtattactgttagattactttaatcagttgaataatgaagagagagaatattgtaaagatattgttctagcatattctcaacttccgttgaaggaaggctataattatcaggtacaagatgggacaacctcggcaatttcagccttacccgtgatttatcataattatccaatggaaagggagactataaaaacaatattacttttgacactgtctaatgaccactctattggaatggcaggtgggcgctactcagtatttcctagtatggtgattcataaattatggctagactattttgatgatatgcagtctctattgtttggttttttgattttaaagccaaagtatgtaattctttcaagaaaaatcattcatgaaagttatcgtcaagtagactatgacattaaaaaaataaatattaataaggtgtttttaaataactataagcattgcatatcaaatgtcatcgataataaaatatctatagatgatttgggaagtatagatatagttgatctacatattttgaacacagctttccaattaattccagttgatactgttaatattgaacataagcaattggtttccttaattgttaaaagattttctacaagcctattgtcaagtgttcgagaagatagagttgattacgctcttcggcagtctttcttggaaagatttgcctactttacgcttcatgcgcccgtgagcgatattcccgattatataaaaccttttcttgatggtttcaacggttcagagcctatttcagagttatttaaaaaatttattctcgtcgaagatagattaaatacttacgccaaattttggaaggtttgggatttgttttttgataaagtggttactttgtgcaaggatggagataggtattggtatgtagataaaattataaaaagttacctttttgctgaatctccatggaaagaaaactctaatggttggcacacatttaaagatagcaatagtcaattcttttgcgatgtatctaggactatgggccattgcccttcaactttatattctcttgccaaatctttgaataacattgccagttgctatcttaatcaaggtataacctggctttcagaaatgttgtcggttaataaaaagctatgggaaaagaaattggaaaatgatactgtttattttttagaatgtttggttaggcggtatattaacactgagcgtgagcgaattagacgaaccaaacagttgaaagaagaggtcttagtaatattggattttttggtagagaaaggatctgttgttggttatatgtcacgggaaaatattctgtga

SEQ ID NO: 17581 - DNA, 261 bp, Escherichia coli
gtgactgcctatcaaacaaagaaagaggcgcttaaaggccgtggccccaaaaatccgcgtccagctagtttgaacattgcagccgcgaggattgtgaatcttgaaagcgaaatcgaagagcttaaggaagagaaccggaggtacaaacaacagtttgtgatctggcaatacaatgcatacaaatatggaatgacagaacatcaacttaatgcgcagctgacaaagattgaccgtgagcgctctgatggagaaagaagatag

SEQ ID NO: 17582 - DNA, 2034 bp, Escherichia coli
atggctgagattttcctgtttaagccaaaggctacgctgacagcagcagaaaaccttgaagcattcatatcccagtgccgagatcaattgactgtattcggctctgatctcacttgggaagatcctgtttggccaaacataactgtatttgccaagttgggcattattacgagaaaacccatactggaagagacgcaagaccctgctttcattgattttgccaaagcctatttccgttaccagcaggggcatagcctctctagggcaaagaatgaaagtaaagccctccgtgcggttgaggcggctttgcttcaagtaaatggaaacgcaaatattgatggcctgtcgatttctgtgctggatgaagcagctgaattggcaaagcattactactccgatggctccgcatatcattgtggccgtgagattgagcggctggctaagtttgtagctgaaaaccagcttgtatcaagtgctgtacaaaattgggtcaatccaattaaacgtgcagaggataagaacaaaacgagcagaaaggcgaagaaaaatagggaagataaacttccgagtgatattgctcttaatgcgttggcggaaatttttgccaacgacccaattcatgagcgagacatatttacaacatcggtttttgccatgttgatgtcggcaccttcacgtattactgaggtgttagcactgcctgtggattgcgaggtttttgaaacggatcgtgaagggatagaacgatatggttggcgtttttttgcggggaaaggctatgagggtgatatcaaatggatacccaccgtgatggtcggtatagctaagacagccgtagctagagctagagtgctctctgaaaatgcacgacaactggccaagtggatcgagaaacacccgaataagttttaccgccatgctaactgtcccagtgtagccgatgatgagccattgacgatgaagcaggtttgtatggcgctcggttttgcacattactctaaaaagacgtgcaggtcgtgtcttggtaatcgaggtttagctaaagaggatggtgtacatactctaaatagcctgtggcagcacacaatggcgcgtttaccggatggctttccgtggtttgataaagacaagggaattaggtacagcaatgccttgtttgtactgaacgtaaatcagttccacgggaacagaggatgcataccagttgagttacataagccaaccaataatttcttcaacagtgatctgacgcctcgtctgtccttgaaaggaaaacatgccagtatctttgatcgccatggttaccatgctgtaaacggagagccggtgaaattaacctcacatcaggctcgacacctgctcaacaccattatccagcgcggtggcctgtcaaacttggaaattgccaagtggtcggggcgggcagatgtgaaacagaatcgaacttacaaccacatgactgaatacgaactggttggcattgctgaacgccttgatcccacaacagcgctatttgggcctgctggcgaggtggcaaagcatctgcccgtgactatgcaggagttcaataccttagagcatgccgcagtccatgtgacggagtatggctactgtgtgcatgattacaccatgagtccttgtgagaaattccgagattgcgtcaattgtaccgaacaggtttgcatcaaaggcgatgatgctgaaaagttggatcgcattaagatacgtctggagaaattagagcgactgttttttcttgctgacgcagcagtggaaagtggtgagataggaactgatcgctggtatcagtaccacaagaaaactgttacccggcttcgtgaactagtggctattttagagaatccagacattgaaaatggtgtccagattaagctccggggcaatgatttcagccagcttcgccgtgttgtcgcaaagacgtctattgtggccatcgagcaaaaaggcaaagaaagtgaagaagctgtgatgttagatgatttgacaactttgttaggaggtggccttggctaa

SEQ ID NO: 17583 - DNA, 459 bp, Escherichia coli
gtgattgcggaactgcttgaccacgcggacacccaaaacgcaggcgtttacatcaagaatatccccgagcatgtgaaaaagcttgatgaggcggttggcttccaattagcaccatacgctcaggcctttgtcggggcacttgtcgattcagagagagacgcgcatcgaggtaacgaccctaccagtcgtattcggaccgaaatgggtcagggtgttggtacttgtggagaacatggcttttgtggtgccaatgttcctattccttgctacacctgcatgcatttccagccttggctggacggcccacatgaagatgtctatcaaggactgctcaacgaacgtgaacgggtgaaagagataactggcgacatccagattgctgccgtacttgatcgcagtattatcgcgctggcagatgtgatcatgcgttgtgcaaaacgtcgtgaagagcttagttaa

SEQ ID NO: 17584 - DNA, 216 bp, Escherichia coli
atgtggcgaatgttagatacccgtggtggaacctgggtacaactcgtgaaagacaataaagaaggcaacgggggggcggaatcccacattgcctcccttccaggggtcaatccggaatatttttatgctattagccgtactatggggcagttccgggattgtgtttatatcgtgaatgaaaatatcacgtttattccagcaactatcagaaaatag

SEQ ID NO: 17585 - DNA, 555 bp, Escherichia coli
atggggctatttacccaactggaaaaatttgaccaaaagcttacgcgcggttatgcccgctgggggcgctgggtatggcggacgttaattgtcgttccagtactggtcgtgttgtggaatataggacaggcagtatggggaggaccaagaggtggagtgattctggaaatccacagtgaaattgaccgtccgatactgggattcagtgttaacggcgtggcgggcgcgaatgcttttgcgaatggtggaggttcaacaacctgttgtggtgatgtcagtggggatacggcagaggtcatctggacattaagtactactcgtacacagtataatgctggaatgcgtctggagaaacggaatatgacgttacctctccccaaaagagaatggggagaagattttctgcatgtgcattttatgcctggcgataaagtgttgttggggtggagtaaagattctttttctccgtatgaagatcttcacaacggggggtacaagacccgcgttcggcaggatgtgaaggataaactttatggtacagggaaaatgaattga

SEQ ID NO: 17586 - DNA, 276 bp, Escherichia coli
atgacttataccaccaggatgcacttgactatgataactgaaactgaaattaacgtactgaaagttatggctgagaaagatataaactggaactggatgaatctcgatcgcacactatccataaggcaaattccaggattcggtaatgttgttaacattgttaacaaattagctaacgagggtttggttattattgaggatagcggacataagtctatgcctcactaccacgttactgaaaagggatacaatctcgtgaaaagtgagaataaataa

SEQ ID NO: 17587 - DNA, 804 bp, Escherichia coli
gtgccactacatctcccctgctttcttgtactttcggcctgtaccgttgatatcagccagccagactcatcagccacagtggtaaatgccgaggcgaaaacatgggctgttaaattccagcatcaaagctctttcaccgaacaatcaataaaagaaataacggaaccagatctcaaacccggcgatttgcttttttcctcaagccttggggtaacctcatttggtatccgcgtattcagcacttcctctgtgagtcacgttgcaatctatttgggagataacaacgttgccgaagcgacaggcgctggcgtccagattgtttcccttaaaaaagccataaagcatagtgataagcttttcgtcttacgagtcccggatcttaccccgcaacaagccacagaaatcaccgcgttcgccaacaaaattaaagatagcggttacaactatcgcggcattgtcgaatttattccatttatggtgactcgccagatgtgctcactaaatccattctccgaggattttcgtcaacagtgcgtcagcggcctggcgaaagcgcagttaagcagtatgggcgaaggagacaaaaagtcgtggttttgttcggaatttgtcactgatgcatttgccaaagccgggcatccgcttacgctggcgcaatcaggctggattagccctgccgatctgatgcatatgcgtactggcgatatctctgcgtttaagccagaaacgcagttacagtatattgggcacatgaagcctgggatttatatcaaggcaggccgctttgttgggctgactcggtga

SEQ ID NO: 17588 - DNA, 837 bp, Escherichia coli
atgatgaagacattcttcaaatactttctttttttagtactatcctgttcttgctttacagcgattggcaatcctacaagttttcttgttggtaacaatgccggggtaggcaatggtaattttaaaggaccgagcactgcggctcaggtcacttttagatatgcatcaacaaccaataatttagttttttataaacctactcaacttggcccgacaggtgttaaattgcgctgggaacaattagatacagccagcggtggcggttttctttactgtaatgcctctgacagggcaaatccagatggactaatggatattgaaaatgccatggttgattctggtaaaacctatggtggacataagttatttaaaacctctgtcccaggcttgtattacactctatttattgcaaaactttggtctgcatattcaacaaaaacaactattagcgactctggtttatatgttggagataccacaccacaaaaattccagtggatcatcacagaccctgatctacaacataacggctgcgataacgcgatatggtacgatagattctgggccatcggcggtattgtacacgatcttacgattgaattttatactgataccgattttaaccctacaacaaaccagcaagtatcattgtccagctcatcgacatatctttacgcttttaaggcctatagtcccagtactcgtgtcgttgatcacagtcatcacctttatatcgactttgatctcctcaatgttaaattaaccaaccccacctgctttactgctgtacttaccggtgaaccgccccgggtttcctggagagtgttttatctgtga

SEQ ID NO: 17589 - DNA, 8511 bp, Escherichia coli
atggcagggaaagcgcatgggaatggcgatcgtcggggcgataacaccatatgtggattgggggatcgtttacgtcgtctgaccgccggtatttgcctgataacacaaactattttccctgttatggctgctgcccctacgcatattaatcctgcgcactcggatactgccgcgtcactgatcctgccgaacgttaaaactattccatataccctgggtgcgttggaatcgccaccaacggtcgcggcacgctttggtatcaccgttgatgaattacgtcgcctgaatcagttccgtacctttgcgcggggctttgacaatgtgcgtcagggcgatgaaatagatgtgcccctcattaacagtaacagccctgaagcgcgcaacctgaaagcaatgcagatggagcgcgatggcaaagatccgcaaatgcaggtcgcggaagtggcgcagcaaagcggaacacttttagcgcgcgatatggacagcgaacaggctgcaagtatggcgcgtggctgggtggcttcttctgcctctgcgcaggcaacggactggctcagtcgttggggaactgcccgggtatctcttggtgtggatgaagatttcagccttaaaagctcgtcatttgaatttctccatccctggtacgaaacgccggataacctggtcttcagccagcacacacttcaccgtacggatgatcgcactcaaaccaaccacggtatcggctggcgttatttcacatcgagctggatgtctggcgtcaatatgtttatcgatcatgacctgacccgctatcacacccgaaccgggatgggcgttgaatactggcgcgattacctgaaactgagcggcaacggttatctgcgcctcagtaactggcgtagtgcaccggaactcgacaatgactatgaagcacgtccggcgaacgggtgggatcttcgcgccgaaggctggttaccggcctggccgcagctgggcggcaagctggtctatgaacaatattatggcgatgaagtggcgctgtttggtaaagacgagcgacaaaatgatcctcacgcgattaccgcaggtttgagttacacccccgttcccctgatctcctttagtgccgagcaacggcagggtaaacagggggaaaacgacacccgaattggtatggagttgacgttgcaacccggccattcactgcaaaaacagctcgatccggctgaagttgcagcacgacgcagccttgtgggcagtcgctatgacctggtcgatcgtaataacaatattgtcctcgaatatcgcaagaaagagctggtgcggctgacgctgaccgatccgttgaaaggcaagccgggtgaggttaaatcgctggtttcttccttgcaaaccaaatatgcgctgaaaggttatgacattgaagccgcctccctgcaatcagcgggcggaaaagtagcagtttccggcaaggatattcaggtcactattcctccctaccgattcacggcaatgcctgaaaccgacaacacttacccgatagcggttacagcggaagattcgaaaggaaatttctcccggcgtgaagaaagtatggtggtcgtggaaaaacccacactaagcctcaccgattcaacgctttctgtcgatcagcaaatcctgcttgctgatggaaaatcaacctcaacgctgacctataccgcgcgagattccagcggcaagccaatcccaggtatgacgttaaaaacacaggtgaaaggtttgcaggatttcgccttaagcgaatggaaagacaacggtaacggaacctatacccaaatagttaccgccgggaagacgtctggcgcgttatcgctgatgccgcaatttaacggcgacgatatcgctaagacgccagcgctgattgctatcgtggcgaatacggcatcccgcgctgactccacgattgagacagaccaggataattacgtcgcgggtaagccgatagtcgttaaagtgaccctgagagatgataacggcaacggggttaccggacgaaaagaacttctcaaacaaaccgttaaagttgacaacacgaaggctgatgacgttagtgcctggacggaagaaagtgagggaatttacaaagcaagctatacggcccatctcattggcgacaaattaacggcccagctgacgatgcccggctggcaaaccaaacattcggatgcgttcagtattgcgggtgataaagataccgccaaaatcgctgcgatgcagatcaccgcgaataacgcagttgccagacgcgatcacaataccgtcgctgtgacggtcagggatgtgcatcaaaatttactgcagggacaaaatgttaccttcacggtcgtgaatggtgcggcggtttttgccgatccaaatggcggtattgtgacgacagataaagacgggattgccagcgttaaccttgccagtgaccaggcggtaaacagtcttatcaaggccgagatcaatggcagtagtcagtctgtggaagtgagctttattactggcgatatctcgcagctgacctccaccattaagacagacgatgtgtcatacaccgcgggtggcaagataaaagtgtcagttacccttatggatgagcagaaaaaccgggtgaaagggatggcttcgctgctggcgggtagcagtgtggtcgaggtgagcggtacagataaaaatgaaacgggtaactggagcgaagagtctgatggcgtttacaccaccacccgaaccgcgaagattgctggcgatcgccattacgccacgctgaaactatcgacatggagtagcgcgcagcaatccgatgcgtatgccatccgcgaaagcggagctgtgctggcttattcctccatcgttaccgacaaaacggcctacaccgcgggcggcgcgataaaagttacggtaacactcaaggatagctatgaaaacctggtcggggggcaacgagacgctatcaacctggctatccagctgccaaatacaaaagcggaaagcatcgcctggaatgaagatcaaaaaggaatttataccgcaacgtataccgccttactccctggcaccggtttaaaagcacagctacagatgtccggctgggcgaacgctctgacttcaaatgattacagtattagtggcgatgccgccagcgcacaaattgtcgcgatgcaagtgacaacgggtaacccggatgtgctggcgaatggcagcgatcgacatacggtgaatgtccgggtggaagatcagtttggcaatgtgctgccggagcagaccgtcacctttacggtgacgaagggggcggctgtatttgccaatgcagggcagagcgcagatatcaggacggatgcgcatggcatggcagaggttgatctgagcagtaccgtagcggatgccagcactgttgaggctaagatcaatcaaagcagcgatagtaaaacggtgaactttgttgctgatgttagcacggcgcaagtcgcggagctggtggtgacgcaggacggctcagtggcagatggcgcgacggcgaacacgctgcgggcgagggtcaccgatgcgttcgggaatgcacttgccgggcagacggttagcgtgttggcaggcaacggcgcaacgactgctccgacggtcaccacgcagccggatggcacggtggagatcagtgtcaccagccagaccgccggaaccagtgtgatcactgccagcgtcaacaacagcagccagagccggaacgtgacgtttattgcggatgtcagcacggcgcagatcgcggatctggtcgttagccaggataacgcggtggcagacggcgcgacggcgaatacgctgcaagtgagggtcacggatgcgttcgggaatgcacttgccggacagacggtcagcgtgttggcggataacggcgcaacggtcgctccggtggtcaccacgcagccggacggcacggtggaaatcagtgtcaccagccagacggcgggcagcagtgcggtcaccgtcagtatcaacagcagcagtcagagccgggacgtgacatttatcgcggatgtcagaacggcgcagatcgcggacctggtggtcattaaggacgactcagtggcagacggtgcaatggcgaatatgctgcgggcgagggtcaccgatgtgttcggtaatgcgcttgccgggcagacggtcagcgtgatggcggacaacggtgcagcggtcgcttcgacgatgaccacaaagccggacggcacggtggagatcagtgtcaccagccagacggcaggagtcagtgcagtcactgcaaccatcaacagcagtactcagagtcagaacgtgacatttatcgccgatgtcaggacggcgaagatcgcggatctggtggtcattaaggatggttcagaggcggacggttcgacggcgaacacgctgcgggcgagggtgaccgatgcgttcggcaatgcgcttgccggacagacggtcagcgtgttggcaggcaacggtgccacgactgctccgacggtcaccacgcagccggacgggacggtggagatctctgtcaccagccagaccgccggaatcagtgcggtcaccgccagcatcaacaacagcagccagagccggaacgtcacgtttatcgccgatgtcaggacggcgaagatcgctgatctggtggtcattaaggatggttcagaggcagacggttcgacggcgaacacgctgcgggcgagggtgaccgatgcgttcggtaatacgcttgccgggcagacggttagcgtgatggcggacaacggcgcaacgactgccccgacggtgatcaccgagccggacggcacggtggaaatcagtgtcaccagccagacggcgggaaccagtacagtcactgccagtatcaacaacagcagccagagccggaacgtgacgtttatcgccgatgtcaggacggcgaagatcgctgatctggtggtcacccgggataactcagtggctgacggcgcaatggcgaacacgctgcaagtgaaggttaccgatgctaacggtaatacgcttgccgggcagacggtcagcgtgttggcggacaacagcgcaacgactgccccgacggtaatcacagagccggacggtatggtggagatcagtgtcaccagccagacggcgggcaccagtgcggtcaccgccagcatcaacaacagcagcctgagccagagcgtgaagtttattgccgatgtcagcacggcgcagatcgcgatgctggaggtgacgcaggataacgtggtggcagacggcgcaatggcgaacacgttgcaggtgaaggtgaccgatgcgttcgggaatgcactttccggacagacggtcagcgtgttggcaggcaacggtgcaacggttgccccaacggtgattacagagccggacggcacggcggagatccctgtcaccagccagacggcgggagtcagtgcagtcactgcgaccatcaacaacagcagccagagccggaacgtgacgtttgtcgccgatgtcaggacggcgcagatcgcggatctggtggtcattaaggacggttcagaggcagacggtgcgacggcgaacacgctgcggctgaagatcaccgatgcattcggtaatgcgcttgccgggcagacggtcagcgtgttggcggacaacggcgcaacggtcgctccgacggtcaccacgcagccggacgggacggtggagatctctgtcaccagccagaccgccggaatcagtgcggtcactgcaactatcaacaacagcaccgcgagccagaacgtgacatttatcgccgatgtcaggacggcgcagatcgcggatctggtggtcattaaggacggttcagaggcagacggtgcaatggcgaatatgctgcggctgaagatcaccgatgcattcggtaatacgcttgccgggcagacagtcagcgtgttggcaggcaacggtgccacgactgctccgacggtcaccacgcagccggacggcacggtggagatcagtgtcaccagccagacggcgggagtcagtgcagtcactgcaaccatcaacagcagtactcagagtcagaacgtgacatttatcgccgatgtcaggacggcgcagatcgcggagctggtggtcattaaggacggtgcagtggcagacggcgcaatggcgaacatgctgcaggtaaaggttaccgacgcgttcggtaatgcgcttgctgggcagacggtcagcgtgacggcaggcaacagcgcaacggtcgcttcgacggtgaccacaaagccggacggcacggtggagatcagtgtcaccagccagacggcgggcaccagtacagtcaccgccagcatcaacaacagtagccagagccagaacgtcacctttgtaccttgtgatgcatcgcggctcacttcaaccgttgaaacaaataagtcgaactatacggttggagagacaatcaccatcacggtaacgctccgggatgcgttcgataatctggtaaccggtgcagcttcacagttagccgctgatggtgtgctgacggtggctggcactgacccgtcagaaacgggaagctgggttgaatcaggtggcgtgtataccacaacccgaatggcgacgattgccagtaccaatcagcacgccaacctgcaattgcagacgtggagtgatggcgtaacgtcagatcgctatgacatacagtccggttctccggcgcaagccacatcaactatcgctacggataaaaacgcctacaccgctggtgacactataaccgtcgctgtgacgctgaaagacgcgcacggtaacctggttgaagggggcgagtccttattgtctggtgataacgtaacagtagaaggagccgtacgttcaggaggatggtctgaaaccgccggtgtttatactgctacatggtcggcgcaaatggcgggagactctcaccacgcgacgctgaagttgtctgaatggggcagcagtaaacaatcagagagttattccatccacagcggtgctccggtgcaggcaaattctgctatcaggacagataaatcggcatatatcgccggggagccattaaccgtcacaataacgttgcgggatgagtttggtaaccctgctttagggctgacatcagaagtcatcgagtcttatattgatagtttcgcggtaggcggcgcaactcccgattctatgcggtgggtcgagcagaataatggtgaatataccattgtctggacagcatgggttgccgaggaaaatctggttgccagtctgaaattaaaaacatgggcaacggagattaagtcctcgttatacggaatacaaccaggtgcagcggcaaaaaatcaatccacgattgtcgcggacaaaacgatatatatcgctggggatagcataacggtgaccgttgttcttaaagatgcccagggtaactttattactgatggtgttgttcagcttaatgaggaaaacgtacaagtcaggaatgcggatcctatccagggcaataattgggtttacaacggcaatgggcaatatcaaagacagtatatggcgcattttgcggaagcgaatttgaatgcgcaactgaagatggctggttggagcgatgccaattattcaaacaattacactatcaaaccaggtgaagtgagtccgcttggttcacagcttcgtatacgagaagttttagtagtggaaggggcggatttacctgtcagtgttttattagttgatgattttggaaatccggtggataacggtctggatttgctggatgatacagtgtacttacaaaatgtagaaaaaaaagaaggggaaaaatggagatatgtgggtgatggcatatatgaacgtacatatatggcctaccaagaaggagaaaatttaacttcatttatggagattaaaggttggcgtatatacggacaaccatcctataccatccttccttttgtggaagtcgagttgctgagtgttaatggtgtaaaattcagggcgacagatggttttccggaaacagggtttgatggtgcaaaattcacgctgttactaacccataatatgaaaaatacggattataattggacggctgggatttatggaattaatgttgacagtaatggagaagtaacattatctgtgctgataagaagtgaagttactattaccgggaaacccaagaatggtaaagggaatgatgttgtatttaaattcaagattaaaaaatggtttactagtttaggtgctaccagtagtaatacctgggatatcataaacacttcatgtagctatggtcaaatgccgtcatctttagaattagcgcagcggccaagcggtggggtagtaccgcgaaaagtaggtacgttgtggggcgaatatggtaatttaaaaacttatgggaacgcttttagcggtacggattattggacaagcactcagctcatgggagtacacgagaaatttaatcctgaaactggtatatcagagcttgggacaggaaagtcttctggcttgtgcgtagagtattattaa

SEQ ID NO: 17590 - DNA, 1737 bp, Escherichia coli
ttggatgccacaacaataattagccttttcatcttaggatccatccttgtcaccagcagtatattacttagttcattttcttcccgtcttggcattcctattctggttatttttctggcgatcggcatgctggcaggagtcgatggcgtcggcggtatcccgtttgataattaccccttcgcctacatggtaagtaacctggcgctggcgattattttgctcgacggcggaatgcgcactcaggccagttcctttcgtgtggcattaggaccggcactgtcgctggcgacgctgggcgtgcttatcacctctggtttaaccggcatgatggcggcgtggctgtttaatcttgatttgattgaaggcttattaatcggcgctatcgtcggctccaccgatgctgcagcggtcttttctctgctgggtggtaaggggcttaacgaacgtgttggctcgacgctggaaattgaatccggcagtaatgatccaatggcggtctttctgacgattaccctgattgcgatgatccagcaacatgaaagcagtgtcagttggatgttcgtagtcgatattctgcagcaatttggcctcgggattgtcatcggtcttggcggtggttatttactgctgcaaatgattaatcgcatcgccctgcccgccggattatatccattgctggcattaagcggcggtattttaatttttgctttaaccacggcgctggaaggcagcggtattctggctgtttatctgtgcggttttctgctgggtaatcgcccgattcgcaaccgctacggcattctgcaaaatttcgacggcctcgcctggctggcgcaaatcgccatgttcctggtgctggggctgttggttaacccaagcgatctgctgcctattgccattccggcgctcattttgtccgcatggatgattttcttcgcccgtcctctttcggtatttgccggattgctaccattccgtggcttcaatctgcgtgagcgcgtgtttatcagctgggtgggattacgcggcgcggtgccgattattctggccgtgttcccgatgatggcggggctggagaatgcacgtctgttctttaatgtcgccttctttgtggttctggtttcactgctcttgcagggaacatcactctcgtgggcggcgaaaaaagccaaagtggtggttccgcccgtcggacgtccggtgtcacgcgttggcctggatattcatccggaaaatccgtgggagcagtttgtttatcaattgagtgccgataaatggtgcgtgggcgcggcactgcgcgatttgcatatgccaaaagagacgcgtattgcggcactgtttcgtgataaccagctgcttcatcctaccggcagcacccgactgcgcgaaggcgatgtattgtgtgtaattggtcgggaacgcgatctcccggcgctcggtaaactgttcagccagtcgccgccggtcgcgctggatcaacgcttctttggtgacttcattctcgaagccagcgccaaatatgctgatgtggcgctgatatatggtctggaagacgggcgagaatatcgcgataagcagcaaacgctgggtgaaatcgtccagcagttgttaggcgcggcaccggttgtcggtgaccaggtagagtttgccgggatgatctggacggtggccgagaaagaagataatgaagtgttgaagattggcgtacgggtggctgaagaggaagctgaatcttaa

SEQ ID NO: 17591 - DNA, 1374 bp, Escherichia coli
atgaatcaacaactctcctggcgcaccatcgtcggctacagcctcggtgacgtcgccaataacttcgccttcgcaatgggggcgctcttcctgttgagttactacaccgacgtcgctggcgtcggtgccgctgcggcgggcaccatgctgttactggtgcgggtattcgatgccttcgccgatgtctttgccggacgagtggtggacagtgtgaatacccgatgggggaaattccgcccgtttttactcttcggtactgcgccgttaatgatcttcagcgtgctggtattctgggtgccgaccgactggagccatagcagcaaagttgtgtatgcatatttgacctacatgggactcgggctttgctacagcctggtgaatattccttatggttcacttgctaccgcgatgacccaacaaccacaatcccgcgcccgtctgggcgcggctcgcgggattgccgcgtcattgacctttgtctgcctggcatttctgataggaccgagcattaagaactccagcctggaagagatggtgtcggtataccatttctggacgattgtgctggcgattgccggaatggtgctttacttcatctgcttcaaatcgacgcgtgagaatgtggtacgtatcgtggcgcagccgtcattgaagatcagtctgcaaaccctgaaacggaatcgcccgctgtttatgttgtgcatcggtgcgctgtgtgtgctgatttcgaccttcgcggtcagcgcctcgtcgttgttctacgtgcgctatgtgttaaatgataccgggctgttcactgtgctggtactggtgcaaaacctggtcggtactgtggcatcggcaccgctggtgccggggatggtcgcgaggatcggtaaaaagaataccttcctgattggcgctttgctgggaacctgcggttatctgctgttcttctgggtttcggtctggtcactgccggtggcgttggttgcgttggccatcgcatcaattggccagggcgttaccatgaccgtgatgtgggcactggaagctgataccgtagaatacggtgaatacctgaccggcgtgcgaattgaagggctcacctattcactattctcatttacccgtaaatgcggtcaggcaatcggaggttcaattcctgcctttattttgggattaagcggatatatcgccaatcaggcgcaaacgccggaagttattatgggcatccgcacatcaattgccttagtaccttgcggatttatgctactagcattcgtcattatctggttttatccgctcacggataaaaaattcaaagaaatcgttgttgaaattgataatcgtaaaaaagtgcagcagcaattaatcaacgatatcactagttaa

SEQ ID NO: 17592 - DNA, 933 bp, Escherichia coli
atgaccatgaataacctcttacttgggttagtaccagaacgaatccgtgccagggccaatggctactcttttctgttgtatgacacatcgtggacattggatagaaatatcactattaatcttgctgatattcaccattacttgtcagatgggacgctagatggctgcctgcgtacactggcgttttatgcatccaatcgttcttcttctcatacaaaaaatattcttgaacggtttcagcacatgctgcgtgagactgacgcgagagaaattactgatacggtattgattaattatcggtcgatgctgtcgcctgcaacagaatggtatctagcaaccatccgtggctttcttcgatcctggcacgaactgggctatcccggcatcagtaaggaggtgaaccgcttgctagatggctggacgctaaagggtaatcgtaagggggatgcggttaagcgcatggatcctcaagaggggccactgacggataatgagctgacagcgtttaacgagggggctgttcgggcttatgaaaagagcttaattactatagctgagttggctatagcacttggcaccagtcatacaggacgtcgtcccattcagatctcgctgcttcgtgtggtcgatgtcctttgtggtaaaaatggaaagggagagcccttctatgtgttgaatgtgccgcgagccaagcagcgcagcagctctttccgaataaacttcaaaccatttgcaatatcactggaactatgggcaatcctgagtgctcaggcaagaaatgcgattgcgcaggttgaaaatcgtttggggtttgaattgcaggaagatgaccggcagcaaatccctctttttcctgatcttgatgtgttagatgccgtccaatctccttatgaattccgccaactgaaccgccccgggaatcctggagactaa

SEQ ID NO: 17593 - DNA, 1269 bp, Escherichia coli
atgtttatggggtgtgagtgcatggaaaagaactacagagttacaacatttgtcatggatagtggcgagcgctattgcatggtagtggatcgtgcttctgggcttcccatgtattaccccactctgtttctaacaactcaaatccgcaatagagaggatgctttttcaacgatgttggcggcggctaacaacctggttatgttgttacgctttgtagagagtcgcgacattgaccttgagcagcggtttttgaccaaagacttcttcaagccacatgagctggatgatctgcgagattttgctcagtgcaaacaaagaaaggggccattaactgtgtcctctacctcttggttggccgatgcgatgaccgatatcgttgataacgggacacagcattcccggctaacaacgtttgccaactatttacactggtatgcgatgcatatcttaaagacgacagaactggaagttgtcgaaaagatcaatgctatggcggcgcagataaagacgcgccgaccatctaaaaagcgcagaaaccacgacttacaagacaggtcattgagtgatgttcaattggacgcgctatttgaagtcatccagcctagatcagagttaaaccctttctcaatagatgtgcagcgccgcaatcggctgatgatcttacttctgttttatcttggcatccgaggtggtgaattattaaatataagaatacaggacatagattttagcgctaacaggatccgtatcgttaggagagcagatgaacaagctgactctagaaccaatgagcctaatgctaaaactagagaacggctcttaccgttggctgaatccttagctcaagaactgcatagttatatccttcaagatcgccggaaagtcagaaatgcgaagaaaaatgactatctgtttgtaacttacaagagtggaccaactctgggaaatcctatctccaaagggggatatcataaaattttttccgtagtcaggtctatatcaccgcaattgtatgcagcgacaggacattcgctccgccacacttggaatcgcaagttttcagaaagaatggatgccatgaatgagcaagtcagcgaggaacgccaagagcaacttcgttcgtacttaatgggctggagagatggctcgggaaccgcagcgacttacaacaagcgtttcattcggcaaaaaggttttgaggccgccttggcattacaagcaggtaacggcactagcttgccagaggacttcaaggatgaccatgaataa

SEQ ID NO: 17594 - DNA, 651 bp, Escherichia coli
atggtccagaacatcatgtcagcttacctaaaaaaagcgttatcgattcatagtgatgaatttcgcccatacggaaacgtaatttctgcaataaatgtagattcattgcttaaataccttaaagaggaaatttctgtacctgaggatcaggtggcatatgtcagaagcgatgagcgcttaaagcaataccccgccgtgagcgacattcagcgccaaatctacggtggaatgcccgttcaggctgggtacgtttgtggggtaaataccacccaggatggctttgaatatcaccagggaagtgaagtcattatcgccgccagcgattttttcctgtttttaggtaaacgagagttgatgcagggtgacacgtttaatggtgaacgtgcagagccgtttttcattccggcaaaatcggtgattgaactttatagcacaacgctacattactgccctatgagtatcaatgcacaaccttttagtgcagcgattattcttcttgatggaactaatgaagatattgatggcaagaataaaccaacaatattaagcaagcgaaatacctggtttatcgcccatgaaagtttcactgagcatccttgcccattattaaaagggccgcatctttgcgtgaatgatattattcatgggtga

SEQ ID NO: 17595 - DNA, 2655 bp, Escherichia coli
atgaatgattcgttagcacaggcacgccaaaactttaaaaatcctgatgtatggcacctgcctgcaacctactggttctggcataccattccggacaaaaagcagatcgacagccaactgaggcaactgcaggcgggagggtatggttcatttcagatagccgcacgtctgagtcttccgctggagagttatctcagtgaggagtggctggcagcctgtcgctacacggctgataaagctgccaatattgggctgatgatgggcatctacgatgattacaactggctttccgggcacgccgggggaaggaccgttgaagggagagatgagctgcgtgagcgccatcttttctggagccagtccagccggtctgcagatgtactgacatgtcacctttccgggatccgctctgcggatgcgcaggcgctacagcagtgtggaatggagtggatttttgctggcggtaaaccggcgtgggatgaatgggaaattgtcgcagcgtatgccacctcttcatcaggggagtgcaatgcagatgaaattgttgatgtttcttcattggcccgcatcaccaaagcaaccacagaggaatttgaggtcacctttacgggaagcgacctgccctggggtgcggaaacggtagtgacgctctttgccgcggcgcgttgcttgacctcacggatgattaattacctgatgcccgaagcggcagaaaattttattcgtgtcggctatgaaccttacgcccgcgcttttggcgatcattttggtaagacggtggcgtatctctttttcgaccagccacacgcctgtttctggcaatggaatgaacatactggcgcggtcaaatcctccttaatgtatgaaaaaaggtttgttgatgcattgcaacaggcaccttactgcctggcagaaaacctgatgtcgttagttatggacattggcagtcgtaccgcacgtcggcgctgtgagctgctttcctgttattccagccaggcgatgcaggccttttttggtacgttgtcagaatgggcgcaccagcggggaatacagctaagtggtcatgaagtattaggtcacgttagtagctggaatttcgccagtaaaatcatcaccgaagataaccggtgtaattttgctatggattactttgctctcgatggctggcgggatattacggctgtcgattcgcgaaatagcgagccgcagatggcggcgaaggttggcgactctgtggcgcgcgctcatgggcgtaaagggtgcattgttgagcaatattatgcgcgggtgaagccatgcacacattttgctgccgggcagtgggaaatttcactgcatgacatccggttgcaggcattgcgccatcacctcctcggtgcgcggcaatttttgatgcacgcgttctggctgacggatggcgaggcaaatgacgacgtattaagtaacccgcgttttgattttgcgccgggcgttaacttccagccctggtacgccttccacgctgggtttgctcaggaatctggtcgccttgccgaatttcttgagcagggagagccgtacgttgatgttggcgtactctatcccaaacggactttctggcactgtggcgtggatggcaacgaagggcagtcaggcgaatattgggcaaaacaactcagcgctcagggatttgaatatttctttattgatgaagagaatttgctccaggctgatggaacgcgcattaacggcatgaatttccctgcgcttctgttagcggacgttaaggtggtgaaatcagccgccacgctgagccaactggagcactttgtcgccgctggtggccagcttctgatcgccggcgagcttgcggcatatagcgaggaaaaaggtgaagatcgttctctcaccgaaaggctgcaaaaactgattgaggcgcaaccgcagtgcagcacgttagccgacacgctgaaaaacgatcacccctttgttgactatccctcccggaaaactgccgtctggacgcgaattacccaggatgaaacatcgcgttacgtcagcgtatttaacgacggagataccccgctctacggctggctacattttccgggcctcagtgggcagttgtcggagtggcatcttgcaacgggagaggtttcagtgctggaagagcatctcacgggaagttatccgctacaaatcgagccctggcaggcccgttgcttttcattgcaggtagtggaaagtcgccacgaggtggtgctggataagcactggcaactgctggttgataacgtttcccgacccgttgaggtaacaaaagggtgggagcagcaggggatggagacgtggtgtggtccgggacattatcagttacgctttgcgctggagacgattaccgacgatattgagctttatttaccgcaagtgcagggaagcgttgctatctggcttaacgatacgttaattgccgaaaagggctggccggaatatcgtttcaccttgccacagtctttactaaaaaagcgtaatgaactggcggtcgtggtctacccatcggcagcgaatcattattattttgcgagtgcatggcaggggaatgagtgggatcgctgcggtctgaccatgccaccacgcgtgcgaacaaaagacagcgtggcggtaattgccgggtaa

SEQ ID NO: 17596 - DNA, 816 bp, Escherichia coli
atggcaatgacgatggttgggctgggctttctcaactatggcggtgatttcgcccgttacctgccgcgcaaaaccgctgccgggaaagtgattttctggacgtcgcttgggatttcgcttccggtttccatcctgctaattttaggtgccctgctggccgacagtaacccggaactgagcggagcagcagcgtccgaaccgattgcggccttaacctcgttcctgccattttggttctatgtgccgttttcaatcgtgatcatcatctccctgctggcggcagccattacaggtgtttacagctcaggcctcgcattgctggcaatgggcgttccagccagtcgttcaaccaccactgctatcaatgcggtcattatcgcattcggtgccttctacttattgtttgtttctgactcgttcctcgcaacctttcagtcttttctggcaacggtatccgtcgtattgggatcgatgggcgcaatccagcttgtcgactttgcccggcaaaaacgcttgcactggaacactgatatggcgcagcccgcggggcttggcgggcgtaacggtcgctggacggcattattatcgctgtttgttgcatcggttatcggcatgggaaccatcacctcaggcgatccgtggattgctcacctggtcggcttcttactgacggcagaaaccaaaaccagcgtgtttgcgacagcaaatattggcgtagtggtggcgatgctggtgggcgcggcgctgtatgccattttgacatacatttgtcattgtgatgttccgccgattaagaagggggaaagccatgaatga

SEQ ID NO: 17597 - DNA, 627 bp, Escherichia coli
atgacgagccaagcccagaacccatctgatgtttcaggtacgatgaaggtggaaaccaatggggtaaacccggttagtgataacgaacgttatggttcgcctgccggacttttcccgatctggttttcatggaatgtatccatcctcggtattacctatgggatttatgtttactcactggggttaagcctctggcaggcgattgttgccggtgtcgtgggctattttttatccagcacgctggtgggggttctggccgttggtgggccacgcaccgggctgcctaccttaacgcagacccgatttgcctttggttatcatgggaataagatccccactttatttgcctatatttccaatatgggctggaaaatcaccattattacgttgtcctcgaccactggcgccgccctctttgcccggttatggccaaccgtatttgcagcagaaaacggtcaccctaccttagggtgcctgttgggctggttcgtggtgaccttagtattgactatgtccgttgccatctacggccaccagctcatcatgaaggtagaaaagtatattgcatggttaacgggcggaatgagcatcatctttattatcctgatcctgccgcatattcactga

SEQ ID NO: 17598 - DNA, 1218 bp, Escherichia coli
atgtttgggaaagaaagacaacgtcaaatattggcatatttgaataaacatgagcgggctacggttaatcaactcgccatcttattctctgtcagtaaagaaacgatccgtaatgatttaaatttattagcggagcaagggggtgttgagcgttgtcacggcggagcaataatattgcgtcggattttccattctcagcccgttaataacgttggtacctctattgaaaagttcctcaatcaggtcaactggcgaaaaaactcgatgacaaacaaaaaagggaaaataatgataagcaaagtttgtatattaggatcttttaatgtcgatattattgccaaagttgatcgcttccctaaaagcggcgaatcaattcttgccagcaataccatcattggacctggcggcaagggcgcaaaccaggcgatggcagccagcaaatgtcccgtccaggtacacttcgtcggcaaagttggcaacgaccatttcggccagatggcgcatgatcatctctcttcatccgatatccgcagctttaccctctaccaggacgaagagcataaaacaggaagcgccataatatatgtttcggagcctgcgggtgaaaataagatcgcgatttattctggcgccaatcaatatatcactgaagcggaagttgccagtattgcgggtgagttgacggacgccaaaatatttttgacacagttggaaaataactttgaagcaaccacgctggcactaaatatggcacatcggtcgggcgtgaaaactatccttaacccagccccttattctgaccaggcaaaagaatgcctgcaatatgttgattatctgacaccgaatgaaacagaagcgtcgctgatgtccggtgtcgagattaatgatatcgagagtgcgaaagaagcggcgcaaaccataaaatccctgggggcaaaaaacatcattattacgatgggttctcaaggggcgctggtttatgacggtgaacaatttacccatattccagcgttaaaagcagtaagtattgacaccaccggtgcgggggatgcgtttaacggtgcgtttgctgcggcgattgcgcagggccagccgttgctcagtgcagcaaaatttgcctctgcgtttgcttctctggcggtcgagcgggaaggcgcatcgaacatgcctgagtatgaagccgtactatcacgtcttgctcaatatgagaggaaataa

SEQ ID NO: 17599 - DNA, 1518 bp, Escherichia coli
atgaacaggaccagtccctattattgtcgccgctcagtactttccttattgatatctgccttgatatatgccccgcccgggatggcggccttcactcctgatgttattggtgtggtaaacgatgagactgtagatggcagccaaaaagtagatgaacgaggtacaacaaataacactcatattatcaaccatggccagcagaatgtttatggtgggatatctaatgaaagtcttattgaatctggtggatatcaagatataggacgtcataacaattatgtggggcaggctaataatacaaccattaacgggggcagacagacaattcatgacgggggtatttccacaggtacaataatcgagagtggcaatcaggacgtttatacaggtggtatcagcaatggaacgacaattaaggggggtaattcacacataagtggggggactgcgaatggaacaatcattgatggtggcagccaacgagtaacaactcaggggcatgtcgacagtacaacgataaataagtctggctctcaggacatcacgcaaggaagtctggcaacgaacacaaccataaatggtggtcgacagtatgttgaacagagcacagtagaaacaaccaccatcaaaaatggcggtgagcaaagagtatatgagagccgtgcgctggacactacgattgaaggcggaactcagtctctgaatagtaattcaacggcaaaaaatacgcagatctattctggtggtacgcaaattgttgattacaccagcacctcggatgttattgaaatttattccggtggcgtgcttgatgttagaggtggtatggcaacaaatgttactcagcacgatggagccgctttaaaagtaacgacttacgatttgacggtgagcggtacgaatagtgaaggggcattctccatccacaataacgtggcagacaatgtgttgctggaaaacggtggtcatttagacgtatatggttcggcaaccaggacgataattaaagataaaggaacaatgtcagttttaacgaatgctaaagctgatgcgacccgaatagataatggcggggttatggatgtcgccggaaacgcgacaaataccataattaatggtggcacacagaatataaataatcatggtattgccacgggaaccaatatcaacagcggaacacaaaatatcaagagcggcgggaaagctgacacgacaaatatctcctccgggagccggcaggttgttgagaaagatggtacggcaactggcagcaatattagcgccggaggctcgctgattgtctataccggcggtattgcacatggggttaaccaggagacgggcagtgctttagttgccaacacgggcgcagggactgatattgaaggatacaacaagctctctcacttcactattaccggaggggaggctaattatgttgtgctggaaaataccggcgaactgacggttgaaccgccccgggaatcctggagactaaacttcctgagaaagaggtaa

SEQ ID NO: 17600 - DNA, 1185 bp, Escherichia coli
atgactaaacctaatcatgagcttagcctggcgctgatcgtgctgatgtctatcgccaccggtctggcggtagccagtaactattacgcccagccattgctcgacaccatcgcgcgtaacttttccctttccgccagttcggcaggctttattgttaccgccgcgcagttgggctatgccgcaggtctgctgtttcttgttcccctcggtgatatgtttgaacgccgccgcctgattgtctcgatgaccttactggcggcaggcggcatgttaatcactgccagcagtcagtcgctggcgatgatgatcctcggtacggcattaaccggtttattctcagtcgtggcacaaattctggttccgctggcagcgacgctggcttcaccggacaaacgcggcaaagtggtcggcaccattatgagcgggctgctgttggggatcttgctggcacggaccgttgccggattgctggcgagtctaggtggctggcgaactgtcttttgggtcgcttcggtattaatggcgctgatggcgctggcgttatggcgtggtctgccacaaatgaaatcagaaacccacctcaactacccacagttgttgggttccgttttcagcatgtttatcagcaataagatcctgcgcacccgcgcgttgctgggctgcctgacctttgccaacttcagcattctctggacctcaatggcctttttgcttgccgctccaccttttaactacagcgatggtgtaattggtctgtttgggcttgcgggagctgccggagcgttgggcgctcgtccggcgggcggttttgccgataagggcaaatcgcaccacaccacaactttcggtctgctgctgctgttactttcatggctggcaatctggtttggtcacacttccgtactggcgctgattatcggcatcctggtgctggacctcaccgtgcagggcgtgcatatcactaaccagacggtaatttatcgaatacaccctgatgcgcgtaatcgcctgaccgcaggttacatgaccagctactttattggcggtgccgccggttcgctaatttcagcctcagcctggcaacatggcggttgggctggcgtttgtctggctggagcgacgattgccctggttaacttactggtctggtggcgaggttttcatcgtcaggaagccgcaaattaa

SEQ ID NO: 17601 - DNA, 906 bp, Escherichia coli
atgcttccatcggaaacgatgatctggcagcctgagttcacagataaaacactctccaggaaacccggggcggttcagcttggtacgctgtccaacctgtgggaggcaatgacggggaccgcaactaacggccttgcggctattggcggcgcattttctggtgacgccaaaaatatcacgcaatggctgggggagttgggggaaaaattcacgaagtttgcggatgaaaatccccgggttattcgcggcgtcgtcgggcttgctgccggtcttgcgattctgaaactgggattgatgggcgttggcagtgccatcagtattgtcagcaggctcatgtcgatgacgccgattggcatgattgcgacggcgatagccctggctgcgggattaattatcactaactgggatgttgtcggaccttattttaagaaactctgggaaaccattggtccttattttgagactggctgggaactccttaagaaagtttttgcctggtcgccgctggggatggtgatcaataactgggggccggttgttaagtggtttcaggatatgtgggacaagctgaagccaattattgagtggtttaccgacagttccggtgacacggtcgatgccattaactcggtgcagtggggggcgggtgcttatgatgcttatgggacgggaataccggcacggggatacacaccttatccggcggtagatccggctcagtcaaacaacgcctccgatgccacaggcccgaatcccttcatgattaacaaagcttctgcgccaaaagttgatggtgagatcaaggtctcttttgtgaattcgcctccgggtatgcgggttatggaaacgcgatccagcggttttgatgtcagccatgatgttggctatacgcgctttggcaggtaa

SEQ ID NO: 17602 - DNA, 174 bp, Escherichia coli
atgctaatggccatggtggtggaggcggtggtgcctgtgtctacggtggagcgacgcagcagcgtgccggaggtagcggaatggctggtattgcaatcatttgggagtatgcgtgatgaactatgccgttatagaaaatggtgttgttaccaatattgctgtatgggatggtga

SEQ ID NO: 17603 - DNA, 1539 bp, Escherichia coli
atgcaacagcaaaaaccgctggaaggcgcacaactggtcattatgacgattgcgctgtcactggcgacattcatgcaggtgctggactccaccattgctaacgtggcgatccccactatcgccgggaatctgggctcatcactcagtcagggaacgtgggtgatcacttctttcggggtggcgaatgccatctcgatcccgcttaccggctggctggcaaagcgcgtcggggaagtgaaattgttcctctggtcaaccatcgcctttgctattgcgtcgtgggcgtgtggtgtctccagcagcctgaatatgctgatcttcttccgcgtgattcaggggattgtcgccgggccgctgatcccgctttcgcaaagtctattgctgaataactacccgccagccaaacgctcgatcgcgctggcattgtggtcgatgacggtgattgttgcgccaatttgcggcccgatcctcggcggttatatcagcgataattaccactggggctggatattcttcatcaacgtaccaattggcgtggcggtggtgttgatgaccctgcaaaccctgcgcggacgtgaaacccgcaccgaacggcggcggattgatgccgtggggctggcactgctggttattggtatcggcagcctgcagattatgctcgaccgcggtaaagagctggactggttctcatcacaggaaattatcatcctcaccgtggtggcggtggtggctatctgcttcctgattgtctgggagctgactgacgataacccgatagtcgatctgtcgttgtttaagtcgcgcaacttcaccattggctgcttgtgtatcagcctcgcgtatatgctctacttcggcgctattgttctgctgccgcagttgttgcaggaggtctacggttacacggcaacgtgggcaggtctggcctctgcgccggtaggaattattccggtgatcctgtcgccgattatcggccgcttcgcgcataaactggatatgcggcggctggtaaccttcagctttattatgtatgccgtctgcttctactggcgtgcctatacctttgaaccgggtatggattttggcgcgtcggcctggccgcagtttatccagggttttgcggtggcctgcttctttatgccgctaaccaccattacgctgtccggtttgccaccggaacgactggcggcagcatcgagcctctccaactttacgcgaacgctggcggggtctatcggcacgtcgataaccacgaccatgtggaccaaccgcgagtcgctgcaccatgcgcagttgactgagtcggtaaacccgttcaacccgaatgcccaggcgatgtatagtcaactggaagggcttgggatgacgcaacagcaggcatcaggctggattgcccagcagatcaccaatcaggggctgattatttctgccaatgagatcttctggatgtcagccgggatattcctcgtcctgctggggctggtgtggtttgctaaaccgccctttggcgcaggtggcggcggaggcggtgcgcactaa

SEQ ID NO: 17604 - DNA, 288 bp, Escherichia coli
gtgagagaaactaatgaggtagcattagccgtaaggaaatatgcaaaggaaatcggaataccaattattacagataaaaaattagcacgaaaaatttatgctacccatcgtcgctacgattatgttagcttcgaaaatatagatgagatcttgcgtcttctgctgtggcttgaagatgtggagaatgctggacaacctgttccagatgaactgctcccctcagaagataaattcaaagaaggtgaagacacaaaaagcgagaataaagacaataatttaaaaaattaa

SEQ ID NO: 17605 - DNA, 708 bp, Escherichia coli
atgcgaaaaaaaatagagatgagcttgataaactctcctgcaaatggtgttgtgattaaaagaataatttctgatggattgaaagaaatagtttctctaaaagaacagatccttcttgaaaccaccgcaaaaattcagagtattgaggaaaagagagaagaaaaaattattcaaggttattatgatggctatgcgaaaggcattattgatgtgatggataattttatacccttgataagtttgctgagctcagaattagaaaaaaacagagtaaacatgataaacgatctgaagagcatattgttaaaatcttcagaggaagttgaagtttttatcaaaatttttgaaagttgggtaacaaaattaccgtcaatatcaggccctttaaatctctatatacctaccagtttcaaagataagtctattgaagtagagtcattttttgtcgataagtcaatatggaatgtccatatttcatatcatgatgacaaacgttttattttttttacagatcaatttattgctgaatttagtccgcaggaatttgtggataattgtgagcaatatttaattagcaatcactgtttttcccctgacaaggttaatgaaatctgtgaacatgccagacattatttagttgaaagaatgtgtgaaatagattctttggcgatgaataattctgatttgacgaacccagagggcttatag

SEQ ID NO: 17606 - DNA, 633 bp, Escherichia coli
atgggaaagattaaaattgtagtttcagatcagcagccgtttatgattgatgggataattggatttctcggacattatcccgatttatatgaggttgttgggggctataaagatctgaagaaagctatagcggagtgtaacaaatctgcagcccaaatatttattttaggagaatttgcaggtggaatgatggggtccgaactcataaaatgggttaaatcgcataaaatagatgctcatattattacatttgtagcaaaaatgccgtatattgattcaataaaattgcttgaagccggtgcgaaaggatgcgtatggaaaaccagtcacccggcgaaactaaatcgcgctattgattcgattagtaatggttacacttattttgatagtgtacatatggattgtgaaaaaatatcttcaagatattcctctgataatcaacttacaaatcgtgagtctgaaatactacaactcatacctgatggaaaaacaaacaaagaaatcgctaatttcttgcagttaagcaggaaaacagtcgaaactcatagactcaatatcatgaagaaattagatgttcacagtggtatcgagttgatcaaaacagctttacgtatgggtgtttgcactatataa

SEQ ID NO: 17607 - DNA, 1377 bp, Escherichia coli
atggacttagaaaataaattctcatatcattttcttgagggattaacgctcacggaagatggaattcttactcaaggaaatgagcagatttatattccaccgaaagagttaggagtattgatcgtattacttgaatccgctggtcatgttgtcctgaaagatatgatcatcgaatcagtatggaaaaatattattgtaagtgacgagtccctgacaagatgtatctattctttgcgctgcatttttgaaaaaattggctatgatcgttgcatagaaacaatctaccggaaaggttatcgtttcagtggacaggttttcaaaactaaaataaatgaagataacacttcagactattccatagctatatttcctttcaccacttcattgaataccctggatccattaatacttaatcaggaattagtgcaaaacatttcggataaaaaaatcgatggcctttatacctatccgatggctgcgacaaatttttgtaatgatcacatatcgcaaaattcatttttgagaagattcaagccagattatttcgttacaggaagaataaatcagaataacgcggtgaaaactttatacattgaactgatcgacgctaaaaatcttttcctcatcgccagtaatcatcttcctgttgatgaactacataacacatcacaatttattatagataatatccttcaaacggtacataatccagagcgttctgtaagattagctaaaccgaaccaaggttacaagaatcattatttatcagatgaactgttggctggtaagaaagaactttacgagtttactcctgaaagcatttacagggctatggctatatttgatggattacaaaataaaagtgatatacagacgctaaaaatagaatgttattgtctgctagcggaatgccatatgtctttggcacttcatggaaagtatgaacttgaacttgctgctcaaaaagcattagagcttttacattatgtatcagacataaccaatgtcgatggaaaaattttagctattatgggactgataactggtctgtctggacaagcaaaagtatctcatatcttatttgaacaggctaagatacacacaactgatatagcctctctctactactatagagcacttgtcaattttcataatgaaagaattgaagaggcaaggatttgtatagacaaatcactacaactcgaacccagaagacgaaaagcagttgtgataaaagagtgtgtagatatgtatgtgcctaacccgctcaaaagcaacatgaaactctactataaagaaacttcgagtgaaagccatcgagttataattgacaacattttgaaactaaagcaactaacgagaatttgtatgcgataa

SEQ ID NO: 17608 - DNA, 438 bp, Escherichia coli
atgaagccacgaaatattaataatagcctaccactgcaaccattagttcctgatcaggagaacaaaaataagaaaaatgaagagaaatacgtgaatccagttaaaattacgatgaggtctggtttaaattatattgaacaagaatctcttgaaggaaaatatctaacacatggtttgtcaataaagatagcggatatttctgaagaaataattcagcaagcaatattatcggctatgagcatatataaatttccgataacagatgatttaatgagtatggctacaaatgaactcataaaactggccaaaatagagaataatttagacctgaataaattctctactatatgcaccgacgttctatcccccctcgtcaccagacataataaagaaaaaaaccagacgacttactacccttcgcaaaaatcccctttttaa

SEQ ID NO: 17609 - DNA, 705 bp, Escherichia coli; identical to SEQ ID NO: 6883

SEQ ID NO: 17610 - DNA, 705 bp, Escherichia coli; identical to SEQ ID NO: 6883

SEQ ID NO: 17611 - DNA, 1116 bp, Escherichia coli
atggttacgccagtaagcatcagcaattacatatctcttcctgatgattttcccgtacgtaatattgcaccgcaggtaaaagaagttttaaaggatttcattgatgcacttagtacaataatatgtgatgaagagtggcgcacgtctttaaacatcaactcagccacaaaaaagatatttaataaccttgacaacttatcatatattcagaggacttcttttcggggtaacgacacgctatacaatgaaaaggttcagtttaaactcacttatcccgtcaagaatggaagacacaaagaaaatattgaatttcaggtagtaataaatttaagccctatttatttggataatttccgccatgatggggaaattaatattttttgcgctcccaacccaaagcctgtcactatggggcgcgtatttcagaccggcgtcgagcgtgtgctctttctgtttctgaatgactttatagaacaatttccaataatcaaccctggcgttcctatcaaaagagcgcatacgccacatattgaacccctgcatccggatcaccataccgctgcagattacttacgccagtttgatttgcttgtcctgaattttatctctcgcggtaattttgtcatactcccccgattatggaataactctgaggttcacagatggttcgggaataaagaacctaacttgctcaccgctattctcgacataacggacagcgaattaaaagaggatttattgcaaagtctgatggattcactaggttctaacaaacatgtactacccgaagtctgcatctgctttttatcccttttagcagaacaagattttccacattttcaggagttgtttttatttttcgccaatatgttattgcactatcaccaatttatgaaacccaatgaaagtgatttgattgacgtgttgatgtcagcatcattaagtgatgataaaattatcaaacatatggcgcgcaagaccctcaaactttttgtaaaaaatgaaacgccgccaaaagttactcatgaagacctggtgaaaaacaggcctcgctcccctgtcagaccacctatacccgcaacctccaaaacgccagacctccctgaacgtcattaa

SEQ ID NO: 17612 - DNA, 216 bp, Escherichia coli
atgttggcctgtgtggtcgcaggagcaggcattgcgcttattccacgctctatgctggaaagtatgccggggcatcaccaggttgaagcgtggccgttagctgagcaatggcgttggttaacaacctggctggtctggcgtcgcggtgcgaaaacgcgtccgcttgaggcatttattcaactactggatgtgtctgactcggcaaaacagagttag

SEQ ID NO: 17613 - DNA, 1425 bp, Escherichia coli
atgagctcacctcttattccggttatattaagtggtggtaatggtactaggttatggccactatctagagaggaatatcctaagcagtttttaaaactaaccgactcaatatcaatgctgcaatcaacaatatctcggttagactcattaaatacttcctctccagttgtaatatgcaatgaattacacagatttattgttgcagaacaactcaggcacttaaataaattagataataatattattttagaaccatctggtcgcaatactgcacctgctatttgtattgctgctttaattttaaaaatgaagcatccaaatgaaaatccacttatgctcgttcttccagccgatcactccgtaaaaaaagtcaaaactttttgtaatacaataaaaagtgctattcccttcgctgaagctggtaatttggtttcttttggtattaaacctactcatcctgagacggggtatggatatatacaaaaaggcaaagtgttatctgattctgatatatatgaggtcagtgaagttagaacttttgttgaaaagcctaatcttaaaacagcagaaagctttatagaaaaagatgagtattattggaatagtggtatgtatttgttcagtgttgaacgttacttacaagagttatcattataccgaccagacatagttaaagtatgccaggaaactgttaaaaatattcattatgatatggattttattagattggacgataaaatatttcggaactgtccacaggagtctattgattatgctgtaatggagaaaacaaaggatgctgtagttgctacaatggatatcggttggaatgatgtaggagcatggtcttcgctttgggaattagggaaaaaagactcctctggtaatgttatcacgggagacatcgtttgccacgagacagaaaatagttatatttatactgagtctggattggtagcaactattggtattcaagatcttgttattattcatactaaagattcattactggtttccagacgcgattcagtacaaaatgtaaaaaatattgttcagcatcttgatttgtcaggacgtaaagaacataaagaacatagggaagtattcaagtcatggggacgatgtgactccatagatagtagtgaaaagtaccactatcaggtcaaacgaataacagttaatccaagtgaaaaattatcgttgcaattacatcatcaccgtgcggaacattgggttgttgtaatggggattgctaaacttacagttgcagaagaaataaaaattttaaaagagaatgagtctgtatatattcctgcaggtattaagcatagtttggaaaatattgggacaataccacttgtgttaatagaagtttggaccggttcttatcttgctgatgatgatatccttcgatttgaagattga

SEQ ID NO: 17614 - DNA, 828 bp, Escherichia coli
atgtcagatgacactccaaagttttctgttttgatggctatatacatcaaggattctcccctatttctctctgaggctttacaatcaatttataaaaatacggttgccccagatgaagttattattattcgtgatggtaaggtcacatctgaactcaattctgttattgatagttggagaagatatttaaatataaaagatttcacacttgaaaaaaatatggggttgggggcagcgttaaattttgggttgaatcaatgtatgcatgatttagtaatacgtgctgattctgatgatataaatagaacaaatcgattcgaatgtatacttgattttatgactaagaatggtgatgttcatattcttagctcttgggttgaagagttcgaattcaatccaggagataagggcataataaaaaaagtaccaagtcggaattctatacttaaatattcaaaaaacagatctccttttaatcaccctgcagttgcatttaaaaagtgtgaaataatgcgcgtcggcggttatggaaatgagtacttatatgaagattatgccctttggttgaaatctttagctaatggatgtaatggtgataatattcaacaagttttagttgatatgagattttcaaaggaaacagcaaaaagacgaggtggaataaaatatgccatttcagaaattaaagctcagtatcatttttatcgtgcaaattatatatcatatcaagactttataataaatattatcacaaggatatttgttagacttcttcccactagttttcgtggctatatatataaaaaagttatcaggagatttttatga

SEQ ID NO: 17615 - DNA, 1113 bp, Escherichia coli
atgacgaaaatagttttcaatttactatctttttcagaattaaaatattatggggttggagtatactttagagatttaattgcaaaaaatattaatgaaatattcgatgggattgattgcgaaataatagttgttcaccaggctaatatccctgttaaagaattgttcaattttccagaaaacaataatattacctataatcctgtaaaaggcattaatgggaaattttcgcgtgttatttacgaacagatatttatgccgattaaatttcgtaactataacataatttattccccaaataatattaatccgattcttttgggggctaaatgtaagtcaataattactattcatgacttgcttccatttagaaaggctaatagatttggtcttctacaaagattgtatctaaagtttttcacatatatgtgtgctcacaaatcggaaaaaatcgctacagtgtccaataattcaaaaaatgatattatcaatacccttaatgtcaagagcgataaggttattgtaacttacaatatattaggtgattttaaaaaatcctctatacaccaatatgattgtgaacctttttttttctcggtgggtgctttgcatgaagataaacaatacgatttgatgataaaggcttttctaaagttcaaaaaattagtcaatgataattgtaaattattaattgctgggggtgatcatggagctaagaaaattttacaggacttgattgatgaattaaaattaaatgaccatgttcaattattaggatatatcactgatgaagataagtgggactactatgaaaattgttgtgcacttatcttactagggaaatatgaaggttttggtattcctgtattggaagctatgagtgtcaataagccatcaattgtagcaaataccggggctctacctgagatcataggtaaagcaggatttgtcataaatgctgatattgattcaatttgtgatgctatgttaaaaagctattcatataaagttgacccaaaattgtttgaagatgaattatcacgcttttctactaataaacaaataaatactttgcagcacatgtttaaggaaatatgtaaagatgtcagatga

SEQ ID NO: 17616 - DNA, 1176 bp, Escherichia coli
atgagaaaaaatttttacacgacaccaatcacattactaattcttacgcttaatattgctgcaacaattgtagttataaacaacagtgaattattgattggcgatttaatggggtttaaatcagaaactgtcgtaataattcaatctctaatttatatatctcttagcttattatttctatcggtattatataatggattggaaaaaataaaaccacttacaacaaaattagctgattctaatagtagaccgatcgccatttttttaatttgtttagaattattatatataacatacgtatttaatacaggcttatttgttgctggtaataatgagcgcggaggcggagtaatttcagcgttatttgtattactgaatgttgatgtacttgttttaatatttctaacacatgttaaaacaagtaagtacaagcccattattatcatgttgtggattatttcttttcttcagcgtggttggatatcttattttttcattttgattttaatctcatttatcgatcgtcgattgaaaaacaaaaaaaattggaaagctggggtagtattaatatgttttattctggctctgccatttgtagaacagattaagaattctatcagaagtggcgaagctatcagcacgcaattaactttttttgattatgcggattcttttaatcaacaatttatgaaggttgttggcagagttcaaacagtttcacacgttgcatttataacagataatattaatcaacttcagaatttaaaaaataatggagaatctactgatttttttgaagaaaattttatttatataattgctaaaaaattagggagtgctgatgataagattaatactccagatttgcttgccagatatatttctccatctctggatagctcatggaatgtgaatccatcgttaattggttggatttttattcaaaatgatttatacgttctacccatcatatgggttgttttgctgtgttttctatttacaatgctatctaaaattattgcgaatgacctatatgcaatgaatatgagatggttgttttggttagtgtttttatttccgggttggatattccaattcacagcagttatattttcgcttttagtatttattttattaaagtacacacttaggactaaaagagtaaaacctttatga

SEQ ID NO: 17617 - DNA, 822 bp, Escherichia coli
atggattgtaaaaaaaaattatgcattgtggcctgttcttatactttaaagccagaattcataattaataaattatataattatttaccagattatgaactagatggtgttgtgatttccaataatcatatagtagaacagattacaatgaagggatttcatatcgaaaacgggacaaattctctttttgagttttctgcctataaggaaggaatagattttttagaagatagctcattattaccatcaggagtaccaattctcattttgaatgatacattgttcttgaaacataatgcaaaattctttttaaggaaaattgtgagttattattcaacaattcaaagaactgaattgcctacaatggcaggtcgtttagatccttataataatatatgttacagtaactcttggaataatatgaatggctatatatcttccttttgtatgctaataaatgaaaaatctgcaaaaataattgttagttgctacaatgagcttccaaaatatttttttagtaatgatattgatattattgaccccaaatggggaatgcagattgaatcaagactgagagaatttattcgtagtcatttaattgatatagacacagatacggtttggtatcaagctaaattgttacataatgataaacaacgaattaatattaaagctcaatgtgtcttcatggaacatttcatatcagggaagattggtgaaagtggaattgttgtttctatttttcccacatggaaaggaaaggtgttaaattttttaaacgagcaattggctaaaatcaagaggaagattataattaaatga

SEQ ID NO: 17618 - DNA, 747 bp, Escherichia coli
gtgaagattcatatttattttcggcatacggatattagtcggacaactaaaaataatcggcctgagtggtttagtcatgaaaattgttttataaatcttataaatacaataaaagaatctaaatataaagaccaaatagcatttacttttatttttgatgggtcattaaacgttgcttccttagatccgttatatcaacactttgaaaatatcgatatgaataataaaaagatattcataatcaatggaggagatcagcgcaaagcatggcgtgaatgcgtaaaactagtagatgaagatcgtcgagttggaaaaattgataaaaatgatttaatatattttttagaaaatgattatttgcatgagtctaaatggattgatgagatatttaacttggtcaaatcaaatataagatgggatatggcaacgctttatgatcatccagataaatatagtgaatattgtgaacatcttgattcattaaaaaataaaaacaaaaaaactattgtattttattctgggagtaggcattggaaaatagcaccaagtacatgtgcaacatatattatgaaagccagggtttttgataggacaaaaataattctaaaattagctatttacgattacaaattatttttgatacttactaaaatatttagaattagacttctttcacctatccccgctctttcaactcattgtatggcttctttgttatcaccttcaatcaattgggatgatttataa

SEQ ID NO: 17619 - DNA, 579 bp, Escherichia coli
atggcctatttagatgaaatacagttaaaagaaatgggcttcaaaagcgttggagaaaatgtaaaaatatcagataaggcatctttttatgggtgtgataatattagtattgggaataatgtaaggattgatgatttttgcgtgttttcagctggagagggtggtattgatatacacgattatattcatatagcggtatattcttcaattattggcaaaggaaaagtaactatatctgactacgcaaacatttcatctcgagtctcaatatattccagtaacgatgattattctggcaattatatgtctaatccagtagttccaagtgaatatacgaatatacatagcggtactgtatttataggcaaacatgttatcataggttgcggaagtattgttcttccggatgttattttacatgagggtgcagcaattggagctctttctgtagtcaaagaggattgtgaagcttttacggtaaatgtaggtataccagctaaaccaatatctgaaagaagcaagaaattattggagcttgaatctgtatttaaaccaagcgctattggagataatctgtga

SEQ ID NO: 17620 - DNA, 1113 bp, Escherichia coli
atgaacgataaaactattccagtaacgcaaccttctttgccggaacttgcagaattcatgccttacctggaaaaaatatggaaaaataaatggttgacaaataatggaccatttcatcaagaactcgaggaaaaattatgtgaatttttgggtgtgcagcatatctcgctttttaacaatgcaacaattgcattgatcacagcattacaagccctaagaataacaggtgaggtaataacaacaccatattcatttgttgcaacttcacatgctattttatggaatggacttacgcctgtctttgttgatattgaaaatgatggatataatattgattacagaaaaatagaacaggctattacaccaaaaacttcagcaattttacctgtccattgctactcaacaccctgtgaagtcgaagaaattcaaaaaatagctgataattatggattgaaagtaatctacgacgcagcacatgcattcggtgtaaattttaaagggcaaagtttacttaactatggtgatttatcaattcttagtttccatgcgacgaaagtcttcaatacatttgaaggtggggcaataattagccctgatgctaaaaccaagttacgtatagatcgattaaaaaactttggtatcgccgacgagctgactgtgacagctccaggaataaatggcaaaatgagtgaaattaatgctgcctttggacttgttcagttaaagcatattgagggctcaatatctaagcgaaaaataattgatagtctttaccggaatttactgaaagggactccgggtattactatatttccaggaaatataaatgcaaatagcaactattcatattttcctatactcatagatgatggttttcatatgagtcgtgatcaggcatatgaattacttaagaaaaataatatcctatctcgaaagtatttttatccattaatcagtaatatgcctatgtatcgaggattgatttcagctagcgttgataatctaccaatagccaatagtgttgctgataaagtcctatgcttgccaatatatacagatttaaatgaagagattgttgtgaaaataaccaaattattattgggtaagatgtga

SEQ ID NO: 17621 - DNA, 1431 bp, Escherichia coli
atgaataacaaactagccaggcaaggattattatggagcacaattgaaaggctaggaacgcaagccatacaattattattaatgttgtatttgggtagggttcttggaccaagctcttttggttatgttggtatgctaactttatttctatcattagctcaggttctaattgatagtggatttagtgcagcattaattagaaaatcggagcgtactgaaaaagattattcgacagtatttatatttaatatttgtctatcaatactaatatatattgtactttattgtttatcttcttatattgctttattctatcaaatacctctgctggaatctttacttgatattttagcattaacagttatagcaaatggtctaactttaatccccaagattcaactcactgtagacgtgaattttaagatccaagctaaaagttcacttatcgctattaccagtagtagtgtaatagcgataacgttagctgctttgggttatggagtatggacattggttttccaatcgttatcctatagtgtcataaattgtattgtactgaatatttataatccatggtatccaaaagagaaattttgctatgaaacattcaaaaagctattttcatttagcagtaacttactaattgctggagtacttgaagctttttattcaaatatatatcaattaattatagggaaattttttacaccacagcttgtagggcaatttacacaggctaatcagatctctagcgtacctgcaatgacacttactaatattattcagagagtaacttatccacttttttgtaatatttataatggcaaagggaaaatagatgatgcttatttaaacacacttaaaattgcaggcgttgtagtttttccaattctattaggaataggtttaatctcgaagccattagtctctgtattattaggaagtgagtggaaatttacatctgatattctgtttctactttgtattgcatttatgatttatcctatacatgcaataaatattaatatcctacaggttcatgggcgaagtgatctttttttgcgtttggaaatactaaaaaagacattgatgacaattattcttgtcattacgatgcaaataaatataaatgcaatggtgattggtttagttttacactcatatctttcgtggtttttaaatggattatttagccagaaagtatcaacgatcacaataaggaagcagttaaaagagttactacctatatggtgtctatgtttaattagtgggttaggttctaactatattataaatgaaataagtatggaacctttattaaatataatatttactattttattaaatgccattatatacatcacactaattcgaattatgtacaaagaaatatttatgactattatttctcttataaaaaataaggactga

SEQ ID NO: 17622 - DNA, 1524 bp, Escherichia coli
ttgataatcagcgaaatgcaacgcaagcttgccacatgggcagccaccgatccgtccctacggattcaacggctgctgcgtctaataacacaaccagaatggctggctgaagcggcgcggatcacgctttcatcaaagggggcccatacccccggcgttgatggcgtgaacaaaacaatgctacaggccagactggctgttgagctgcaaatcctcagggatgaattactctcaggccactaccagcccttgcccgccagacgggtttacatccctaaaagcaacggcaaactgcgaccactgggtatccccgcgttgcgggatcgtattgttcagcgggccatgctgatggcgatggagccgatatgggagagtgattttcatacgctctcatatggcttccggcctgagcgcagtgtccaccacgcgatccgcacggtgaaattacagctcacagactgcggtgaaacccggggacgctgggtgattgaaggcgacctgtccagttacttcgacaccgtacatcatcgactgctgatgaaggctgtacgccgcaggatcagtgacgcacgtttcatgactctgctgtggaaaaccatcaaggcgggacatatcgatgtcggtctctttcgggcggccagtgaaggtgtgccacagggcggtgttatatcgccgctattatcgaacatcatgctgaatgagttcgatcaatacctgcatgagcgctacctgagcgggaaagccagaaaagatcggtggtactggaataacagtatccaacggggccgaagtacggcggtcagagaaaactggcagtggaaacccgcggtggcgtactgccgctatgccgatgattttgtcctcatcgtcaaaggcaccaaagcacaggcggaagccatcagggaggagtgtcggggtgtgctcgaaggcagtctgaaactcaggctgaacatggataagactaaaatcacccatgttaatgacggctttatctttctggggcacaggatcattcgcaaacgcagtcgttatggcgagatgcgagtggtctcaacgatcccgcaggagaaagccagaaacttcgccgcatcgctgacagcactgttatcaggcaactacagtgaaagcaaagtcgatatggctgaacaactcaaccgaaaactgaaaggctgggccatgttctatcagttcgttgattttaaggccaaagtcttcagttatatcgaccgtgtcgtgttctggaagctggctcactggctggcccgcaaataccgtacaggtatcgcttccctgatgaggtggtggtgtaaatcaccgaaaccgggtcagagcaaaacgtgggttttatttggtaaaaccaatcacggcaagctcagcggcgaaatactgtaccggttggtggggcaaggcaagaagctgttccgctggcggctacccgaaggtaatccctatctgaggacggagaccagaaacacgtatacatcgcgctttacagaagtggcaatggcgttcgccagcatttaa

SEQ ID NO: 17623 - DNA, 558 bp, Escherichia coli
atgtcggtggcttcttcattggagtacatatgctccctcgaacctcaaaagcatgccgagttcgcggctgccgccataccaccacagatccgtcaggctattgcaaaagccacaaaagcgaaggctggaagcaatacaagccgggccagtcctgtcatcagcgcggttatggttcgcgaggttgtccctcatgctcgccagtcctgtgcgggggtggaagaaacaggacactcacacagattcttgtgggtcgatgctattcctttctggattatcccgatgccattcatgcaagggctgtataagacgttcgtcatggctgtcaggctgacgggtcctcccggtggggtggcctgccacggggcgggagcgtcgcggaaaaaggctagtttttgcatttttatcggccaccatcatctttgcatcttattgattattaatggttatttgttttttgcatgtcgaattgagtgttttttgttcgacatcgaacgcgttttcttaaagttgttcgcacgatgcatgtttaaagctctccggaggaaatatggatcatga

SEQ ID NO: 17624 - DNA, 699 bp, Escherichia coli
atgcaggatattcacgaagaaagtctgagcgagtcggttaaatcagagcagtcaccgcgggtggtactctgggaaatcgacctgacggtacagggcggtgagcggtattttttctgtaatgagctgaatgaaaaaggggagccggtgacctggcaggggcgtgaatatcaggcgtacccgattgaggggagtggctttgagatgaacgggaagggcagcagtgccagaccatcgctgacggtgtccaatctgtttggtctggtcaccgggatggcggaagacctgcagagtctggtgggggccacggtggtccgccgccgggtgtatgcccgttttctggatgcggtgaatttcgttgcgggcaatccggaggcggacccggagcaggagctgagtgaccgctgggtggtggagcagatgtcgcagctgacagccatgacggcctcgtttgtgctggccacaccgaccgagacggacggggcgctgtttcccggtcgcatcatgctggcgaacacctgtatgtggacctaccgctctgatgagtgtggttacacgggcggggcagtggcggatgagttcgataaacccaccacggatatccgtaaggacagatgcagcaagtgcatgcgcgggtgtgaactgcgcaggaatgtcggcaattttggcggtttcctttccattaataaactttcgcagtaa

SEQ ID NO: 17625 - DNA, 990 bp, Escherichia coli
atgatacctgtatggagcacggcctgcccggactgggcagagcgcctgaaaaaggggctgtcgattattccggctccgatttatccggaccaggccgcacatgccctggcgatttttaaacaactgcggattgtggatgcaccgggtagcccgacgttcggggagtcctgtgcacagtgggtgtttgacctggtggcggctctgtttggctcctacgatgcgcagaccggtgtccgccatatcaaggaagtgttcattctgatacccaaaaaaaacagcaagtccacactggccgccgggatcatgatgacggcgctgttactgaactggcggcaggcggcgggttacacgattctggccccgactgtggaggtggcagccaacgccttcaatcctgccagggatatggtacgacgggacgatgatctggatgacctctgtcaggtgcagacacatatccggaccatcacccaccgggtgacggacaccaccctgaaggtggtggcagccgatccgaatacggtgtccggtatcaagtccgtggggacgctgattgatgagttgtggctgtttggcaagcagtacaaggcggaggacatgttacgtgaagccatcggcgggcttgcctcccgcccggaagggtttgtggtgtatacgaccacccagtcgaatgaacagccagccggggtgttcagacagaaactgcagtacgcccgggatgtgcgcgacggcaaaattaatgatccgcactttctgccggtgatatttgaacaccctcctgaaatggtggaaagcggggctcacctgctgatggaaaacctcgccatggtcaatccgaatctcggctattcagtggatgaggcctttctgtaccgggagtaccgtaaagcccgggaagccggtgaagagacattccgggggttcatgtcaaaacacgccaatgtggaaattggtcttgccctgcgctctgaccgcttgggcgggggctga

SEQ ID NO: 17626 - DNA, 366 bp, Escherichia coli
atggctcagcttcgtacactccagagcagaatcaaaacactgaatacccgacgggtgaatattctgaagggggagcagcgtcgtgtcagtggcagtgcacgtgtttccctcaagcgtcatatctggctcagggacgccgggcagtgctgtatctgtggtcgtgtggttgacctctgtgacagtgaacttgatcaccgaattgcacttcagttcggtggtggtaatgaggagacgaatctctggacgctctgtaccgaatgccatcgacaaaagtctgctcgtgaagcggcgggtggtatgccggacccgacgctgccggaggtgtccggaggtagtggcagagcggacgacatcatcggactgtaa

SEQ ID NO: 17627 - DNA, 327 bp, Escherichia coli
atgaaaagaaatcttccgttaattattttgttgtcttctctggttatgggctgtacgcaacataaaacagatatgccccgacagttggttaaggcattaccacaatatccggcctatgcagcggcaaattatataaagggacgggttgatgtgaagtttgatattggtgctgatggtactgtcacccgaattgagtttatccgttcagagccgcaccatctgtttgatgagcaggttgtaaaggcgatggcaaaatggcgatttgagaaggacaggccgtgtaaaggcgtgaagaaaacgtttatctttagtccttctgcaccctga

SEQ ID NO: 17628 - DNA, 384 bp, Escherichia coli
atgcgtgatattcagatggttctcgaacgctggggagcatgggcggcaaataatcatgaggatgtgacctggtcgtccattgctgccggttttaagggattaattccttcaaaagtaaaatctcgcccgcaatgttgtgacgatgacgcgatgatcatttgcgggtgcatggcccgtctgaaaaagaacaacagcgatttacacgatttattagtagattattatgtatgtggtatgacattcatgtcactggcaagtaagcattgctgctcggatggttatatcgggaaaaggttacagaaggctgagggcataattgaagggatgttaatggcattagatatccggttagatatggatatcgttgctaataattctaattga

SEQ ID NO: 17629 - DNA, 1083 bp, Escherichia coli
atgaaaaaattaacagtggcaatttctgctgtagctgcatcagtactgatggcgatgtctgctcaggcagctgaaatttataataaagacagtaacaagctggatctatacgggaaagttaatgccaagcactacttctcctctaatgatgcagatgatggtgatactacttatgctcgtcttggcttcaaaggtgaaacccaaatcaacgatcaactgactggtttcggtcagtgggaatatgacttcaaaggcaaccgtgctgaatctcaaggttcttccaaagacaaaacccgtcttgcatttgcaggcctgaaatttggtgattacggctcaatcgattacggccgtaacttcggtgtagcatacgacatcggtgcgtggactgacgtcctgccagaattcggtggtgacacttggactcaaaccgacgtgttcatgactcaacgtgcaactggtgttgcaacttatcgtaacaacgacttctttggtctggtcgatggcctgaactttgctgctcagtatcagggtaaaaatgaccgcactgacgtagctgaagccaatggtgatggtttcggtttctccactacttatgagtatgaaggattcggcgtgggtgcaacctatgctaaatcagatcgcactgacggtcaggtcgcctatggtaagagcaaattcaatgcctccggcaaaaatgcggaagtatgggctgcaggcctgaaatatgatgcgaacaatatctatctggctaccacatattctgaaactcagaatatgaccgtttttggtaataaccatattgcaaacaaagcacaaaactttgaagcagtagcacaatatcagtttgacttcggtctgcgcccatctgttgcttaccttcagtcaaaaggtaaagaccttggtgttcatggtgaccgagacttagtcaagtatgtcgatgtcggtgctacttactactttaataaaaacatgtccacttttgttgattacaaaatcaacttaattgacgatagtaagtttaccaaaacagctggtattgataccgacgacatcgtcgctgtaggtctggtttatcagttctaa

SEQ ID NO: 17630 - DNA, 279 bp, Escherichia coli
gtgacggcgcaggtgccgtataccgatgtctggacgcataaaccggtgcagttctatcccgggaaacatccgtgcgaaaaaccggcagaaatgctgcagcagataatcagcgcaagcagtcgtccgggtgacctggttgcagatttttttatggggtcaggttcaacagttaaagctgcactggcactgggccgtcgtgctacaggcgttgagctggagactgaacgttttgagcagacggttcgggaagttcaggatttagtcagtcagaacggatga

SEQ ID NO: 17631 - DNA, 429 bp, Escherichia coli
atgtattgccgtgctgtaccagttcttgttttgatattagccagtctgacaactggctgcacaaaagatgtatcgacaaataattatgatgcttctctgtatcactcagataaattaataaagtcgcaaaatttgagctcatcggaacgtacccctgatgccagtgaagaaatcaggcagtatgccattcaggtcaggaaagccatagaagaacagttaaaggatgcgagtaagtattcaggaaaagagtgttcactgagaatgtatatggccccgaatggtcttctgctacaggttaaaagagaaggtggagaccccgatttatgtcgtgaagcgatgaatgcggtgaagcatgctgatataccagttccgccgtctccggaagtatataaagtatttcacaatggagtgctggattttaaaccgtga

SEQ ID NO: 17632 - DNA, 390 bp, Escherichia coli
gtgctggtggcttcaccacaaattgcagatgtctattttactgagccgggaagacataacgcctgtagttttattatcaatgaaccgcaatgtgtcttccgccagatatttgagagcacgctgcgccagcgacggatcacggtggaaaacaccattgagcttataagtatcgaaagcatcaagcgttgtgtcgcggcaaatatcggggtcagttacctgccgcgctttacagtggcaaatgaacttgcgagtggcgaattaatcgaattgccttttggcgaacagtcgcagaccattacggcaatgtgcgctcaccatgccggaaaagcggttagcccggcgatgcacatttttattcagtgtgttgaagagtgttttttgccgggataa

SEQ ID NO: 17633 - DNA, 363 bp, Escherichia coli
atgaacgaatatcagtttgtgcttccatacccgccgtcggtgaacacctactggcgaagacggggaagccaatactacatcagcgataaaggccagaaataccgaaaagacgttcagcaaataatccgccaactcaagttagacattttcaccaaatcaagactccgcatcaaagtcatcgcagacgttccagactcccgccgccgcgacctcgacaacatcctgaaaggtttcctcgactcccttatccacgccggatttgcggaagacgacgagcaattcgatgacattcgcgtaattcgtggtgtgaaagtaccaggcggacggcttggaataaaaatcaccgaactggagaacgtatga

SEQ ID NO: 17634 - DNA, 291 bp, Escherichia coli
atggctaacctacgcaaagaagcgcgcggcagagaatgtcaggtacgtatttacggcgtatgcaatggcaatcctgaaactacagttctggcacattaccggatggctggaatttgcggaacgggaatgaaacctgacgacctgatcggcgcatgggcttgtagtgactgccacgcggagatcgaccgacgcacaaggattctcgacaacaaagacgccagactttaccacctcgaaggcgtgatcaggacgcaggcgatactgctgaaggaggggaagattaagtcatga

SEQ ID NO: 17635 - DNA, 723 bp, Escherichia coli
atgaatgagctgataaatagcaacgtcatcaaaatgacaagcattgaaatcgctgagttggtgggaagccaacacggtaatgtcagaatatcaatagaacgtctggcaaagcgtggggtgattcaacttcctccaatgcaaaaagttgaaaataaacaaacaattagccctaacaaattcacaagcgtgtatatattcgaaggcgaacaaggtaagcgagacagcattattgtcgtcgctcagttgtcgccggaattcaccgctcgtcttgttgaccgttggcgagaactcgaaggggcaaccgcgaaaataccacaaaccttttctgaggcattgcgccttgcggccgaccttgaagaccagaaggctgaactggagaaacagcttgctctcgcagcacctaaagttgagtttgccgatcgcgttggcgaggccagcggaattttgattggaaactttgcaaaggttgttggaattggtccaaacaaactgtttgcgtggatgcgcgatcacaaaatccttattgcttcaggttcccggcgcaatgtgccaatgcaggaatatatggatcgcggctatttcacagtgaaagaaacagcggtcaacacaaatcacggaatacagatatcgttcaccacaaaaatcaccgggcgtggtcaacagtggctgaccagaaagctgctcgataacggaatgctgaaagtaacaggggaggctgcttaa

SEQ ID NO: 17636 - DNA, 678 bp, Escherichia coli
atgacaactcaaatttctgtcgaaactctttccccgatcacccacaaccagatccccgttattacaactgaacttcttgcgcagttatacggaacaaaaatcaaaaacatttcggataactttcttaacaacacgacgcgattcgtggtagggaagcattactttaaaattgaaaggaacgaattacgcgagtttaagaacagacccgaaacaatcgggttagttggtaaaaatgcccgctccctcatcctctggacagaacgcggagcagcccgtcacgccaaaatgctcgaaaccgatcaggcgtgggaagtgttcgaaaaactggaagactgctatttcagccagtgcgagaaaaatactggcaaacaagagaagaagcccaacgggctttccgcaaaagaaacagacagccttgtttggctgtgggattatgccaaccgctcacaggcattgttccgtgagttgtatcccgcattaaaactgattcagtctggctattccggcatatgccacgactacggctatgagttctcgtatatcatcgggagggcgaggggcgttttaattaatcacacgcgggatatagatatttatgagcctgacgggccgacgaaccttctggcatgggaaaggcttaagaacaaagagttgccgccttcactgcatcgctactga

SEQ ID NO: 17637 - DNA, 612 bp, Escherichia coli
atgcgaataaaaaaaccaattgatcacgatgagcttctgtcaacattatcatatgactcagaaacaggaatatttaaatggctaaaaacaaattcagtagtaagagtaaaaggtagtattgctggaggtgttagtggtggttatatatgcattagcataaataatgttttgtattatgcgcataggcttgcttggttctatgtatacaaaaaatggcctcctaagtttattgatcatgtaaatgggaacagacttgacaataggatttcaaatctaagactggcaacagaggagcagaatgcaagaaacattgtaggtaataggttaaacacatccggtgcgattggagtgtcttgggataagacaactggcaggtggaagtcttatgttggttataaaaataagacaatatcgttagggtatttcgatagcaaagaagatgcagcattcatagcagcactagcaagaaagaaactatatggaacttatgcgagtaaagcacttaattgcgagcatgagcttttatctcaatttaataatgatgaggataaacttgcggaatatcttaaggaaaaatctaaaaggactcgaaagcgtgttaaaaaaagataa

SEQ ID NO: 17638 - DNA, 846 bp, Escherichia coli
atgacgctggatgaaaagatctcgcaactggagaaaaaacttgcagaattgagttctccgccaattgctatcgagcatacagctgtagaaattggcactggcatctgtgaaaaacatggtgagtttgagcagcgtaaccgttattcgacagggacaattaagtttgcctcaagacctagcgaatgcccggaatgcatgagagatgagcttattcggctacaggcagagaagattaaaatcgacgaagaatcacgtaagcgcaatgtcgagtttctgttgaataatcttgatattcctgaacgattcaagggttgcacactacagaactacgagccagtcaacgacgatgcaaagagagtgctcagggtgtgtcaggcatacgccagcaaatggcctgagaggttacagaaaggcggtgggctggttatgtgtggaaagcctggtactggaaagaatcatcttgcactggctatcgcccggcacgcaattacggaacatcaaagctcagctattttcacaacggcgctgaaaattgccagagaatataaatcaacatggtcgaaaaactccacccgcacagaggatgaagtgatccgacagttcactaaacctgacctgctaattatcgatgaggttggtgtgcagtttggaagcgaggcggaaaagatgatcatgttcgaaatcatcaacacccgctacgagcgcatgaagccaacaatcctgattagcaaccagagcaaagatgaactttcggcattcattggtgagcgtgttattgacaggatgaatgatggcggcggatgcacccttgcgtttacatgggatagttacaggagcagatcgtga

SEQ ID NO: 17639 - DNA, 888 bp, Escherichia coli
atggcacgttcaagaaatatcaaaccaggctttttcaccaatgatgaattagctgagtgttctccatatgcccgtctcctttttgccgggttatggactattgctgacaaagaagggcggttggatgatcgcccaaagaaaattaaagcaatggtactgcctttcgatgatgtggactgcaatgatctgcttcagcagcttcacagtcacaaattcatcaaccgatatcaggtaaatggcggctcatatatccaaatcaataactggaaaaagcaccagaaccctcactgcaaagaagcagccagtgagataccagaaccagtagagaacaataacagcaccatgcaagtacagtgcaaggacgataaagaggaagagaaggaggatgccgaatcactacaagtcattgaaaacaatggagcaccagaaaagcaccatgcaagtacagtgcaagaaccagtagagaacagtttaaatcctgctgattcccttaacctgattcctgattcccttaacctgattcctgattccctttctaacacccaagccgctgacgcgacttgtgaagggggtggggctgatgtccataaaatttcaagtcgctatgcattcgaaggaaatatcgttcggttaaaccacaaggactacgaagcatggaagcgcctgtatccgaacattgacctgaattacgaactggaaaggctggatatcgaatttagccatgagaagccaaagaactggtttatcactgccagccagaaactcagctaccagaacaagcaggcgttatccagaccggtacgcaaggttgctaatggacttaaggctgaaaactttgccaccaaagattacggacaaactgaaatgccttcatgggcgcaggagtga

SEQ ID NO: 17640 - DNA, 801 bp, Escherichia coli
atggcaaaaaaacctacaccagaccaggtaaaaaagattcgttccggcattaccaagaaaatacggtttgaggttttcaagcgcgatggcttcaaatgccagtactgtgggagttctgcgccagacgtcatccttcatgtcgaccatatcaacccagttagcaagggtggcgataacgacatgatgaaccttattacttcttgcgatagttgtaatggcgggaaaagcgacaaactgctcagcgataactcaataatggaaaagcaaaggcagcaactccaggaacttaataccaagcgagagcaactggagatgatgatcaagtggcgagatggtcttaagagcctgaaagacgatgttgttgatattgtcgctaccaaaattgacgactgcattgcaccatttactgttaatgacaatgggcgaaaatctatcaagagatggcttcgaatatataagcttgaagaaatcctcgatgcgattgagattgccgcagataaaaaactcacccaagaaataacccatgagcttactggtgaattctttgagtacatccctcgcatagcagcgacaaaaagaaaaccgccaaaagaacaaaggattctatacatcagaggaatccttaaaaaccgcatatatatcaatcaaaaccatgtaatgagttatctcaaggcatggctttcatacgacttagatctcgatgaacttactgagtttgcgaaaacagtacctaactggacaacgttcaaggagtgggtatctgaacgcattcgtgaagctcaggaagaactcccgtactaa

SEQ ID NO: 17641 - DNA, 156 bp, Escherichia coli
atgaacacgttcagcataatcgcgatacctttttttgccctttcagtggttctgttgactcttggcgctaccaggaagaaccaagccagcttcatcgttggcggcgtgtttatggcgtcatgcgtggttaatgccattatcggcatgtctctttga

SEQ ID NO: 17642 - DNA, 267 bp, Escherichia coli
atgtcagataacactattaaaatcatacctcagcacatgaccgccacatcagttcttattacgcctgatcgtgctgaaacaatcattactttttaccgccatgaatttgagcatcacatgcagtctgatgagcaaggaaagaatagcttccaagtaaaagttgagttgacccctaacatgtcagtctcaatgagcccggatcaagctgttgcattagtaaaatcattacaggtagctctcagggataatgggctatggaaagactga

SEQ ID NO: 17643 - DNA, 471 bp, Escherichia coli
atggacgaaacgggtttgcgcccaagtaaggaagatgtagcgatgaagagtgataccctggaggtaagcgtgagcggaatgtccagagaagaacttgacgcaaagctttcacaaaacaaatcagaggtagagtctattgctgcggaaatgcgtcgcgaatcagctgactttaaaacctattatactcagcaattttcttctattgagagaggtattgctgaaattaaaggtgaaatcggcggtttgaaaacgggacttacaacgactcagtgggcgatggccgttggcttgactttagttactgtgattctgtctggcgtgatgttagcctcaagttggattatctccggcaatgacaagtcaccatcagtaaccagcccggctccaattataatacaggtaccgacacagcaaccattaacgagcgctccaactaaccaatcgtcatcacaacaagctcctaagcaataa

SEQ ID NO: 17644 - DNA, 870 bp, Escherichia coli
atgggctggatggaagggctgcgcggcgtcggtgtaatgtcgctggcggtgtttaccatgtgggtcttttctcgctttgcaccggatgacagcgccagcctgaaaacggtcattatcatctacagtgtggtctacattttattggggattctgtgctggttttttgttagcgataacaacaacctgcgcaataccaataacgaagaaaaacagtcattccagcttagcgacatcctggccgttttgcgcatcagcaccacctggtattgcagcatggtgatttttggtgtcttcaccatctacgccattctgagttactccaccaactatctcaccgaaatgtacggcatgtcgctggtggcggcgagctacatggggattgtgatcaacaaaatattccgcgcgctgtgtggtccacttggcggcattatcaccacctacagtaaagtgaaatcccctacccgcgtgatccaaatcctttccgtactcggcttgctggcgttaactgccctgctcgtcacgaactctaacccgcaatcggtcgcgatggggattggcctgattttactgctgggattcacctgttacgcctcacgcgggctgtactgggcctgccctggcgaagcgagaacaccgtcttacattatgggcaccacggtaggtatttgttcggtgattggattcctgccggatgtcttcgtttacccgattatcggctactggcaagacaccctgcccgctgcagaagcctaccgcaatatgtggctgatgggcatggcggcgcttgccatggtgatcgtctttacctttttgctgttccaaaaaattcgtactgctgatagcgcccctgctatggctagcagcaagtaa

SEQ ID NO: 17645 - DNA, 873 bp, Escherichia coli
atgcgctatttcatactaatattcacattcgtgtgttcctttgttgcagcccaaccaactattgtcccacaattacagcaacaagttacggatcttacgagtagcttaaactcacaagaaaagaaagaactgacgcggaagttagaatctattttcaataatacccaagtacaaattgctgtattaattattcccacaaccaaagacgagacaattgaacaatatgctacaagggtttttaacaattggcgtttaggagatgccaaacgcaatgatgggatactgatcattgttgcctggtcggatcgcactgtccgcatccaggtaggttatgggctggaagaaaaggtaaccgatgctctggctggagatatcatccgtagcaacatgatacccgcatttaaacaacaaaaattagctaagggattagagttagctataatcgctttgaataaccaactcacttcacaacaccaatattcggctaatccttcagaaagtgaatcagcgtcttccagcgatcattactactttgctattttttgggtatttgcagtgatgttcttccctttctggttttttcatcaaggcagtaatttttgtcgcgcatgtaaaagcagtgtctgtatttcagcaatctatcttttagatttattcctgttctccgataaaactttttccattgctgtatttttcttcttttttactttcaccaccattatggtctttacctgtttatgtgtacttcagaaaaaagcatctggtagaagttatcattcagacaacagcggttccggtggcggctcaagtggcggcggatttagcggcgggggcggttcttctggcggtggcggcgcgtccggtcgctggtaa

SEQ ID NO: 17646 - DNA, 873 bp, Escherichia coli
atgaatccgtctgatgccattgaggcaattgaaaaaccgctctcctccctgccttactcactttcccgtcacatcctggaacatctgcgtaaactcaccagtcacgaacccgtgcctggcattatgggtaaaagcggggccggtaaatcctcactctgtaatgcgctatttcagggggaggtcaccccggtcagtgatgttcacgccggcacccgggaagtgcagcgcttccgtctgaatggccatggtcacagcatggttatcactgacctgcccggggtgggcgagagccgggacagggatgcagagtatgaagccctgtactgtgacattctgcccgaactggacctggtactgtggctgattaaagccgatgaccgtgccctgtctgtggatgagtatttctggcgacacatcctgcaccggggacatcagcgggtactgtttgtggtgatgcaggccgataaaacggagccctgccatgaatgggatatggccggtattcagccttctcccgcacaggcacagaacattcgcgaaaaaacggaggcggtattccgtctgttccggcccgtacatcgggttgttgccgtatcggcccgcgccggccgggagctggatacgctggtcagtgcgctcatgacagcgcttcccgaccatgccgccagtcccctgatgacccgcctgcaggaagaactgcgcacggaatctgtccgcgctcaggcccgtgaacagtttaccggtgcggtggaccggatatttgacacggcggagagtgtctgtgttgcctctgttgtccgtacggccctgcgcgcagttcgtgacacggtggtctctgttgcccgcgcggtatggaactggattttcttctga

SEQ ID NO: 17647 - DNA, 336 bp, Escherichia coli
gtgatacgtcagggcgaaacaggccaggttaaccagctactggatattctcagacataaagcattaacgcagatggcacaggagagtggcggtagtgcaaccgtgcgtctgaacactatggactggcttggtggtcagggccgggagcaggcagataacgagtggcatgacgcgattaactggctgggagactggtgcagtgaagagcagcatccggtgatctggtcaaccacgcaggctgcagaacacttaccggttcgcatgcctcgcctctgctctgcagaacgcctctctgaaagtatggtcgatgaaatatttcagaagggggctgcatga

SEQ ID NO: 17648 - DNA, 483 bp, Escherichia coli
atgaaacgtttacatactctgatgtttttcctggccgttctgtttaccggtgttagcgctacagttgatgccgcaacggttcaacaagcatttaaatgcgacacaagtgcacactctggtcaactgggtgtgtgtctagtaatgaaccagctgtacgaaggcgatgctacctttaaagccgccattgacaaagcgttaaatccggtaggcctgaaagacatgtttggtgccgacggttacatggatggtcctggcggaggtgtaacaccagtaaccgttaacggtacagtctggctcgaaggcagcagttgcaaagccaatgcctgcggctgggactatatcgtaacactctataacccaaaaactcataaagtcgttggttactattacaacatcgaccctggttacctgatttggtttggtgaaattggcattcacgaattcgcgtacctggtcaaggactacgtaaacaaaacaaattaa

SEQ ID NO: 17649 - DNA, 549 bp, Escherichia coli
atgctggagaacttgactcgcctgaaggtatttgactgttctagtaacgatttgatctcttcaccacggctgccgcccaaactaatcatatactactgtggagaaaaccagtttaaaactgtaccggtgccgcagccccgaagcctgaaggtgtttagctgtaatggtaacccgtgggacaaagacaatttaccgacgctgctcaaagccgtcgagggcctgaaaaaccaggagggtctggaggagcttttagactttttgcacaaggaaggtctggttgacctggaaggactcgaggagctggaggacctggatgaccttatggatctggagttcctggatgacccggaactcctggagcgcgtgaaggtacaggaggacctggagcacctggatcaacagttgggcctgttgagtctggaaaaacaacaggactcgcagcctgttaatcaacaatctgaacatgaacccgaatctgcatcaagggtgaagcgtgatttatctgaagtcgactccgagtcaacaatgaagcgtaagcgttttatgtag

SEQ ID NO: 17650 - DNA, 195 bp, Escherichia coli
atgttgataaaaatcatagcccaccgcaaggcctgcaccaaatacagtatcgtttttatcaccgcccttatacttataaacatcatccccaaagtcctgacggaagcgctggtcagtctgagtcacaaccgaagcaccagctttaccggtcacataaaagcctgttttacccctatcagccagagcctgggctga

SEQ ID NO: 17651 - DNA, 861 bp, Escherichia coli
atgagcagcaacacatttactctcggtacaaaatccgttaaccgtcttggttatggcgcgatgcaactggcaggtcctggggtttttggccccccaagagatcgccacgtcgctataactgtgctgcgcgaggcgctggcattgggcgtcaatcacattgataccagcgacttttatggtccgcacgtcaccaatcagattatccgcgaagcgctttatccttactctgacgacctgaccattgttactaaaattggggcgcggcgtggagaggacgcctcctggttgcccgcattttctccggcagagttgcaaaaagcggtgcacgataatctacgtaatctcgggctggacgtactggatgtggttaacctgcgcgttatgatgggggatggtcatggcccagcggaaggatcgattgaagccagcctgaccgtgctggcagagatgcaagaacaaggcctggtaaaacatattggtctgagcaacgttacaccgacgcaggttgcagaggcgcgtaagattaccgaaatcgtctgtgtgcagaacgaatacaacattgctcatcgtgctgatgacgcaatgattgatgctttggctcgtgacggcattgcctacgtgccgttctttccgctcgggggctttacgccgctgcaatcttcaacgctttccgatgttgctgcgagcctgggtgcaacaccaatgcaggtagcgctggcgtggctgttacaacgttcaccgaatattttgttgattcctggaacatcttctgttgcgcatttacgggagaatatggccgcagaaaaattgcatctttctgaggaagtgttgtctacgttggatggtatttcgcgagaataa

SEQ ID NO: 17652 - DNA, 405 bp, Escherichia coli
atgagcagaaatctcgcagagtgtttcagtattcataatgataatttcagtgacccggaatgggagtgtaaccggccatcctttgttgtatccggtgatgctgggaaaataaccatctcagaaaatgggaaagtaacacctccatcgcaccagcacagtgaggagctcattgaatttgccattgattacctgaagaacaataaaaagcaggggctgatgaagcgcgttggccgttgcatgggatatcttcaggtagccgctgagattgaagcgctggccagtggtgctgataaggatgcaattgtgcgggaggctcttcttcgtgattttaatactccaccctttaaaaaagtgccggcttactggcttcatccggggctgacttatcttaaagtgcgtatttag

SEQ ID NO: 17653 - DNA, 489 bp, Escherichia coli
atgaagaaaaaatacgaactggttgttaaagggataaataattacccggataagattactgttactgtggcactggaagttggtgggtatccgtcactgttgttgccagatgtggcgattagtcttgaccgtactgaaggtgccacgctggagttttacgaagctgaggcgaaaaagcaggcgaagcagtttttcatggatgttgctgccgggttatgtgaatggaacgaaccgttgccggaaaagcgccccgtaattttagatgcgcagaatgtgttgataacctacaaaggaaagctaccgggaagaattactgatgctctgaagatgccgccgtcaacactgcggtcagaaaaagatgatgttgaatcacgtattgaaaaactggagcgctatatcgctgaattgaaaaaaagcgccccaacaaaaaatgaggtgcttgcagcagatgaaatgaaagaagctattcttgatcgcgcgggcatctaa

SEQ ID NO: 17654 - DNA, 216 bp, Escherichia coli
atgtaccagatggaaaaaatcacaacaggtgtgtcatacaccacgtcagcggtgggaacgggctactggttcctgcagttgctggacagggtttccccgtctcagtgggcggcaataggcgtgctggggagtctgctgtttgggctgctgacatatctgactaacctgtatttcaaaatcagagaggaccgtcgtaaggcggcgcggggagagtaa

SEQ ID NO: 17655 - DNA, 270 bp, Escherichia coli; identical to SEQ ID NO: 11447

SEQ ID NO: 17656 - DNA, 984 bp, Escherichia coli
atggcatttaaacactatgatgttgtcagggcggcatcgccgtcagaccttgcgaaacgactgacacaaaaactgaaggaggggtggcagccatttggcagtccggtggccatcacgccttataccctgatgcaggccattgcggcggaaggtgatgtcaccacacctgtggtggtgaagccgtcggatggagaaggcgcagttatcagcaccaccagcaacccggagtattactttgttgttgccctggccgggcagtcaaacggtatggcgtatggtgaagggcttccgctgccggagacatatgaccgtccggacccgcgtattaaacagctggcgcgtcgcagcactgtcacgccgggtggtgcgtcctgtaactacaatgacattattcctgcggaccactgcctgcatgatgttcaggatttgagtaagttttcacacccgaaagccagcgcagctcagtatggatgcgtggggcagggattacatatcgcgaagaaattgttgccgtttattccggcgaatgccggtattcttctggttccgtgctgccgtggtggttctgcatttttggcgggcgatgaaggtaccttcagcgaatccaccggcgcaagcgagacctcggcacgctggggtgttgataagccactgtacaaggacctgcttacccgtactcaggccgcactgaaggccaaccctaaaaatattctgcttgcagtggtctggatgcagggcgagtttgatttgaaacagggtgcatacgccactcagccggggctgtttgattccatggtggaaaaatatcgttctgacctgtcggaattcggaggtcagtgtctcgggggctctccgtcatcagttccctggatttgtggcgacacgacctactactggaagcagacttattcttcgcaatacgatgcggtgtatggtgcatacaagacgaaatccgcaaaaaaatcttctttgtgccgtttatga
